United States Patent Application Publication US 2005/0208558 A1 - sequence listing, part 29

SEQ ID NO: 29194 - DNA, 3503 bp, DROSOPHILA
tgcctaatggatgagggattcggaacggaacaaccgaatttgtgacagtttccgtgtgcgtgggcgaaaattaaacaacagctaagcaaattaagcaatttgtaccgccgtgctccccgcaaatgggcggaaatcggggggcgtggccgcacgagcggctcgaactcattagcacctgagtgcacgcgacccgcgaaatgggactagaaatggcatagaactcacgcttgcatgcgactcatggcagcggcgcctggaagtatgcttcacttcacccaggcgatggggataggattttcggcgaaactgcacgaatggaactcacaaatgaaactggctgaaggctccggctccaggagctcgaaagcataaaagcgcaaatggcatgcaggtgaaaggagaaggcgaaagggttgagctgagtcctccaacaaggtgtatggtttgatggtgattggctcacgaccccaaacggcgggccagggggtttgggccaaggggaggactcatgtcactcgttagctggttcggctgcgatttgatttgagttagcatgtctaaggacaactcagcggcaattttcggcccggggagccatcgaatgtgtgccaatgtattctaaattgtgtttattttgagtaatctgcaatccggctgaggcacatctcgcatctacacacccattgcctgacttcgccagacagtttggcaattaaaattgtaggttgccagctgtcgacgcgccgcatgcaaaccaaatagcttctaaatacgtagattttatacgtacacggcgagaaaaaccaatgacaagagtacgttactttctgtgtggccctgaaaagaatagttcgcattaaacgtgtaaaagcatttgtttttattttacttaaaattttatatttcaggtatcaaaaaaaaaaaagaattcacaaatgtgtatgtacatatatacaagaccttctactactattattaataatattaatcatgcgatggttcaatacgcagagcgtcgtagttcgttccttaaggacactcccatgattgtggagaaagtgaaggcacctatctataaaatacaaagtacttcaagcgaatgaaaccaaaaacttaaagcaaatcccacctcaatgaccatcagcatccagccaacaatcttaggacccttgaggagctcctcgtactgggtctccattttggccagacaaccgtctctgtagggcgtatcattttggtcataacagctacttggaacagttatgtaggcgtctccatagtcctttaacttgtatatgccacagcactggtactgcaattgaaaataagttaatagaacctttaccttggatcataacctgaatactatctgctaagttaggtactatgattcaaagtaaagtatgcaagtgtaagcccgaaaccataagccctagatatgtatgtttttaatcttattgattaatttcctaattaaacttacctgtgtctggtactcggccattgcgtcgaaagtgtttgtctgcttggcaaaggcttgtttcagcttggtaatggagtcttcttcgaaatgcatacggaagacaaaaagcatgactattgagacgatcagcattaccagcatcgaggtggcatactaaatcacggaaagataattagtagctgaataatatcgtattgtacagtaaaaactcaccgcccaggtaacacagatgctctccttaatggcaccaaagcatccaaaaaatgagagcaagaagacgatggacccaacggcaatgtacagtcccaggatgagttggtcctttggagctatttgatcgattgctattacattgaccacaatagtggcgatgcccaggacctgcaaatgaatcaatatatttaaggaactttcagactagaacccacgccgaagttatggctgctccaatataataatatatgtataatataataatagatttataaacacatttagatccctacttccattaatcattcccgccatccacttggcccagataacgacgacaacccatgagctgactcacaatgtgggtttaataagttagattgaagctttattagcactttgtaaacaactcattgttaccaaaccgtcatcaaataaagaaaatttctcaacaatgataacaatctcttatctttgctgccaccgaaactcaaaatattaatccgcgaagtgtatgcatagaataatgtgtatatcatatttatcttatgttttattgatcttttctttttgttcaactttttggtaaatgttcttgttaaggtaaaattcgattgtcataatgaaacctctaaaagcagtgcattgatcgaagcacttaattatatcatatcattttatagaacacgatttttggcacagagatggaaacatacatgtatgtaagatggacaataattaacttaccgcacaaagaaaattgaagaggaatgccagataccttatcatcagcggtgaccaacccatggcgtaaatagcaattcgactacgcgtgctcgttttttcagtagttactaatttttatttcgatggttactcctagacggctattgctgtactaaataggtgggcaaatacgagtctcgattgggttttgtttgggttcgccatcaagtgtgagaatgcactggcaaaagtgaatgtgtagcttgaaattgttcgcttaattcaaataattcatacaacacttatataaaaaaaaaacattaatttaggagtatagatttatagacggcaactataagtgtataccatcacattaaatggctgcaatactttattgctgattttttcaggtgcaacacatgacattgctcccaactgattaacgcccagattaagttcgctttcctctcttcggaaaacctcgctgaccatgaaaccaaccagaccaagtgccccaaatctgataagtaactatgctctctcccagaaagctatctttattgcacttcaggcgattgctgtttagggtggacactctgcaatgcctgataacactactattaattaatcgcttcgaatatgaataagctaagtaataccttgagaacgtacatttaatacccattgatcgcccccatttatttttcttacgtcgcatgctaaatatgtccacctgaatcacaccctgcccatagatattccctcgctgttttggtaggtgaaccaatatcgagcgaatttccatgctcaagtgctcatcaaatacaacaattaggcagggagcgaccctagtcacaacgctcgccagtggatgggaacccagctctttgcggagagccttatcagcccacaggccgggtgcttttgataactctaagcctcattggactgcgccgtttggcgtttgctgtttggtttttggtttttggtgttgggcgctgcctttcagttgatttccgatagcgagtgcgagtgtgggccaaaccgacatcaagacacctgaaaatccaccaaaatgagc

SEQ ID NO: 29195 - DNA, 636 bp, DROSOPHILA
atgggttggtcaccgctgatgataaggtatctggcattcctcttcaattttctttgtgcggtcctgggcatcgccactattgtggtcaatgtaatagcaatcgatcaaatagctccaaaggaccaactcatcctgggactgtacattgccgttgggtccatcgtcttcttgctctcattttttggatgctttggtgccattaaggagagcatctgtgttacctgggcgtatgccacctcgatgctggtaatgctgatcgtctcaatagtcatgctttttgtcttccgtatgcatttcgaagaagactccattaccaagctgaaacaagcctttgccaagcagacaaacactttcgacgcaatggccgagtaccagacacagtaccagtgctgtggcatatacaagttaaaggactatggagacgcctacataactgttccaagtagctgttatgaccaaaatgatacgccctacagagacggttgtctggccaaaatggagacccagtacgaggagctcctcaagggtcctaagattgttggctggatgctgatggtcattgagataggtgccttcactttctccacaatcatgggagtgtccttaaggaacgaactacgacgctctgcgtattga

SEQ ID NO: 29196 - protein, 211 aa, DROSOPHILA
MGWSPLMIRYLAFLFNFLCAVLGIATIVVNVIAIDQIAPKDQLILGLYIAVGSIVFLLSFFGCFGAIKESICVTWAYATSMLVMLIVSIVMLFVFRMHFEEDSITKLKQAFAKQTNTFDAMAEYQTQYQCCGIYKLKDYGDAYITVPSSCYDQNDTPYRDGCLAKMETQYEELLKGPKIVGWMLMVIEIGAFTFSTIMGVSLRNELRRSAY

SEQ ID NO: 29197 - DNA, 3421 bp, DROSOPHILA
cgtgatgttcggatgctatggcatggtcgccaacttgctttgtgtcaatctgattgtaagcgaaaggaaagagcgaatcctgaatatggattactatccataactaactgaactctccccacagttcaccatgttcatactgatcgctctggcagcggagtaccttcagctgcaccactatcacagtccgtccctcaggagcccgggtggcgcctggcagcaactggaattagcttggcatggcctggacagagaccccgagctcatgcaccagtacgaggcctcccagcactgctgcggctacaatggtgccgacgattacaagcgcctgcatctgctggtgccggcgagttgttatcaggccgctgttaatgacaccgcccagcagatctatccaagcggctgcctcgagacgttgaaccgcagccagcggtacatccagcaccgcgataagctctacatgtgggccatcgttggccttgaggtgggaaattgacttgcggctgaagtgcagtttctcgaataatcatccatctcttcactcgccgcagatcttcatactgctgcaaactgtggcgctgagtgtgctgctctttcgactacgacagcggcagcgcatcgcacgaagacaggtgccgccaggtgtgcggcgggaaccgcgctccaaccatgtgtccgcctctcgtgcgcacctactgaacgacgcctgagctaccattaagatcttatgaaaactttggtttattatttatccaagtggcaagtgcttatctataaatgtcattcgtggttagtaggtgtagcgacgagtcttgttggtcagctggcagcacaaggtgatacccaagatgatgcctacgacctgtaataaaagaaacaaagtgttgcattaaacatttaatgcctgtcagttctcaatcattttgttcgacaagtgctactagagacttgcaaattcgaggttaatagctttccattttcaaatgtacatatatcatagctacattttgctaataagtcttgcaggtctgaaagctttgcccacctcgtagccaataagtccgcagtggacccatttctcgtatcggtagatctgcagataagcccgcttcacggcagccatgcagccctccccatacggatacaaggcgtgaatgccgtccttggtgtggaaacagctgcgaggcaccttcatgttgaggctcgtgtagtcggagaatcccttgtcgccacagcactcgtactggaaaaggggaaagagggcatttaaggatcgtagcatgatcgctctggggaaggacccacctcctgctgcaagtcttgcatggcgccgtgatggaccagctccttcatccagagatccatcacgtacacctcagtggcgtccagctgtttggtctcattgtagtgggacaccttccagatgtgcgaggctatcagagccagaagcagaatcaagttctaaaagccgaggcattggaagtgctcatcaatcgacaaaccatctgttctggctacttaccaccaccatcaccttgatggaaccgaatatggcacccaggcaaccgaccagtccggccaagatcagagcacctgccattcccagttggacgaacttctctgtgtgctccgcagagccctcgttgaacttatccagctcatagacgccggccagggccgcaaggacgccgacgatctggatcggtattaaaattatgaattatgcctgcgcacattaagcgtttgttaatggcccatgaaatgggcaaacaaaatcttcagagacaaactttcggctcgtgggatacgtcatcgggtagcgagaacaaccaaaataaaaacaaaccgggcgcaaaaataaattaaattactttgggctttatttttaaatggcacatacacagtttcctttcttgttgctgtcgcttcgattgtgccgaaaatgcgactggccaacaaaagtgggcagaacgagagccgccaagtgacatcttgtctggtggaaatggaaattttgaatgagatttgtttgctgccaaattggccagctactcggcccgtccagtaagaaattacaagcggcaatgaaaaatggacaagaatgaaagacactttatgatcgtgctttgacagactgccagcggcgagttaattttgaatcgtgatttccatcagcaagtgcttttattactcatacgcagtgtgtgactcaagaacagttgcactgaaattatcaaggaacagtgacaatgaataaatgcttggcctgtggcttgcgtttcccagtggcgatcatggaaagtttatgtcggctaatgatgcgtaatactaacgcgttttcccacaagatatcctccttaccaacgtcagcgtactgaagacaaccgaggtccattgtaggcacacgcgaaccgtgggcattttttacttgcgatgcagttttttctgtttctttatttttgatcaatcttattcagcgctcatccgagcagcgactccaggcagcggacgcgtttcccgggaaaattcgctttccactctcgaccgtctgtgcgtggcggtgaccgaaccgttagtgccgtcggacatcggtcggggccaaaataaagcaagacccgaaaaagcgctaagaagctgcgaactgtttacaaatccgccgagtggccgtccgtgtccgcatccgtgtccgtctcggtctccgtttcggcgtttcgtgtgccggtcgttactcaggagaccggcgttcaccagacctcaatggcaccccgccccatccgcccgacactgagagaaacacattataattacgcctataaaaatttaagatttattgtatagatgccttataactttgaaataagtttaaataactgaccgaaatttacccagtgattgtactagatatttttatttcaatagaaatgggtaacttaacttaacaacaggtcaagaatcttctagcagatcgggtgaaattatcagtatatatatgttactgtcgtatagcatatctcctcgtactcccattagctgtggaaggggtatctcatagtcgaaaaatcgaatgcctagagcctattatagttatttttcttttaaaacggaattcttttcatatgtagaagatattctttgagtgcacccaatgttttcgtatatttttatacgcatctttataggcaacatacatctacttagcaggcccgccgaaattccgcatatagtgggcacaaacaacacttattgaatattatgattttggtttattttttattctacgcttctgttgcctccagatcatcttaaactgctataaaaatccatagatatcggattatgcgttgccaacacccgatttcgatgattccaagcgacctgttagaatctttcgcgccgcaatttattgcgcaccgtgatgccc

SEQ ID NO: 29198 - DNA, 633 bp, DROSOPHILA
atgcccacggttcgcgtgtgcctacaatggacctcggttgtcttcagtacgctgacgttgatcgtcggcgtccttgcggccctggccggcgtctatgagctggataagttcaacgagggctctgcggagcacacagagaagttcgtccaactgggaatggcaggtgctctgatcttggccggactggtcggttgcctgggtgccatattcggttccatcaaggtgatggtggtgaacttgattctgcttctggctctgatagcctcgcacatctggaaggtgtcccactacaatgagaccaaacagctggacgccactgaggtgtacgtgatggatctctggatgaaggagctggtccatcacggcgccatgcaagacttgcagcaggagtacgagtgctgtggcgacaagggattctccgactacacgagcctcaacatgaaggtgcctcgcagctgtttccacaccaaggacggcattcacgccttgtatccgtatggggagggctgcatggctgccgtgaagcgggcttatctgcagatctaccgatacgagaaatgggtccactgcggacttattggctacgaggtgggcaaagctttcagacctgcaagacttattagcaaaatgtag

SEQ ID NO: 29199 - protein, 210 aa, DROSOPHILA
MPTVRVCLQWTSVVFSTLTLIVGVLAALAGVYELDKFNEGSAEHTEKFVQLGMAGALILAGLVGCLGAIFGSIKVMVVNLILLLALIASHIWKVSHYNETKQLDATEVYVMDLWMKELVHHGAMQDLQQEYECCGDKGFSDYTSLNMKVPRSCFHTKDGIHALYPYGEGCMAAVKRAYLQIYRYEKWVHCGLIGYEVGKAFRPARLISKM

SEQ ID NO: 29200 - DNA, 2984 bp, DROSOPHILA
agacaaccgaggtccattgtaggcacacgcgaaccgtgggcattttttacttgcgatgcagttttttctgtttctttatttttgatcaatcttattcagcgctcatccgagcagcgactccaggcagcggacgcgtttcccgggaaaattcgctttccactctcgaccgtctgtgcgtggcggtgaccgaaccgttagtgccgtcggacatcggtcggggccaaaataaagcaagacccgaaaaagcgctaagaagctgcgaactgtttacaaatccgccgagtggccgtccgtgtccgcatccgtgtccgtctcggtctccgtttcggcgtttcgtgtgccggtcgttactcaggagaccggcgttcaccagacctcaatggcaccccgccccatccgcccgacactgagagaaacacattataattacgcctataaaaatttaagatttattgtatagatgccttataactttgaaataagtttaaataactgaccgaaatttacccagtgattgtactagatatttttatttcaatagaaatgggtaacttaacttaacaacaggtcaagaatcttctagcagatcgggtgaaattatcagtatatatatgttactgtcgtatagcatatctcctcgtactcccattagctgtggaaggggtatctcatagtcgaaaaatcgaatgcctagagcctattatagttatttttcttttaaaacggaattcttttcatatgtagaagatattctttgagtgcacccaatgttttcgtatatttttatacgcatctttataggcaacatacatctacttagcaggcccgccgaaattccgcatatagtgggcacaaacaacacttattgaatattatgattttggtttattttttattctacgcttctgttgcctccagatcatcttaaactgctataaaaatccatagatatcggattatgcgttgccaacacccgatttcgatgattccaagcgacctgttagaatctttcgcgccgcaatttattgcgcaccgtgatgcccaagtgggttgcggctcccagggcggcgaactgtgtggagagaacggaaaattcgattagagcccagcgtctgagtgtggcatctatttatgcaccgcccttggccagccaagccctcggaaatatgtggccaaggccggcatggaatctacatacctccaccagaagcagcagccacttgatgatgagtccgatggccacgttgtccgtggcatgcgcctgcacggcctgcaggcagcccccggagaagaggctgtactcgcgccgctcctgatccttgtagcagctcaagggtataccccgtcccatcaggatgtagtcatgggcgcccaactggccgcagcaggagtactgggaaggaatgaaattggtcgtgatgacccgcaaatagcaatatactaatcccaagtattggacttaccttttgctcaaggagcgatatgcgctccacattggtcctttgatcagcccaggtggccaggaaatccttcttggatcgctccacgtagtccgtggagtgggctgccgcgataatataaatctgcaggcacagcaggatcagcaggcagatcacatactaccggaggacatataaatattatgtgaatttagttgatgtatcaattgaaggcttcacttacgctccaaaccagtcccagggaaacccgagcggtggcaaagcagcccagaaacgaggtcaggaccacgaaggtgcccacgaagatctggacaacgatggcgatgtgctcgaaggtgcccggcgtggagctgttcagctcgtacacggacagagcaatcaacgtcactccaatcagctgccaataaagtcacattaggtccgttggctagtgcccaattggctccaacgtcactcatacgcaccgatagcagcacattgagaacgataagaacggctttcaggaacgatgtgcggcagtccatgttgccaatcaataatccctataattaaccacgaaggtgcgtttatccttgttcccgcaccaattttccgctgcgcacttgacccgaagcgtcgaccaccggagaagcgaagacccaatgaaatccgccagccctattggcatagaggttgacgtgcgactgagcgcaacgctttccatttgaaatgtggcgcccccgaaagcgccagttagtgggttccgccactagacagaaatcaactattccgcggcggttcgcctcgctacactggaagaaaagagtcgaaggacataatcatataattacatacaatcaccatgctaagcacaatcactggtaaacaatttaaggtaaattttaaaattttcttgaaaaatacacttaaacaatacgatattactcgaaggtaaagcatttcacttagcgatgtatattttgcttgacacatattgcatacatatttacctatcatgcatatcgaattggacagagtccaaaaataaacttagcttatgtcactttatattctactacttacttttctagatccactcatttttattcagtacacaaatttccatcaccaacttttttgctgactgtatttacatcatcattgctgccgatttttgtggtggtatagtggacttctgtgggtggtatgatgtcacagcggctaaagctttcaccgcattttctttatttaggaattgaatggggccaccaaaatccatccaccgcagagcactaacatcatagattacaggacatcattgagatatttctgcgccgcacacttaacggaaccctacagattccaagcatgccattacgcgacgagcaacaagtcatttggcagtcaaagcaaatagagaaatgtttcggccatacaaagctcgtcgggactacgcgtcgtatgcttaatatttccatcgggcagaacacacaaacaaactgacaagcgagcaaatcatgtgaaaacaaacacgcgcacatttat

SEQ ID NO: 29201 - DNA, 657 bp, DROSOPHILA
atggactgccgcacatcgttcctgaaagccgttcttatcgttctcaatgtgctgctatcgctgattggagtgacgttgattgctctgtccgtgtacgagctgaacagctccacgccgggcaccttcgagcacatcgccatcgttgtccagatcttcgtgggcaccttcgtggtcctgacctcgtttctgggctgctttgccaccgctcgggtttccctgggactggtttggagctatgtgatctgcctgctgatcctgctgtgcctgcagatttatattatcgcggcagcccactccacggactacgtggagcgatccaagaaggatttcctggccacctgggctgatcaaaggaccaatgtggagcgcatatcgctccttgagcaaaagtactcctgctgcggccagttgggcgcccatgactacatcctgatgggacggggtatacccttgagctgctacaaggatcaggagcggcgcgagtacagcctcttctccgggggctgcctgcaggccgtgcaggcgcatgccacggacaacgtggccatcggactcatcatcaagtggctgctgcttctggtggagttcgccgccctgggagccgcaacccacttgggcatcacggtgcgcaataaattgcggcgcgaaagattctaa

SEQ ID NO: 29202 - protein, 218 aa, DROSOPHILA
MDCRTSFLKAVLIVLNVLLSLIGVTLIALSVYELNSSTPGTFEHIAIVVQIFVGTFVVLTSFLGCFATARVSLGLVWSYVICLLILLCLQIYIIAAAHSTDYVERSKKDFLATWADQRTNVERISLLEQKYSCCGQLGAHDYILMGRGIPLSCYKDQERREYSLFSGGCLQAVQAHATDNVAIGLIIKWLLLLVEFAALGAATHLGITVRNKLRRERF

SEQ ID NO: 29203 - DNA, 4742 bp, DROSOPHILA
gaatattaatgtatccagtgatttttatcacggatgcaaggtttcgaattataagtctcaacctagtttctgaaatcctttattctttactctttccccttgctttcgcttatatatgtaaacattggatcaatcctaatataaccaacttaaaatattaacttaacagcactttgttaaattttcattccaattacattattttcgatattaagccagagttgatgcttacccagtaatgactcacacaatcctctgtccagagttgtgacctctccgtcgatactgtctccccttctcaaaaagtaaaagcgctttgtttacaagtttttgtggttgttatgtctgagttgagcaataccaccccccccccccaagacatactaccaaattcctcccactcctacacacacacgcatgtatgtatgtatacggccataaatgacttggaggcgtcatttggagttaattgtgtttgtctctggctttggttttccattcataacagttcgcttgacttttgtttgcgcaattcgtttgaagagccctctagtggtcagttttctccaacgcacaacatcactgaaaaaaactatcgctcaacttcagtaaaatgtttagagaggtggctctaaacacgaagtttatgttgctaaaagaaagaatattttcatattccgatggatgtgcccgctgtaaggaaagtgcatggataggaaaaaaagaaaccgctttcgactattatataccctttacacgaatcattggagagaaacataaacatatatatgtaagccttaacgcttttgcttccaactttttgttccacatgtgctcataatttgtttttgcgtggactaacttaaaacattttatatagttatcgagaacgttcatacggacggacaaacggacggtcaaggtgaaaaactcaaaatattttgtatcaccggtatcgcgaacctattttgaaatcttaattattgtcgaaaatattgttgaaagtaatttttctaaatatatttggtattttaaacgacatgtgtttggtacttgtagttatgtacatattattttaatattcgaatgtgttaaacattgctttaataaaaagattaactcagttgcttggcaagtaacgctgggttttcgtatcaaaaacaaaccatacactgatgacacttagatttgaggagtttggtttcttattcagtaaatattcactaatagttatatcgtctccgccggttggtgtagtgaatggccaagatgatggccagcaatagaatgacagcctataagaaataaagaaatgagttagaaatttgctccaccgtaatagaaataaagagctcttacgttgaatccgagcagaccccactccaaatagcccagagtggttgcctcatctgcaaaagcctcctccactttgatgaggcagccgcgcacatatagattcagtggattcacacagctgtcgtccttgcaacagctacttggaacggtattgttccagaatttgatatccaagtagtcttgggcactgtcgcggccacagcaatagtactaaagtgatagaaatatataaacaccaaaattaaaggagaaggctaagcatacataaatatgtacttcagcagctttgcgcaatttctaatactacattattagaaataaacataagctaaagcgttatattcaattcaaaccatgtaagataacactagctaaaaaagagcacggccctaacgcctatctaccttttgcttatgtacttatgtatataacaaaaaaaattccaaattaaagcactcttttaatctttattttggaagcatttgaacaaacaaactagcctttgctttgttacattggcactcaccgttttctgaataatatccatactgccaggcttcgtctgctccagctcccactgattctccaccgtttgaagcgcgtactttttaaatacatctttgggattcaggatgataaacgccactataagtagcagcaaaatcagcagcagtgacgcatactgcaaggcaattagaattattagctcatgtatgattcacctaattgcaatattcagttacgtaccgtccagagcatgcgcggcgattcgcgaacggctccacagcatccaaacagggatattaccaggatagtaccgcccagaattaagatgccgatggcatatgcatctggcattgctccccagccaaggccgccaaagatgagcaccaggataccgagtatctaaaagtcagaaaattaaatagtcaataaatatgtccagcatcctctaaattatgaatattatctatctatgtaaaaaattgccaaacaaaattgggtttataatctcagaccgcctagccctaaaagtttttataaaacacacatgcataaaagcaaagattaaaacaagtcgagttccccgactatcagatacccgttactcagctagtgtgaatgcgaacgctaatttttatattttttctggaatatcgatagatattggggaataaaatgagaaaatttaaaaattgttcaaaagcttggacaagctcgattttgtgggcgttagagtgggcgtggcagcatgggtcagcaaacttacgctgcgtctttgtcgctagaagctgcatgctgaatcacaaccttctagtttttattgttcctgagatctccatgttcatacggacagacggaaatggctatagatcgacctgttcaagcaaatatagtatacgcttttacgagtaatagacgtaattaagaaaacaaaaaatgtctcttaaattgtttgagcgactgcgttttggaatcatgacaacatttttttaaaagcgctgaagtgggaagttcatacggacagaaagacagacggacaaacggacatgaccagaccgagttggctagagagtgtgattaagaatttgtatactctctagggtcgaagaagaattccaaaaggatcagtcaacaatctattaggattgggcttacatcagaccatcgcggccttgagaaggccacagaaagttttgatgcatatgggcaccgactaatgcgtcgagctcggcctcatcgctattttcatcattatctggtgaataatccggtttccatattccgctcgaattagcctttcaaacgaaatccgaatgcatgacgcacttcagcaacctcgtttcgccgcttggctagcaagccctcctcttggcttaaggaactaaaaggccgagcagaagccattaacaatagacactggctaacacacacagccagccgcgaagcgttgtcataaaccaaacacgcacccgagatgatatcatccaccgaccaggtggacgtggaacggacagcatagaccccaaacaccgaggctcccctcacacaaatttcaaaccatcgcaattagctggctatttgtagaaaagaaccggcagatacgcagatatatcgcttagactcccaaggcaccatatgccaattccaattcggtgctctacttaccgcccataaggcattgaacaggaacagcgagtactttatggtgcccgttgcgcaacccatttcgaatgtttttccacttcaaacttttgcctttggctagaatgcaaccgaatcgcagtgccacaagtgcggcagtttgctgtgccgccgattattttcagtttttgagtccgtatcggcggaacctgactgaatcggttaggagtgcgcactggtgcggccacggtcacgagcaaactgagctccccgaaaactctctcgctcggaatccgatccgagtcgagcggtccgaagctccaaagctgccgcttctgcaccgtgggttcaatgaatagaatagcagctgttcatggagcaccaaaattatagtgacgaacactgctcctaatacttaaggcaatgcagagtgtttcggcacgaatcaaatgatatggacttcctgtacgaatatgaaatacgtaatcaatttttaatcaaatatcttctctaagcaagctctacgaaattgattcttttaaattcattttcacaattgaacagtgattgagttaaaatgatgtgccccacagtgccagctagcagtgtttgttaaagcaaacaaaagcagccgggcacacacattactatacagtagaacctcaataacccgctcccagacgatagcaaaagttcattgcttattgtattgattttcgttgataccatagatgttattaaaatgagaggttacaaaatatatcactatcttgttatattgatttgtcaattaatatacttcgagtgactaaaatccatttagccgaattcgcctgcactcgcagtaggcaaatcaagaaagttaaaggtggcggtggcactctagtgcggctcccgccattcggaagccaaacagaaactgaggcgggaaagttcgaagcgtggagctggttatgcttgacagaactgaagcgaaatctatatgtctccgtttgccagatgtttagccgcggtgtgtgtcttatcgagagcggagttgggtctaatcgaccaccgcctctcaaagcaatttaccaacgatcgaattaatgccggtaagattgattcagctcgattgcgtcagacactcggcactgaatgacgccatcaacatcaccggatgagctcagtttccgatgcggagtgcaggatcctgacttccactatcaaaatagaaaccctaaatgcattgctcactttgt

SEQ ID NO: 29204 - DNA, 1034 bp, DROSOPHILA
caccagtgcgcactcctaaccgattcagtcaggttccgccgatacggactcaaaaactgaaaataatcggcggcacagcaaactgccgcacttgtggcactgcgattcggttgcattctagccaaaggcaaaagtttgaagtggaaaaacattcgaaatgggttgcgcaacgggcaccataaagtactcgctgttcctgttcaatgccttatgggcgatactcggtatcctggtgctcatctttggcggccttggctggggagcaatgccagatgcatatgccatcggcatcttaattctgggcggtactatcctggtaatatccctgtttggatgctgtggagccgttcgcgaatcgccgcgcatgctctggacgtatgcgtcactgctgctgattttgctgctacttatagtggcgtttatcatcctgaatcccaaagatgtatttaaaaagtacgcgcttcaaacggtggagaatcagtgggagctggagcagacgaagcctggcagtatggatattattcagaaaacgtactattgctgtggccgcgacagtgcccaagactacttggatatcaaattctggaacaataccgttccaagtagctgttgcaaggacgacagctgtgtgaatccactgaatctatatgtgcgcggctgcctcatcaaagtggaggaggcttttgcagatgaggcaaccactctgggctatttggagtggggtctgctcggattcaacgctgtcattctattgctggccatcatcttggccattcactacaccaaccggcggagacgatataactattagtgaatatttactgaataagaaaccaaactcctcaaatctaagtgtcatcagtgtatggtttgtttttgatacgaaaacccagcgttacttgccaagcaactgagttaatctttttattaaagcaatgtttaacacattcgaatattaaaataatatgtacataactacaagtaccaaacacatgtcgtttaaaataccaaatatatttagaaaaattactttc

SEQ ID NO: 29205 - protein, 181 aa, DROSOPHILA
MPDAYAIGILILGGTILVISLFGCCGAVRESPRMLWTYASLLLILLLLIVAFIILNPKDVFKKYALQTVENQWELEQTKPGSMDIIQKTYYCCGRDSAQDYLDIKFWNNTVPSSCCKDDSCVNPLNLYVRGCLIKVEEAFADEATTLGYLEWGLLGFNAVILLLAIILAIHYTNRRRRYNY

SEQ ID NO: 29206 - DNA, 3500 bp, DROSOPHILA
ttctctaagcaagctctacgaaattgattcttttaaattcattttcacaattgaacagtgattgagttaaaatgatgtgccccacagtgccagctagcagtgtttgttaaagcaaacaaaagcagccgggcacacacattactatacagtagaacctcaataacccgctcccagacgatagcaaaagttcattgcttattgtattgattttcgttgataccatagatgttattaaaatgagaggttacaaaatatatcactatcttgttatattgatttgtcaattaatatacttcgagtgactaaaatccatttagccgaattcgcctgcactcgcagtaggcaaatcaagaaagttaaaggtggcggtggcactctagtgcggctcccgccattcggaagccaaacagaaactgaggcgggaaagttcgaagcgtggagctggttatgcttgacagaactgaagcgaaatctatatgtctccgtttgccagatgtttagccgcggtgtgtgtcttatcgagagcggagttgggtctaatcgaccaccgcctctcaaagcaatttaccaacgatcgaattaatgccggtaagattgattcagctcgattgcgtcagacactcggcactgaatgacgccatcaacatcaccggatgagctcagtttccgatgcggagtgcaggatcctgacttccactatcaaaatagaaaccctaaatgcattgctcactttgtgtgaatcttaaaagtataggagctatataccgaaagacagctgaactgaccctgttaggcaaatacatagttacaaatacaaagttactagtttaaaaatcacaattttaatcagttcggattgaaccctttgtataatcggaagtattcgtttcatcgggatacgcttttatttctcctgggagcatcaaaaactttatacaagattactgtaaaggaatattggcgccctaataatatattcagaattctacgaaagtattccttagtaggtgtagcgaacgcgctgcttcctgaatcttccgaccaagtaaaaggcggcaatcatcattagaatctgtaaaaactctgtaagattagtccctccatgtgtagttcacacatttcactcacggttattcccagtgctatccagttggtatcgtgggcgtagctgaagagcaccacaaagttctcactggacttttggacgcaaccagctagatagtggggcatctgggggtcctcctggggatagcagctgggcggcaaggtttgacgaccgatggccacgtagtcgtcggggctatcacgcccacaacactcgtactgttaagataattcataaaaatgataaacgataatgccagcatattaaatatattcgattaaaagtgcatgatgcgaatgatcttcgccagaatacgaaccactgtctggtaaatgtccatggcgccgggttccaccagctcctcgtcccatttcatctgaacctcctcggcggcgaacttctctatgtattcctcagtgaacttgaagcggaagatgcctagcaagctgattattagctgagccaacagcaagaagccgtactgttgacatacaacacacaacatagagtgagtgaattaccaaacggatgacatagcgtttccactcaccgttgcggtcatgcacacgttctccatgcagattccacagcatcccagtacagccgaaacgaagataatgccaccgagtccatatagaaacagaatgtaggcgataggggctttcgagagggccaacgttgcaatggctatcagggatagacccgaaagctacagagggagcatagggtcaattcagattagcatttggcaatgatatcgggtggtaatgtcaatgactccaatggagcttgaggtattttcaaaatattatcaaatgccgcggtgaagaaactagattttcccgtttatctgggcactggaatctctgttatttgatttggtgtttcacaataacgttcgctctcttagtgctaaataatgagttatttttaaaaggatatggataaaacaagtttttggcagttaaaaatcttgttttcttccataatcttccataaattgtaaatatggtacaaatcgcagcatatggtaaagtcgtaaagcatttctagatcaaacaaattgaatttggaatgtgttggggctaatcattaaagtgcggcaaatgtttctcatacatatctgacaagcaaattacgtttactggccaaacaaattttcgattccatgaaaacggaatgcgtacttgcttgtcgatttgcagaaaaatgtattcatttaaattcctgtgggaacacagatggctaatttacatttgtaatacattcttatagcacagaattaccaatttttattcatatgcatgtgaatatatgcatatgttaagaactcaccgcgttcagagtattaagagtgttaaggaaacacttaacgcaaccggaagtgcagcccatcctagtgctacgattaagctgtttttgtaaaattccaaactaattcctcttgaataattagtaatagagagtaatctttgttgtatgatcgaacctgccagatcggagttccgatagacaatgaatttcagatgcaaatatttgccggcagcacgtaaaatcccaaaatcacgatctgcgctcttcaatgttcttttgtttttcagatcttcgcagccgaatgatgccgaattcaatgagagagagatataactgcggggaactcgtttaggctatggaaagtatttattttctaatggcattttagctaatttggttaatttttattatcaataatcatgcaggggtatcctcggccatcagtcgttgatgggggtctcctcgtcctttatcttggttttggcatacttgcgagccttgcccaaatggtaagcggtgaacaagcccaaaaactgaaaaatacataaattgtaataatataatattgatatggaatcgaaatcgaatagacaagcgaactttgttaaaaaaatattttactgtcttaacgtccttactactttataactttataacatcaagcaaaagctcaacaactgtgtacataaatagtaacgatcgcacctttgacatatttagtttaaagaaaactttagtaacaaaaatggtttgaatgaaaaaacacacatcttatcttggcagggatttctatttaagcgtgacgaataaaaaagtagttaaaatgtgttcactgagtcagttgtgtgcgttaattcaaaagttattggataactcttccataagcgacgtgccgaaacatacccttgtgctcaagtacccttgtggcaagtgaattttaccctgcgtatggtttaatgtctcacctcgagggcaatgatcgccatgcagctgtagtagttgagctccgcctgcattctcagagtagctaccgccttggtggagcatccctcctcgtagacgtgcgccggcttggagcagt

SEQ ID NO: 29207 - DNA, 648 bp, DROSOPHILA
atgggctgcacttccggttgcgttaagtgtttccttaacactcttaatactctgaacgcgctttcgggtctatccctgatagccattgcaacgttggccctctcgaaagcccctatcgcctacattctgtttctatatggactcggtggcattatcttcgtttcggctgtactgggatgctgtggaatctgcatggagaacgtgtgcatgaccgcaacgtacggcttcttgctgttggctcagctaataatcagcttgctaggcatcttccgcttcaagttcactgaggaatacatagagaagttcgccgccgaggaggttcagatgaaatgggacgaggagctggtggaacccggcgccatggacatttaccagacagtgtacgagtgttgtgggcgtgatagccccgacgactacgtggccatcggtcgtcaaaccttgccgcccagctgctatccccaggaggacccccagatgccccactatctagctggttgcgtccaaaagtccagtgagaactttgtggtgctcttcagctacgcccacgataccaactggatagcactgggaataaccattctaatgatgattgccgccttttacttggtcggaagattcaggaagcagcgcgttcgctacacctactaa

SEQ ID NO: 29208 - protein, 215 aa, DROSOPHILA
MGCTSGCVKCFLNTLNTLNALSGLSLIAIATLALSKAPIAYILFLYGLGGIIFVSAVLGCCGICMENVCMTATYGFLLLAQLIISLLGIFRFKFTEEYIEKFAAEEVQMKWDEELVEPGAMDIYQTVYECCGRDSPDDYVAIGRQTLPPSCYPQEDPQMPHYLAGCVQKSSENFVVLFSYAHDTNWIALGITILMMIAAFYLVGRFRKQRVRYTY

SEQ ID NO: 29209 - DNA, 2513 bp, DROSOPHILA
tcgatttgtttatagtctttagcggctcattgtcaccaatttttgctctcttgcgaaagatgtgaacttgggcgcaatattgatttttcgattttggctcattgctcgcatcaccgggtgttgtgcaagattcccatttgggtcaggctcgggaaaatgggaaagctctggaatggggaaatgcgcatctttttcacttaccacaatgagaatgcaggtgaccagtaggccgtacttccagggtgttatgggaaacgacttctccatgttgccacaatgtcgcacgtgagtttccttggcagttatgcttgtgaaccaaagtatctggctgccgatagaatggaagatatgacctccgagttccggaaactcgctcgattcgcactatgccactggcttagggcagggcattgtttacttgcgcccagagtaggtctacacccacattaaactgggctcggagctctgagccctatttcggattggaactcgtggtgttgatgccacaaaagctgccctgcgactgagcgaaaaaatgagagacccaagggcccctctcgaatctgaactttttggtctggcgcgttctgcgttcgctggcaaactgaaagcgggaaaagttttgtttttctctcttcccgtgaggactgttgttccccaatcaaaataaaccacacagagcgcactcgctctctcaaaagagagcgttgcacttgggtcagagctccaagtcatgtcgactggcgtttccacacggtggtgttttcgaattcttatcgggtctgtcatgagcgtacatatgtgaactgctgaatgattgaatggattcgagcttaagcaattaggaaaatattaatgtatccagaggtttttagcaccgatgaagctattaaacaacacaaccaaggtttaattcttttttctttcttttacgagagtgatgatgatggtgacagttttgtggaagattgcctagaatgctgtgaataccagcaacgattcaccgagttgctatgcattctagcgctcctttagcggctttgatctccagctccattttgatggtgtttatcaggtgcacattggtggctcgatcctttccttctcggtggcggatgtcagacttgccggtgccaatgtgcacattcaaggcgtcgtttctgattaaattcttggtgcacagataacaaggataggccacctcgccaatgacctcgatctggatgattgaattattggcctcactcagggacttttgcagcgtgtcaatctcctccagggccgccgtatgcgcctgaggctggcatactgagacatcacaaaggacttgacaatgtcactgtccagaatgtgtccagtgaagcctccgaaaggtgggcactagctcgaagttttgctccctgagaatcctctccgtttcatgggatcctgccagaaatgccgttgtgaagtaagtgataactattatttttataattttccatacccataagcctccaatccagtggaccatcaggatactatctattgaatatttgcccttaaatcccatttctctgaaaataaatcagccacttcttcttcgccttttttttttttttggtttgggtattgaccgatatttctttttgtgtatcgatattgggtcgaaaaacaaggcatatcgatatattattatctaattatcaagccgccaacgccaaaatgtctgctacgttaaacttagaagacgctacaaaaaatcaaccaacagtgcgaggttgcaattgcaacgctaaaaggaaggagttttttcctccaatttaaaaaaagagtctggcggctgaacacatcagaatcactttgagcagactcctgagctttttaagggataaacacatgcttttggcaattattgtcgacgacgaaagcatgaacatccccagccgcacgctgcgtgtccactgctctatgacatggagcactgtctggcaaactttcggagatactgtgaaggccactggactaaccccaggaatgggccaactgtgtgtacgtggaggaacaatgcggaaatttaaagcggagatgataatgattcgcaactggagactcttcagtgtaagcggagaagatttcttcttaagcttattgaaagtgaaacaacttaaagacttcgagtttcgatgcagtgttgcgatgaagaaacaggggtttggtcctcttcctcctattagggcaagtaaaaaacgtttgcaaagttaaaatatttgtatactttcaggaagagcttccagcttccgcctgcgaggctgagccttcctttgtgtccgtcgctgatcctgaccacacctaaacatattctggcaccgacctgcgatcagcatatgtaagcggtccgttgctccagcagccacattttgtaccagtaccgcccccgtccgaccacgagcagcagcaccaccagcagatgcaaccgcgacccctacagcagcaggtcagttacgtcaatccaacttgccacccaattccgt

SEQ ID NO: 29210 - DNA, 327 bp, DROSOPHILA
atggtccactggattggaggcttatggcctcaggcgcatacggcggccctggaggagattgacacgctgcaaaagtccctgagtgaggccaataattcaatcatccagatcgaggtcattggcgaggtggcctatccttgttatctgtgcaccaagaatttaatcagaaacgacgccttgaatgtgcacattggcaccggcaagtctgacatccgccaccgagaaggaaaggatcgagccaccaatgtgcacctgataaacaccatcaaaatggagctggagatcaaagccgctaaaggagcgctagaatgcatagcaactcggtga

SEQ ID NO: 29211 - protein, 108 aa, DROSOPHILA
MVHWIGGLWPQAHTAALEEIDTLQKSLSEANNSIIQIEVIGEVAYPCYLCTKNLIRNDALNVHIGTGKSDIRHREGKDRATNVHLINTIKMELEIKAAKGALECIATR

SEQ ID NO: 29212 - DNA, 4407 bp, DROSOPHILA
tggtcctcttcctcctattagggcaagtaaaaaacgtttgcaaagttaaaatatttgtatactttcaggaagagcttccagcttccgcctgcgaggctgagccttcctttgtgtccgtcgctgatcctgaccacacctaaacatattctggcaccgacctgcgatcagcatatgtaagcggtccgttgctccagcagccacattttgtaccagtaccgcccccgtccgaccacgagcagcagcaccaccagcagatgcaaccgcgacccctacagcagcaggtcagttacgtcaatccaacttgccacccaattccgttaaaggaataaaaccttttatccatatttagtacgaacctaattgaaataatatatttcctacctttagtcattacccaacaataaatgaccgtaaatatctgaaggtgaataagtggtcagaaaaagtacatgagtaaacaattatcaattatcaattatttaagcccttttttaaaattttcaagtctgtaaatctgcgcaatttaccaaaagacaacgatattaaacatttctcctcactcgctcgccaaactctccgtactctttgttactaggcgagctacagccagagtaacttttggtttcaattgcaaaaatatttcaaaattgggcgctaatttgtaacagttaatgacgagcatattatttcgattttggtgaaattccaaaccctctcacaactcgatttgacgttaatcaacgccatcaagccattcaagcgatcactagacagcaattaccatgcaattactggaaatttgggctaatcctgatcatgaattagttcatcagctggttactattgagttcaaataaatcacttgttctgtggcaatcgaatgggtggcgctggcggaaaacttcttggactgctgctgtgtttgctatttctaacagagttgcatgtaagtatgtttgttggggagaagtttcacttctgatggaggataatccgacattcagggagtcttcatgaggttcaccaatgtaacctgcgagagcaaggacctcagcatgagtatcgtggagtactgtgcggttactacgctgagcaagaataaaaacagcattagccttcggtacgctatgctcaagcctatgtttacaaatatagaggtaatctatgggttctagtttgctgtgccagcttgactgtcctccgaagatctactttcagctgatgaccaggggcagtgagagtatccacgcggcttcaaactggcagcccttcctccatacgatgaaacttgatttgtgtcgattctggaaaaaccaccacaaccatttggccagaatggtgtttgaattcatcgatgggcacacaaacatgaaccacacttgcccctataccgtaagttgaacaggctcaaatatcagcaaatcctaatcttctcagtaatattttcttttagaaagaaaaatacatttccattgatgatttgacaaataccgaagtctccgccaagatccgtggagtgccaatgccaaagggtttctacgccttgttcaccacgtggtccactgaaaacataactcgagttgtgaccaacttttactttgaagttataagcccttgatgtgttttttaattgtatacaactgaaaaaatgatgagaaacaagatcgaaatggtgtgttctatggttcttacgaactgaaattagaatatttgaaaaatgtctattggtttggtaatgataatggagaaaaaagcttaataaatagattttggttaaagagtaataactttatgtgactatcgttatcaaaaagacgttatcaatatatgaacattattcccattacaaatttctcgaaaatcgtacctaaaatcttaagccctttgtacagattgggtttgcctttagtaatcggttattaaatatttaagtaggaaacatttgattagaaaacagattcaaatatattgttaattaatactaagatgacttagaaaacccctcacatccagacggcattgttgcggcggctttggttctttacgctgctgtagagcagccaaccgaaaacagctcccacagcctaaaagggaaaaggggtatcaaacaagtccacatttgggcaaatgatctaaccaacctctccgatgacaagcaaccagcagacgattttgaacaccagtaacttatcgtccagatacttcacgaatgcggccttgcagcccgtcttgaagaccctgctcggagtgtccatgcacttgctttctggacaacagctggacggaatgccatgatggatgatccagtagtcctcggaactgttgaccccgcagcactgcagccaggactcgtagtagctcaaggcgcctgtttggttgcgctccgattcccagagacggtcgaatccctcgttgatgctgcccgagattccatccttggtgccgtgtgaggacatgccgagaaaaattagctgggcgaggatcagcagcaccacggctcccacatactattggtttggatcggatttagaagaaattagtggaaatatccgagacaagtttaaatctaatagatgcaatcaaaatctacaaatcagctttgctgaaaacaatcgcttctcactaagcttacaatcagtatctaagctgaatcatcgcattggctaaatctaatcgtttaggctactaacatactctataatttatgggtgcaatgtgcaaaaaagcactgaccaagcaggacagtactataatgtgcacccacataaaataaagagtttgtatagcatattgtcttaaaacagtattacttaatcaggaaatatgtttaaaaaaaaaaatatatatatcttttagcaagtctgcaagggcaatgagtagaaatcagagctacttactatgaggagcctcacaggagcctcatggatggcagccaggcagccgaagatcgcaatgatgaggatgacaacgcccaaggcgatgattaggcccccggccacatttttcccaatgctgactgcattctcagcggcggagatcaaaaagaaaattccgaaggcgatcagcgccagcccgagcacctgtggaaaacgagaaaaaagttaggttggcatatataatacttactagtatcgctctcaggtgtgctactcacggaaaacacaaagttcagcaaaagcagcacatgcttcactgtagtggcgcccagacccatgattactgtggatcaatcaacctgtagatgcggctggagaccgactgttaagatgtacgaaggcaacgcgcagtagagtgcatcagaggccttacatataaggctatatggccagcagcctgtttcagatgcgtatctttcggatacagcggcgcgctaagatctttcgacgtccgaccgccgtggttcagctgtgcgaatcaactggcagcgctgtgagatggaaaccgaaacagtgtgttttgttttgacttaaacaacgaccgactcaccgatcgctcattcattctatctataaatcggttaatgaaaatcgagagcgagaatcgcccacttgcgcgagcttttcttgtttatcgccgatccccacacgtttagattcctgctggccaacgaaaatctcttgtaaaagtttagtttagtcaatggcaacgggtttatttattttcgtttcgaattatttcgtgggcgtgggtgccagtttacagttttatgaatgaatacttggtatctgtagcctaacttggttaatcatcgtaaactacaatcacaattcgccagggccgtatggctaggaaattactcacaacaaataacgataatacggttcgtgcaaatccctaaatactatcttaattatagaatcttatgcggtcgcgatgattgcgaatgctgtctaccaggtagcaggtggtcaccgagccagcgaactgcaaatacaataagttaatataataaacataagtatgtaatgatagaaagatacgggcaatttaaatattttgtaaattactttgtttagattgagaaccaagcaaaaaccaaagatgctagatggtagttgagaaactctaaaactgtctacttacctcaaagataacaaggaaccaacttagcgagtggaagttggctgtctttgcgccgacatactccttgaacttgacttcgcagcctgtcatgaaaagattcagatgcttggtgcagtcccgattgagacaacaactgggaggaggcatcttctccaagtgcaggtagtcctcggcactgttgcggccacagcagtgaagctattgagttgtaagtttagctatgatctgaaagtgtttaattaaaaggacggcaagcttacccactcctcgtaggtgttcagtgtgctgttgccctcgtgttgcaagtcccacaggtcgtcaagt

SEQ ID NO: 29213 - DNA, 967 bp, DROSOPHILA
agctgaaccacggcggtcggacgtcgaaagatcttagcgcgccgctgtatccgaaagatacgcatctgaaacaggctgctggccatatagccttatatgtaaggcctctgatgcactctactgcgcgttgccttcgtacatcttaacagtcggtctccagccgcatctacaggttgattgatccacagtaatcatgggtctgggcgccactacagtgaagcatgtgctgcttttgctgaactttgtgttttccgtgctcgggctggcgctgatcgccttcggaattttctttttgatctccgccgctgagaatgcagtcagcattgggaaaaatgtggccgggggcctaatcatcgccttgggcgttgtcatcctcatcattgcgatcttcggctgcctggctgccatccatgaggctcctgtgaggctcctcatatatgtgggagccgtggtgctgctgatcctcgcccagctaatttttctcggcatgtcctcacacggcaccaaggatggaatctcgggcagcatcaacgagggattcgaccgtctctgggaatcggagcgcaaccaaacaggcgccttgagctactacgagtcctggctgcagtgctgcggggtcaacagttccgaggactactggatcatccatcatggcattccgtccagctgttgtccagaaagcaagtgcatggacactccgagcagggtcttcaagacgggctgcaaggccgcattcgtgaagtatctggacgataagttactggtgttcaaaatcgtctgctggttgcttgtcatcggagaggctgtgggagctgttttcggttggctgctctacagcagcgtaaagaaccaaagccgccgcaacaatgccgtctggatcgtagtaaccgcacagtactccacgatactcatgctgaggtccttgctctcgcaggttacattggtgaacctcatgaagactccctga

SEQ ID NO: 29214 - protein, 257 aa, DROSOPHILA
MGLGATTVKHVLLLLNFVFSVLGLALIAFGIFFLISAAENAVSIGKNVAGGLIIALGVVILIIAIFGCLAAIHEAPVRLLIYVGAVVLLILAQLIFLGMSSHGTKDGISGSINEGFDRLWESERNQTGALSYYESWLQCCGVNSSEDYWIIHHGIPSSCCPESKCMDTPSRVFKTGCKAAFVKYLDDKLLVFKIVCWLLVIGEAVGAVFGWLLYSSVKNQSRRNNAVWIVVTAQYSTILMLRSLLSQVTLVNLMKTP

SEQ ID NO: 29215 - DNA, 3045 bp, DROSOPHILA
tatcttttagcaagtctgcaagggcaatgagtagaaatcagagctacttactatgaggagcctcacaggagcctcatggatggcagccaggcagccgaagatcgcaatgatgaggatgacaacgcccaaggcgatgattaggcccccggccacatttttcccaatgctgactgcattctcagcggcggagatcaaaaagaaaattccgaaggcgatcagcgccagcccgagcacctgtggaaaacgagaaaaaagttaggttggcatatataatacttactagtatcgctctcaggtgtgctactcacggaaaacacaaagttcagcaaaagcagcacatgcttcactgtagtggcgcccagacccatgattactgtggatcaatcaacctgtagatgcggctggagaccgactgttaagatgtacgaaggcaacgcgcagtagagtgcatcagaggccttacatataaggctatatggccagcagcctgtttcagatgcgtatctttcggatacagcggcgcgctaagatctttcgacgtccgaccgccgtggttcagctgtgcgaatcaactggcagcgctgtgagatggaaaccgaaacagtgtgttttgttttgacttaaacaacgaccgactcaccgatcgctcattcattctatctataaatcggttaatgaaaatcgagagcgagaatcgcccacttgcgcgagcttttcttgtttatcgccgatccccacacgtttagattcctgctggccaacgaaaatctcttgtaaaagtttagtttagtcaatggcaacgggtttatttattttcgtttcgaattatttcgtgggcgtgggtgccagtttacagttttatgaatgaatacttggtatctgtagcctaacttggttaatcatcgtaaactacaatcacaattcgccagggccgtatggctaggaaattactcacaacaaataacgataatacggttcgtgcaaatccctaaatactatcttaattatagaatcttatgcggtcgcgatgattgcgaatgctgtctaccaggtagcaggtggtcaccgagccagcgaactgcaaatacaataagttaatataataaacataagtatgtaatgatagaaagatacgggcaatttaaatattttgtaaattactttgtttagattgagaaccaagcaaaaaccaaagatgctagatggtagttgagaaactctaaaactgtctacttacctcaaagataacaaggaaccaacttagcgagtggaagttggctgtctttgcgccgacatactccttgaacttgacttcgcagcctgtcatgaaaagattcagatgcttggtgcagtcccgattgagacaacaactgggaggaggcatcttctccaagtgcaggtagtcctcggcactgttgcggccacagcagtgaagctattgagttgtaagtttagctatgatctgaaagtgtttaattaaaaggacggcaagcttacccactcctcgtaggtgttcagtgtgctgttgccctcgtgttgcaagtcccacaggtcgtcaagtccctgcctcaaagaatccggtaggaaatctcggctggcggcatagcttatgctgaccaatacaatctgaacgatcaggagaaacaccaacaaaacggcgtactatataagaaagttataggaaaggtgagttatacaggtgagtcatagaatcaacgtcgagtacttacgcagatcaacagcaccctggagtccttggccacagccaccgatccgaaaatgctggccaccacgatgacggtgcccagcaggacgcagagaacggcggccaggtcctcaccgtgatccattcccagcatccgctgctcctcagagaggctatccagcagccaggcgccgtaccagatgagcaggcagccacctagctaaacaaaggccacaatccctttcaatgtcagccgatcgggtctatttcgggcacttacggcacagatgccactgatgacacacagaacgtatctgagcagtcgggtggtgcagtacatggcgcagctagctttcgattttcacaattttcatgcgagtttttccgtcggcgttccaaggcgcacaccttgagcagtgccatcaaaatatagactaaagtcgcataatctccatttgtttgcctggggcgactcgcagagctgtcgccggcaaccgattaacccacagattcgttggctgcttcggattctgtcgccatcccgtccggtccggcccgatccgatccgacccgttggccagatgcagtggccaaataaatgccagggggaaatcaaaggcgagcacggtccgcagcgaataataccaatgaaaacaaccgaccgcccacgcgctctacaaaaatgagccagcatgtggccaccctcaccttttggccgccactcccctcacctcattatcataggaatgatgtcaaccgatctttagatcttcagatcttctggatcttcggccagattctttatttgacttgtctcctcgaaatgctgttacagaaaatttgtggcttaggtcgagcttagtgtagattaagttacattctaagcggaatatagaatccgcttcaacattgcagttatccaaagtgataaatagaatacaaacaacgcactgctttcggtttgcttggcttaagtaaatttgttttggaatctctatcgagtttcggcttaagtatttgtatggagagttctttggccttaagtatgcgcagcttaaacttgaattttcgaaatgcatttcaatgtatttcaaaatggtatgtgaacctatttctgatagtacttcgagcgtcgccagcggttcacgatgctattggccaggacataggccaacagggcgcaaatcagctgtgaaggaataattggttttcattattgaacatcatctaactctcaataactctctacccacctccacacccaatagcaccagggaaaccagattaaatgtcgtccaacgatcggcgataaagtccaggaacttttgccggcatccttc

SEQ ID NO: 29216 - DNA, 696 bp, DROSOPHILA
atgtactgcaccacccgactgctcagatacgttctgtgtgtcatcagtggcatctgtgccctaggtggctgcctgctcatctggtacggcgcctggctgctggatagcctctctgaggagcagcggatgctgggaatggatcacggtgaggacctggccgccgttctctgcgtcctgctgggcaccgtcatcgtggtggccagcattttcggatcggtggctgtggccaaggactccagggtgctgttgatctgctacgccgttttgttggtgtttctcctgatcgttcagattgtattggtcagcataagctatgccgccagccgagatttcctaccggattctttgaggcagggacttgacgacctgtgggacttgcaacacgagggcaacagcacactgaacacctacgaggagtggcttcactgctgtggccgcaacagtgccgaggactacctgcacttggagaagatgcctcctcccagttgttgtctcaatcgggactgcaccaagcatctgaatcttttcatgacaggctgcgaagtcaagttcaaggagtatgtcggcgcaaagacagccaacttccactcgctaagttggttccttgttatctttgagttcgctggctcggtgaccacctgctacctggtagacagcattcgcaatcatcgcgaccgcataagattctataattaa

SEQ ID NO: 29217 - protein, 231 aa, DROSOPHILA
MYCTTRLLRYVLCVISGICALGGCLLIWYGAWLLDSLSEEQRMLGMDHGEDLAAVLCVLLGTVIVVASIFGSVAVAKDSRVLLICYAVLLVFLLIVQIVLVSISYAASRDFLPDSLRQGLDDLWDLQHEGNSTLNTYEEWLHCCGRNSAEDYLHLEKMPPPSCCLNRDCTKHLNLFMTGCEVKFKEYVGAKTANFHSLSWFLVIFEFAGSVTTCYLVDSIRNHRDRIRFYN

SEQ ID NO: 29218 - DNA, 2078 bp, DROSOPHILA
caactagatatttacttatatatgttcgttagcgtgtacacagaaaacagaaatagatgacgatctatttgaataaaatggaagacgcggtggcccatgctagttataccccttactcgaaaaaatagggtatgttgtgcacgtgagcaaggaacaaacatttcctaaaaacaccacgatatcaacataagctgacttatctgctgaaatacagaacgacgattgtactgatcctttaataaaacacttcattaaaaatatcatattttttccaaaaagtgcaacaggcttggaaagctaatataccctgattactttgagggtgtgtcgcatctcatagtaatagtactctgactgcagcattctcgctttttttattttatttttgccagtagaaatattcggtttataattaatttccatttgaaacgttcatcgtgtgtatttattttttggataccaaagcttttctatgtgtgagcaacataaccggcagttttatttttaaatataatatcgtttgtataatttatacaagcaaaccacaaatgtgccccacaatgtgtgccccaatacgttactaatcaggtgtgtgcaactatatggataactaattaggttagaatagtaacgaaacacgacccaaacacgctaaatataatgtgtttttcaataataacagaatgaagtaggtgcttgactttggttcgataaatttatttaaaagtatgttgaaataaataaaactaaatctattttacttttcttaatcttagttgtgagttgccctctgtatttcactgaaatcaacgtgtgaaaagggatcatttcagtgcactgtgctgattaaatgagtttcaatttcgaaaatataacagcaataccccagtcttgaataacgctcaagacctgccaagccaattaattaatagtgtaatattcttcagaaatttaacaagtcgactgccaatcccagttgagtattttcaggtttcactgtctaaaagtaagaacgtcgagcatcgttgcgaatgctgttgcacaggcggcaagagatgacactcagcaggagctgcaagagatggggacattttaaaaacagcgctcagtcgttcgcttttgggacacccacctcgaagccaatgagtacgagggccaggatgttaaaaatcttggtcaagtgttgccagtagttctcgaactccacccgacagccggtgtggatcaggttctccggcttgctcttgtcgtggtttcggaaacatgtctccggcggcagtcgttcgttgacgatgtaatcctggggacttccacgaccgcagcactggaactacgggtatatgggtgattatcagtgtttatgactctaactagagccctgctgtcaactcacccagttctggtacagcgacatggcaccagggctgttcagttcctcctcccaggtggcctccagggcattagccaggttggaggccaccgtcttctcctgggtgatcagcaagtagacgacggcgaactgggcaatgatgaccaggcacaggaaaataatgaactgcaaggaaatagaaccgtataccaccatgcttaacagtagacacccatccttgacttaccgtcactgtgcagcacacgttctcgcgccaggcggacaggtatccccaaaggacaaccagcagggcagcagccccgagtcccacgtagccgtaggccgtcagctgaccgatctcgtttaggttgtaggacaccgccacatagatgccgaaggatatcagcaccaaggctagcagctgtgggatcacaagtccaatattagtagggaatcttgggagcttctcgaacggaatgagcattctgacctcattagaaatacatatatgttgttcgtttagctcaagtaatacaattactagtaccgaagaccgaaatgaattgtctgccttaaatttatctgataagataagaatacgtgcgtacatacaacacgatttaagttcaagttgaagactttcaaaaagattacaataaatcaagattaattacatgtaaagggtaacactttatcataaatttgataa

SEQ ID NO: 29219 - DNA, 669 bp, DROSOPHILA
atgctcattccgttcgagaagctcccaagattccctactaatattggacttgtgatcccacagctgctagccttggtgctgatatccttcggcatctatgtggcggtgtcctacaacctaaacgagatcggtcagctgacggcctacggctacgtgggactcggggctgctgccctgctggttgtcctttggggatacctgtccgcctggcgcgagaacgtgtgctgcacagtgacgttcattattttcctgtgcctggtcatcattgcccagttcgccgtcgtctacttgctgatcacccaggagaagacggtggcctccaacctggctaatgccctggaggccacctgggaggaggaactgaacagccctggtgccatgtcgctgtaccagaactggttccagtgctgcggtcgtggaagtccccaggattacatcgtcaacgaacgactgccgccggagacatgtttccgaaaccacgacaagagcaagccggagaacctgatccacaccggctgtcgggtggagttcgagaactactggcaacacttgaccaagatttttaacatcctggccctcgtactcattggcttcgagctcctgctgagtgtcatctcttgccgcctgtgcaacagcattcgcaacgatgctcgacgttcttacttttag

SEQ ID NO: 29220 - protein, 222 aa, DROSOPHILA
MLIPFEKLPRFPTNIGLVIPQLLALVLISFGIYVAVSYNLNEIGQLTAYGYVGLGAAALLVVLWGYLSAWRENVCCTVTFIIFLCLVIIAQFAVVYLLITQEKTVASNLANALEATWEEELNSPGAMSLYQNWFQCCGRGSPQDYIVNERLPPETCFRNHDKSKPENLIHTGCRVEFENYWQHLTKIFNILALVLIGFELLLSVISCRLCNSIRNDARRSYF

SEQ ID NO: 29221 - DNA, 3995 bp, DROSOPHILA
gctgctgcttgaggccagtggcgataaggctttcagaagcatcccattatcaccccgttctctttggcgcccttccgaatgcgttgcccgggcaacaacaaaggcaataacaaatgcagcgtgcccgctgcggcaacaacaacaacaaaaatgcggacaacagacaacgaaggccgcgtcaatgggactcgaagattcaagtggggaaaatgggaaaagttcactgcactttgtcaaggagaagaggaagcgcagcatacgcgccgcccgactcccttgcacaacacttttccacacgtactacgcagtcttttgttttcctgccttctccttctcctcgtccttttttgcactgcttcttcttcccaaccactttttgcggcgtgcagcatcatttgcttttgtgctctggcgagctgggagcgccaaacgaacaccactcgtttccgtttgcagttcgctggctaattccgagaatctcactagctttaattggtctagtttagagagcatcattaccttcgactttaaattatcaccaatttatattccaacgaaatacgcgtccgttcaagtcgaacagctttctgttagtcagtgtgaccgtggcggagcgctcttataacctccgattcgccaaaacaagccctaaatatgccagcaaaagtcagcacagcaagagaactttgataaggagcggaacttcggtaaccgcctttcaattgcacatttccactagattccattgagctaacaccttgttccaactgagccacattaagcacatcttgcagataatctctaaattcctttaaaatcgttatattattaagttttactacacattattgctaagtgatttagtatatcgatgttattcaactagtttctcatattatgtatggttcgtctttaacttgtttaatatgaaattaataattttttatcaatagacctcaaaacctactattcaatttgatacctaggtactttttgggaaatctctaccactgcagcaacgcttttcttatcgccgctaaattcagagctaaaatctaacagagcttttcgcgataggaaatgcgctcataaaaatattgttatatatcagactttttcagtatcaagcggaccacgaacgaaatcgcatcgaacgtcttactcttaaatcgaacacaagtgatacacaagtacatctcagcaatggattgcggcggcgtttttgtgaaatatgtgctgttcatattcaacatactgtttgtggtaagactctaggttctcaagagatatgtacatagatcagcaatagtgaaaaaacgggtggtatcttatctggcaaacaatgaaaaatgaactctcgaagctcaagatttcgtccaaagagccatggatactcctttcaaaagttatcttatcgaaaaatactgggaaaagtggttggaagtggttagaaacctgacattctttaaataaatcattgcatgccaatgccgaacgtaattacggctaatgagccgaaacagttgtcggaaaacacattgtactcggaaagataagggcatgagtaataccatacgttcgtagacaattttcagaaccatccccctcaaagatcttgggaccacatagtattcgtgatgaaattgtttacagcctcccagcgacgcaagcaatgcgtcgatcgcaaatcacaatgcaaaaacacaggcgtagttatatatatatcaaatgctagttaggtttggatttttacataatggacaatcaatccggtctaatgtgaacacaataaaaatgatgtggtcttcatatgtacacatattcatattttttgtgactctcatttccctccacaaacggagtaagttttgcggtcgaagacagttagttggaacttgggcggggtgactgttatccaataggcctgattcaccacccaccatgagtggtgccaaaaccactgactaactagcacacactcttcgtttttccaaacgtagatatgcggcattttgcttatcaccttcggctccatcatggtgtccaccataaaggacttctcgggcgttggcgagaccttcacggcaaacagcgtggccatcatcatcctggtccttggctgcgtagtcttcctggtagccttcatgggatgctgcggcgccatacgcgagaattcctgtgctctgacctcggtaggtgcccatgatacatgccctgctgggtgcaacatttgaatccaacttgctccttcctgctttcagtactctgtggtcatgctggtgctgttggttagtcagctagctctcattatctacgtgtgggtggaccatgtgcagatacagcaatctttggagaagatcgtccagaccatatgggatcaacgcaagaccgatgccctcctcatggacacactgcagcgatcggtgagttctgctgaccctcaagcattacattgtgaattctttttgttatttacttcatattcaatgaagattgtctactgttgttccacattcataaagatagcttaaccgagaatatactctgattccagttcaagtgctgcggcttgaacggcttcgctgattacggcattacgtatcccgcctcctgctgcgactcgccctccaatggaacctgcgcactaacccaagtcatgacgcgatccagttgcctgaaggccgttgattccttctgggacaccaacgtgagcatcatcaagtacgctggcctgggtgtgactgctgttgaggtgaggattgcgtataatgttctttgaattcgccaaactgaatggtacttttttcagcttgtggccttcattttcgcctgctgcctggccaatcagacccgcaactcgcagagacgccagaactactaaacgatgaaacgatgaattagtagcatagtattaggattatctcccgaccctctttaacgtcataaagtcaatatgaataaataaaacaaagtgcttcgcatgcttactgtatataattgcgacatttgatagtttatggtccaaacaaagacatttcacgataaggttaaaataaatatatctcgactaatagatacttcttactaagccaatgagagtgcaagggagatcgagatatgaaaacagcaaaacaactgcatcctaacattagtatctagaatgatggagtatgggaacgataggtgttgacttaataatactatatttactagcaagaaaaagtccacatcatatcttggttttgtagtttcatgtgatttttggggaaaactcgataactctaagaaacaaattcttttcactatgtggactaattaataaatggtaaagtatgtattctttaatataatcaacacaaatattttgaaaatatatatatatatattctacattaacgcaaagcaataattatcatatttgtcttctctttcgaatataacaaattgtgttgataagcaaaacatctacatgccaatgtcagtttggttttcaaaacattgatcaacgcaatgttaaaaaaatcgtgccttctagtcgaaagtcaaaaatatttggtgaatgtatttcttctttttagatcgctattcctgactttttcaaacctattttaaagccggcgtaaatccagtaatatgcatattaaagctgtgtgaatatcagttggataaatcaatcacaagttgaactcttgcaccttggattcgttaatcatttgtcaatgatttagtcagggttacaaagctattattaataataataatataataatataataatattatttgatttcgtcttggattggctaattctctttgaaattagtattagtagcattatctagtcacaattgaaatttctatttgaaagttgagaatgtcacataataaattggagaaattgttaaatgttacttagttggagcgattggaattttttggatatgttccaaatgttaataagggaaatttaatgttatcacattcaggtcaatgtt

SEQ ID NO: 29222 - DNA, 965 bp, DROSOPHILA
atctctaccactgcagcaacgcttttcttatcgccgctaaattcagagctaaaatctaacagagcttttcgcgataggaaatgcgctcataaaaatattgttatatatcagactttttcagtatcaagcggaccacgaacgaaatcgcatcgaacgtcttactcttaaatcgaacacaagtgatacacaagtacatctcagcaatggattgcggcggcgtttttgtgaaatatgtgctgttcatattcaacatactgtttgtgatggtgtccaccataaaggacttctcgggcgttggcgagaccttcacggcaaacagcgtggccatcatcatcctggtccttggctgcgtagtcttcctggtagccttcatgggatgctgcggcgccatacgcgagaattcctgtgctctgacctcgtactctgtggtcatgctggtgctgttggttagtcagctagctctcattatctacgtgtgggtggaccatgtgcagatacagcaatctttggagaagatcgtccagaccatatgggatcaacgcaagaccgatgccctcctcatggacacactgcagcgatcgttcaagtgctgcggcttgaacggcttcgctgattacggcattacgtatcccgcctcctgctgcgactcgccctccaatggaacctgcgcactaacccaagtcatgacgcgatccagttgcctgaaggccgttgattccttctgggacaccaacgtgagcatcatcaagtacgctggcctgggtgtgactgctgttgagcttgtggccttcattttcgcctgctgcctggccaatcagacccgcaactcgcagagacgccagaactactaaacgatgaaacgatgaattagtagcatagtattaggattatctcccgaccctctttaacgtcataaagtcaatatgaataaataaaacaaagtgcttcgcatgcttactgtatat

SEQ ID NO: 29223 - protein, 215 aa, DROSOPHILA
MDCGGVFVKYVLFIFNILFVMVSTIKDFSGVGETFTANSVAIIILVLGCVVFLVAFMGCCGAIRENSCALTSYSVVMLVLLVSQLALIIYVWVDHVQIQQSLEKIVQTIWDQRKTDALLMDTLQRSFKCCGLNGFADYGITYPASCCDSPSNGTCALTQVMTRSSCLKAVDSFWDTNVSIIKYAGLGVTAVELVAFIFACCLANQTRNSQRRQNY

SEQ ID NO: 29224 - DNA, 3982 bp, DROSOPHILA
ctttcgaatataacaaattgtgttgataagcaaaacatctacatgccaatgtcagtttggttttcaaaacattgatcaacgcaatgttaaaaaaatcgtgccttctagtcgaaagtcaaaaatatttggtgaatgtatttcttctttttagatcgctattcctgactttttcaaacctattttaaagccggcgtaaatccagtaatatgcatattaaagctgtgtgaatatcagttggataaatcaatcacaagttgaactcttgcaccttggattcgttaatcatttgtcaatgatttagtcagggttacaaagctattattaataataataatataataatataataatattatttgatttcgtcttggattggctaattctctttgaaattagtattagtagcattatctagtcacaattgaaatttctatttgaaagttgagaatgtcacataataaattggagaaattgttaaatgttacttagttggagcgattggaattttttggatatgttccaaatgttaataagggaaatttaatgttatcacattcaggtcaatgttattgtcttaacatatgcgtaacataacagcaattctccaaaattttccaacttatggaaaacattagggcaatcaaaaaaaaaaaaaaaaaacagcctaagtgtatgcctcaaatactgcacattctgtaggaaaacatagatgaacaaatatactctttagaagttttaagccagttagaaaaatcataattggtaaaataacccatttatccttataagaaagacgagtaatggtaaatgttgtagcggtatatattaatattggcattgctccaaaaagagtataaagaataacataagtagtaactgataaataggcgaaatgtagacgtatatattaatattggcacggctcgaaaaacagtttgttatatggtaacataagtagacatatgtagatcctttggcctttggcttgttcctcacaagtttaggcgtacacctggcgacctgcgttctggctgcgcatgcagttggtcagggcgccggcgatgaggaagacgaccaggtcgaagatgcagaggccgaggccggaccagcggatgatgtccatgttgtcgttccagaactcctcgaacttggcgctgcagccgggcctcgactggtagaccgagggggtgttgcatgtggcctggcggtccaggtagccgcagcaggttccgggaaccgaaaggccgatgttgttgtagttggtatagctcgtatcaccgcagcagccgaaggtttcctcaagaacgcccatggcagtgtagtcatgggagtcccagagcaagttaaccagattggacatatcgcccaggaaggcagatcggttcacgaacacccagcacgtaagcaccagttgcaggataaagagcacaaaaaccatgctggtgtactgcaaagcattcaacttcaattagctcgaattccttgggatatgctcttcacgcaaacttaccgcgccggtcatgcagacactctgccgaaaaatgccgtagcacccgaagaaggacaccacgaagatgaggcctcccaggacggtgacgcagatggggatggtgttcgggtccgtcccactccccgcgacatcgaagcggctcagatcggacagcatgatcgagcccaacacgatcagtaggatgccaacgatctggaagtattcggagtattactagaaggcatctctggttgcctaacagttttatggtcataagcataccacattataatgaatgttttatggacttctaattatccgggaatatctatgtactgaaaacttgtccgcaaactggactaagatatgagcttttaaaatagccttcaggatgtcggtgaccaagatttacttaaatttcttcatttgattctttaagttgacaaagtgattaacaaagtgaataatcaagtcttatacttgcatacaaattaatgaaattcacaatcagacggatatggctagtttaaaaacgtagctgataaaaaaaacaaacgttaatcacctttatcttgtttttggcataattcttaaggtgaaaaatgtatcttttagctgcgttaatactggcgagtaactacacatttatttggataaataataaatcatttgtaaataatagtttgttggatttccttagtttattctctaaatgatcttttattcactccaacttagccttgctaaaatgtgaacttgtgtgcatgtgtgccccctttgaagctcattttgggctcattacttatattacaaaacactgataatgtcaatcaactgataaaattctgtatgtccgtccacacttgcattacagatagatattattatctatgccagcacatttatatgaataatagtgttaaaccttgtgactcaaagacaatcgaaaggaagcgaccgatgcgtaatttatggattttcaaatttcatttcacttgttttaaataatacatgttcgatatttgttgcacaaatatttattgcatatgacttgattaatgaatgacagaagtcagctagaaggtcttatatgcaaataaataaacatctacagtttgataaataaattaacataattaatggacattttttggaagttcattataacacaagtaattggagagtatgaagttatccataattggaacctatttgggatctgcacccagtagtgtttggtctattgttacacgtctcattacattattaattccttttacttagatactcaaccgacaagcacttaccaaaaacacgatattgacaatatataaaataaagttgactattcccgatagacaacccattttgaaagtatatagtttgctcctgtatttagtagaattaaataaacactattgttttatccaaaggagttgtcggtgtctctgattttatcgcgcactcgcgtcgtttactgtcgttcgattggactgctcctccagatgggctactgtttttaaattggccaacagacacgggcgctatcggaggaaagatacgcaagtgcctgttatcataatcatggccgaaacgaaaaatagataatgggcactgggcggcgggcggagatcgatagccattgccatatggaggtgattcaccactactgagggcattcgatctcggaaacgcggcactcggctaacaggccgataaggacatactttttggaaaaacatcaacctgtcttgattagatagacggcagccagaggtagacagcgaataagcaataatatttcattgggcttaacctattctggtttatttacggtgagtgagtgagtgaggaattcgtgtgttggatttatgctatgaactgggctacgtctaaggattgtatctgacttcggctctagcgcttcctcatcgcgctggccaggcagcacgacatgatgaagatgcccagctcgaagagggcgatgatcagactgctccatcgaatcaggtccgtattggaggcccagaaatcgacgaactcctgccggcagccaggtcgctggctgtagatctccgcttcgcacaccttggtgcgatccttgtagccgcagcaggagctgggcacggtttcatactgttggtatcccgtgttgccacagcaagagaactgcaatggaatagatacgtaaatatccggaaaaaactaatgacatctgatggtgaatttcgataaacttacggccaactggagggcatccatggggtatccctgggcggcattgttctcatcccacgccttgtccactgccttgcccatgctggacaggaacttgtcgttggccgcgaagatccagaatggagagggccagttgcaggccgaacagaatcagcatgcagatggcgtactgaaaggaatgccaagtcatttagaatccaatttcggtcagtgggtgatttccgagtgcttacgatggtggtgcagcaggcgttc

SEQ ID NO: 29225 - DNA, 825 bp, DROSOPHILA
tccaatcgaacgacagtaaacgacgcgagtgcgcgataaaatcagagacaccgacaactcctttggataaaacaatagtgtttatttaattctactaaatacaggagcaaactatatactttcaaaatgggttgtctatcgggaatagtcaactttattttatatattgtcaatatcgtgtttttgatcgttggcatcctactgatcgtgttgggctcgatcatgctgtccgatctgagccgcttcgatgtcgcggggagtgggacggacccgaacaccatccccatctgcgtcaccgtcctgggaggcctcatcttcgtggtgtccttcttcgggtgctacggcatttttcggcagagtgtctgcatgaccggcgcgtacaccagcatggtttttgtgctctttatcctgcaactggtgcttacgtgctgggtgttcgtgaaccgatctgccttcctgggcgatatgtccaatctggttaacttgctctgggactcccatgactacactgccatgggcgttcttgaggaaaccttcggctgctgcggtgatacgagctataccaactacaacaacatcggcctttcggttcccggaacctgctgcggctacctggaccgccaggccacatgcaacaccccctcggtctaccagtcgaggcccggctgcagcgccaagttcgaggagttctggaacgacaacatggacatcatccgctggtccggcctcggcctctgcatcttcgacctggtcgtcttcctcatcgccggcgccctgaccaactgcatgcgcagccagaacgcaggtcgccaggtgtacgcctaa

SEQ ID NO: 29226 - protein, 232 aa, DROSOPHILA
MGCLSGIVNFILYIVNIVFLIVGILLIVLGSIMLSDLSRFDVAGSGTDPNTIPICVTVLGGLIFVVSFFGCYGIFRQSVCMTGAYTSMVFVLFILQLVLTCWVFVNRSAFLGDMSNLVNLLWDSHDYTAMGVLEETFGCCGDTSYTNYNNIGLSVPGTCCGYLDRQATCNTPSVYQSRPGCSAKFEEFWNDNMDIIRWSGLGLCIFDLVVFLIAGALTNCMRSQNAGRQVYA

SEQ ID NO: 29227 - DNA, 3150 bp, DROSOPHILA
ttatattatcgtcaagataaactaagcaaatggtgccgttaagatcgcggacaacgctgtccataacccgttgaaaggtagccggtgcgttttgtaagccgaagtcattcgtatgaatttgtgagacccccttcgagtgtaaagtctgttttggcgatatcttcttgtttcatctcgatttgataaaaaaccgatagttaggttgagcgttgaaaaatattttgccttgcatatgctaatatgtcatttatgtttgggatggggtatctgtccgaaatggttttgtcgttgagtttccggtagtctattacaagtcgctatttcctatttcctgttccgtccagtttttttgggacgctccaaggggatggctagatctaattatttgttggtctaacatgaattcgatttgttttttgacttctgttttatggacaaaaggatatctgtaggattttgcgtggagaggtgtgttgtctatggtggggatggagtgtgtgattttgttggtgacgtacgcgctgttataaaaaataattaatcttttgaataatcttttaacttacagccttgtggtctggcacagcaagtaataagaatatgttttacgacgcttattcggagttgacgagctgccgctctttattctgataaatgcaaattcaaactaaaacttaaaatgattcctttagctaacaaagactagcagcggccacgcaaatatgcccggctgcgcacgggtatccggcccaatgctgggacagcacttttatattatgtttcatgcactgtgccaactgttctaggacgttggcttgtgttaacttgcacacgtatactcatgcattgtaaattcgacaaaatatgcttttcaccttatatgtaaaaaattcttgtttcgcttgcggcgtgtaaaaaatgaataagacactgattgttgaatgcttgtgtccgcacttcgtgcctcaatatatgaccaaagcaaagacactagaataattcaaagcaagctaagctcagcattctatatcacaaataaaaaaattagcgatatataaataattgacgactgaaaaatcgagcaatatataataaaaaacaattgttagaaaaataacttaattggggaacatggaaatgttttaatgttaaacattcaagtcgactcgaaggtcttatatgtaaatataggaccccattacaattgtaatggtctccccgtggtgttgctggttctcattttaagtttgacaagagaccatagagataaaaggtaatgcaataaataagtcctgaatttcaaataaaaaatgtgtgtacccacctttggagtcattaggcccagtcgtaccccagtcattagatgggcaacatggcgcttgcggctttctggattacggtcgatccatttaacacacaatttccatacgtgatcctcttcgcgggtatttaactcatcatcgctaataatactgtaaaagtcttcagctgacatatctagtatgtcaatattacgatatgcaacttcagtaaagtaccttagagtgtagttcctggccttcaggtgaaggtcctccaaaaatcggaacctacgtaaaacaattaaaagggtttccttacgacaattagcgaattaaacccaccgtgcgaatcccataatactgacacagttttcgggggtgagtatgcgaccgaggtagtctttacatttcttaactaaacctaccatgccaacgtagtcagcgcagataagtaactcatgaacattgctctcggagatgtttgtttgacgcaggtaagcgtactgtattacacagttcattatacatgaactcacgccggggatatgaataaaattattgtttttttttgcatctgacccatctacacatccgggagtgtcagcgttaaaccctgtgaattgagctctggtgggaatacgtgttatcttcacaattcagggtgaagttattaactcaccgaaagtatgagctacatgaacacattattgcacgatgtacgttgaacacatcctcccccacagaaatctgggcgtcgcagagaagattttgctcgcggagctcatttagcgtgttcagggcctcgtcactcacaatgggagccaaagattttgtgtgcgcattcaaaatggttttacggccaataccgagcgtcttgtcctcggggctattgccgtctgcgttcagctgcaacgaatccattgagacggggggcagagcaagagcaaaaggcagatcttcattgatatcaaggaggttgctttcgttttgattacgactcattagaagaacgaggtgaagtccaacccctttactgtgttcgatgctgaaccgtgtctatggggtggaaattaggcacatacgtaaataaaataggtgggatctgtaaatggttgttacctcgcgttctaataatttttgtttttactgtgaaaagaagtaccttcgtatttaactgcaggaacaggaatattagtcaatgtaggaatagcaacaataaatttatgggggaaaacaaaatgactgctaagcctaaacaaaaatgattattatcataaatagggttaaatacgactttcagttttataaatgtaacatggagtaaggctgaaggctggcaacaacccggttggcagcgctgttgagcagcaacatgattgtcggaaatcgaagttatcgacaatcagtcatcgaaggaacgatcgcaaggcagcagtggtgtggaagtcagcgtggcagtcagtcgagttctcagcagcagtcgttcggtcacaaactaagaatactttatataattaccgcatttagaattaaactaataattaaattaataataaacaataataataaacaatcttacatgggggctcgtccagtcctaaatcggttatatgaaggtgcagttgtttaaagaaaaaagacattgttgtgtgcgtgggtatagtctttaaaagttgtaaagttgtggctatatctattgcatttaaagttggaaaaatcagttgtacagattttgtttgaacacaagtcggtaaaagtcgggaaagctgctagagagaactgataaagttgaaattgtcgtgtgcgtggatttagtctttaaagttggaaagttatggctacgtctact

SEQ ID NO: 29228 - DNA, 951 bp, DROSOPHILA
acacggttcagcatcgaacacagtaaaggggttggacttcacctcgttcttctaatgagtcgtaatcaaaacgaaagcaacctccttgatatcaatgaagatctgccttttgctcttgctctgccccccgtctcaatggattcgttgcagctgaacgcagacggcaatagccccgaggacaagacgctcggtattggccgtaaaaccattttgaatgcgcacacaaaatctttggctcccattgtgagtgacgaggccctgaacacgctaaatgagctccgcgagcaaaatcttctctgcgacgcccagatttctgtgggggaggatgtgttcaacgtacatcgtgcaataatgtgttcatgtagctcatactttcgagctcaattcacagggtttaacgctgacactcccggatgtgtagatgggtcagatgcaaaaaaaaacaataattttattcatatccccggcgtgagttcatgtataatgaactgtgtaatacagtacgcttacctgcgtcaaacaaacatctccgagagcaatgttcatgagttacttatctgcgctgactacgttggcatggtaggtttagttaagaaatgtaaagactacctcggtcgcatactcacccccgaaaactgtgtcagtattatgggattcgcacggttccgatttttggaggaccttcacctgaaggccaggaactacactctaaggtactttactgaagttgcatatcgtaatattgacatactagatatgtcagctgaagacttttacagtattattagcgatgatgagttaaatacccgcgaagaggatcacgtatggaaattgtgtgttaaatggatcgaccgtaatccagaaagccgcaagcgccatgttgcccatctaatgactggggtacgactgggcctaatgactccaaagaatgctgagcttagcttgctttga

SEQ ID NO: 29229 - protein, 271 aa, DROSOPHILA
MDSLQLNADGNSPEDKTLGIGRKTILNAHTKSLAPIVSDEALNTLNELREQNLLCDAQISVGEDVFNVHRAIMCSCSSYFRAQFTGFNADTPGCVDGSDAKKNNNFIHIPGVSSCIMNCVIQYAYLRQTNISESNVHELLICADYVGMVGLVKKCKDYLGRILTPENCVSIMGFARFRFLEDLHLKARNYTLRYFTEVAYRNIDILDMSAEDFYSIISDDELNTREEDHVWKLCVKWIDRNPESRKRHVAHLMTGVRLGLMTPKNAELSLL

SEQ ID NO: 29230 - DNA, 2280 bp, DROSOPHILA
cattctcctgctccgccgccaaaacctccacgacaggtacccaagtcccctgctctgggtaaagacgacattcgccatgccctccaaaactggcaactgaacctgatggcggacgcaggaaagtcaaaaacgacgcagtcgcgggaacaattcgaacaccgtggatcggctgacggtggctcttcctccacctctgcttcggccaccgactggagcctggcccttccggctgtgcccaagaagaccagcagcaagcgcagagagtcgcggaggcacactctgcaacacggcatcgattacaacatgctaaaaagactgaagcaattggaggagcagcgggaactgcttcttttcggactcgatggcgtggagaaggcacgcgattggtatatgatgcaggtgctcaatgtacaggagcagataaagtatttcggccgtttaggaacccgatttgtaagtagtcctctagcttgtaattaatagttacccctttcctgattttcgcacaggatcagtggtctgaactgcagcaagaaaggctaaactttcaacgcgcccgcgtttttgaggccaatcgcagcctccagattctggccgacacctgggagcacggcggctacccactgcacattaatttggctgtgccgacacccaccgtcccaaaaccgaggcagatgtccgatctgctcagtcgggttcgcgagaagccgccgcttctgtcagacttgtacgaggcgcagcactctcattcccatccgcagttcctgcgtgccatgcccaacttcgtgctcagccagccctcgccggtcagccaatcctcggccgggctgggagacgccgacgtggtctactgacgaatcaatgctgctgcgtacattgtaaatagtgtattattaaacaacttgaactatgtaaagctatacgggattggggtagcggcgcatgtacttgttaagttgcttgtagttcaggttgctgcccggttggacgattccctggttcacggtcttcttcgcctcaaacttacggtccatgtagcacttgtagcagttctggaactggctgatctccttgtggcagtacttctccacgaattcgttgtctttcaagcaggcgaacagcacgcccatctcctggagacaggccacatcggatccggagtccgccttcccgctcacggtgttcttcagccgcagaggcagaatctcctggaagggcacgtccttctcgctttgaggcgctcggccgcgcgcggcaaacagggctccgggtacgcgcatctgaaaccccttggctctgtgagtccggtcatttcagtcaaaaaatacgattttacccacctcgtaatttccaccgactcctggacaactgaacagctgcttcagattacgtcacgaactggttcctgcttttggtggtgattgccagtacgtctgcagccctggtatttcgtttaacataagcatacggtcacacttagagtctccgtggaacaaaaggtaaataatcaacctgcgggcacgccaggagattcttcaaggatcaccgaagaccacgcgcacatggaagccgccgagcagctcgacgaggcggcagcaccagccgccctttgcgcgccttcgcgtgcagcctacgcggccgccgagcaggaagatccagacccagaccaggagcaggaccgaggccgggaatcgcccattggttcgttggagtgcgcccccaccctgagcagtcgcaagcggcagctgagtcgctttcatccataccacgggtccaatatccagttgggcgacgacgccacagtggcctaccggagagctagttttgccgacgccctgacattctcggagcgtccgctggcccctggggacatcttcttggtggagatcgaaaagatagagcgcggctggtcgggccatatgcgtcttggtctcaccgaactagcgcccaatgtgattcgcaccagcagcgagggaaaaaaggcgcctcaggagaatctggtttttctcgcgcaacccaagggacaaggcagcactcaacagagccatcaaggaactcaaggacaagctgtgtaccctacggcaagactccttcgacagattccttgaggagctggaacctggtgacccgcaacataatctgtggcaagtcacgcgtcatatcaggaggcctgcaaagaaggcgtcgccggtgcgaaaagcggacggctcttggtgccgctctgaagccgaaagagctgaagcgtttgcagatcacctccagaatgcattcacaccattt

SEQ ID NO: 29231 - DNA, 280 bp, DROSOPHILA
atgcgcgtacccggagccctgtttgccgcgcgcggccgagcgcctcaaagcgagaaggacgtgcccttccaggagattctgcctctgcggctgaagaacaccgtgagcgggaaggcggactccggatccgatgtggcctgtctccaggagatgggcgtgctgttcgcctgcttgaaagacaacgaattcgtggagaagtactgccacaaggagatcagccagttccagaactgctacaagtgctacatggaccgtaagtttgaggcgaagaagaccgtga

SEQ ID NO: 29232 - protein, 93 aa, DROSOPHILA
MRVPGALFAARGRAPQSEKDVPFQEILPLRLKNTVSGKADSGSDVACLQEMGVLFACLKDNEFVEKYCHKEISQFQNCYKCYMDRKFEAKKTV

SEQ ID NO: 29233 - DNA, 2526 bp, DROSOPHILA
cctgcactcataccgttgtctttccggatccccgcggcccaaggagcagcaaggagttggattcccccatttcagctgtgcgttgcagcaataggcgcacattggaccgctcctttgcgtagcccctcaaggtggtgtagtctcgctggaggcgctccttcaggaagcgcctgatgctgaccagctccctatccgcctccggcattttcgctctcggatcggaactcctttattcctccttatttattagttaaatggacgcacagatagtttggatttctgccagtaattaagtcgcgccaaaaaacgtcaacaatgcattggggatggaacaaaaccgatattggttcatttaatgtacggtggtttggaactctgatactactcagtgttgccttaagccgcctgaaaaatatattcgtgccacaaaccaatacgatctaatttctgcggctttagcacattttgaaatatcaacattttagttcatacaaaatggacctacgattgaggaatatgtacaatagtaactctataaataacaatcaattatacatataaacatctttaaaaatatgaacaaatttctttattaatcgcatagtcgttggcattttgagggtcaatttgctggaataggtttatttggaatgctgtgtattttaaatgtccattaaaataagttattaaacactcaatggattctcagagattatttaatatcggctggcaatttcataacagcaatggatcgagtaatcacaattaataacttttggaatgcttcagcttttggcactcggtattgtggttattgtgatccagacctctttaggaatgagcggattgtggacttttctgctgatttttatgtctccgatggcagtaagaatcgaatgcgtatggctaatagatggcactatagaataattgatatccaaagatccgaggacacttcgaattcaataatgtagtctgcctcgtgcgcgacaggatgtttatggactttgagtactgttacttgaagtccgtgaaccgcacctacaagtacctttcgctaaaaacaaagatgttccgcctgcccgtcgacaactgcgaggtaagagtatagaactgtgtcggtctcacaccacccgaccatcttccagaccagattccagctgaggatgcgcgagaacaggcgagtcctgtacaactttgatttcaaggtggactcctgcaagttcatgcgcgaccgcaagcacgtgatcgccaactgggtctaccagaccttcggcccctactcgaacctgaaccacacctgcccctacgacgtgagtgagcgttgccatgttcatgccgcataaccttcgcctttctcacccacccacccacagcacgacatcgtgctcgacaagcttcccgtgcagcatctgaacaagctggtccagtcgatcatccccgatggcagatacatgatgaacagcacatggatggtcgcgggcattccgcgcaccgatgtcatcctatactttaccaagagctaaacagtcaaatccagtaatatccaggctcttcaacccgtaagcagaaatattggtaaggtgttatgccgttttagtattggatgggggtcagcaggaccaatatagtaaatatagtaagtctaagtgggtctgtatgtgatgtatttgtcacattactgagatttacgaaaataaatatagtgtagtgacgaaagttaacttaaacatgtacataggtttcagactaggccagttcgtaagcgttaacaattatgtgcagagtttctgcacaggtggctggcagtgacctggatgcactgcacctgtcgtctgtcaagtggctgctaatgcgattagggagcacacagaaaacgggattggcactcgggactggcaactcagctgccaatcaggtgggccagccacaaacttcacacatttcggacacatatatcaatccactccacaaccagaaggacacgaagtaaagtaaacacaaccccacacccctgacaagatgccggcggacatagtgaccacggagcagctgcgctaccagctcgccttcagtcatgccatggaaaggacgacgaggcactggcaggagaccttcgcgtggtaccctaagatgcagtgctgccattatcagcggattgaccagatctatctgacgagtcgccagcggtacggcgacggccacttcctcaagtacgccaaccgcaggcgcctggcaaagaagttcgtggttaccgcccaggaggttgcggaaggtttggaggatctgaagatgctggagcaagacggcattacgggcctcaaagttgcggtcaccgagaacggggagtacggccgaatgaagccctccaagctgtacatgtgctaggacaccctgtgaccagccggcccgctctgctccccaatcctcgccagaacccctcacgattaaactatcattctctgctgacaatgcaactctcaatggccgtcactcattacgcgattttagcatgaccgtgcgcat

SEQ ID NO: 29234 - DNA, 414 bp, DROSOPHILA
atggactttgagtactgttacttgaagtccgtgaaccgcacctacaagtacctttcgctaaaaacaaagatgttccgcctgcccgtcgacaactgcgagaccagattccagctgaggatgcgcgagaacaggcgagtcctgtacaactttgatttcaaggtggactcctgcaagttcatgcgcgaccgcaagcacgtgatcgccaactgggtctaccagaccttcggcccctactcgaacctgaaccacacctgcccctacgaccacgacatcgtgctcgacaagcttcccgtgcagcatctgaacaagctggtccagtcgatcatccccgatggcagatacatgatgaacagcacatggatggtcgcgggcattccgcgcaccgatgtcatcctatactttaccaagagctaa

SEQ ID NO: 29235 - protein, 137 aa, DROSOPHILA
MDFEYCYLKSVNRTYKYLSLKTKMFRLPVDNCETRFQLRMRENRRVLYNFDFKVDSCKFMRDRKHVIANWVYQTFGPYSNLNHTCPYDHDIVLDKLPVQHLNKLVQSIIPDGRYMMNSTWMVAGIPRTDVILYFTKS

SEQ ID NO: 29236 - DNA, 3199 bp, DROSOPHILA
cctcgcaaacggagcggattggagtggtggtgaacaacgaggacgagggccggaaggggtcctccatcttctcgctgggaacaatttaagcactgaacttgacccacaagtcgagtctgctgctttttgtgcggcagagttttagaaaattgctcgtttcgttgcgtgcatatttcccaaaatgcgagcggcttgaaatcattttgcgtgttgttttgtccgctgtctgttttctgcttgttcctccaatgagaaatctaatttaaaagatacaaattttaaattatggggttttcttggctaccaaaaatgtttcgatgttttttcttcgctttaccttcctcttcttcacatatgattgcttctacgtgccgaagactcgcattttggcattttggatgcgatggcagatacgcaatttcgttgcggaaatgccgaatgtcaagagtggttgcataacagcttcaaacacagaaaggctaggaataataagggtctcatgacagaggggtattttttacacacagtatttattggtaaccagattcaaattgaaaacattcgcgcgccttttttgcacccactcgcggtatcgatatatcggtttgcacacatcactactgtgctaaggtaaacaacatataaaatatacattatatcgaggtttgaaaattcctttacttattttgttacacaatgaagattattcagtatttatttgatttattttaagttctacgttatgatctttgttctaccagtaataaaatacattttacatcgtaattacggcagaagaacttagtaccttttccagcactgcagccagagttggtttcttaatggagtccgataggttcaataacacatccatacatcgataacaattttattttttgttttgctaatgtgatttacaaaatagttgttttaattgagaattgtcggcagattatggagtttgatttgtaaatagcatgattttgatgtaacttctgacatggacaccgccggagacatggatcacctggccagtgtgtccttcggcgactttgagacaaaatccccagagggcgacgtatcctgctatcagaactttcgggcacagacggaacatgtttcgctagacatttctctcgggcagaagtcagacactctatttgccgccgaccaaacgcccacgcctacgcgactcatcaagaactgcgacgaggtgggtctcttcgaggacctgcagcacgtaaatccatttgacattggattccagcaagcagcggagcgaaatgtcagcggcactccgagtcgcccagaggctcgacccaatgacggtgagtccctgcacacgccccaggtgtatcccgtcgaggcccccaccgtggtatcagttccgtctgaaaatcaggtcccacaaagtgtcagctgcggcgatatggatgtggaccagcttctggccacgacagttacctcgccttccaaagccagtcaagatggtccgccgccgctgcagttgatccagccccaggtcctaacatgggtgctgcctgcgcagtcagttcccatttccatcgctacagttgattgtaacagaaacagggtgaagccgactggtgccattcatcccttcatactgccgaaacccactgcgaaagaattaaacaagaccagtaaaagacccgagcctattttggtcagttgcaacccacctaataacgagcccagtagcgccagtctgacgcccacctcacagctgcccatcaaggagcgattgaaggccattatccacagcaataataacagacgaagtttctccacaccgcccaaggctgcgaaagcaaaggatcgcagtcgggacgaggattgtatggagcgacgaagagcagcagcctctcgttaccgtaacaagatgcgaaacgagcataaggacctcatcaaacagaacgcccagctgcagcaggagaatcaagaactgcacgaaagaatttccagattagaaaaggaactgcagcagcacaggagtcacagcagcttagctggcggtaagctttaataaaccattcctgaagttaagttaatttattttcgtttatagtggtggccgaccagctgcggattccaccatccagtatacacttgctcatcaatgtgcccaacgtgttagtgccttcgtccgccagcaacgcaagcgcggccaagaaataaccaatatgccttgtttatttattttctagtgccatgtacataatcctagccttgtagtttattcgtacaaaaaagcctcagttaagttaaattccttctgtactccaatgttttgtctgtggttatgatttccgtaaactctctctgtatctcaaaaatggaattctcgatatccaccagctggggactaaattgcacagatgatgttgctggagttcgcagctgttccatggtcatctgttcggaagaaagtagacttaggagatcacagaatacaatctaaaatcttttatcacatacatcacgcaagtttttctgcagctgatcacgctgatagcaaagtttctggattttgtcgtaatacttctgtgccagtggagcaccctccgtatccgagtagtagcgctgggcaaggagctccatctcctggttacgaatttcatcttcggccagctgcatttcttggttgtgacgccgacgctcacgctcaatactgtgcatcagcaggtccatgtccttctccatctccagaattttgcgtcgctgctcagactcctgtaacttagtgatgacctcgctcttgcgccgacgcacctccatttggtaggtgagcagcattttccgttggcaggtgatgcgctcttcctcgcgatggattgtgtcctggtaaactctctccatttctttgaggcggcgagcgtgctcctcttgcttaagtcctgtttcaaggcgttccataattttaacctcctccaactcaagatggcgaattcgggcatcgatttcctggttgtgcttgatcaacgatactgcttgatactcctgctcatcgatccactcgctgggatatttgagaaactttggatacacacccttcggaatggggctgaagtgtgtcatgaaacgctgtgggtgaagtgcaagcgcacatttggacattagtttgcgcgccttggaaagaagtttgctgatgtccacagggttctgatcgtggaagaag

SEQ ID NO: 29237 - DNA, 1080 bp, DROSOPHILA
atggacaccgccggagacatggatcacctggccagtgtgtccttcggcgactttgagacaaaatccccagagggcgacaagtcagacactctatttgccgccgaccaaacgcccacgcctacgcgactcatcaagaactgcgacgaggtgggtctcttcgaggacctgcagcacgtaaatccatttgacattggattccagcaagcagcggagcgaaatgtcagcggcactccgagtcgcccagaggctcgacccaatgacggtgagtccctgcacacgccccaggtgtatcccgtcgaggcccccaccgtggtatcagttccgtctgaaaatcaggtcccacaaagtgtcagctgcggcgatatggatgtggaccagcttctggccacgacagttacctcgccttccaaagccagtcaagatggtccgccgccgctgcagttgatccagccccaggtcctaacatgggtgctgcctgcgcagtcagttcccatttccatcgctacagttgattgtaacagaaacagggtgaagccgactggtgccattcatcccttcatactgccgaaacccactgcgaaagaattaaacaagaccagtaaaagacccgagcctattttggtcagttgcaacccacctaataacgagcccagtagcgccagtctgacgcccacctcacagctgcccatcaaggagcgattgaaggccattatccacagcaataataacagacgaagtttctccacaccgcccaaggctgcgaaagcaaaggatcgcagtcgggacgaggattgtatggagcgacgaagagcagcagcctctcgttaccgtaacaagatgcgaaacgagcataaggacctcatcaaacagaacgcccagctgcagcaggagaatcaagaactgcacgaaagaatttccagattagaaaaggaactgcagcagcacaggagtcacagcagcttagctggcgtggtggccgaccagctgcggattccaccatccagtatacacttgctcatcaatgtgcccaacgtgttagtgccttcgtccgccagcaacgcaagcgcggccaagaaataa

SEQ ID NO: 29238 - protein, 359 aa, DROSOPHILA
MDTAGDMDHLASVSFGDFETKSPEGDKSDTLFAADQTPTPTRLIKNCDEVGLFEDLQHVNPFDIGFQQAAERNVSGTPSRPEARPNDGESLHTPQVYPVEAPTVVSVPSENQVPQSVSCGDMDVDQLLATTVTSPSKASQDGPPPLQLIQPQVLTWVLPAQSVPISIATVDCNRNRVKPTGAIHPFILPKPTAKELNKTSKRPEPILVSCNPPNNEPSSASLTPTSQLPIKERLKAIIHSNNNRRSFSTPPKAAKAKDRSRDEDCMERRRAAASRYRNKMRNEHKDLIKQNAQLQQENQELHERISRLEKELQQHRSHSSLAGVVADQLRIPPSSIHLLINVPNVLVPSSASNASAAKK

SEQ ID NO: 29239 - DNA, 5641 bp, DROSOPHILA
ctgcgcatcccgtcattagcttttttactttcgacggcgacggacgtttcttttcatccgtgtccgcgcatccttagttgactaaattctgccgcatgcttttctcactaccaccgaagctcacacatcgcatacctatacacaggcagagaaaaaaaataaaatcggaaaggttcctgtgaaaagcagcagttaaacacatcagaagttgtagtttttcccaggacgtaacggtgcttttttcccttagtttccgaagcatttatacataatttgcataaactaaataataatcgactggaatcgaagctcgactattgccaatcacccataacgatacaagcaaagtgccaaaatgtcgtttagcatttgagtctgcatacgaaaaggaaaatagcttgacataaaatttacagttacgtgggatttacaaccgtgggctgtaacacacagacaggccttcacatacacacacatacttacgtcgagtgagtgcgggagtggagtccttgaagcatctctgcttacgaacaacccccacaacattgggtgcgtcggtactcggcgcgaagtaatgaataacggccaaaaataaccgtcaacaaaaaacaaacaaacacaagtatagaaagccgacgaagtccgtgtgtgttctggtgtagatttaccattgccctttcatctcttgtgcgggtgtgtgtgtgggcgccaaaataaaagaaggcgcaaaggatatgaggacaacgttgtctgccacatttgcaagtaaggtaatttcgcataaaattccagcacagcctcccacccaaactatagaaaatgtgtccctactgaaaagccattcggcttttgtgccgtagtaaatggatttccttatcagcgcaaagtggtcccaggagtccactcctcttcattgttgcagctgaattgcagccagcttaatgaactcccctttcaggaattaccgtccgtccacatcggctaagactagaataccactatgtttggatccaagctgcgctcctggatggagacgcatattgtgcgtccgcggaagaagggcagtaaacacaagcaagggaccgtggacgcaggcagttcttgcgtggggaagaaggcgggcaccttaccaacacagggcagcaacctaactagcccggtcctgaccagtagcggaagccacagcatcgccagtccggtgcggaggcgcgaggtctcccccatccagtgtcacgtaagtagcttccttcctaggaatatacaaatgcttacgtcgatcatattttcgtagccacccagtcgtcgatatggctggcaatccccagatgaagattcctacgtcatagcctcgcccaagtcggacaatttgcttcacgctccgcactgctatcagccgcatcaaccgctccagcagccgtcgcaccacttaagcgtgcccaatagcaaggaaacctatgcggagaaatcgcccaccagggtaaactgctcttcgtcctccatatcgtcgttgtcctggtcaacgggatccaaggagccctcttctggcaaacaagcaatttttagagagcagtccttaaatggggaataccacatcccacctgaggaggaggtggagtacgaggaagttggcgctttgctgcttcggcatgcaccacccattgcagaacaacagcgcccgcagtcagaaaacttaagtgccgtgcgtctaatctacaaggaagagccaaggcaaagcaagaatcatgttcgttacggtcgcctgcttccctccaagctagcaccggctcagcatggcgagtcactggataatttgacagctacaccgcctattccacccgcttcacttaccggctcgcgtattcgaactccacgaggaattcagcgcaataattttatttcgggaccccggccacacagcttgccctcgccagaaagcgcttattccacgggctactccacagatggcacatcgccatgcgccgccagcaactacaatccacctgagtactacattaacatgcgctcgggaacccactatttcccgaagagcgtcaactcgctggccgtcgaggcccagcggtacaagttcggccttaaccgcatagaggagatgtcgcctatggatccgttgcccaagagcaacttcgcaactgccactcatggcccggagtcgtcgcctagttcgctagctctgcggcagcagtcaaagctctttgagtgtgagtttcagtgttgttagcccggctgctggcaaactgagcaattaacccatttaaaatctctacttggctgaagtagcatctctcatctccttttttgcagctccctcgccgagacagcgctgtcgtataagaacaaatccctggtacaacacgggagagctcttgcctagcacgacaggccccacacgcttggatctggatgcgaccagtactacctccacgacctcgtcgggcattaagtcaagcaatgaactggaagttccggtggccaaaacaatagcaaacaaagcagggaagccagtcccttatgcagcaacctccaactgcagagctactcctagccaggcagccaaacaggctgatatagacattgttgggggaggggctggtgttgcacctggggctggagttgtttatgaatccgagggctcctcgacttcgactgaattggaaaatgtgcatgccccacataccattaagcggcgtcacttggaccacgccgagactacaacaacttcagcgcccgtggcagctggtggtggaactggagctaccactacatccttcgttcttagtgatgacgaggccacccttaatgaaatgattgggaagttcgacgagagttacatttacgaaaaggaaactgatatattaaggtgagttggagtcgttcagtgctcgccaagtcaacttaagttgccttcttatatttaattcgacttctagcagtgattcagaccttacggactgctgtgcttcggagctagatactggacaggatgcgggtgatgagtgtgacacagacgagttgttggacattgactttatagacacttcatccatgcaagaggtggaacttgaccgcaaggatctgtcacgaaatctgggcaactgtcactactattctaatcaccctatcagtccggtgctcaatcgaaaggcatcagtccgttcccgacgcaagagcggtcaggagacgggggaaagctcccaacagcgccgacgcaagaggttccttaaaacacgtaagaagagttgtgaaaatcgcgaaaagacttcttcgtcacctcttcgtgagcctcgtggcacccgaagtgtgggtggcacgcccgtctgtttgcgccgcaatctactgggtccaagtgagaggtataagacaacaatttaataattatatataggattttaaaatattttgtttaaagaatatacaaaacgtctcccctgtcaaaccgctccaactcgctaatctttggaagcataaaaaaaaagtcaacactcaccatcgcagaaagcgaaaaagcacttcttaaggcagacttggaggctgatatgaaatataaacaactaattatggaagcggagtctttgctggaatcgatgaagaacagcttacagaggtaaggaatgataaagtttaaatatttggttcgttattaataacatatcaccattagcattcccagagacacgcctgtcgccagcccaagacgagtgaatcccttagctaacaagcgggtggaaatgcttaaaaacagtgaagtggtggactccaaaaaacagactctggttcttaactctcctcctcttgagcatgagttagcagcagccattaataagcgcatagagatgctcaagtttgagacatcgtctgcttcttcgccaccaaacagtcccaagcctgcccgttacagtcctcgcaaaacgcatctgaccaactttatgaatcaaaatgctccaccagagttgccaccacgaaaaataaaaggcaaccctccctctgctccactctcgccacaacttcagctaaatggaaggagtattcaggagagtccaaagagcaagcgacgcacgatgatggtgacttcttctaccacgacaacggtgatcagcttcaacggcagtgatcctgagatggagtgcatagctgtagaggatattggcaatcacaactacttgcctcagccgcaatcgaatacgagggatggaaaatatggatcgaatacgaaaatggaaaacccattgcatgccgaattaaatattaataacaacttttactgcccacacagcgagcccttaaagcgcaaggtatacaagggtagctcatcgttcgagcgcataaaaaaaaacttcgacttcgaattgggtaagtaattcgccttgtttgtaagtgaagtatttaatcaaatgatacacagattcaaacggacggtgcaagtcaaatgagcgttcgcaaattaagcttttggcctccgtgtcggccaagagctctatgcaagacgtgaccgttgacgaggccaagggccatgcaataggcggtagtaaccgcaagcagcagctcatactgaataccattttcgatttaaagcgcagcttggagcatcaaagccatcaactgagtggatttaatggcgaatagaactgagtgaactactaggactaatatcatcatcatacttatttacaatgcatcatatagacagtaactagttggctaagatatagagtccaaaagagtccctcagactagacactgaaacgaagcgcaataacattaacttataaggggagacgattatttacaaaaatactagaatactcaagggccgtaatagaacatatgaactggtgcagaatcttatcacaaaaagtatttagaatgtagcaaattgtttttgatggaagtgttacattacaatcgtaatcataacccagaagttttcaaagtaatattttcagttttaaaatgtactttagacaccatagattttagttaaagcatatcaaagaatgtgtatactaagtaatattctgttgaaattaatcgtttctgttatttacatcaattttgttttggatacacattgttttcatgaaaaattcgaaacatatattttaacggtctatatgcccaagctgaaagtatgttcagaacactatttccgtggcatgtccatcatactatcctaccaactcatactatccaatcatagcttgaatacgttgatattagtaaccaaaccaaactacataagttaataactggtagtattccttagtttttaacgagcgtcagcgcgtgtgcgttaatgtggaaaatatactaacctttcaatgcaaatcccatttgaacgtcgactacacttatagagctcatcttattactaaacttgacaacacatttcacctaattatctatattagaaaagtattcaaaagtagacctttaagtaaaccatattaagatccatccaaatgaaaattgtttagccaaattttttgtagaataatgaaaagaaaaggcattgttttactgttttgtttccttggttaagtagataaagactattgagtttctatgccagaaattgaaataatcagaaggaaatcgaattatattccagctggcattaccatga

SEQ ID NO: 29240 - DNA, 3144 bp, DROSOPHILA
atgtttggatccaagctgcgctcctggatggagacgcatattgtgcgtccgcggaagaagggcagtaaacacaagcaagggaccgtggacgcaggcagttcttgcgtggggaagaaggcgggcaccttaccaacacagggcagcaacctaactagcccggtcctgaccagtagcggaagccacagcatcgccagtccggtgcggaggcgcgaggtctcccccatccagtgtcacccacccagtcgtcgatatggctggcaatccccagatgaagattcctacgtcatagcctcgcccaagtcggacaatttgcttcacgctccgcactgctatcagccgcatcaaccgctccagcagccgtcgcaccacttaagcgtgcccaatagcaaggaaacctatgcggagaaatcgcccaccagggtaaactgctcttcgtcctccatatcgtcgttgtcctggtcaacgggatccaaggagccctcttctggcaaacaagcaatttttagagagcagtccttaaatggggaataccacatcccacctgaggaggaggtggagtacgaggaagttggcgctttgctgcttcggcatgcaccacccattgcagaacaacagcgcccgcagtcagaaaacttaagtgccgtgcgtctaatctacaaggaagagccaaggcaaagcaagaatcatgttcgttacggtcgcctgcttccctccaagctagcaccggctcagcatggcgagtcactggataatttgacagctacaccgcctattccacccgcttcacttaccggctcgcgtattcgaactccacgaggaattcagcgcaataattttatttcgggaccccggccacacagcttgccctcgccagaaagcgcttattccacgggctactccacagatggcacatcgccatgcgccgccagcaactacaatccacctgagtactacattaacatgcgctcgggaacccactatttcccgaagagcgtcaactcgctggccgtcgaggcccagcggtacaagttcggccttaaccgcatagaggagatgtcgcctatggatccgttgcccaagagcaacttcgcaactgccactcatggcccggagtcgtcgcctagttcgctagctctgcggcagcagtcaaagctctttgagtctccctcgccgagacagcgctgtcgtataagaacaaatccctggtacaacacgggagagctcttgcctagcacgacaggccccacacgcttggatctggatgcgaccagtactacctccacgacctcgtcgggcattaagtcaagcaatgaactggaagttccggtggccaaaacaatagcaaacaaagcagggaagccagtcccttatgcagcaacctccaactgcagagctactcctagccaggcagccaaacaggctgatatagacattgttgggggaggggctggtgttgcacctggggctggagttgtttatgaatccgagggctcctcgacttcgactgaattggaaaatgtgcatgccccacataccattaagcggcgtcacttggaccacgccgagactacaacaacttcagcgcccgtggcagctggtggtggaactggagctaccactacatccttcgttcttagtgatgacgaggccacccttaatgaaatgattgggaagttcgacgagagttacatttacgaaaaggaaactgatatattaagcagtgattcagaccttacggactgctgtgcttcggagctagatactggacaggatgcgggtgatgagtgtgacacagacgagttgttggacattgactttatagacacttcatccatgcaagaggtggaacttgaccgcaaggatctgtcacgaaatctgggcaactgtcactactattctaatcaccctatcagtccggtgctcaatcgaaaggcatcagtccgttcccgacgcaagagcggtcaggagacgggggaaagctcccaacagcgccgacgcaagaggttccttaaaacacgtaagaagagttgtgaaaatcgcgaaaagacttcttcgtcacctcttcgtgagcctcgtggcacccgaagtgtgggtggcacgcccgtctgtttgcgccgcaatctactgggtccaaaaagcgaaaaagcacttcttaaggcagacttggaggctgatatgaaatataaacaactaattatggaagcggagtctttgctggaatcgatgaagaacagcttacagagagacacgcctgtcgccagcccaagacgagtgaatcccttagctaacaagcgggtggaaatgcttaaaaacagtgaagtggtggactccaaaaaacagactctggttcttaactctcctcctcttgagcatgagttagcagcagccattaataagcgcatagagatgctcaagtttgagacatcgtctgcttcttcgccaccaaacagtcccaagcctgcccgttacagtcctcgcaaaacgcatctgaccaactttatgaatcaaaatgctccaccagagttgccaccacgaaaaataaaaggcaaccctccctctgctccactctcgccacaacttcagctaaatggaaggagtattcaggagagtccaaagagcaagcgacgcacgatgatggtgacttcttctaccacgacaacggtgatcagcttcaacggcagtgatcctgagatggagtgcatagctgtagaggatattggcaatcacaactacttgcctcagccgcaatcgaatacgagggatggaaaatatggatcgaatacgaaaatggaaaacccattgcatgccgaattaaatattaataacaacttttactgcccacacagcgagcccttaaagcgcaaggtatacaagggtagctcatcgttcgagcgcataaaaaaaaacttcgacttcgaattggattcaaacggacggtgcaagtcaaatgagcgttcgcaaattaagcttttggcctccgtgtcggccaagagctctatgcaagacgtgaccgttgacgaggccaagggccatgcaataggcggtagtaaccgcaagcagcagctcatactgaataccattttcgatttaaagcgcagcttggagcatcaaagccatcaactgagtggatttaatggcgaatag

SEQ ID NO: 29241 - protein, 1047 aa, DROSOPHILA
MFGSKLRSWMETHIVRPRKKGSKHKQGTVDAGSSCVGKKAGTLPTQGSNLTSPVLTSSGSHSIASPVRRREVSPIQCHPPSRRYGWQSPDEDSYVIASPKSDNLLHAPHCYQPHQPLQQPSHHLSVPNSKETYAEKSPTRVNCSSSSISSLSWSTGSKEPSSGKQAIFREQSLNGEYHIPPEEEVEYEEVGALLLRHAPPIAEQQRPQSENLSAVRLIYKEEPRQSKNHVRYGRLLPSKLAPAQHGESLDNLTATPPIPPASLTGSRIRTPRGIQRNNFISGPRPHSLPSPESAYSTGYSTDGTSPCAASNYNPPEYYINMRSGTHYFPKSVNSLAVEAQRYKFGLNRIEEMSPMDPLPKSNFATATHGPESSPSSLALRQQSKLFESPSPRQRCRIRTNPWYNTGELLPSTTGPTRLDLDATSTTSTTSSGIKSSNELEVPVAKTIANKAGKPVPYAATSNCRATPSQAAKQADIDIVGGGAGVAPGAGVVYESEGSSTSTELENVHAPHTIKRRHLDHAETTTTSAPVAAGGGTGATTTSFVLSDDEATLNEMIGKFDESYIYEKETDILSSDSDLTDCCASELDTGQDAGDECDTDELLDIDFIDTSSMQEVELDRKDLSRNLGNCHYYSNHPISPVLNRKASVRSRRKSGQETGESSQQRRRKRFLKTRKKSCENREKTSSSPLREPRGTRSVGGTPVCLRRNLLGPKSEKALLKADLEADMKYKQLIMEAESLLESMKNSLQRDTPVASPRRVNPLANKRVEMLKNSEVVDSKKQTLVLNSPPLEHELAAAINKRIEMLKFETSSASSPPNSPKPARYSPRKTHLTNFMNQNAPPELPPRKIKGNPPSAPLSPQLQLNGRSIQESPKSKRRTMMVTSSTTTTVISFNGSDPEMECIAVEDIGNHNYLPQPQSNTRDGKYGSNTKMENPLHAELNINNNFYCPHSEPLKRKVYKGSSSFERIKKNFDFELDSNGRCKSNERSQIKLLASVSAKSSMQDVTVDEAKGHAIGGSNRKQQLILNTIFDLKRSLEHQSHQLSGFNGE

SEQ ID NO: 29242 - DNA, 3670 bp, DROSOPHILA
cacatgtggtgggacaggtatgcaagcatgggctgcccgaaaccttggcgcactaaataatgtctttcacgcagaacattgagactgttaattgccgtgctgccgatcgcgagttccagtctgaggtgatttggtgcaatccggacagcgataagcccttcgacttggctctactcacagctccgcaggatgtgccggagcaatgctgcgtgcgactggccaggagtccggccaccgtcgggcaaatggtgtacaacgccgggtttccctactacgttaacttcagcttcaggcacgacttcaacccttcgatttttcaagggagggtcatcaagtgcgacaccggggccattatgtccgatggcagcgtgcaggcgggccaaagtggaggaccgatgttcgaccagaatggatgcatcctaggcgtttgtgtgtccaacattaaattagacgacgtcgtctacccaaacataaatacagccattccaatttgtgatatccgcaacacgttgcagcagtttgcacgcaccaacggtgagcagaatgtcgaatcgatggtttctagcttatcttaattctttgcagacttaaatgtgcttagcaacctggtagccagtccagatgtacaccgcgtgtggtctctggaaatgccccccattcgcagcaaactctgaggagactcgtgcattgttcattgttaacgaaactgtaattagtgtttttatataatatggccggttagccaggcttttaagattaaacaagatattgtaaaaaaagaaaatatatatatatatataaatttattaatatggtaagaaattgtgcttagtttttatccaaacaatcgttaacgtgactctgaagcacgcttaaggcgttaaaggactttgaacagatcggacatcgcaaagtggtgtctgaagtccgggatgaggcgcctgttgggtcgagaatctaccgatacaaaaattagtattgacatttatggactttggaatcagcgtactcttactggtctctgctcctctcgcaaattgcttctgcttgaactcagcggagaagcggtcgagcacgccttgcttgccttgtgggactcggccagagcttcgataagctcctggttcctcctctgcaatgatcgcaagtccataagatactgatctttctctccggcattcttctcgcgatctgcccgctccatttcaaagtccctgcggtagatatcgttttggatctgtagacctttgatcacctcctgcttctggatgtccctggccttcagctcgttaatatccagctgcattttctttatcagctcctgggattttgattcggttgcatactctggtacgaactcaaacgagtgctgaaataacagaagaaaaagggtgcgagcccggaagagaatattttaaagagatactgtccagtttacaatgcagaatagcaatgattgcgagtctgtatgcaagtatttgccctatcgcttggagcaactggtagacatacatttagctgtttcagtttgtcaatctccacgcgcatgttgtcgatcagggactgtttctcagatacgctcttacgaagctcatcctgctcctttagcctgatggtatgaaccccttcaatctgctcgattttcgtctctaggtccctcttcagctcttggttttccacgcgaaggatcgcgatttgcgcttggcactctttcacatgctccttgtactggtgttctcggtcggcggcttcctggcgccattgttgagtcaggttgtggtagttcagcatggtttggttgaccttgtcaagtgtgcctggccggataatggcatattattgctgtatattactttacgggaaaaaaatgctcactctttagcgcgaggtactcggtcatcatgttctgcagcttaactacttcctctgcggagccctgcaacgagcagaggctgggaaactgcgaataaacactgttctgtggttggatttagagactgttgttagaatttaaacagaccagacggtaaccagacgctcaccttcaggacatcggattgaatttctcccataatgaagctggtcgccagggattgttgctgggaagatccggaatccagcgatttgtgctgctgctgcgatgcagtgatgctgactggaatacagttcactgttggcggctgagtgctcgtagaggcaacggtttccttcgcctcctgcgcgttaccacatacgtcggaccgcaaggaactgtccggcatgagcgaggagcacggcgagctacccaagataacgaatgactcttcgtccgacatgtctccgttgtcgcggtagcaatggcgggtattaataatcagattttacgactgtgaacgcaggtgagggaattcccctctttcgaaaactagacggcaaagtattagccaaatcgattaatttgatatcggcaatagtaaggataaatgtataataaatgagttttagggcaatgattcattaggcgtgggaattacatcgacgcgtcacaatggaataagcaattgtcatgtttattgcatatataccttatatactactgcgttccttatctcgttttgctttgctgacaagctttaaggaaataaaattgttttcggagtaatatttacttttaactaatttaccaaacaacttagaccagtgtgaccgcaatcgtttcaaatgtgcctttttttgtgtcattgattgtcatattgtcataatcggaaatgttatcgacaatcggcgagctcgtctatctaaatttaaaagcagctaatttcaataaaactgattacacgcccaaaactcgtgcatatgaagtgcagtttgcactgcaagggcggtggaaagtcccggcatcatttattcaagcccagtgacgtgcatcccaatttaccttcctttgttgctcagctgagattaatgggcgcgtcctaaaggcctgagcctgacaaaccagttgccagcgaaattacaccgaaatgtaattgccaaaactcgcaaattctaatggacggcgcagtgcgttctgaacccgccaaaccggattcagtacctccattgttcggctcaactctgtagatgtgggttaataaggctttcgcgtgttaaatataggtgtgagtggagctcgcgacaaggaactggtggctggccgagatgcgactttcgtattaccataaccaaccggttcctggctatgtgcacagaccgcatccccatcctcatttccatcccaatccacacattttagaattaatacgttcgtaacaatgataatcatcatgcggtttattactcaagaatctctatgtgatcttacgactaatgcacgcgaataaataaaattaaaaaaacttaaacgaatacgatacgaaattccattaaagctcaagtgcattcaagaaaactcctcaaacggctacaactagaagactcacacgttcactctcgcactctatgatgcaggatctcctcatctgctctatcacattcacacaaggacttaggtctaggcctgcggatcctctgaccgcgatcttacgcctgttgctggcggaacagacgcctctgcgtctggtggggtggctggaggtcgctctgcaggatagaggcgaagtgctgctgctttaaggagctgattgtggcg

SEQ ID NO: 29243 - DNA, 1231 bp, DROSOPHILA
ttgtttggtaaattagttaaaagtaaatattactccgaaaacaattttatttccttaaagcttgtcagcaaagcaaaacgagataaggaacgcagtagtatataagttttcgaaagaggggaattccctcacctgcgttcacagtcgtaaaatctgattattaatacccgccattgctaccgcgacaacggagacatgtcggacgaagagtcattcgttatcttgggtagctcgccgtgctcctcgctcatgccggacagttccttgcggtccgacgtatgtggtaacgcgcaggaggcgaaggaaaccgttgcctctacgagcactcagccgccaacagtgaactgtattccagtcagcatcactgcatcgcagcagcagcacaaatcgctggattccggatcttcccagcaacaatccctggcgaccagcttcattatgggagaaattcaatccgatgtcctgaagaacagtgtttattcgcagtttcccagcctctgctcgttgcagggctccgcagaggaagtagttaagctgcagaacatgatgaccgagtacctcgcgctaaagagtcaaccaaaccatgctgaactaccacaacctgactcaacaatggcgccaggaagccgccgaccgagaacaccagtacaaggagcatgtgaaagagtgccaagcgcaaatcgcgatccttcgcgtggaaaaccaagagctgaagagggacctagagacgaaaatcgagcagattgaaggggttcataccatcaggctaaaggagcaggatgagcttcgtaagagcgtatctgagaaacagtccctgatcgacaacatgcgcgtggagattgacaaactgaaacagctaaatcactcgtttgagttcgtaccagagtatgcaaccgaatcaaaatcccaggagctgataaagaaaatgcagctggatattaacgagctgaaggccagggacatccagaagcaggaggtgatcaaaggtctacagatccaaaacgatatctaccgcagggactttgaaatggagcgggcagatcgcgagaagaatgccggagagaaagatcagtatcttatggacttgcgatcattgcagaggaggaaccaggagcttatcgaagctctggccgagtcccacaaggcaagcaaggcgtgctcgaccgcttctccgctgagttcaagcagaagcaatttgcgagaggagcagagaccagtaagagtacgctga

SEQ ID NO: 29244 - protein, 183 aa, DROSOPHILA
MSDEESFVILGSSPCSSLMPDSSLRSDVCGNAQEAKETVASTSTQPPTVNCIPVSITASQQQHKSLDSGSSQQQSLATSFIMGEIQSDVLKNSVYSQFPSLCSLQGSAEEVVKLQNMMTEYLALKSQPNHAELPQPDSTMAPGSRRPRTPVQGACERVPSANRDPSRGKPRAEEGPRDENRAD

SEQ ID NO: 29245 - DNA, 2345 bp, DROSOPHILA
tgtatataatgtatgttattgcagatatgtttaacaaaaaatagttacctaggaattaaaaataaatctaaagtaattaaatcaaatcaaaaattaaaatcaaaacattaaatgacatacaatcgaaattcaaagaatacgacctaggttagcgtatccagtaccatatgattttgagattatctctttaataagaacaatattcattctgtaatgaaactcatattatgtacatctgaaatccatctgccatgaacaatgtaatcatcatggtgcaaacgtagttgccgtaaagtgcgagtggagcgattgaatcaattgaatggattgcttaacgatcccattgacgaagctgtgtgtgtcaagaagacgcgctatcgcggcgacatccagccaacggcgaccctgaaaagctttaaagcgaattagcagaccgcacgcgtccgcgcaccccacctcatccatacaaaccacccagtcacccaacacccacccaagtcgaatccactgacgagcaattgttgattgcagggtcacaggaacagcgtcatcgggcaaagagcggaatcagcaggagcatatggtgaaggtccttgggcggagttcctgccatcccgctcgctcccgtggccacagccctgctcctggggtggcccgcctatcgccgcgctgctcgctcccgcagcgaatggcatatgcgtgcgattttgatttttatttgatttgattgcggcgtcaacttaattaagcgaccaactaccaacaatggccagcaaattgaaacagcagtcgggcatttgaagttcagttcctcgtctgcccaaaggatgttgggctgcgggcttgaggggctggagaggggttggtgtcccggcaagacatttgtaattccttttattccgctgccgccaaaagtcattgaaacgtgtaatctgcagcacgtgcgcagcgcggcaggatgagtcctggctgattttcaagttagtccgacggtgcgactttaaaggatgcccgaataactcacggtatcctgcgggggcggaggcgcaattagttggcggcacaggatgcctcctaccggatgagcggacaaggacgaggatgcgcgccaggatgagcggatgggtaggaattcggctgccaccgacgtggccgccgcctccgtgtaattagtgtcagttgcgaagtcacatttggctgccttctgtagttgtagttgtagttgtagaccactggcggtgctgcactcggccacgcccccgaaggccgactggacgctcctgcccaagatggacgatgtgccgcaggacctgcccccgccacttcctttcccgtccctgctcattcatgcatccgtcagataattattataattacctgcgtgagtgtaggtttccatagaccaaaaaggaaaaaaaaacacaatattttaaaactgaaaatcccgcagcagcaggccacagtggcactcgaggcgatggtcgaaatcgaaggaatttataccaaatttagtgatagtaattaatatagtgctattcacattttaaagtacgtcttctaagtatatcttatattatgtatgtatatgattaaaaataataccactagccttatattgagcacattacttcgtacattttttattatcatcattgagattgaaattcttctttttaattccggaatcctcctcttgttgttcaatcaagcgattattcactcataaaacttgccaaatgcaagtcaatgcaatcttaagtaggcatctttgcccgaccgattctccctccgatccgagtagattttatcagcttctgaccactgtgcctggcggcaactaacaaaggtccagtaccaaggacccgtttctgtgtcattgtctcggatcctgctcgtccttctcctccctctcctctctctcccgctccctctaatcatcctcctattgtcggctgcctgcgtgcacttggcacttgggcagaccgtcgattgtgtgagtgtgtgtgggagtgcgtgtctataattatccgccgctaataatattcaaatagctcctaaacatatccgctgcgatagcgagcgggcttactggctaagcgcagccattgtgtctaattgcggaggccgaaaaagataaaacggatcgggcgagaggaactcggtcaaaacccagatgcagttggccgataggcagtggaccctggagacctgaatccaaagccctatcgattcagtggctgtcgccaaaaaggttaataaaccacgaggaaaacctctcggccgcttggtcagcagttcgtcaggccaaataactggccaggaactgggaacttagccaaagaacg

SEQ ID NO: 29246 - DNA, 345 bp, DROSOPHILA
atgagcagggacgggaaaggaagtggcgggggcaggtcctgcggcacatcgtccatcttgggcaggagcgtccagtcggccttcgggggcgtggccgagtgcagcaccgccagtggtctacaactacaactacaactacagaaggcagccaaatgtgacttcgcaactgacactaattacacggaggcggcggccacgtcggtggcagccgaattcctacccatccgctcatcctggcgcgcatcctcgtccttgtccgctcatccggtaggaggcatcctgtgccgccaactaattgcgcctccgcccccgcaggataccgtgagttattcgggcatcctttaa

SEQ ID NO: 29247 - protein, 114 aa, DROSOPHILA
MSRDGKGSGGGRSCGTSSILGRSVQSAFGGVAECSTASGLQLQLQLQKAAKCDFATDTNYTEAAATSVAAEFLPIRSSWRASSSLSAHPVGGILCRQLIAPPPPQDTVSYSGIL

SEQ ID NO: 29248 - DNA, 4869 bp, DROSOPHILA
gttagcaatacggctggtttaattaggcatgccttacagaatacacgattttatttatatatatacattgttgagattaaagtatatacgaaagataggagttaatgtttcatcggccacgctactagaagcagaataagtcgcataacaccacttaaaccgaataacaagtcgtacaattgtccaaaacgctccaagaactaagtcaattattttgatttgccgctttaaaggtcctagtcctagtcctctaacaataacaataacagccacagctaatcaagagcgttatcaagtcgagtaaccaaactaaggcccagtagtaatttgtattctagcttagcttaatcgatgcatgcgcttcactcactccataaaacggcctgaagctttttactccttgctgtcggaaatcataaaaaacaaataattaggctgaaaattgttaacaaattatgaccgcacagcttgcataagtttccagtcggttttccattgccattgattgcctcgttagctctttacgcccgtgtaattcgatttggtccgctacgctcagttcagctctggcttaaacaaaggaattattacagacaaggaagacaaaaaagttaaagattaagagctcattaaccataatatgtgactaacacacattttgaaccgaatcatatcaaatcaaaataaaagatggttaagtaaagcgaataactaaatgaaaactctaaaaagcgtacatctaacatttgaaattaaatatttactcgggtacaaatagtacagtaatgatattcgtttatacaatatttactgtctatataaccattatatactacttacttactgacaattattaagggttttgttcaatttcattactcgtatgttaataaaaacaatttccgactaactcggctctttaaactgaatgttaaatgcaaatcgttctaaaaggttgattagtctcataaatactaaagctaccaaaatacattctccatcacttccggtcctggaccagctgtattaattgctccagcttgtactcgatcagcttcagtcgactgtcgttgatctgttcctgtttccgcctctgctccgccgcgttcttctgatcgattacctcgagggcccgtttgaccacccggccgctcatctgggagcactttccggtgagcagggaacagcagcagggcagaagtctaagcggtggatccaacagcttcttctggggcactgcagcactcaggggcaattgctgaaagctagccttcttaagggtcctcatttcgaagggatcgctcattggaataagcactttgtttccatcgttcggcagcacggaaatctgacgcagacttaagtagttcgggtagatgttcatcaaacgttggcagatgctgcggaagagatggttgcccaacaaaaacccagcgcgtccgtggccagtgagaacctgctcgtaccgactaaggacgttggttctgcaaatggctccgttcagttccgcctgagccttaataacctagataatgaataacgccggaaatgggattagcgaagggaaataatacgaatggcgatagacctacttgggtgtcgctcactgcaagaccgttcaaaaggttgaacagcactatcgtcataaagatcacgaagagcaggaaaatcaggtaggtgtagatgctggtaaactggatgcttccggcgtcaaactcgcctgtcagcatcacaatggtcttgatcacggcctcgataggcttggtaaatgtgttgaagccctgttcctcgtccttcccctccttcttccccagaggtggacatggcgtagcgcttttagactggtcttcctccactgacttgccgaagaggatatagaaacacaggctgaaggtgagcacgaagatcgagtagagggtaaagctctttaagaagctgtttgacacctctcgcagcatcagcatgtgcgtcgaaattgagagcactggcagggagcccactagtaaacaaaactccatggagacgagtaggatggtaaatacggctaagacgcgctgcgtctccttgtcgaagctggattccatgcaggtaaagatagatagtgtaataagagccacctccataatattcgttatagaccaaaagtaccgaactggagacattatccactggatgcactcccgtaatataaggtagctgattcccagccaggaaagcaatccgaaaaatgcagtaagagccctttgatcgctttcgtggaacttgaggagcgtgtaggtaattatggaggcggtaaaaagcgagtatatcaggaagttcaggtagaatatcacggaaagtcggtgccacttgaggaatagaaagctcgagatcagcgggtgctggagcaggtggcgcatctccttcgactcggcgatgaatgcgatcggggccatttcgtcttgcagctggttgagtccggagtctctctcctggcgcattaggttcttataatcgatgatgatctcaaagttctggtcaccaggcctctctccgtttgtggtgatacacgagtcgaagtgctcttcgagaacctcgggtggcatgtccttgatgggtagtgtgccaaatgcgctcttagaaccaatgtaggcaccgttcttcaggagtttttgcatcgcactcgtgttgcggtacttaacagcgaagaacagaggcaccaggcgtccggaatcagcttcgttgatgtctacgcgatcgctgttaatgagcaattcaaagcagcgctggtggctggagccatcatacggtggctcatccagacggccgattactgcatttagtagcttggagtctggagtaagtcgcaggtttggctccttaagcagtcgctccaacgcctgccagttaccgtatatcacggccgtctctacgagattggcctcgttggccctgcctggtctcgagttgatatccatgccagtggacaaaatgacatcgaaggctcgctgcctgcccctcttgatgctctcctgcagcagtccgaagtattcctcctggtgggcatttagttggttatccgctccgcctttgagattctgcaagtactcagcgaactgctgctcaaacagtgtttcgtccccgtcccgtagagtcctttgaagagtttggatgtcaatctccggcccggtatgacgctcttccggcagcttaagctccggaaattgcgcctgcagcagtctgcgcacctccccgtttcggtaactatcgatatccagctccggatggtccagaaagagctgaatcagttccttcttcccagccttcaccttgctctttctcagcacatggtgcaagggtgtgaactcgccctggtctacgatattcggcgaggcgccgtagtccagcaagagttgcatgcaggagtacacgtctggggcattttcatccgtgagattcttggcaagtgagttaagtggagtaagctgcccatattttctatcaacctggactttgtttccggggcggtacttaaggagagccgccaggtttcctggatccctagagtcagccgcatagctgattgcggccttgtccagcttcttgttgatctgtgaagatgaactgtggttagatggtgtccgacctctactccttgttgctctactcacgtagttcacctggctgccgtggtcgatgcaggcttcaatgaagtcacgacaacctggtgttgagagtgccttctcgtagatactggtatggcggtcgtcttgtagatcggccagggcaccgctgtccagggcagcaacgaactgtcggatgtcctgcttggccaaagctccagctagctgggcctgcggatcaatgaagccgcagttgttaaagtccattggtttggtctgcaaagaaagagcagccacggatcggatgagcaatgtctatgtgggctggacttcaggtaattcgcgtcgaatgagtaacgtaagctgaaaatgaagcaagaacccgcattgctcactcaggccactttgtgaccccactagaccttagggccttggaagtcaaaaacaataggttggaattggaagctctcgaaaaacggcatttgacatcgcttcatgctacgatggttttcacatggagtggacatgaggctggaacggagcgagagaaaaaagctgccctacaggtttcttcacagccaaatctccgttttgggggcaattaaagaaagcgtcttaagtggtttctgtggtaccgaattcggtcttaatttgctcctccgtgtagttattaaattattacaatccatgcgaagacaagacaaggtcggcggtggacgtgggtactggagcccccagtaccagcagtggcggcggtcggagtgatccactaaatttgaatcaggtttggtgcgggtatcaacgtctaacgatcataaagaataatcataaaataatcgacacatcagtatcaattagcaatcaatttgttgcgctttacgctttgataactcttctagatggggctcgaatggagcctgggggcgactcaggcaatgggggcgccgaaattgtgagatttataggcggctttgttcgtaaatttcaaggcggcttcttctgggggattctcgtttccacagtgatactgaccgctgtgatacttgaaatgtgtgagaaatctgctaatcacactcaagacctggctaatttgaatacgccacttctgattatttatcaacagccgaagaattggtattcaggaaacatatacccgacccatccgttgaaaacggctaatcagtccaagttttttggcttggcaaaaaattgggttttgtaaatgaccccccccaggtgggaaggtcggcctgataagataaacaga

SEQ ID NO: 29249 - DNA, 2742 bp, DROSOPHILA
atggactttaacaactgcggcttcattgatccgcaggcccagctagctggagctttggccaagcaggacatccgacagttcgttgctgccctggacagcggtgccctggccgatctacaagacgaccgccataccagtatctacgagaaggcactctcaacaccaggttgtcgtgacttcattgaagcctgcatcgaccacggcagccaggtgaactacatcaacaagaagctggacaaggccgcaatcagctatgcggctgactctagggatccaggaaacctggcggctctccttaagtaccgccccggaaacaaagtccaggttgatagaaaatatgggcagcttactccacttaactcacttgccaagaatctcacggatgaaaatgccccagacgtgtactcctgcatgcaactcttgctggactacggcgcctcgccgaatatcgtagaccagggcgagttcacacccttgcaccatgtgctgagaaagagcaaggtgaaggctgggaagaaggaactgattcagctctttctggaccatccggagctggatatcgatagttaccgaaacggggaggtgcgcagactgctgcaggcgcaatttccggagcttaagctgccggaagagcgtcataccgggccggagattgacatccaaactcttcaaaggactctacgggacggggacgaaacactgtttgagcagcagttcgctgagtacttgcagaatctcaaaggcggagcggataaccaactaaatgcccaccaggaggaatacttcggactgctgcaggagagcatcaagaggggcaggcagcgagccttcgatgtcattttgtccactggcatggatatcaactcgagaccaggcagggccaacgaggccaatctcgtagagacggccgtgatatacggtaactggcaggcgttggagcgactgcttaaggagccaaacctgcgacttactccagactccaagctactaaatgcagtaatcggccgtctggatgagccaccgtatgatggctccagccaccagcgctgctttgaattgctcattaacagcgatcgcgtagacatcaacgaagctgattccggacgcctggtgcctctgttcttcgctgttaagtaccgcaacacgagtgcgatgcaaaaactcctgaagaacggtgcctacattggttctaagagcgcatttggcacactacccatcaaggacatgccacccgaggttctcgaagagcacttcgactcgtgtatcaccacaaacggagagaggcctggtgaccagaactttgagatcatcatcgattataagaacctaatgcgccaggagagagactccggactcaaccagctgcaagacgaaatggccccgatcgcattcatcgccgagtcgaaggagatgcgccacctgctccagcacccgctgatctcgagctttctattcctcaagtggcaccgactttccgtgatattctacctgaacttcctgatatactcgctttttaccgcctccataattacctacacgctcctcaagttccacgaaagcgatcaaagggctcttactgcatttttcggattgctttcctggctgggaatcagctaccttatattacgggagtgcatccagtggataatgtctccagttcggtacttttggtctataacgaatattatggaggtggctcttattacactatctatctttacctgcatggaatccagcttcgacaaggagacgcagcgcgtcttagccgtatttaccatcctactcgtctccatggagttttgtttactagtgggctccctgccagtgctctcaatttcgacgcacatgctgatgctgcgagaggtgtcaaacagcttcttaaagagctttaccctctactcgatcttcgtgctcaccttcagcctgtgtttctatatcctcttcggcaagtcagtggaggaagaccagtctaaaagcgctacgccatgtccacctctggggaagaaggaggggaaggacgaggaacagggcttcaacacatttaccaagcctatcgaggccgtgatcaagaccattgtgatgctgacaggcgagtttgacgccggaagcatccagtttaccagcatctacacctacctgattttcctgctcttcgtgatctttatgacgatagtgctgttcaaccttttgaacggtcttgcagtgagcgacacccaagttattaaggctcaggcggaactgaacggagccatttgcagaaccaacgtccttagtcggtacgagcaggttctcactggccacggacgcgctgggtttttgttgggcaaccatctcttccgcagcatctgccaacgtttgatgaacatctacccgaactacttaagtctgcgtcagatttccgtgctgccgaacgatggaaacaaagtgcttattccaatgagcgatcccttcgaaatgaggacccttaagaaggctagctttcagcaattgcccctgagtgctgcagtgccccagaagaagctgttggatccaccgcttagacttctgccctgctgctgttccctgctcaccggaaagtgctcccagatgagcggccgggtggtcaaacgggccctcgaggtaatcgatcagaagaacgcggcggagcagaggcggaaacaggaacagatcaacgacagtcgactgaagctgatcgagtacaagctggagcaattaatacagctggtccaggaccggaagtga

SEQ ID NO: 29250 - protein, 913 aa, DROSOPHILA
MDFNNCGFIDPQAQLAGALAKQDIRQFVAALDSGALADLQDDRHTSIYEKALSTPGCRDFIEACIDHGSQVNYINKKLDKAAISYAADSRDPGNLAALLKYRPGNKVQVDRKYGQLTPLNSLAKNLTDENAPDVYSCMQLLLDYGASPNIVDQGEFTPLHHVLRKSKVKAGKKELIQLFLDHPELDIDSYRNGEVRRLLQAQFPELKLPEERHTGPEIDIQTLQRTLRDGDETLFEQQFAEYLQNLKGGADNQLNAHQEEYFGLLQESIKRGRQRAFDVILSTGMDINSRPGRANEANLVETAVIYGNWQALERLLKEPNLRLTPDSKLLNAVIGRLDEPPYDGSSHQRCFELLINSDRVDINEADSGRLVPLFFAVKYRNTSAMQKLLKNGAYIGSKSAFGTLPIKDMPPEVLEEHFDSCITTNGERPGDQNFEIIIDYKNLMRQERDSGLNQLQDEMAPIAFIAESKEMRHLLQHPLISSFLFLKWHRLSVIFYLNFLIYSLFTASIITYTLLKFHESDQRALTAFFGLLSWLGISYLILRECIQWIMSPVRYFWSITNIMEVALITLSIFTCMESSFDKETQRVLAVFTILLVSMEFCLLVGSLPVLSISTHMLMLREVSNSFLKSFTLYSIFVLTFSLCFYILFGKSVEEDQSKSATPCPPLGKKEGKDEEQGFNTFTKPIEAVIKTIVMLTGEFDAGSIQFTSIYTYLIFLLFVIFMTIVLFNLLNGLAVSDTQVIKAQAELNGAICRTNVLSRYEQVLTGHGRAGFLLGNHLFRSICQRLMNIYPNYLSLRQISVLPNDGNKVLIPMSDPFEMRTLKKASFQQLPLSAAVPQKKLLDPPLRLLPCCCSLLTGKCSQMSGRVVKRALEVIDQKNAAEQRRKQEQINDSRLKLIEYKLEQLIQLVQDRK

SEQ ID NO: 29251 - DNA, 2604 bp, DROSOPHILA
gaaatacccgaaatattataggccccgcaagcacaaacactctaaaattcgggcattatcaatggcctaataacatctgagcacagaagtccctcttgagatccacgctccctctatgatacccccccctagcagcattttagttcgctggcgacgcctctggagaacacgtacgcatgtcttcttcagtttctctgctgatcggtggggatcggaaatcgtatactgtatattgtaatattctgcacttccatgtgtccgatttgttataaacaataacaaagtctctttgtaattgattggttgataggtgggggagggggtgcggcaacaacaacaccaaaaccaaaccagttgacatgcgctctttaaaatcaaaatctcactgcgctctctgaattgtgccctgcgaaaggtaaggcattttagttttcggactcaatacgaactatcaagcgtaactacatattgtatattgttgcccattcattatgaaagggtaagcactcaataaagttagtgcttctcatatttcctcaggttagataaatcgatataatacatatgcataatgcgtttttgaagttggtattttaatatggacaaattataggttactttatgaggcgattaaagctgtttttatattttatgttattccttacagtttctaaagacaagattgcctttccataaaaattttaaatcaataaaaagagtaacatagtcttgtagcttaattcataaataatcatgaacctaaacaataaatacatatattaaaatccatacgacatcagcgggacctaaaacagccccattgctgtcaaacctcctctctaggtcaatagttcccggagcagatgccgttgtgagcataatggtgctgtttgtgccggcaggcacacaagttaggagcgaagcagtaagctcgtggtccgcagttgctggaggtacagtttagggcaagtgtggcgaaaagatatagcgacaatcaaacttactgatcacagattggcatgcattgctgtccatgaagcaggctgtcccttagctcgtatccctgggcacagatgcaccgtccgtcggaggagcagttgccatgtgtgcagcgcctggaaatgagaaagggcacataaacgcatacgtatgtatgtacacttcctaagcgataaggtgaggagcaagaatcatactcacccaaggcaggggtccagcagacggggagccctgtggcggcacttttgggagaggggatcaaagtagtagtgcctgtcctcacggcacacacagagatctggtgcggcgcagtagccacctgccgccacgcacccggggaggcactctgcggcacacaccaaaccatccggattacccgccatatactgatcggcacagggacaggatccgtcctcgaagcacactccattcaggcagacgatgttgcagcgccttacgcactggcgggtgttgaccaccagcatttcgtagtcggagcaaagctgtgaaggctcgttgatctcccagtagccgtagtcgtagtaatagtgaccctctactactgcccacagcagcaactgtaggaagaccatccggcgcgacatctcggctaatggcaagtgatgagccgcggattggttcaggcaacgaaagggagagtgaaagtgctttccggaggctgcgcactttgtgtacggatctcattacggcctcggtcacgatcactgtgcacaaacacagtgcggatgacgcaatggcccccaacacactcggccaactgataaccgctcgaccgaagatcgtttcgatcggaattgcacatgatcagcccgaatcgaagcggcggcgtgcattactcacccgaacgggggtggaggcaatggtggggttggtggtggtggagtcgacagattggatccaactcgaacgcgtgtgcagagagccagggagagctattcgaggactgattctgaattcggaatgtctggatttccacgctctcaatgagaaatcggcgcccacatctgcataaggcactgaaaacatcaacatttaaaaatatacaaaatacattcgaaaaaaattcctcattaaattacaatattttatattaattatttcctctaagtaaacattcttaccaaacatagtcattcagtttcttaaattcttccggctgatttaaatttatacgataaatacgtaacgcataaaccaacttagaactcgattattacgatttgatgcaccaaaccttttcttccagtgctccgattggggcctggctccgtttgcgactgcagctggctttaatgggctccattcattcggtcggtcggagtcggcgagagatgacgctggcgaggaacggcagcagacacgcctgcgcgaacagaagctcagatccaaagttccagagtgtggaataaagttgccaaatagctgcagccgcttgggggattagcgaaaacgccatcgaggcagagttattttcccgctagactctatttcccttcgcttcgacgtcagctgcgaattttgttcttgacagagccgcggactgcgcggtctaccgcctcgccctcgccctcgtgctccccctat

SEQ ID NO: 29252 - DNA, 519 bp, DROSOPHILA
atgtcgcgccggatggtcttcctacagttgctgctgtgggcagtagtagagggtcactattactacgactacggctactgggagatcaacgagccttcacagctttgctccgactacgaaatgctggtggtcaacacccgccagtgcgtaaggcgctgcaacatcgtctgcctgaatggagtgtgcttcgaggacggatcctgtccctgtgccgatcagtatatggcgggtaatccggatggtttggtgtgtgccgcagagtgcctccccgggtgcgtggcggcaggtggctactgcgccgcaccagatctctgtgtgtgccgtgaggacaggcactactactttgatcccctctcccaaaagtgccgccacagggctccccgtctgctggacccctgccttgggcgctgcacacatggcaactgctcctccgacggacggtgcatctgtgcccagggatacgagctaagggacagcctgcttcatggacagcaatgcatgccaatctgtgatcagtaa

SEQ ID NO: 29253 - protein, 172 aa, DROSOPHILA
MSRRMVFLQLLLWAVVEGHYYYDYGYWEINEPSQLCSDYEMLVVNTRQCVRRCNIVCLNGVCFEDGSCPCADQYMAGNPDGLVCAAECLPGCVAAGGYCAAPDLCVCREDRHYYFDPLSQKCRHRAPRLLDPCLGRCTHGNCSSDGRCICAQGYELRDSLLHGQQCMPICDQ

SEQ ID NO: 29254 - DNA, 2345 bp, DROSOPHILA
tgccgcagcgggttaagcggaaattaaaccaggccaatctgctgcctgctttcaaaaagcaaaaatccagtaatgaaaatgctaaagaaatatttgatggctagttataaattaaatagtttaaatgcttgttttcaaatttaaatttatattattattcggcttatttccaacattttacgacagtaactatacgaatttaaaccagatatattaagaataaatctgtgctctcacccctcagtttctccaccaaggaggcggccacccacgccatcgtcgccgttaacaacacggagatcaaccagcagccggtgaagtgtgcatggggcaaggagagtggtgaccccaaccacatgtcggccattgccggtggagccttggcccagggattccccttcggctcggcggcagcggcggccgcagcggctgcctacggacagcaggtggccggatactggtacccgccggcacccacatatccggcggcagcccccgccagtgcccttcagcccggacagttcctgcagggcatgcagggattcacctacggtcaattcgccggctaccagcaggcgggatacatggggtgagtttgagatccagatcggggcagcaaagttgtgtttaagctgtagcaaataattacatgaatactttttaatcatttgtgttagttatacgctttatttatgccctctatattctttgtcgcttcagaatgggcgtccagctgcccggcacctggcagagtgtaccgccccaacctcagctggccagtgcagcggcagccactgcgccgcagatcacacagagcgtgggcagcgcattgccacaggcggccggagtggtcgcatatccgatgcagcagttccaggtcagtccacaggtgagtgttcgaggaattcgatgatgaggcggtgcctaacgattgtacatcgtttagctggcggaggacgagtggctggcgcccagtctgctcgtgtagctgccatgagggatggccatgtatcccacacagcagcaccagcagcagcaacaacagcagcagcagcagcagatgctgcagcagcaacatgagcagcagacgtccggcgaatatgtcaaggagccgccctaccaaacgcagcagctgcagcagctgcagcatcaccaactgcagcagcagcattcacacaaccagcatcagcagcagcagcactatatccaccaactgtactatccatcgcactgggtgcagcagcaacagcaacagcagcagcaggtagcaaacaacgagcagcagccgcagcaacagcagcaacaaccaccagtggctcaggtttatggcatgtccgaagtgtagaaaggtgcagcattacacgtaaacgaaatcttaccgtagattaagtatacgccatggcgacagcagcaaccacacaggccagaaagtgcaatagtcgaaatccaaagttgatctaatcaatggttcgaggaagtcacctctgtcaaaaaatattaataatgataacacgagaagatctaaatgtattttagtaggtataaacatatagacaagtatgtaggtatgtatataccagagtaagaatagagtgggtgctactaagaaagtggttttgatttaccagggcttacgtttcacatagcaaaagaaagtataacaaaccgaaaactaatatttaagcgtagactaagcaaacaaacaaaaggttaagagaaatgtgtttcgttgactgagaactcattttagaaaattttccccatcttctatgaaattgacagaaccgatgattttcaaatagatttcattctgatgatcatttcaccgatatatcgatgtgcatagacctaagaattagcaagtagtgaagggccattcgacttggcccaccataagcatcgatcagttgagtcacgactatgagtgttatccagcattatatagagaaatatcaaagtaaatatactaactgagttaagcaccgacaactaaaccgaacccgaaaatgagaaacacaccagaaatcgagtagataattgcactgaaaacagaacggatcgattgagccagagaatatatatatatatgtagatggacccatgactagatcaactatatatcctaaacgatacccatagaagaggctactacacatacacacaaacaagcacacgcatacgcaagcacgcacacactcacacgtaaggatccttattcatgtatctgtgtttgtgtaacgtgtaaatgtattaaggtaacctataagaaactaaggaaatagcgaaatatttagaaaaggatatgaaagaaaaacgtgtagcaaaagcaaaatacaaaacgtagt

SEQ ID NO: 29255 - DNA, 345 bp, DROSOPHILA
atggccatgtatcccacacagcagcaccagcagcagcaacaacagcagcagcagcagcagatgctgcagcagcaacatgagcagcagacgtccggcgaatatgtcaaggagccgccctaccaaacgcagcagctgcagcagctgcagcatcaccaactgcagcagcagcattcacacaaccagcatcagcagcagcagcactatatccaccaactgtactatccatcgcactgggtgcagcagcaacagcaacagcagcagcaggtagcaaacaacgagcagcagccgcagcaacagcagcaacaaccaccagtggctcaggtttatggcatgtccgaagtgtag

SEQ ID NO: 29256 - protein, 114 aa, DROSOPHILA
MAMYPTQQHQQQQQQQQQQQMLQQQHEQQTSGEYVKEPPYQTQQLQQLQHHQLQQQHSHNQHQQQQHYIHQLYYPSHWVQQQQQQQQQVANNEQQPQQQQQQPPVAQVYGMSEV

SEQ ID NO: 29257 - DNA, 17499 bp, DROSOPHILA
atcgaatactccaatttcctctaatgatatgcgcaccaaacatatttttaactgagcgcaattaacagaaaaccgaaaatactctcaaaaaacaaaattttcactaaaagatttttatttatgtaaattataaagaagaaggcaattcagttgtataccacggaatttcatacgttattcagcatcaatgcccgattaaacataatttataaagatggattcgtttccttcttttatttttgatttcttaatttaacgctaatataagatttatattttatataatgcatctttttactttgtatggaataacacttaattatacattcatttcatatagtttgattttagttgtaatcataacaaaaagaaacatttctgtgcagcgtgatttgaaaaaaatgaacaaagaactaaggtacaaaattctagaataatacaatttgaaattgtctgaatgggatctttaaatagtagttcttgcctgactttcattgtgtttgtttaagagtgtgccgtgtggtttatttgttgattcctcctctgtcgtatagtatcaaaccactaaatacttgtccatataaatgatttcgtttaaatatttatttatatatcgaattatatatattttatgctatataataactatgcaagttctgcatatatgcatgttgcgcttcatttaccattcttttacttggttattttcattttgtattgttaacactcatagtttcgggaatgggaggagagtttaggaaaagtacaaaagtatacatggtttgtccaaagcttttcagttgtagttgctttttactacacagtgtgcatatcgaaatgatacagaatacgatccaatataaatgcttctccacacgcaattggaataagaaatacaaaaacaaattgaacttaactaagttgaagtacataaaacattacaagatacaccacaacttctaaattcagctacactacgatttgttgtttgattggagatttattcactgtctatgtttaggcccactcgcttctcctcctccagcatggcgtccagctcgtccgtgagattggccagcatattgccaatgtcgttcagaacgttcaccgaaactttgggcggaacgccgttgtttatggccacagttggtacggctgcttctggcgaacttgcaggctccgccgttgatccaccggcatttgacatatccaatgtgggtgaacgcaggtgcaaggcacttccaccgctggctgtgctgcccatgctttcactccgcgccaatgtggcatcgtgcagcgaactggaagatttcaacgaatggaacgagtgcgctatattcgcgatggtgttcgtggaggaggagctggagctcgagctggaggagtgcaggtgtgcgggatggccgccgccgggtacattgttgttgcccgctccgccgccctgcagctcctggcggttgagcagccgctgttttatcgtcccagtgttctcgttggcaaatggtatcgtgtcaatcgaatcgatgctggaagtcgacttactgtcgtgatacttctcacagtgtatctccgccgttgtctgttgtatggtggcatagttggcgtagatcggctgctgaccagtacctgcacccgcctgctgctgctgctgctgccagtgctgcgccgtgtggccgtagaacatgtgctggccctgctgctgttgggctgcctgctgatgcgcctgcgcagccgctcccgacggcactccctctccgctcagcgtgcgggagttgcgtatgctgcagtggcgtctaggtggctcaggagctattttcttgcccgtcaaaggactgccgcccatgtaattctgtaatagaagatagctcttagtaagaacagtttaaaatccacagttgccactttggtgtcccttctattataaccaactatggcaaccacagataagtgttctaaggattcgtggaaccccaacttaccgctccaccctccacaccgctggccgcaccgtactccgccgcagccgctgcattcatgtagtgatggtgctccagtggcggcatggtgttcaacaccgcccgctgcaggatgccacgctgctggcgtggcagagttccgccgccctcctgctcgtagagcagctccctcgtggcatcgttggtgggtgtgatgtcgccgtcgtcgtaggatcgccgccatccaatgccaggcgcattgttgcccaggagacgggcggcagctgcctgctgctgttgctggtggagcagctgctggtgatgatgctgctgctgcagtgtggccgctgcggccattgccgctgcagccgccgctgttgtcggcggcccaaagtggccgtagtccgtggttgtgtaatggctgaaggtcagatggctgcgcgtgctgttgtcgtggatgtcctccaaagattccaggctcttgccgcgcggctggcgaacctgcagaaaaggataagaggctcgttaggaggtgcaactttttgaaattaatgaggccagttttcttctaagttaattggaaatcaacgagaaaaaaattctcaacaacagaaataataatatgaaaataaaaatattttttgcaaagcaatattaatgaagggtattaaacttaatttgatatttgttaagtaacgatgttcgcgatgcaaaagctagttcgtggctaaaatgtcagagggcacttaaaaagttcaaggccaacgggctgctacgctttttaactgtggaaaaccaagtgcccaccttaatgagcaccacatcgttgcccgagcagcactcatggttactgcccgtgcagtagtaggcatctccgttggcaaggctgctattgaggcagctgctcccggatggggcagtggaattcaagacactgctggtcgcgtagattttcgtgtcgtcccacgagacgcgggtggttggcacataggatggcgtactgggtatgggcacattgaattgccagggcttccgctggtactcctgtttggtcaacattccgacgaggggaaatcatacaaaacaaatgaacaaaatagaaacgaaacgaaagttagtggtaaattaaaatcaaattaaattaagactaaagaaaaaatacaacaaatgctttagattgaagtttgcagtaatgtaaaatttaaaaaacccttgttgtttcttcctaaatcccttgtattttcacccacttctcacctgctgttggtaggcattggcgccgcctgggttccactttccgctaattatgtccttcacacgcttgatggccagcagaattttcttttggtggcccagcttgacaatgccaatgtcctcgagatcctcccaagtcacttgggttacgtcgcgcaccgtcttatagttctgctccagcaggggctgtatatactcctccagacgcagcagctgcagccattcctctatggatccctggaaatgcgaggggagattcgaattgagacgtcattatcgttatgttttattgaagccagctaatcgcatttgattaatgtcagagtagggaacaacacagatcgcctcacagactacaaattgtccatgaactagttcagacctcgctgataaaggggggaatcaaaacgaatcgaatcgaatcgaatcgaatggaatggaatgggttacatatatatgggctggtgtctctcatgatgagcctacccacccgtcgctctaatcagttgtaattgataagatatgacataaatcgcgtcaaagcacgggcataaagaaacgaataaaagccaaaactcgttgctgtcgtcattaaacggtagcaggctagcccgactcgtaaccaaaactcgctatataccccaccagatatatacacatatgcgatgcagtcaaaaatcgttagcttttcagtgcgtgtaaagccactttttcacatacacacattatgctccatgtacgcagcaatgtgttaatcagttttcctcatttttttttcttttttgtttgctctatggactgtctgctcttttggcagctaaattgctgttgatttcaatttaattaaacgccttgtcttctgcgaaatggaatgtgattgctggaagagcctcactatgagaaaatctcattgaaagcatttgattgctagaaaagttcgtctcatatagaagtatctattgaacatgacatcagtggagtacagacttagttgctttccttaccttagattttcttaccgataatttaattaacgcatgtgctattacattacatattacatattacatatatcattttcgaatttatttttgaagtataaaattcatatcttcattttctagataggtcatatgtctttccatttgaaaacccccccattaataccactcttttgttaagtaggtatgaaaatatttcttgatcttgagcttcgttgttcaattgtttacttagagaactctccaccgaggaatgtcacttcaaatagtatgttaatgtagtatttatgcctcacaactccgtcgaagtgaatgtcgcagcaaaacaacaataataacaagaccgcaactctataagccgcatatgctaatcgaaatcctccatcctcgaacaaatgggcgaagatctccagcaggcacgacaccatatattaaaactaaaactttaacaaaatatttatctaaataacaatttggtttttggtgctttggtggcttcactttgccgttcgcttctccgaaatccattagcaggtagcatatggtatgacactaaacagcagcggcagccatcattagagcaggcgaaaaaaaacccaaaacaggttttcgaaaagcaaatcggtgaccaaaagacaagaaacaaactgtacgtactatgtacaacaaaagtagtaaaaagttgaaatgaatgcgtcagtcggaaaaccaaaaaaaccaaaaaacaattttggactccgctaacggaaagcgagaaaattatgaatctatgtaggtatgtatataagccaacttcagcgatgttgcgaccctcaaggtcgtttgctgattgtgggactcgcagcggagattggcgaccgtttaataaccttttcctttctgcgctcactctttcagttatttcgctttatttcctttttcgccacgataaagatgtgtgcgaaaaaagaaagccgtagaggctgtagaatgttggctaatgagcgaagtgctcgagtcgctcgttatgggtgatgtaagtgaaggtacacgttaaaaaatatatgataggaaagctattagatatggtaaaacgaaatattaagcaaagttaatgtatacttgtatcttaaagatagatatttggggtatacatatatctaagttagagttttaagtactttaagtagcaggaaatcacaattgctcagtgttttggagccctacaaccgcacccaaaaataaaaaaaaacaaagagtgtttcgcccaagatcaacaaataagaaatatcgaatgtagcgataaaaaacgacaacaatacgggtacgggtaggtaggtaactcgaccgcagaacttggctaacttgcgaaaacagtcacggcgcgttatataaacagaaaacaagtataaaagaaggaatgccgaacaacaaaaagctcaatatattctacacagctagtaaaatattatcgagcatttttttcagctgaaatacaaaaccgtctctgcaaaataaaaaaaaaaaccccgagctgaggtcatatagtgatttgaaaaattgcagctaaaaagcatggcaaatccgcttttcaaagtttcgaggcggtgcgataatgaaacaccaaaatggaggttattagatggagcaaaactggcaattaatcgaaatcgaacggaatgtggaacaaaagtcgttgagtttgttgaatcgatcgataaaggcgataaatgatattttctgtattcaatccgccggcggcaggtgggctgcactatagccgagtgggcggggaatgcagttatacacccatacacttataactttagacatatgtatgtatgtatatgcatctgcagtcgaacgaaatgcatcagacgaagctgcagttgaagttgaagattatggccgttgggtgttaatcggctacggaatgcagctcactgtgaatatggaactcgtgccacgaatgtggttggtatgaacaaacaattcatgttaatttatggaggcattttttttttttgaaaaacatttttggagcatttcttcaaagccacaacacattgacttggatttaaattcgttttcaggcggtgcttaaaattcggaataattatgttggtcaagttttaaactttgaactggattactcagtgatatgcatgtttcgcatcttatttggtatgcatttccatatgcgcagcgtgttgattttattcggggttagtcattcgacttgagagcgttgtttagggccaaacgtgaaatgcatattgataaaagctcaggtggttgcatttagtaaggcacgtacttttcgtacgaattttggtgcagttaactggggaaggtaagtttgctgaataatcttacaagctcgacttttaaggcggaagtttggcatatacatacataggtagttatggaaacaaacccgaactttcatataataataaataatttaaatattaagaaacaaaagaccctacccataaccaattgaatcgcggaagtaatgccagcttatgcgaatcctatccagattctgtctgtatcttttggtcttaacagtttgttcacctgcgattactcgattcaaatcaattacttctgcggctagaacacgactttgaatggcatttcactgaatgagctttgttgactccatcatattagccattcattcagctggaaccttgatctgtcagatcgattggctaatgatcggcttcgatccgcagagcaattatctgcgatggagcaggttgctgctgctatttcaagttcaacttaatgtcaccgcagcaatccacacgaatggacttttagttttatatatgtatgtgtatttattcacttcgcttttcgtgtttttaatgaattgttgatgggaattaatgtgcgcatatttaataaaaattaaattcctttattaaaaaaaatgagctgacggcgctgttttaagttctctttttctccttcgcatgtgggaaacaagtttattttttcagctcgctctttttcccccttttttttgcaaatgcttatttaatgaatataaaagataagccggtaactaaacaagcaaacagagaaaacggcgaaaagagagaaaaagggtgttgccggccacaattaatgccaatatggcaatttgccaagctcgtagccgtgcatatgtgtgtgtgtgtacgactatctgtgttaacaatgactaaataagttgctctacgtgattgcaggccaacgttcacagtagttgatcgctagtcgagccattagttgccataccaccgctttttaatctttactgtattcaaacttgatcgctaataagccacttcctttccaatcgatttaagttttacttttcctttccctatttcagcattttaagttgattacttcaagaacttacgaaaatgtttaatgttttctatttacaattaaacaaaaggtttttttttgtcaacttaaatacctaaacatgattacttatggcaaagaacttctcaatttgaaagtaactgcaagcgtgtccatcgaaaagtctctactgtaccataaggtgcatcacgagttgaactggttctgtactgattagataggcaaatatttgccgggcgtgctaacaaacagagatacttttccggaactctcgactttattgtgaagagataaagtccgtttagtgtttctagaacaccttttacaatacgtttaaggcttttacttaccggcacgaaatgcggcaaattgtcgagcacctgcagcttgtcgatccgctgcttgatccgctcccgatgatgcggattcttaatgccaatggcggtgagatcctccggcgtcatgcgcgcaatggtgggcagatcatagcccgcggcgatgaacagctgcgcgtactcctcgtgcttcatctcgagcagccagtcgatgatgagctcatcgttgcgctgccgatccacactgccaatggagcacgagctgacggaactgcagcgcggcgaggagagcggagcacgaatcgaggcgcccgacgaggacacgcccgtcaggtaggaggaggcccgacccgagtccaagctggcggtgctgtgacgagatccagagcccgccgagcccgacgacgagcccggcgagtctcggccaggcgattgggttagatcgatgccctgatcctcctgcagggccagctgttggtggtagtagacggccgctttgtgggtcagcggttcgcgcaaagtggcacagaaaacgggtggcggtggaaccatggctacgccgggctttccggcaccgggtggtggtgctcccaccaccgtcgctccacctcctcctgggccgccagtggttggggctgccgttgaagtgccacccacttcatccttaagacgcagggccacactcgtctcccgcggcaaattgaagccaccctcctccagcgagggcgacgaaacgatgctgctgccgctcatgctgatcccatcgtccgcctggtggttttgatgatggcgcagtggtccgcttagccgatagagcggtatcgatggctggtggtgcggatgatgatggtttgggtgttgatggtggtggtggtgaagctgctgcggctgctgatagagatgcaaatcctgcggcgagtcgcctggtatcgttggcggttgcaccttcttagcctgtgcggtggatgcatgcggcttcagcgaacgatgcatgattatgatgcgcctctactggccgccggggccgtatcttcgccgactcctggtggaaaaacacacagaaaaataaaagaatgaaaatgggaaaatcagtactgcagttgggcaaatgtgtccgccagatgtgtgtgccagaaaacaagaaatctgcataattggtcatagacggttttgatgttctactctaaaaatagggctcacaacactgtttacatggcgagtcaataaactgcgcctcacgggttcttcaacacccctccagcttcatgtttttaggccccaacgccccaatccctcatccatttatctactccactgcattacaattttcattcacaaaaaagttgttagctcaaaaggttgcgacgggcgaaatacccatgcttaatcattacatcacgtgatttaatagcttttgtaaactgagcgaatgatgattttcggtgtttaaatgtataacttgatcaaatattttaaggtttttcagagctagtttggaaaagttattatatattatattatcattatatagtgaatcaaaaggcagtggtctaaaaattgaatttatttccaatcttaaaatgaaatttccctgagtttcccaattaatttatatatttttccacagatgtcaatatgtctgcccgatatgcccttgatgcccccaaaaaacaaacaaccatgcccctgttctaagcagctgacagacagagacggcacgaggcggtcggagggagacagggcgagacctcgcaaaagggcgaggactatgagactttggctgcggcacgagctgtgtcaaagttcgttgactgcattctgtggtcggtcgtagggggggggggggggggagagaggggttgggaattgggcctctgtctagtcggcagcgtcataatacactcgaaaaatgcacgggcagacctcggacgagcgaaatctgacagaaagtcacgaacgcagccctcaacatgtcattaacagcagggcgcagaaataaagcggcccgatttacggggaaataataaaagagccaagctgcagcagcaatttcctggcaattcgcgtacaaagtaagtaagtaagtaagtgtgcgtgggcacctcaaatgaaaatgaaaaatggaaaaacgaaaaacaagtgtttcggaattcgaaagcatgcaattgcaattgccgccccgaccgactatcgataactggcggggcggccacctgttcgattggagcctcgctgcccggccggcgagtgaaaatccaaagcaccaggtgtcataatccgagtggttttccctacccaaaaatgtgtgtgtgtgggttacgctggaaaatgtacgtataggaaaggcgtaggaaaaacagcaaagcgcataacggtggcagtagtaaatctcatttacaagctgcctttttaatgaatttttatgtatgcgacgtgccggaaaaatagggaaaaaactgcaaccgttgcgaaaactcctccccaaaccgcaaaaagagagtacaaatcctctctcgtcgagagagcgagagagttttttggcgtagtagggtagtatatcaactgcagcagcaaatgtgggttgcggtttctttgtgttgtgtgttgttttgccgcccacatgagctgcacccatgcaacccccaccccccttcgccaacaacctttcgtataccgaaaaacacccacccaccagatgttgttgaaccgtttcatgcggccggcattgcagtttttttttttcattatttaaatttttgtctttttaccccgtgtttttgttatcccatttttatgagctaccattgttgttaggagctgtaagtttaattgcaaacatggaacaggcaagcccccacactgctacataaaaggggggaaggggagttggggtggtgcaataatgtgcagtgagaaaaaaatgacaaatactttaatattggttagtaaagctgtaggagattcgaactttttataatattaaaacctttactataattcaattaaatatttagatatagcaacaagcagtattgagaaaaactaattaaaagagaaaattgacatattccacttgtgtttttttcagtgcacaccctgtaatgtgggtggtgagtaatcgtaatgagcataacacttgccctgtcttgttcatgcccagcgaatgccggctttggctttaaagtgtggctataaaatcgaaatcaattttgaatctattgacaggggtctcccctggcgagtgttcactgttgtgcagcataaaaactgattggaaatgcaattggaggcttgggaccttttgggtgttggcaaatacataaatacaaaagggaaatagttggctggcggggagttgggtggctggttgggcggcaaacaggctaaaagatttattgattgtcacacacacacacattcgcgcacacacatattgattgatgtacaatgaagcggagttgcggttttgaagttggcagcaaaaacgctgagcaactaaaaataattatggttacaccagagctctcaacacattgaggcgcacagatacaaagggagcagcggcaaatgataaatcagatacaaaatgaccgcaatctttatactctacgaaaaagcttagatacaaaaactgtaatggattccgcccataatctttataagacgtgggtattttggtcactttagggattaaagaagtctgtttattattcagaactcaataactgtcaggaaacccaagacttaagaatccgtgaaatgtaatcctttgaaagatggttattgactcttcacccttccgtccaaaagacgactgagaaaaagcgtatttaatcttcgctagattcgttccatttagtggctcgttttcttttctttcatagcgtttttgtcgctgtcgagagccgttaaagtttactggcatgagtaatcagccaaatggagcgcaataaaatggcaaacggtaacacggccaatctatcaccagaacggccagctcagtgggcacaccacccactaaacaccagacccacccccgcattggacccactagatggcacatagtgcgatagtatggcgacccacaggaggttggcatcaaatgaggcgcatctcaatctcatgtttattaacgccgccagtgagtgagtgtgtgtgtgtgtgtgtgtgctggtgtcattaagccgcatagataaagtaaggtcccacagctgaaaaataaaacacccccatactatcccgtacacactccactcggccagcacttcgttattgacaacaaaaggttggccgactctgcttcttatttatcagctgcgggtgttttgcatatgacaagtttttttttcactctttcactcgctttttccctttttttttatcccctactggcctttattttctttattttgcctcccaaaatgcaatggactaagttcggtcgtactttattcgtatttaccacgcccgggtctcaagtagagaaaaggttttgtacttagtagaatattctgtcaagccaaacaaaaagagagaaagctacacaaacagggagaaaaacaccatcaccaaaattcgtcatcaaaaagtttaagtttgggaaaatattttaaaagctgtattaattatttgctaaaaaaaagtataagcttgtggtgtttataattctatgattatttctttatgattaagaagattttgtgtgaccatgcgaggaaaaaagtggtaaaactaggatcatattcaataaccaaatattatgaactagatctgtccaaacagtgattatgaaatctgttagtgaatcttgatggatttgatttagtttttttccgctgtgcaacagccacaataaacgtggagcgacaacaaccaacgagcgcacaaaagatggtgtcgatgatgctgcttggctgttgcctgcctcgcgattccctgccgccttaaaactttaccatctctttgccacaaaggctgtcgatagctcgagatgttgatcttgcaaagcgcagagacaagcagcaaccacaagcttcgactgagactccaactccaactccgactcgaaactccagcaacaataaatggccagaggcagccaaaacttgttttgcctgtaaaagggagttgtcgctgttgttgttgttgctcgtgcattgtctctgcgttttgtttcaggtttcaggcaaacgccaagaacaggcagaaacagcgccataacagctatatgaagtgaaatgcaataaggagcatcgagggagctgtactgctaccctataccttaaagaaaatgaggacagtttgagctggagaaatgcaaaaaatacctaagaatcaatttagaccccaaagaaaaggaaatataagaatattcactgcaattacagttttcaattattgtcaattagaactagaaagactttgcatttccactttgcttgattgctctaattaaacgacatttccaatatatccttttgcaattattagccattttcaaagttcatctttcttgaaaattgcctatgaataaataatggtctaatggcggcagcccattcccagccccattccaaaatcaataacgcacatgttcaatggcaatggccaaattagacgttcatgttccattaggagtagcccaccccaaatccgtaaatcacactacgaattccacccacagctcgatccgatatacctcgtagtaccccctattattatggtcgatgttttggaggagcggtataaagctcgtaggaggaaaatgcaacgctgaagatgtgtcaaatgtgtgggcgggcgggcgctcggtaaacggacagacagacggacatactgacgaacggacagacggataacttacgtgcagtttaacggttaatgcaaacgaagacgacattgcgttgcgcatatggcatgtagcacagtcagtacaggaaaaatgaagacagcaaacagagacggaccaaatacggcggacaggcacgtagagaaatatacgccaagtcgtaccaaaagcggccatcaattccttctttttgtacattttcttctattcagtttttttttttttggtcaagaagaaaggggcaaacaagttgtaaggcgagcaatgagtgcagacaaaagcagttacaagacatgaagaagaaaggcaagggagataagtgggaggtacacaggaaaattgtggatacttttcaagtttgattagacacttataatgtcagagatgacaggacatgaccccacatggcagtagtttgtctgcaataaaatcacgcgaacctgcaaggattaaatcgccaaaacctactgcctcgtgaaaatatcaaaagaagggcaaatatttacatcttttccaggatttccctaagaccctatccacctatttggatataatatataattaaacccaagaaacgtgccttctagggatgtactaaggtatgattttaatataagcgtgggtatgaattttgagagtaactggcatatataatactagaaccatttaccaatttatatggcttaaactactttttttcggtgtagtcattaataatgaagggtagtgctcagcgttttacagctaaattgaacgttttgagacttttttaaggcacttgccttttgccccgcccaccgcctacaattttcggcgaaaaatcgtatgcggcttactactacgcacacacacaccacgaaacgtagtcacacgcacacatgcgtacgattttgcagaacaactgtgcaaaaaatatgcaaattaccatgttaaaatgatgaattccttcgagatttctatgcgaatccaatgatgacacttaaaattcacattaactgcggttttcaccaagataccaattgatttttcatacgataaatgctgtgcaaaaatttctttttacgttaacaccaacacacacatgcacgcactcaaactcacacacatacacacacacacgcgcgcgcggacatataccgagcagaaaagtagctgtgtgttgagaattggagaatcgcagaccccgagcgagaggagcccgaaaaaagagaagcgccgacgaccgcaagccaaagcgtattgaatcgcggctccagcattcgagcattaaagccaggtccgtaaaatccgattggagtccggagtcctcgaagttgtaagtgagagagacagagagagcgagccagctgagcgagctccaaaggagagcgaatgcgcaacttgtacttgtacttgtcctccccttcccctccccttcctttctatcattctcttgcaaggagagaaaaccatttttctcagcggccaatttgttgcaattgaaacaataacaattccgctgggcaatttgtttcgggcctggcaaattagttagttaataaatgaatgaaaagggggaccgagggaaaggcggtagtgaaagagaaatgggaaaacaaagcgtagcttcaataagcaggcacaagcattattccctaaagtggttgccattggcaacgatggaaatgcacttggcacagtggaaccgcttactgaaggcggctacaagaagttcaccgaagttctgctaaagccctaaagtacccaaactgtaagatactatatacatatgtaaatattagatactatataaagattgaacatattaagttgggcttcaaaaagatagagccctatttatacgttcaatgttcctatatataacttcaagttgtaagatattaatagatcgttcaacttggtttacttttccattgcagcgagaagattaatgagagggagtggggacagcaattgataatctccttatctgtcccactgtgcgttgaatgccacgcaaaagacaaacaaaccgaggcacgcacacacacacacacacacacacacaagcgaatgaaccaagcacaaccacttttcatgccgcacaaggcaataagagaaatagagagatggagccacttggggagagagcgcaagagcgagcgaggctccatcggcggtaactctatttgagaaccgcgcagctgcatgctctcgctctctttctctgcctctaatctcttggtggagccattgccgcccgactcccctccccaaccgttattctaacacttcattggagacaacgacatcaagtcatttgattcccacacaaatctctgcatattgagcgcggactctctctacatctccagctatctcgctctcactcgttttattatggcaagtgagttatggtttttccggctgtgtgtgtgtaagtgtgtactgctgcgctttctattgatttatatgagttttatggcgcaatctgagctataacagccaaagagcagaaaaaatttacgtagagcgctggtctcgattttaattatggcaagggacaattatgcaaacggagaattaataaaaaaaaaggaaaacaataaagaacaagactttaagttttattacactcccactactcacgaccagagttgtcacgtgtcgttcgcaatgccagacacgtgttcgtttattaattacataagcctaaacagcggcagctgcagtcgtgagtacccctcctcctgattgtcttttgtttcctctatttttttgttgaaaacccaatttcctgcagatgctaaagatgccgcattgaatacaaggcgcatcgaaacagctggcaaccctcataagtgacagatggcgacgccgacgtcgacgcaggcagcgcaggacgaaggccgcatcaaaataaaaacacaaaaaagagttgccgcctgtccgaaatgtaccaaaaacaccaagacccatttaagtgtaaacgtaattaagtgtacatattataaacttacgttagcagataatattactattttccaggcttttggctaagttctctccgctcctcctcttaccgttcgacaaatcacataaatcacaagcgtaacgaaagctggcacacaaaatgtaaacaatgtaaaacgctcgtaattgttgcttttgtagcttaatgaatttcacgttttttatggttttttccacaaaaacaagagactaacaaacggcatcaaacgcacgcagacacatccactcgcaccaaaactcactgtttgttgtctttattttatgtctacgacgcgcgagtaaaacataaaaaccagattaatttcaggcagacgaaaatgttgacgcttttttttttgttggtttcttttaagctgaatttcttgctcagttgttgtggtcgcgagtgctcttttttatttgctgagccgccattttcttttgtggcaatttgttgagttttatttattttttttattttctcagatatattaagcactgctttcttactttgtaattataatcactttactttgttgtgatatccgtacttgtgatatatttcgtttttgaatctaacgacaaaagaacgggtttccgctacaaacgtccgaacagcggaaaaacgaaaacaaaacttagtgtgatcgcagcgtggctgttggaaaatacctcattaataaaacatcgattgcacacaaagtattgacgtatcgatgttttagtatttttgggtcatctgctca

SEQ ID NO: 29258 - DNA, 2933 bp, DROSOPHILA
acaatcaggaggaggggtactcacgactgcagctgccgctgtttaggcttatgtaattaataaacgaacacgtgtctggcattgcgaacgacacgtgacaactctggtcgagtcggcgaagatacggccccggcggccagtagaggcgcatcataatcatgcatcgttcgctgaagccgcatgcatccaccgcacaggctaagaaggtgcaaccgccaacgataccaggcgactcgccgcaggatttgcatctctatcagcagccgcagcagcttcaccaccaccaccatcaacacccaaaccatcatcatccgcaccaccagccatcgataccgctctatcggctaagcggaccactgcgccatcatcaaaaccaccaggcggacgatgggatcagcatgagcggcagcagcatcgtttcgtcgccctcgctggaggagggtggcttcaatttgccgcgggagacgagtgtggccctgcgtcttaaggatgaagtgggtggcacttcaacggcagccccaaccactggcggcccaggaggaggtggagcgacggtggtgggagcaccaccacccggtgccggaaagcccggcgtagccatggttccaccgccacccgttttctgtgccactttgcgcgaaccgctgacccacaaagcggccgtctactaccaccaacagctggccctgcaggaggatcagggcatcgatctaacccaatcgcctggccgagactcgccgggctcgtcgtcgggctcggcgggctctggatctcgtcacagcaccgccagcttggactcgggtcgggcctcctcctacctgacgggcgtgtcctcgtcgggcgcctcgattcgtgctccgctctcctcgccgcgctgcagttccgtcagctcgtgctccattggcagtgtggatcggcagcgcaacgatgagctcatcatcgactggctgctcgagatgaagcacgaggagtacgcgcagctgttcatcgccgcgggctatgatctgcccaccattgcgcgcatgacgccggaggatctcaccgccattggcattaagaatccgcatcatcgggagcggatcaagcagcggatcgacaagctgcaggtgctcgacaatttgccgcatttcgtgccgggatccatagaggaatggctgcagctgctgcgtctggaggagtatatacagcccctgctggagcagaactataagacggtgcgcgacgtaacccaagtgacttgggaggatctcgaggacattggcattgtcaagctgggccaccaaaagaaaattctgctggccatcaagcgtgtgaaggacataattagcggaaagtggaacccaggcggcgccaatgcctaccaacagcaggagtaccagcggaagccctggcaattcaatgtgcccatacccagtacgccatcctatgtgccaaccacccgcgtctcgtgggacgacacgaaaatctacgcgaccagcagtgtcttgaattccactgccccatccgggagcagctgcctcaatagcagccttgccaacggagatgcctactactgcacgggcagtaaccatgagtgctgctcgggcaacgatgtggtgctcattaaggttcgccagccgcgcggcaagagcctggaatctttggaggacatccacgacaacagcacgcgcagccatctgaccttcagccattacacaaccacggactacggccactttgggccgccgacaacagcggcggctgcagcggcaatggccgcagcggccacactgcagcagcagcatcatcaccagcagctgctccaccagcaacagcagcaggcagctgccgcccgtctcctgggcaacaatgcgcctggcattggatggcggcgatcctacgacgacggcgacatcacacccaccaacgatgccacgagggagctgctctacgagcaggagggcggcggaactctgccacgccagcagcgtggcatcctgcagcgggcggtgttgaacaccatgccgccactggagcaccatcactacatgaatgcagcggctgcggcggagtacggtgcggccagcggtgtggagggtggagcgaattacatgggcggcagtcctttgacgggcaagaaaatagctcctgagccacctagacgccactgcagcatacgcaactcccgcacgctgagcggagagggagtgccgtcgggagcggctgcgcaggcgcatcagcaggcagcccaacagcagcagggccagcacatgttctacggccacacggcgcagcactggcagcagcagcagcagcaggcgggtgcaggtactggtcagcagccgatctacgccaactatgccaccatacaacagacaacggcggagatacactgtgagaagtatcacgacagtaagtcgacttccagcatcgattcgattgacacgataccatttgccaacgagaacactgggacgataaaacagcggctgctcaaccgccaggagctgcagggcggcggagcgggcaacaacaatgtacccggcggcggccatcccgcacacctgcactcctccagctcgagctccagctcctcctccacgaacaccatcgcgaatatagcgcactcgttccattcgttgaaatcttccagttcgctgcacgatgccacattggcgcggagtgaaagcatgggcagcacagccagcggtggaagtgccttgcacctgcgttcacccacattggatatgtcaaatgccggtggatcaacggcggagcctgcaagttcgccagaagcagccgtaccaactgtggccataaacaacggcgttccgcccaaagtttcggtgaacgttctgaacgacattggcaatatgctggccaatctcacggacgagctggacgccatgctggaggaggagaagcgagtgggcctaaacatagacagtgaataa

SEQ ID NO: 29259 - protein, 924 aa, DROSOPHILA
MHRSLKPHASTAQAKKVQPPTIPGDSPQDLHLYQQPQQLHHHHHQHPNHHHPHHQPSIPLYRLSGPLRHHQNHQADDGISMSGSSIVSSPSLEEGGFNLPRETSVALRLKDEVGGTSTAAPTTGGPGGGGATVVGAPPPGAGKPGVAMVPPPPVFCATLREPLTHKAAVYYHQQLALQEDQGIDLTQSPGRDSPGSSSGSAGSGSRHSTASLDSGRASSYLTGVSSSGASIRAPLSSPRCSSVSSCSIGSVDRQRNDELIIDWLLEMKHEEYAQLFIAAGYDLPTIARMTPEDLTAIGIKNPHHRERIKQRIDKLQVLDNLPHFVPGSIEEWLQLLRLEEYIQPLLEQNYKTVRDVTQVTWEDLEDIGIVKLGHQKKILLAIKRVKDIISGKWNPGGANAYQQQEYQRKPWQFNVPIPSTPSYVPTTRVSWDDTKIYATSSVLNSTAPSGSSCLNSSLANGDAYYCTGSNHECCSGNDVVLIKVRQPRGKSLESLEDIHDNSTRSHLTFSHYTTTDYGHFGPPTTAAAAAAMAAAATLQQQHHHQQLLHQQQQQAAAARLLGNNAPGIGWRRSYDDGDITPTNDATRELLYEQEGGGTLPRQQRGILQRAVLNTMPPLEHHHYMNAAAAAEYGAASGVEGGANYMGGSPLTGKKIAPEPPRRHCSIRNSRTLSGEGVPSGAAAQAHQQAAQQQQGQHMFYGHTAQHWQQQQQQAGAGTGQQPIYANYATIQQTTAEIHCEKYHDSKSTSSIDSIDTIPFANENTGTIKQRLLNRQELQGGGAGNNNVPGGGHPAHLHSSSSSSSSSSTNTIANIAHSFHSLKSSSSLHDATLARSESMGSTASGGSALHLRSPTLDMSNAGGSTAEPASSPEAAVPTVAINNGVPPKVSVNVLNDIGNMLANLTDELDAMLEEEKRVGLNIDSE

SEQ ID NO: 29260 - DNA, 2366 bp, DROSOPHILA
cttgttgcccctgccatttgcaagagaaaagctgagctcagttatggttttaaagttgtccgctgcagttggttccgtatccgaatcgaaatcggtcgatgtgagtgcgatatggtgatatgggatatctgtgcaaatcttgcattagctttgcaaatcttgctgcatcacttgagcaaatcgtgcaatatcaatataagagtgtgttatctatcgtgataataaaggattttttcaatctgttatcgttttaaaaatagttcataatcaaaggacaaacaaaacggaaagattaaaaattttaaagattctctaaaaattataaaaaggagaagtaatcaataatcctatatgaaggctaacaaactgttgggtacttatttattttagcggaggttctaaaacacttaagggtgtgcataaataattagcaagcaattacaagtaataggtttcgattgatttaaaattgttttttttttttcttaaaattgtgaggtaattgtagaaaagttgttggagtaggcttgagcaataccttttaagtttgttactttccgtgttctctcatttcattgtacgtacgttgacacagttcccacaggacaatttaaaatttaaaacacctgtttgcagtggcttaggcatatatttatggaaaggaacaacttaaatagttagaaaatgtccaaaatatatggtgtaacaaatgaaatataatctaataagcgtgtatcatacggaggacatgggtgaagagactccctggtacgcccatgtccttttggagcggcacatcattcagaaatcatgcatgaatcactatcgcacgcatcacactgataaaaaaaagagagcgcagaaggttgtgggtgattaccacccctaaaaagcccgccaaccccaactttcgattctctcgctcgtgggcgaagtagtttcatcccctgagcgaaacggttatgcacatagagaatattttacattgctttaaaccattggtttattgttctacggaaacattgaattcctctttttaagttagttccaccaaactagttggggaacttacttctttttgcctttgcccttcttggaacccttggcttccttggcggctggttccgctgcgttgttcgattcggaagtcacaggatcggcggtcggcttggcaccagctggagcggcagctcctttcttagcacccttgtttgattccttttttgccggcattctaaaagaaaaatccggaaagtatacaagttttaagcttgtgtctaaaaatataatttttttttactaacttcacagaaatttggaaaaaatcacagcgattttttcatcagccaaaatcgatgttgctcgcttgaaatttcgacaaaaagtgatttcgtttgcatttagttctatcatctcgaaactaaatgtcaacgcttgcttagaatgtatccagtttagcaaaaacaaattttgaaaaattaaccgttttgcgaatcggttaatgattcgcgccagttttggggggcggactctctttgaactctccgtaataattccgttctctctctccgtcagttgtctcgttattccgatttccgtgcagttgaggaaacgaaagccaagtgcgcgcaacataggccgcataaatttctagtgcaatttctatttaggtaaatttagtttttagcgcaaagtgaattcctggcactttaggaatccactcataagttgatacatcttattcgaaaaaaaagtgtcagatatctataaagaaaaaagcaggccaagttttttttcggacgccgcaaaaaaaggaatcacatcaattatcgattttgtgcacatgaaaagcgtttctgcaattacctagaaataattgctcaaattccctcaaaagtcaagtgcacaaatcggcgaaataatggcagccaagcggaatgcggtgaccacggaagctccggaatcgtcggcgcccggcgaaggtaccgccctcgccctcgactcccgcctgtccaagcgcgtggagagcgtcatccccaagaagcggtgagtgccaaagagtgccaaacaactcaaactaagcccctttcacaccaaagaaatcaatctaaaccagaagattcaatttcagttttaattgttgtatctatagtagtaaatatttatgtttaatttagtttattttagttccaaaaagaaatttaaagtatttttttgaaacatttgtttaaattaaccttaagtcggtaatgggtgtagtttactaataactttatttaaccatttaaattaaaaaaaaaaattccttgttttatcacaattgaagccacttagtccgtatttattctaatgcaatttttatgtta

SEQ ID NO: 29261 - DNA, 296 bp, DROSOPHILA
gcgagcaacatcgattttggctgatgaaaaaatcgctgtgattttttccaaatttctgtgaaaatgccggcaaaaaaggaatcaaacaagggtgctaagaaaggagctgccgctccagctggtgccaagccgaccgccgatcctgtgacttccgaatcgaacaacgcagcggaaccagccgccaaggaagccaagggttccaagaagggcaaaggcaaaaagaagtaagttccccaactagtttggtggaactaacttaaaaagaggaattcaatgtttccgtagaacaataaacc

SEQ ID NO: 29262 - protein, 54 aa, DROSOPHILA
MPAKKESNKGAKKGAAAPAGAKPTADPVTSESNNAAEPAAKEAKGSKKGKGKKK

SEQ ID NO: 29263 - DNA, 3557 bp, DROSOPHILA
caagctgccaaatcgcggagatgcaacaagaagctccctgatttcgccaccgcgccacaagcgccagccatcgcagtaaagccatttcgtattagcggccaaatcgacgaacaaacagctagtgactaagatttaaattagcatttcgtagagctgctcagaatacattccataccgccatactgcggaaaggcacaagggcagcttacacttttcatatgtatattgtataactagaattcgtttgtcgtacgttttatttatttgtaaatctaatttaatcgctaattgtagtagcagctaactctgtgtaatcattctgagacacatcgatcaactaatgcaattaagtactactgcacaggcctgagctaccgatcttaaagtagccgacaaaccaaccaaccatatcaagcaaccgacaatgcaaaaaacgatatatattgtactaaccagaaataacgaacagtgaatcaaatcaaaaggttcatctttaggataaccgggtgtatttaataggaataaaaccaagctaatttaaaagcaaatgttttctcaaataaataaattcttaaataaaaacaagtgtttaatattaactattctatgctgactctgcctattgggctacctgaactttagtttaatattgtttcggttagttactatgctgagttttatattgctttctagactttgttcatagagtaaattcttcgtcattaggcaaaagattgagatactgacataagctaaatctctttgtttcgacttttttatgcacaatgagttgctttaattgctttttccatataaagcacgaagcggaaacattaaaattaaattaaaatatttgcaaagaagccacacaatatattgaatgttagtgcatattctatagaggttttatctatatttctagttaactaaacaagtaccaatccttgctatcccagagataaagctaatgtcagtgatcatgcattctcaagctgcgagcttataccgccctctcctcgtttccgggttctatgacacccaatggcatcagggttagtgctataccatcctccaggttaatcagtggtttcctggtattcaaggagaattcatactcggatagaagcagagccaatgccaatcgcagttgcagctgtgcgaattgtataccaatgcaactgcgagcacccacgccgaatccaaaccaagtgccctgctcctgcagcgaatcccgtggtccgctccaacgatccggcttgaattcctcgggatccggatagatatccggatcgtgatggatagcgtgcgtgggtatgatgaggaacagctccttgaccagaatgtacttgggatgatccggaactgcgtagtcatttaaggtgcgacgtaggatgtagggtgttatgggatgcattcgtagtgtttcgttgatcacctgacccatgaaactaagcgacttaatgccctcatgtgttatgtgaccatcatgtcgctcgatggccttcttgacctcctcccgcacacgtacttgcaattctggatgcaatgctagctcatagagtacatatgatagagtgttggccgtttgctcgtagcccgccttcaagaagacaactgcatgggcggccaactcgttctgcagatgggcacctagttccttatccgcttcatactggtgggtaataaactccagtgccttgacgtcgatcaaaagttgtaagtagtccttctgaggctttccggacgtctctcgttgttccacaatactcgtaaggagcttaataaaatactcctccgcctgtttgggcgtgcgacgcatgcgcaacattcgacaaaagttggggaaccggatcatcatcaggttcattaggtagccatgtttgtggctattcaaggccagctcggtcatctgctcaaaatcctccagaggatacgttttcctctgttcggcattcaaaccaaaaacgcatttggccaacgaagacagcacataacgcctcataatcttttgtatgtgaacggtggaatggggctggctcattagggtgctattgactgtcaagagaagctgttccgcctcctcgtacaggcagtcatacagcaaggacatgcgatcaccttcgagacttggatccaatttctgacgcatctccttccagctctctccccgcaaagcgtacagatcacccgacaaaggatccgacttttgattgcaatacaatcctcgatcattaaagttccaaaagtccttgatcattatttgcctaatcagctcccgatcgaggatcaatgcgcgtggctgcaacagggcgtagaatccgcagaagggaccgcttcccttgaacttcttgtatatggccgagtagtgctccgccttcatagcctccgtactcaatgtctgcgtcattatttgcctaatgataggccatagctttttgggtctctcgtgtggaatgtccagatagcgccaataatctcgctgataccgcgccgcaataattagcagaaccagcagcccgagcaccagcaatccgatgatgaggaaaatgatccacatgttttgcatttcgtacgttttgtttgctctgaatcacatgcacacacgtctgcgaatcggaaccactgatttgtttttttttttttttgttttttttttgctggcttgggttagcattcgtttcacttcctgcccgccgcccgctatcttgccacccactcactctaactggccgctgtatcgcgatcccgctctctcggacgtcaggtagtgtcaccaactatgatctaatgcatcgctccgtagcgttttcgaatcgttctcgatgtggtaacgttcattagcgaggcgcacgatccgactgagagtgctgcggagaaaagtaactatttacgatacacgctccccactccaggtgcggagcttttaatttgtttctttgccgcttttcgagtgcgctacactgaagctcgtcggctggtgggcgtctcactgaggccagacggacatacgattattattactttattttcaatgttggtggaaccgccagacaatcgcaacgcaaatgactcgtttatacgacttacaatatctaaataaacaaaagatagaatcggaatgctacaaccattgataagttttaactgatcataactgatgattaagaagattatatatatgattatatatttgccaaacaaatgcatactttgtaggatattaccgcagtcactttggctggtctaatatccttatctatacgcttttgagttcattttcgtttgttatcaattttaaccgaatttagtagaactttttgttggggctatataattttggggaattttttatgaacttatgatgtcctctaaaactcatttttaacaacaagctggttgctgataatatgcaaaatagaaacttttcgttctttgtttatgtacttttcattgatacattttacgcccaattaacgtttaaatggcatagaaataaaaaaacaagcgaacaaaagaaaagctcaatcgcaaagctgaaataaagccaaaataaatca

SEQ ID NO: 29264 - DNA, 1557 bp, DROSOPHILA
atgtggatcattttcctcatcatcggattgctggtgctcgggctgctggttctgctaattattgcggcgcggtatcagcgagattattggcgctatctggacattccacacgagagacccaaaaagctatggcctatcattaggcaaataatgacgcagacattgagtacggaggctatgaaggcggagcactactcggccatatacaagaagttcaagggaagcggtcccttctgcggattctacgccctgttgcagccacgcgcattgatcctcgatcgggagctgattaggcaaataatgatcaaggacttttggaactttaatgatcgaggattgtattgcaatcaaaagtcggatcctttgtcgggtgatctgtacgctttgcggggagagagctggaaggagatgcgtcagaaattggatccaagtctcgaaggtgatcgcatgtccttgctgtatgactgcctgtacgaggaggcggaacagcttctcttgacagtcaatagcaccctaatgagccagccccattccaccgttcacatacaaaagattatgaggcgttatgtgctgtcttcgttggccaaatgcgtttttggtttgaatgccgaacagaggaaaacgtatcctctggaggattttgagcagatgaccgagctggccttgaatagccacaaacatggctacctaatgaacctgatgatgatccggttccccaacttttgtcgaatgttgcgcatgcgtcgcacgcccaaacaggcggaggagtattttattaagctccttacgagtattgtggaacaacgagagacgtccggaaagcctcagaaggactacttacaacttttgatcgacgtcaaggcactggagtttattacccaccagtatgaagcggataaggaactaggtgcccatctgcagaacgagttggccgcccatgcagttgtcttcttgaaggcgggctacgagcaaacggccaacactctatcatatgtactctatgagctagcattgcatccagaattgcaagtacgtgtgcgggaggaggtcaagaaggccatcgagcgacatgatggtcacataacacatgagggcattaagtcgcttagtttcatgggtcaggtgatcaacgaaacactacgaatgcatcccataacaccctacatcctacgtcgcaccttaaatgactacgcagttccggatcatcccaagtacattctggtcaaggagctgttcctcatcatacccacgcacgctatccatcacgatccggatatctatccggatcccgaggaattcaagccggatcgttggagcggaccacgggattcgctgcaggagcagggcacttggtttggattcggcgtgggtgctcgcagttgcattggtatacaattcgcacagctgcaactgcgattggcattggctctgcttctatccgagtatgaattctccttgaataccaggaaaccactgattaacctggaggatggtatagcactaaccctgatgccattgggtgtcatagaacccggaaacgaggagagggcggtataa

SEQ ID NO: 29265 - protein, 518 aa, DROSOPHILA
MWIIFLIIGLLVLGLLVLLIIAARYQRDYWRYLDIPHERPKKLWPIIRQIMTQTLSTEAMKAEHYSAIYKKFKGSGPFCGFYALLQPRALILDRELIRQIMIKDFWNFNDRGLYCNQKSDPLSGDLYALRGESWKEMRQKLDPSLEGDRMSLLYDCLYEEAEQLLLTVNSTLMSQPHSTVHIQKIMRRYVLSSLAKCVFGLNAEQRKTYPLEDFEQMTELALNSHKHGYLMNLMMIRFPNFCRMLRMRRTPKQAEEYFIKLLTSIVEQRETSGKPQKDYLQLLIDVKALEFITHQYEADKELGAHLQNELAAHAVVFLKAGYEQTANTLSYVLYELALHPELQVRVREEVKKAIERHDGHITHEGIKSLSFMGQVINETLRMHPITPYILRRTLNDYAVPDHPKYILVKELFLIIPTHAIHHDPDIYPDPEEFKPDRWSGPRDSLQEQGTWFGFGVGARSCIGIQFAQLQLRLALALLLSEYEFSLNTRKPLINLEDGIALTLMPLGVIEPGNEERAV

SEQ ID NO: 29266 - DNA, 2306 bp, DROSOPHILA
tatctatagttttttttttcaagacgatttactgccttgctataactagagtttctactttttccgcgccaaagtggaggagcctgtaccgatgacccgtggatttatcgcgatggcatcgggcactgatccgtgctcggtttctacggcacggagcacgcgtggcagtggatttcgattgtgaagggcgtgcgtgagatttcggatcccgaacttaccgttactgctgctggagtggagacatcggtgccgtagcagggatccggttccagttttgccgctgtaggataacagatcgccacaggttttgcagcaggcgtacggctctatgtggtcgtcgcactggacgagattgaaaaacctccagacgcagcttttggtgttcctgggctcaacgagtttgcaacgcttgtccccggattttagtaggctacgaagctctgatttcttttcaacatgcatcgtggtgtatcggttgttcgatttgcggtggtaattcggtttgccaagaagaaaacaaacccaaattacaaaatgtacacaaatacaaactcacgaaaattcagtcacgcacaaaactgtgttggtaaacaagcgctagcacggtgcgaaaagtgtaaggtggtgtaaacagccactgattttcttaaaaagaacttgattgtaagtttaattttttttgaattttatttgtttcttatgttttttgaatattttcttttagtttaaaacctaaaattctcatatgactagcgattccgattacccatagtaaacagtctatcgataaactcaattgagttgactattgtatattgaatcagtagaatctttttatttaaatgggtaaagtttcgatggctttcctacagccaggacaatatcaaggcccaattgaacgccggagtccggcaattcaacaagaagcgcagtcgcggcaaagtctggaatgtcttctccagaatcgagcttggtcaaataacatggatgcacttcacacatggagcggcacaagtgctacagaacctatgtcatatatccaacatcagaggatgaagaggattcccactggaatccggacgtttccagtgcggacaaggctacagataagataaccgaggccctgatggattggtgcgtcgtggttagtgcgcgggacatcgaaacgcactacgatttcttcttggtctttgtcgccttggacagccaggaggataagattatcaaagaaattcaaggctaccaggcaatacagatgcctgcatgtggattagctgcaccgaaagatgttgcccaaccaatatgaataaaagaatcgattcttagctctagcttaccaaattgtaggttttcctagaattcctgttaatttaaaactattaatgatccacaatgtcgatacacaaaaaaatttgaaaaattaaaattttgaataaagaaaacaatacgaacatttaaagttttgtcaatattaccgttttcaagaaatccgccataaattaaaaccccagagttgcaaattcaaaaagctaatattttcgttatatgcatttatatacgttggtattttatgtggagttttagagttggcacagagagtatatttatcggattgctccacggtcacactgtctcttaattttttcgccgtcgccgtcgtttgtttttggaaatgtcaattgttgtgaatatatctgcttaattgtaaaaaaacgcccaatcggaaaaagcacaaatatacgcaaaaaaatttgcgaacaagcagcaaaagtaaatgtcatttaaaacagtgcaaaattaatacaaagaaaaatgctacattttgttgcgtctgctcctgctttgtgtgtgtgtgtgtttttgtgtatgtgtgcgcgttgttaaataaatgaattaaaagacagagttacacattttaaatgcgaaataatgaaaaacgagctcatccagtgctctctctttctcgccctctcatttttactgttactaaaaagaagtactccaattcacgcacatgcatacatacgtaagcccagtgaaaagcgaaaacaataagaagaaaatatagttggaaatccgctgcggttggcaattaaacatatcggttgggaaaatcggtgaaaaattatagctgtgctgcagtatgtataggcgtatgtaaatatgaaatatgtaaaggcagcaacagcaagcagagcagcatatacacacatggagaaatcgcccaaaaaactttctgcgcaagctgcggagagcgcgtgcgagagggagatagagtgacggagagtgcgagagcgagcgcgatt

SEQ ID NO: 29267 - DNA, 306 bp, DROSOPHILA
atggagcggcacaagtgctacagaacctatgtcatatatccaacatcagaggatgaagaggattcccactggaatccggacgtttccagtgcggacaaggctacagataagataaccgaggccctgatggattggtgcgtcgtggttagtgcgcgggacatcgaaacgcactacgatttcttcttggtctttgtcgccttggacagccaggaggataagattatcaaagaaattcaaggctaccaggcaatacagatgcctgcatgtggattagctgcaccgaaagatgttgcccaaccaatatga

SEQ ID NO: 29268 - protein, 101 aa, DROSOPHILA
MERHKCYRTYVIYPTSEDEEDSHWNPDVSSADKATDKITEALMDWCVVVSARDIETHYDFFLVFVALDSQEDKIIKEIQGYQAIQMPACGLAAPKDVAQPI

SEQ ID NO: 29269 - DNA, 3861 bp, DROSOPHILA
agctgggcgtgacgccctttgagcgaaagtttgtgaagcccttcaccgtctttggattcgatgttttccaggcgggcaccactaagtttcgatttggaggcgctttgggcataccggtgaactatggatacgacagtctggaggagattaagcgggcagacattcggtttagagacaaacagatcaactggagttctcccagcggaaaactgctagaggaagccatcgttttgaatgaggatgaacagattttcggtcttagcaaggctgttctgcagatgcaaacccatcgggtactgctcaactccatctttcccagcgtcagctttcttatggtttacaccatgggtcactacctcaacctgcggctagatctcttcgcccgccatggaagcgtgagttttcaacctctctcacttttaaaattttttactgatttccgtttttcaactaccaggtgcggtttgtgctctacagcattctgggtctgtttggcttagggctctggtccttcatgaaagactacaatcaggtctctacggacgcagagattgaccagcgactggccacgatgggtccccaacttgtggcagctggagctagcttttacgacaaacatctaaagaagaacatcgcgctgagggagctgattggaaatgacgtttacactgcactgggcaacgaaaactatatgattcggcaaaagtccatgccgctaacagcacgaaaatctttcttcctggagaagctggaggaactcaaaaaggcgcaacagcctgaaacagagtaaacacacatttattgttacatttttattgccggttgaagaaaatatatatgtttccaataactttacaaatatccttgttgtgtagcctataacagtggatgatagttgtcctaaacctaacaaaatttcgagtggattatctcgcctaggagtctcgaaaattgactagaaatcatgttataaatctggaatgaccaatggccaatgcacttaaaacgcttcctcgcccacaacatcactgatggtggccaccaggcgacgtgcatgctccacggcgcatgtggcggttaccagtcccagatgaatgcaatacaactcgtagacgcgcactttggccggtgacagcttggggaagcacaactccgccagatcgtggtaatagtccattgtaagagcacctggttctgttggggatttcgaaccgttgccactggctgctcctgtggacagaaagtggtgctgcaaatccacgacggtactaagaacgccaccagacatgtcctcgaaccagaggaagtacgagtaatggaatgccttatccttccacatcactgtggtctggcccttcttaaggtaatttctcgcgatctccaccatgctccagagttttgtctttggcaccagctggttcggtcgcagatccggagcaagcatttgtcctcggctgcgattgacgtacataaagtgcaccagacccggaaaatcctccaaataagcatcaatggatatgttacgagtggccttaacggccagaaattcagcgaactccagtagcttggcttccacattcgctgccgtatcagagagttgatccagctcatggacacttgagctgtcgcagcaggccagtgtgaatatctgcttcagttcctctccgaacgagggcaaattcgactcaatcctcacgagcagctcccgctcaaagttcttgaagtactcagtgtacatcttgcgaagattctcccatttagcggcgaacttcttcgtgcagttctctaggtcatcggtttccgatcgctgtttcagatatcgcttcaaagcggtcaaggcctgcacaataaacgattcgaggttctcgaaggcgggcttcagggcatccgaatcgccctgatgctgaacagccacgattttttgaagcacaaagaaggaatcgtagatgcagctggtcagtggcatgtgggcgtactcgatgacctgcaggagaacttggttaccatggagacgcgagatgtgcacgatactgggaacgcagccagagttcacatcataggagacaccctgcaggaatacagctactgctcgctgggaaggggactttggcgcttgcagggcgcgtgacatgaggctgaggaagagtaggtcggcggcagcaagcggcagagcttgccgagtgctgttcgcggccaccagcttgttggaaacgagcaacagggcgtgggctcggggcagtccgagctggcgcaagtgctcaagcgtggcgtccagcgtcagatgcactgtcctctttagttccgtgttgatcagcagcctgggcatggcctccagcaggtacgtctgatcctcctcccacaacaaagtctcatagcagtcgaggcactgcgtcagcaactcctgttgcatggcccccgcctgggcggcaaacaaattggcgccgtaacaatagcgcgtcagcgtaatggccacacccatttggcgacccagcagctccacgggtatttgtccgatcttcagaaaggtgaagccaagaagttcgccgaacaccaaattgaagccttgctcacactgcaggctggagtaggcattatcgaactggcactgcattattcgctgagatccaacgatggggctgaaaatctgcagcagtatgttgctgtccagggagccgccggactggagcaggccctgggtggtggccacactccggatcttctgcgccagcggctcgttaagcttctggtatacaacatcgttggcgctgttaaacacaatcagtccgttcattttcttatcagcattggcaaaacaccaaatacacaacaaaactttcaccagtgtcactggtgctgggtaacggaattcggtgtgtgttctgataagaaaaggtgaagacttcaagtcagcatttaacaacactagagcgattcagctctgagcaattcaacgcttttcaagccagaattatatattaaaagcctagtatacgttcgactttttttatccgaattgccaattgaaattgcttttagttgagttactaagtattgaactgtaataagtttcctgatcaaattaatttataatttataatatatgaattttcaaatttattgcatttttttattattgcaaagcaatatcgctttgcttagatatgaagaacacaattttaaaatttaattttatcccgatttacaaattaagctagatgaacgacttctgccgacgtttgaccacactgacgacagctgactttcttcttcttgcgacatgcgcttatgttatcattatttggacagacagtgatttgtccactaatacagcacttgaccatcaatgggacgtttaattctggaacacacgctgcagggccacaaggggcgcatctggggagtggcatggcatcctaagggcaacgtattcgcctcgtgcggcgaggacaaagccatccgcatttggtcgctgaccgggaacacttggagcacaaagaccatcctatccgatggccacaagcgcactattcgcgagatccgatggtctccatgcggtcagtacttggcctcggccagctttgatgccaccacggcgatctggtcgaaatcctcgggagaattcgaatgcaacgcaacattggagggtcacgaaaacgaggtgaagagcgttagctggtcgcgatccggcggactactggccacctgttcgcgggacaagtccgtgtggatctgggaggttgccggcgatgatgagttcgagtgcgccgccgttttgaacccgcacacacaggacgtgaagagagtggtgtggcatccaaccaaggacattttggcctccgcctcgtacgacaataccataaa

SEQ ID NO: 29270 - DNA, 1861 bp, DROSOPHILA
ttacccagcaccagtgacactggtgaaagttttgttgtgtatttggtgttttgccaatgctgataagaaaatgaacggactgattgtgtttaacagcgccaacgatgttgtataccagaagcttaacgagccgctggcgcagaagatccggagtgtggccaccacccagggcctgctccagtccggcggctccctggacagcaacatactgctgcagattttcagccccatcgttggatctcagcgaataatgcagtgccagttcgataatgcctactccagcctgcagtgtgagcaaggcttcaatttggtgttcggcgaacttcttggcttcacctttctgaagatcggacaaatacccgtggagctgctgggtcgccaaatgggtgtggccattacgctgacgcgctattgttacggcgccaatttgtttgccgcccaggcgggggccatgcaacaggagttgctgacgcagtgcctcgactgctatgagactttgttgtgggaggaggatcagacgtacctgctggaggccatgcccaggctgctgatcaacacggaactaaagaggacagtgcatctgacgctggacgccacgcttgagcacttgcgccagctcggactgccccgagcccacgccctgttgctcgtttccaacaagctggtggccgcgaacagcactcggcaagctctgccgcttgctgccgccgacctactcttcctcagcctcatgtcacgcgccctgcaagcgccaaagtccccttcccagcgagcagtagctgtattcctgcagggtgtctcctatgatgtgaactctggctgcgttcccagtatcgtgcacatctcgcgtctccatggtaaccaagttctcctgcaggtcatcgagtacgcccacatgccactgaccagctgcatctacgattccttctttgtgcttcaaaaaatcgtggctgttcagcatcagggcgattcggatgccctgaagcccgccttcgagaacctcgaatcgtttattgtgcaggccttgaccgctttgaagcgatatctgaaacagcgatcggaaaccgatgacctagagaactgcacgaagaagttcgccgctaaatgggagaatcttcgcaagatgtacactgagtacttcaagaactttgagcgggagctgctcgtgaggattgagtcgaatttgccctcgttcggagaggaactgaagcagatattcacactggcctgctgcgacagctcaagtgtccatgagctggatcaactctctgatacggcagcgaatgtggaagccaagctactggagttcgctgaatttctggccgttaaggccactcgtaacatatccattgatgcttatttggaggattttccgggtctggtgcactttatgtacgtcaatcgcagccgaggacaaatgcttgctccggatctgcgaccgaaccagctggtgccaaagacaaaactctggagcatggtggagatcgcgagaaattaccttaagaagggccagaccacagtgatgtggaaggataaggcattccattactcgtacttcctctggttcgaggacatgtctggtggcgttcttagtaccgtcgtggatttgcagcaccactttctgtccacaggagcagccagtggcaacggttcgaaatccccaacagaaccaggtgctcttacaatggactattaccacgatctggcggagttgtgcttccccaagctgtcaccggccaaagtgcgcgtctacgagttgtattgcattcatctgggactggtaaccgccacatgcgccgtggagcatgcacgtcgcctggtggccaccatcagtgatgttgtgggcgaggaagcgttttaa

SEQ ID NO: 29271 - protein, 596 aa, DROSOPHILA
MNGLIVFNSANDVVYQKLNEPLAQKIRSVATTQGLLQSGGSLDSNILLQIFSPIVGSQRIMQCQFDNAYSSLQCEQGFNLVFGELLGFTFLKIGQIPVELLGRQMGVAITLTRYCYGANLFAAQAGAMQQELLTQCLDCYETLLWEEDQTYLLEAMPRLLINTELKRTVHLTLDATLEHLRQLGLPRAHALLLVSNKLVAANSTRQALPLAAADLLFLSLMSRALQAPKSPSQRAVAVFLQGVSYDVNSGCVPSIVHISRLHGNQVLLQVIEYAHMPLTSCIYDSFFVLQKIVAVQHQGDSDALKPAFENLESFIVQALTALKRYLKQRSETDDLENCTKKFAAKWENLRKMYTEYFKNFERELLVRIESNLPSFGEELKQIFTLACCDSSSVHELDQLSDTAANVEAKLLEFAEFLAVKATRNISIDAYLEDFPGLVHFMYVNRSRGQMLAPDLRPNQLVPKTKLWSMVEIARNYLKKGQTTVMWKDKAFHYSYFLWFEDMSGGVLSTVVDLQHHFLSTGAASGNGSKSPTEPGALTMDYYHDLAELCFPKLSPAKVRVYELYCIHLGLVTATCAVEHARRLVATISDVVGEEAF

SEQ ID NO: 29272 - DNA, 2384 bp, DROSOPHILA
gagaatcgacgctctctcttgaaatcgcacacccaactggccaatcaggtttgagcactgcacacaatggcatttgccttttgggctccccagagattttggttttggttttgggttttagttaccgtttggcttgtgtgttttgtttttcggtgccttgtgtttgctgcctttggctttgtctttgcaggcgttgacactttggtttcccaaaagagctgaaccgaaggtgcctgggaatagagaataaagccaagctgaaatggagacccgagatcccaaaaccgagatcctagacacacgcccccttcgattggggacgtcgttgcgctggttccattcgcaccgttcctagggggctgctctcactcgctcccgctcgctcccattaggatgccataggatggtggtgggttcttttttctgctgacagctttgcgtctctccacgggattggccattggactgccgccaacccccaccccctccggcacgctctctccgctctcccagtggcgcagactcgtttcgtttccattttcgaaactctcgttggcctgccgttttaccctgcttctactgctactgcttctttcgctacggccgcctttgtggctctgctgcgtcgctgccgctattgctgctgctgctgcgccgtcgccgccgcttcttttcgactgctgcagcagcatcgcttggcaaggattcagttggggtttaacagccactcgggacggtagcgcgcgccgctcaaacttgttgcgagaccaattttccgaaaatcccaaattctctacggtgcattggccagttcacccaaaaacacccacacacacacacacacagactgtctcactttcgtttcgcgattgattgccagctctccggagaccaagaaccaaaataatagaaaagggaacccaataccaatacgacgccgcaaaccgatcgagttataaatacaatacgcaaataaaaaactaaacaaacagtaaaacgcctagcaaagagccttcaaaacggcagccacaatttccagcgcaggattaggaggagacgtagccgcgtacgctgatctccaccagcactcgcattcgcaccatccgaatccgcatccacatccgcatccccatccgttcgccaccgacggcttcaagctgcgttccgaagagccggtgccgggcttcagctcggcctccccctggcccaccctggagctgggcatggagtggggccggaagctgtaccccagtgccgtttccggtccgcgatccgccggcggcctgatgttcggcctgccgcccaccgccgctgtggacatgaaccagccgcgcggtccgatgacctcgctgaaggaggagccgctgggcagccggtgggccatgcagccagtcgttgaccagagcaagtaagtaaagggattgggttgaattgtgaacggaaaatggcccaacaaagtgattttcccagtgctgaaatcaaaacccttggacatatctacaaaaactgaccgatagaaaaaaagtgatcttccatgtgttaaagtgttcaatctaatttaaatggtccgcggaatgaaataaacgcttagtgtattaagttgaatctgaaagaagagtaaatttcatagctaatatccactagtgatacagaatcgtcataatttaaatgtaaaatcctccaggatattcagatagcttaattgtttcctatttgcttataaattatgcaggtttatttttatccataattttttttaattacattgctttttggccaaaactctctctgacaaacgtacttgcaatgtttttattaaataaacaaggatcaataactaacgcatcaataaacgaacgaatgcatgttcattattccattcagtatcttaagctttctactagataatacagatcataaaataagcagacacaaaacctctaagaaatatcgcctatgatatggcgcccaacatggggcccatcagcattcattgttgacatgtaacaaggtgggcttaacgggaaacccccttaatctctgctaatctctccctaaatctccaatctccaagagaaaacgcgccaaagtgcccgcaacaatgtttcagcaacacacgcacgcagagcccaaaacaaaaggaagtctccaaaatgggaagactgtgaaagaaaaaaaagtgcgtttgtttacttttggccaaagccggcatcccgtgtgtccaagtccaacaatatatggaggcccctgggggagcgattccgaaacgtagtaagtcagtcagtcagccggggaagtgggcgactttttatggccgccacccaccctgtgggccataagatgaaccccaaaacaaagtccgtccattcagatcccagactcac

SEQ ID NO: 29273 - DNA, 384 bp, DROSOPHILA
atggcccaccggctgcccagcggctcctccttcagcgaggtcatcggaccgcgcggctggttcatgtccacagcggcggtgggcggcaggccgaacatcaggccgccggcggatcgcggaccggaaacggcactggggtacagcttccggccccactccatgcccagctccagggtgggccagggggaggccgagctgaagcccggcaccggctcttcggaacgcagcttgaagccgtcggtggcgaacggatggggatgcggatgtggatgcggattcggatggtgcgaatgcgagtgctggtggagatcagcgtacgcggctacgtctcctcctaatcctgcgctggaaattgtggctgccgttttgaaggctctttgctag

SEQ ID NO: 29274 - protein, 127 aa, DROSOPHILA
MAHRLPSGSSFSEVIGPRGWFMSTAAVGGRPNIRPPADRGPETALGYSFRPHSMPSSRVGQGEAELKPGTGSSERSLKPSVANGWGCGCGCGFGWCECECWWRSAYAATSPPNPALEIVAAVLKALC

SEQ ID NO: 29275 - DNA, 3435 bp, DROSOPHILA
tgggccgtttataaaatggccgaaagaggaggcatttgagcaaaggggtaaaaataaaacaaaaacaaaaaacaaacaatttaagtgttttcaaaaagtcaacaaactcatatatgcagctatatatatatataaaaataataaaaaaaaaaacattaatttatttcttactatataattattgttgtactaagtcggtgagaaaacccatgaaagaaagaaattcacacgaaaactaaaaaacaaaatgcatatttattaaaaataagcaaaggttgtgcaaaaaaaaaacacattaaaaagcaacattattattgtaaaaattaactaaatacggcaattgttattaaatgtgcaaaattcagcaaacacattgatacaaacctcagaaaatacaagccaagatctgaaaacggacatcaatggaatgcaaatttttgaaaatataaggcaagatgaaccgtgaacggatcaaacagaaacggaaacggaaacaaaacactcaacaacaagaagtacaaaatgttaaatatgtatctataatttacaattacgttttatattactctctaatttacacgcttacacaatggaaaaatagctaactattattgcaatcgtcctcaaacacacaataaaactagatcaaaaggcggaattattactttagctaaaataaaatatcaccttttgcaatttgtatcattttcttacccttattgtttcacatcgaaatcagaaaaaatagttaaaatagccgcatatactcatattaaattgaaaagaaacgtgtcattgcagaaaaggataaagaaaatagtaatataaatgatatatttattcatataaatgtatttgaaaatgtgaacaaaagaataccaacaataaaacacaatttaataaacaatgtgaaagctacgagtgtgttttttttttaaaacacttaaaaacacagtagccgtgcagtcaaaaatccaaaacaagaaaaccaaatttcgaaatggaggagctaatgaggcagaacggacagaaatgcgagaggcaggaactcacctgcagcgttttatttaccaagtgagttaatcttaaaccagtcggagtaatcttaaaatattttccttctccttgcagtcccaagcttagtgccgagaagttatcctccaatgatgaaataaactccattgcgagattcgtatcgaaggcggaggatctcgaaatgcatagagtgttcagtaagatatcaaagaatggtgtcgaggagaccacgtctctgaatcgctccctcttcgagttcggtcataatttcgaggatgccgatggctggctgaaactggagcagccttgcaaggatcggctggccacggtgctgcgctacatgttcgagtcccatctgaagaccactgtgcagatagaaatcaacaatatgtacttcaattgccacttcatcgtgctgcaggtgtactctcgcttctttagtgaactggagatgattccgctgctggtcaccctgcccgagaagatcgtgtcccagaaggcctttatgctctcctacaaatggatgctgagcgatgagcccgtcctggagctggctcacattgtggaggtctatgtggccgccacttatttgaggatctctggtctggcggcgcattgttggaaatatttcgatgatgaggaatactacaacgaggatacggcatgtgtcctatacgtcgagtcgaaggacaatcccgccatggatgtagttcgcaatttgatgctgactaggatccgcaagtttctgctcacctttgtggccaccagggatttcctcgatctgccgacctcccatctgatttttttgctcgaatccgatcaaatctgtgtgaacaccgagattgaggtggtgttcaacataatatttatagttattattgcattttatatgtttttcttaggttttctttatagctgttcgatggctgggtcacgattggaacaagaggaaagtgcacgtacgtcgtttaatgtcctgtattcgattcaacctgatgccattgtggtatctactatatgcgcgacgggaggaggatcacccgttggtgatgaagctgattttcaacccggaggtggagtacaagatcgacgaatccatatcgagaataacgtcgcgcatgtacgaggatgccttggagggcaatgacgcacagagtgaggaatacgcaagtgattccggacagcgaaactggatatgcgatagcttgtgcagctattatcacggcgtcggttgtcccaatacccgggaaattcgtttcaaacacttcgaggattacctttcggaattacaacaatgctccaaagatcactggtctcaggtgatatttcaggacccgagtaaaaagattgactgttgcagcacaaggaagataaaatcggacgattttgttgccgattaactattgagtttgaatagtaacgactagaattcaaatttgcgggcttcagtttgtgctagtataacaacttggcacacttttctgttatacattgtacacttcgttcatttgatatttatgaaacaaatcagcatatttttaataatatattttttaaaatgtacatcaacattttaaaaaaaaagcaagtggtttaataaatataattaatatttattgtattattgtcgcaactttaagtgtgaccatttctgcaacgctctttggcatttcgggcagatagggtggcgtgcacactttgcattgttttggaaaataatttgatacatttatcaggaaaatggaaaaactggaggccctaaaaatatcctcgatgcgtccgcgcagcaacatcctagacagaccactatccaagggcaaaacggaggtttcccagagcattgtggcgctgcttttcagcgaaatcgtccagtactcgcagagccgagtgtttacagtcccagaattgcaaacaaggtgggagtttctctaagtttttgcgattaattcgttaattccaaggcgttttcagactccacgatctgggtcaagatgtaggcacccgcataatcgacctgtatttcgtgagggagcgcagctccaagcgagaaacaaaactaacccaaatgcttctctttgttaagaccacggtgtggaagaatctctttggcaaagaggcggagaaactggaacatgccaacgacgacgaaaggacatactacataattgaaaaggaaccgcttgtcaacacattcataagcgtgccaaaggataagggctcgctgaattgcgctaatttcaccgctggcatcgtggaagctgtgctcacgaactgcggatttgtatgttttccggcagactttataaaataatatatactaacattattatttgcgttttacagccgtgcaaggtcaccgcccactggcacaagggcaccacgtacatggtcaaatttgag

SEQ ID NO: 29276 - DNA, 1323 bp, DROSOPHILA
atggaggagctaatgaggcagaacggacagaaatgcgagaggcaggaactcacctgcagcgttttatttaccaatcccaagcttagtgccgagaagttatcctccaatgatgaaataaactccattgcgagattcgtatcgaaggcggaggatctcgaaatgcatagagtgttcagtaagatatcaaagaatggtgtcgaggagaccacgtctctgaatcgctccctcttcgagttcggtcataatttcgaggatgccgatggctggctgaaactggagcagccttgcaaggatcggctggccacggtgctgcgctacatgttcgagtcccatctgaagaccactgtgcagatagaaatcaacaatatgtacttcaattgccacttcatcgtgctgcaggtgtactctcgcttctttagtgaactggagatgattccgctgctggtcaccctgcccgagaagatcgtgtcccagaaggcctttatgctctcctacaaatggatgctgagcgatgagcccgtcctggagctggctcacattgtggaggtctatgtggccgccacttatttgaggatctctggtctggcggcgcattgttggaaatatttcgatgatgaggaatactacaacgaggatacggcatgtgtcctatacgtcgagtcgaaggacaatcccgccatggatgtagttcgcaatttgatgctgactaggatccgcaagtttctgctcacctttgtggccaccagggatttcctcgatctgccgacctcccatctgatttttttgctcgaatccgatcaaatctgtgtgaacaccgagattgaggttttctttatagctgttcgatggctgggtcacgattggaacaagaggaaagtgcacgtacgtcgtttaatgtcctgtattcgattcaacctgatgccattgtggtatctactatatgcgcgacgggaggaggatcacccgttggtgatgaagctgattttcaacccggaggtggagtacaagatcgacgaatccatatcgagaataacgtcgcgcatgtacgaggatgccttggagggcaatgacgcacagagtgaggaatacgcaagtgattccggacagcgaaactggatatgcgatagcttgtgcagctattatcacggcgtcggttgtcccaatacccgggaaattcgtttcaaacacttcgaggattacctttcggaattacaacaatgctccaaagatcactggtctcaggtgatatttcaggacccgagtaaaaagattgactgttgcagcacaaggaagataaaatcggacgattttgttgccgattaa

SEQ ID NO: 29277 - protein, 440 aa, DROSOPHILA
MEELMRQNGQKCERQELTCSVLFTNPKLSAEKLSSNDEINSIARFVSKAEDLEMHRVFSKISKNGVEETTSLNRSLFEFGHNFEDADGWLKLEQPCKDRLATVLRYMFESHLKTTVQIEINNMYFNCHFIVLQVYSRFFSELEMIPLLVTLPEKIVSQKAFMLSYKWMLSDEPVLELAHIVEVYVAATYLRISGLAAHCWKYFDDEEYYNEDTACVLYVESKDNPAMDVVRNLMLTRIRKFLLTFVATRDFLDLPTSHLIFLLESDQICVNTEIEVFFIAVRWLGHDWNKRKVHVRRLMSCIRFNLMPLWYLLYARREEDHPLVMKLIFNPEVEYKIDESISRITSRMYEDALEGNDAQSEEYASDSGQRNWICDSLCSYYHGVGCPNTREIRFKHFEDYLSELQQCSKDHWSQVIFQDPSKKIDCCSTRKIKSDDFVAD

SEQ ID NO: 29278 - DNA, 4911 bp, DROSOPHILA
gtgggcacgtgtgagccattaaatgggaaataaatctgcagatttgcaaaaggatttataattaactaaaataaattatgtgtgtatgatctgtgcttaaatgaagttgtatgaaaaccttgcaagaatatgtgtatttatatttggcatattattagatgttaccttgctaacttattaatatttcaataatcttttattttcccaacaaaatacccccatttgcatttagcctttagatggcaacaacaagtctgctctatatacagacaataacccacatatacacacaccctcgtacccatttacccacattgcttatgtgccaacggtgcgtatgtgtgatgccagtaaactcaaccaaaaaatgtaatagaaattactcacgctcaaagctcacaagctgatgaaattcactcaactcgcttgagttcactcaaaaacacagagtgaatggcagagcttgtttgttttgccattttcaagtctctaagtcttacgcttttatttatgaaagccaaggggagggaaaatatttaaatggtcactcacaaaaacaaggaaatgtcaaacggtagtagttgacatccggatttgtttgagttccggtatgaacgcaatatgaatcgttttcccttgaaatagccctggattaatttgtattacaaattatcaaagaaatttaatgaaaaatgccagttctttttttcgattcctacaaaacatgcgaagagaaaaaaaatgtacaaatcgcccttctcttgccttttgtgtaagccagaacaatgaaatggtaatgatggattgtgtcctttgttttacgcagctgccgaatgataatggagatgataatgagactgtaactgggacacaagagaccagaccgaagggtagtgtcagccaagagcggaacagcaccaaccagaaagggtagggttcagaggaggagcacccacgaccatccagcagagaccatccgagttcaaggaactagcaaacaatgaatccctacactgcaggcgccagcggaggtgtcggtggcggaggaggagccaatcccttcggagcaccagccggaggtgcgggatatggccagcagggctatggatacgagcagcaggcaacaggtggctacgaccagggcatgaactacggcattgagccgcagcagcaggcagccggatacggaccacctggagccaggccacgggtggatgtggaggccactggcgaggtggatcccaatctgtaagtcaaggattaagccctttactttcgcttccaactaattgattcacatttatccgcagatatccagaggcgaaggactcaacgcacaaagttcgcggccactcggacatcctggaaatgtttttcggggcgagcacagaacgggaactgatacccgtgaaaagcttctactttttcttctacgctgcatttggatcactgtttccgctgatgggcgtgtatttcaagcagatgggcatgaatccgggccagtgcggaattctggtgggaatgcggccattcgtggagttcctgtcggccccgttttggggctcctatgcggatcgttgtcggcagggcaagcgtctgctcctgggctccctggcctgttgggtactctttaccattccgctgagcttcatccgaccggaggccatcaattgcattgagcgacgcaatgccacggactttgtgctgacctacacacgcacgaagcgcgacctgtcggccatgtacgagcaggagcacttggatatgggcactggcaccatgccagccgatgaggcgctggaggaggcggaggcagcacacagtcggcacaagagatcactgctgctgccaaggatcgatgcgggcatctcaccagtgcacatcaactttgtgagcaactacgacgacaagtaccacagggactatgtgacgcccatctttagctccatggtgtacaggactccggtaagtgaatagggaaggatgtgccagtaaagataggaaggaagataagatcttcaaaaagataggaatgaaataaattttatatttgtatatattagaatgtaatgtttattaggttcgtttccaaatagttaaatttgatatattcgatttaggttgtgttccatttatgatatacaaacttgataatgtaatgttggatatgaaatcctaacttatatagttttagctttgcaatccatatctttattgccatttcaagatctactaagtaatttatgtctaaaagttctcgcctctttaacttaacgtctcagctgccaagaggattgtatctctggaatgcttttaaaagtacttatacaaatttatctccttccacaggacatccaaaaggcgttcttcctgctgctcctggtgatcctcattggggagttcttcagcgctccggcgattaccttggctgattccgccgtaataactttgctgggcgaggatgcggacaagtacggtcaccagcgaatgtttgggtcactcggctggggcatctctatgttcctggtgggcatcgctctggatcactccacctcgttctcgaatcatccctgtggtgccggcaacaaggagaagaactacaacatctgcttctccatcttttcggtgctgatgacctgtgcgataatctccgcatcgaagatcaccttcaagtacgatcccatcgatgaacagttggcggcacagcagcaggcgcagttcgtggatcccaataagcgggcggaggaggagtcgatgaaccagttggcggcccagctaaatctgccatcgctggcagttggtagcggcagtgccgcctcgggtgcctgtgccggtggcgtcagtagcttccttgccactggccatcagccacagccgcatattggtgccgagtccaaggtgttcgcccagacggccaaggagttgccagagtggatgaccgtgttgacccactttaaagatctgaaaaccgcatccttccttttcgtggcctggttcatgggcttcggcattggcttgatcttcacctttctgttctggcatctgcaggactatggtggcactcccaccctgttcggtgtggcctctgtcatcaatcatgtttccgagatttttgcctacttctttagcttccgtctgattacccaaattggccatgtcaaggttttgtgtctgggcttgattggcaatgttctgcgcttcctatacatttcctatctgaccaatccgtggatggtgctgccattcgagctgatgcagggcatcacccatgcagccgtatgggctgcatcctgctcttacattgcccacaacacccccaagcatctgagagcctcggctcagggtgtcctccagggcatccatcacggattgggtcgtggctgcggcgccatcattggcggcatgtttgtcacctactacggtactactactaccttccgctggtacggcatcgcctgcctcttcgtccttggattcttcatcttcgtcaacttctaccgcaaggagcaaggcttcatctcggaaatacccgtcaccgaggatccgcatcaggtgagtaaggagatccagttggtctagttagaggctatatttatattattgtgttttgtaatccctgcacctatataactaatccaataactctaaatttgtaggtggccgaggagacctcgcatttggcaccccacggcgttcccagcaatccgattccacgtgctctgtccaactcgcggctaaacgagatgaatccgaatggaggaccatatggcacgtaccagaccactggcggtaatctggatatacccggtgccaacccgcacaatcctttcgctcagtaaacgggaacgttggcttcccggagtcggcattcagcccatcttcatactcacagtactaaaacgaacaaagtataaccgcaaacatatcttggacattggcctgcaatatgaattgcataactgcattgctttattttgatttgttgggcagtcaacatacgatctacaccatagcatagcatatacatatacacatatatattttatataggacatgccacatagccagcataaagattccatatgagttggattgattcaagtcgatggagtgaggggggaaatcgaaacgaattttcacatagcagcttagcaatatatacatagggcaatatatgtgtgtgtacgtatagttatatatatatatattgtgccgatctataatatttataggcctttttatattagttgcatggcgccgggcaatgatcatcccggatcatcccggatttagttttcagttatgagcatgcagagcttgttgcctacttttgggcgatcaccaaagcaaattactcatacgcatgggttacccgttcgctccgaaatacacataaagtacctatacaatcacggaacaaatactaaacaggagattgaagctattcgacaccaggatatgtgaatacgaggcgtttcaaggctacaggacatcgggaagcagtgggagctgcttcgtttagccgcagttgattatgactttgatgttcactatactatttcatagtattaatttagattatccgttgtcttatggctttgaaacgcaccgtgtggattacccaataagttaggacagtttcatgtaaagtgcaaaattagtagctcactttgagtcaaagtatttttttagttaaaatgtttatgaagatgatatggttgcgcaactttaaattaaaatctttgtgttacatatgtacaactttttaaaattgaaagagacacattcaatcccaaaatggtcctatgcaataaataccaaacttaaagtgaatatgaactatggaatataaatgtagttacattgaaaaacaaaattaactaaattaaaaaataagcaacatagagatga

SEQ ID NO: 29279 - DNA, 2361 bp, DROSOPHILA
atgaatccctacactgcaggcgccagcggaggtgtcggtggcggaggaggagccaatcccttcggagcaccagccggaggtgcgggatatggccagcagggctatggatacgagcagcaggcaacaggtggctacgaccagggcatgaactacggcattgagccgcagcagcaggcagccggatacggaccacctggagccaggccacgggtggatgtggaggccactggcgaggtggatcccaatctatatccagaggcgaaggactcaacgcacaaagttcgcggccactcggacatcctggaaatgtttttcggggcgagcacagaacgggaactgatacccgtgaaaagcttctactttttcttctacgctgcatttggatcactgtttccgctgatgggcgtgtatttcaagcagatgggcatgaatccgggccagtgcggaattctggtgggaatgcggccattcgtggagttcctgtcggccccgttttggggctcctatgcggatcgttgtcggcagggcaagcgtctgctcctgggctccctggcctgttgggtactctttaccattccgctgagcttcatccgaccggaggccatcaattgcattgagcgacgcaatgccacggactttgtgctgacctacacacgcacgaagcgcgacctgtcggccatgtacgagcaggagcacttggatatgggcactggcaccatgccagccgatgaggcgctggaggaggcggaggcagcacacagtcggcacaagagatcactgctgctgccaaggatcgatgcgggcatctcaccagtgcacatcaactttgtgagcaactacgacgacaagtaccacagggactatgtgacgcccatctttagctccatggtgtacaggactccggacatccaaaaggcgttcttcctgctgctcctggtgatcctcattggggagttcttcagcgctccggcgattaccttggctgattccgccgtaataactttgctgggcgaggatgcggacaagtacggtcaccagcgaatgtttgggtcactcggctggggcatctctatgttcctggtgggcatcgctctggatcactccacctcgttctcgaatcatccctgtggtgccggcaacaaggagaagaactacaacatctgcttctccatcttttcggtgctgatgacctgtgcgataatctccgcatcgaagatcaccttcaagtacgatcccatcgatgaacagttggcggcacagcagcaggcgcagttcgtggatcccaataagcgggcggaggaggagtcgatgaaccagttggcggcccagctaaatctgccatcgctggcagttggtagcggcagtgccgcctcgggtgcctgtgccggtggcgtcagtagcttccttgccactggccatcagccacagccgcatattggtgccgagtccaaggtgttcgcccagacggccaaggagttgccagagtggatgaccgtgttgacccactttaaagatctgaaaaccgcatccttccttttcgtggcctggttcatgggcttcggcattggcttgatcttcacctttctgttctggcatctgcaggactatggtggcactcccaccctgttcggtgtggcctctgtcatcaatcatgtttccgagatttttgcctacttctttagcttccgtctgattacccaaattggccatgtcaaggttttgtgtctgggcttgattggcaatgttctgcgcttcctatacatttcctatctgaccaatccgtggatggtgctgccattcgagctgatgcagggcatcacccatgcagccgtatgggctgcatcctgctcttacattgcccacaacacccccaagcatctgagagcctcggctcagggtgtcctccagggcatccatcacggattgggtcgtggctgcggcgccatcattggcggcatgtttgtcacctactacggtactactactaccttccgctggtacggcatcgcctgcctcttcgtccttggattcttcatcttcgtcaacttctaccgcaaggagcaaggcttcatctcggaaatacccgtcaccgaggatccgcatcaggtggccgaggagacctcgcatttggcaccccacggcgttcccagcaatccgattccacgtgctctgtccaactcgcggctaaacgagatgaatccgaatggaggaccatatggcacgtaccagaccactggcggtaatctggatatacccggtgccaacccgcacaatcctttcgctcagtaaacgggaacgttggcttcccggagtcggcattcagcccatcttcatactcacagtactaaaacgaacaaagta

SEQ ID NO: 29280 - protein, 762 aa, DROSOPHILA
MNPYTAGASGGVGGGGGANPFGAPAGGAGYGQQGYGYEQQATGGYDQGMNYGIEPQQQAAGYGPPGARPRVDVEATGEVDPNLYPEAKDSTHKVRGHSDILEMFFGASTERELIPVKSFYFFFYAAFGSLFPLMGVYFKQMGMNPGQCGILVGMRPFVEFLSAPFWGSYADRCRQGKRLLLGSLACWVLFTIPLSFIRPEAINCIERRNATDFVLTYTRTKRDLSAMYEQEHLDMGTGTMPADEALEEAEAAHSRHKRSLLLPRIDAGISPVHINFVSNYDDKYHRDYVTPIFSSMVYRTPDIQKAFFLLLLVILIGEFFSAPAITLADSAVITLLGEDADKYGHQRMFGSLGWGISMFLVGIALDHSTSFSNHPCGAGNKEKNYNICFSIFSVLMTCAIISASKITFKYDPIDEQLAAQQQAQFVDPNKRAEEESMNQLAAQLNLPSLAVGSGSAASGACAGGVSSFLATGHQPQPHIGAESKVFAQTAKELPEWMTVLTHFKDLKTASFLFVAWFMGFGIGLIFTFLFWHLQDYGGTPTLFGVASVINHVSEIFAYFFSFRLITQIGHVKVLCLGLIGNVLRFLYISYLTNPWMVLPFELMQGITHAAVWAASCSYIAHNTPKHLRASAQGVLQGIHHGLGRGCGAIIGGMFVTYYGTTTTFRWYGIACLFVLGFFIFVNFYRKEQGFISEIPVTEDPHQVAEETSHLAPHGVPSNPIPRALSNSRLNEMNPNGGPYGTYQTTGGNLDIPGANPHNPFAQ

SEQ ID NO: 29281 - DNA, 2485 bp, DROSOPHILA
gtgctagtataacaacttggcacacttttctgttatacattgtacacttcgttcatttgatatttatgaaacaaatcagcatatttttaataatatattttttaaaatgtacatcaacattttaaaaaaaaagcaagtggtttaataaatataattaatatttattgtattattgtcgcaactttaagtgtgaccatttctgcaacgctctttggcatttcgggcagatagggtggcgtgcacactttgcattgttttggaaaataatttgatacatttatcaggaaaatggaaaaactggaggccctaaaaatatcctcgatgcgtccgcgcagcaacatcctagacagaccactatccaagggcaaaacggaggtttcccagagcattgtggcgctgcttttcagcgaaatcgtccagtactcgcagagccgagtgtttacagtcccagaattgcaaacaaggtgggagtttctctaagtttttgcgattaattcgttaattccaaggcgttttcagactccacgatctgggtcaagatgtaggcacccgcataatcgacctgtatttcgtgagggagcgcagctccaagcgagaaacaaaactaacccaaatgcttctctttgttaagaccacggtgtggaagaatctctttggcaaagaggcggagaaactggaacatgccaacgacgacgaaaggacatactacataattgaaaaggaaccgcttgtcaacacattcataagcgtgccaaaggataagggctcgctgaattgcgctaatttcaccgctggcatcgtggaagctgtgctcacgaactgcggatttgtatgttttccggcagactttataaaataatatatactaacattattatttgcgttttacagccgtgcaaggtcaccgcccactggcacaagggcaccacgtacatggtcaaatttgaggactttgtcatcgcccgcgacaagcagatggaggagaaataaatggcatagcttcattacggttttgttttaattccactatacgaatcgaagatcaattggctgaatgtatggcttagatgaacttgaactggcggtccttgtaggccacctggccagtcctgtacttctcctcgcgtccatcgcgctccgccttcaaagcccaggcgtagagggcaatcggcaggacgacggcgaaaaggcccgtgcggaaggatttgccggtgggcttgaagtgttcgtagttggagactcgcatcgcctggaaacgggctaatcccgcatcgaactgcaatttaaagcggtttaatagtatttattcctcaacgtgatgacataaccaagccaaggattggtgctaccacttacaacggtgccgccctcgccggtggcatggcggtagggattggagctctgcttgaggaactcctggcgcagcttcagcgtcgcctcgtgcttgcgcttaatgaactcctgctcctcgttggacaaaaccatttttcttgttttgtgttgcaaaccaaatttttagcaacagctggcaggtgtgaacgtatacagaaattctaaaaataccaaacagccgacaaatataccagtttcatatatgtaaattttaaatattgtttaagctacttgttttattcgcttaaactcaaaataactgcactgttattaaattattcaactgtaaattattcaactttaaaatggccaaagcatttgcttgaaaaatatcaattacagttggcagccctaagcttggctaatcgactgacgacttatcgatacatgccgattgaaaagttttgaatctgtcactttttgacaatcgctccttgtgaatggtaaataattttgattcgctatcctggtctttcaacgaaagttttccaaagttttatttccttctcgcaaagtctgctgcttcgttgcagcgagcactttccaccccgaccacagttaaacgcgcgctctcgctcgctctcactgcgcatgtcctacaaagtgtgatgcgcagatctcgtgtccgcatcctaatttgcgtccttattcgacagattcgcattaataacacctgttttgcaaaaagacgtgcattcccgttagccagttaattggcaaataagaaaaaaacgaggctttttcgcggtgtcagttggaaaaacccctaaacgcaggtagttactaatcaataactcccccttggcgcatgccttttaaggacgagagagagcgagagagctgttgtgagccaacgcgcatgctactacttagttgggtgggaaatgcacttggcttagccaccaattttcccgagcggcgggggtttagccgatgtttaggggtggatttccggcaattcggttgcccgcgattgcgccgttcgcctggctcatttttcactcgcctgcagacggaggcaacggctcccggatttccattttctagcctatattgattttcacctgcctacctgttcgttttctagacgcag

SEQ ID NO: 29282 - DNA, 405 bp, DROSOPHILA
atggttttgtccaacgaggagcaggagttcattaagcgcaagcacgaggcgacgctgaagctgcgccaggagttcctcaagcagagctccaatccctaccgccatgccaccggcgagggcggcaccgttttcgatgcgggattagcccgtttccaggcgatgcgagtctccaactacgaacacttcaagcccaccggcaaatccttccgcacgggccttttcgccgtcgtcctgccgattgccctctacgcctgggctttgaaggcggagcgcgatggacgcgaggagaagtacaggactggccaggtggcctacaaggaccgccagttcaagttcatctaagccatacattcagccaattgatcttcgattcgtatagtggaattaaaacaaaaccgtaatgaa

SEQ ID NO: 29283 - protein, 113 aa, DROSOPHILA
MVLSNEEQEFIKRKHEATLKLRQEFLKQSSNPYRHATGEGGTVFDAGLARFQAMRVSNYEHFKPTGKSFRTGLFAVVLPIALYAWALKAERDGREEKYRTGQVAYKDRQFKFI

SEQ ID NO: 29284 - DNA, 3186 bp, DROSOPHILA
ccagttgattaaatggaaagtgatgcccgggctcttgaattggaggcagtcggtccatgctttatgaaacaaacctcgcccctggaaactttaactaagccagccctgcttttgcaaaatgaattacaaacaaagtgcactaattaattagcgtaaaggccagcaaacttttcgaccagccacttcagcttcatctacaccttcccccccccctggatttttcctgttctcccgcgggggagcaccgattgcagcggctatttttcctggccaacaactctatgcggaaattgtttttttccaaaaggttcgctcgtacgtgctcgttttttatggcccacgttgtgttttcctatttttcgattttttttcccctgagcgccttgaaatcgaaacggccaaaagattgcgctgccaaattgttaacagcaattgacccaattttatgggagccctcatgcatggccactctcggacggcagtgactccaatgaaaatagcggcgtaaaagcgaaaactgccccgagaacagcaagcagcgagcggcgaccaacgcggcgtatacttattctagtggacttctgttgttttttttttcgcagggggtcagctttgtatgtatatttttcgttctgttttatttttttttttttttgttgggctttgtcgtttggctggctgcactctgtttgcatttaacttgcaaacaagctggggcaaaaattcgtaaagtgaaggttgcgttgcctattttttctttattgttatttgcctgcaaatcaaggcagctggacattgcaaattcgctggcatcgaatccattcgcaattaactgcagaacaaacaaggaaaacccatttggtccgtggcccggaaaaggctcaattcgcgacagtattcgaggaattacacacttaaatctggaatccatagagaagtagctgttgaaatgtaaataaaatagatcccatcatggcggccttggactagatttcttgccaactattggttcagcaccttggtgttagccagatcaaagcagagcgttcgcctgtacagaccaaaatttcgtgtctctcaacctgccacagcaccggttccaatccaaaacctccgtttagttatgtttctggccaaaagttcatcaatacttcgcccgcagcttcttaatgaggtgaagggactagtgaagtcacaatttctggctctgtcacaggtcgaccgacgctttgcccactcggacgataggtgcgccaataagaaatccaggaagtgcgagcagagcccacccaagggtgtaggtttgcccccccgggatcgaagacattctcatacggatggcgtcagtgataagtgcgcgaagaacaaaaaagataagcgggagtgcaagaagtttgagtccgagaatgccaaaaagccggaatgcaaaccgcccgttgtccgtgctccaaaatactacaagcagctaaaaccgtgcaagaccgacaaggagctctccgagctgcatcccaagtatctgggtgtatggggtcgttgcgacataccctacaagccagagcccgattgcaccgatccctgtgatttggccgtacgtttggatgacaagtactacaagcccagcaaatcgctggaccgcgaattcgaccagtactgggtggagtgcttcttccggaagcagaaacgctgctgccgcaaggttgctcctgagcgcacttaccgcgtgttaaccaaaaagtgcgtttccgctccgaagaaggcgccttgcttcaccgtcaatcccatgccatgcaaacaagaggccaaaaccagcccctgtcccaagatcaagctatgcgagtgtccgccggcagctgccattaacaattgtaaactggtgcgaagacacacaagatgccggcgtcgcgcatgccagtatcccagcttctcggagtgccagcacgaggagctgaacaccagcagacccatcgagtgccgctgcctggaggtgccgccgctttgccttgtctatcgacacgctctcctcaaccgccgacttccctgtgagcctctgaagccgcgcaatgaatcgtgttaaaggaggcacactttggatttgtggacccattcatggtgcttcaacaataggcagataaaaattaacagtgtaataaaagatacgaaatttttggttaaataaatctttcaaaatatttacatttaatgcatttagtctatgggggggttttggtctctgttgtatacgccgttaggtgggactatcaaatagaggtgctttacttagatcgagtcttctcctattggcagtgccagtaacaggtatctgatagttgaggcactcgacacatattttatttttaattatttacatatgcttagatctaatcataaattttgaatcaagtaggccttaagacaaaacttcaactgtcctagccaatttcagattactttcgaatcattcgtaaacagttgttcgagtggtcaacacacataacaccttagcctccccaaaaatccaggtttccgttttggtttcctttcaaaattccagttaaattcagttagaatgggggtgttgcagacagtgcaacgaacgctgttgatgcagcacagcttgggatcgctgacgatcaagcgcacatacgacacggtgaagaagatgaatctgcgtcgcaggcgtttggagcatctgaaagaactcaagaggctagacgaaatgtgctacaaggcggccagtcgcaacgataagaagtgccacccgccggtgctaccgctacccaagatggagtgcatagacgacccatgtgcggaatcagagatgccattggatctggaccactatactccgagcgacaaggccgcgcgcaaatatcaacgcacctggtgcgagtgctatatgatacccaaggcggctgtcaaggccaggaaatgctatccgaatagaccgcggcgtaagttcgagtgtccgagggtctctgatgtcgagtgccgctgggatcccatgccctgtgatgacgtgaagaaaaagcccgagatactgattgaagtgccgcgtatcgggaagtggccatgctgcaagatccccacgccaggttgccgcgatggccggataccgccctcctgcgacgctggtcgaattcccacttgctgcaagaagcgtcgcaccaagtatcccagcttctcgga

SEQ ID NO: 29285 - DNA, 1186 bp, DROSOPHILA
aactattggttcagcaccttggtgttagccagatcaaagcagagcgttcgcctgtacagaccaaaatttcgtgtctctcaacctgccacagcaccggttccaatccaaaacctccgtttagttatgtttctggccaaaagttcatcaatacttcgcccgcagcttcttaatgaggtgaagggactagtgaagtcacaatttctggctctgtcacaggtcgaccgacgctttgcccactcggacgataggtgcgccaataagaaatccaggaagtgcgagcagagcccacccaagggtgtaggtttgcccccccgggatcgaagacattctcatacggatggcgtcagtgataagtgcgcgaagaacaaaaaagataagcgggagtgcaagaagtttgagtccgagaatgccaaaaagccggaatgcaaaccgcccgttgtccgtgctccaaaatactacaagcagctaaaaccgtgcaagaccgacaaggagctctccgagctgcatcccaagtatctgggtgtatggggtcgttgcgacataccctacaagccagagcccgattgcaccgatccctgtgatttggccgtacgtttggatgacaagtactacaagcccagcaaatcgctggaccgcgaattcgaccagtactgggtggagtgcttcttccggaagcagaaacgctgctgccgcaaggttgctcctgagcgcacttaccgcgtgttaaccaaaaagtgcgtttccgctccgaagaaggcgccttgcttcaccgtcaatcccatgccatgcaaacaagaggccaaaaccagcccctgtcccaagatcaagctatgcgagtgtccgccggcagctgccattaacaattgtaaactggtgcgaagacacacaagatgccggcgtcgcgcatgccagtatcccagcttctcggagtgccagcacgaggagctgaacaccagcagacccatcgagtgccgctgcctggaggtgccgccgctttgccttgtctatcgacacgctctcctcaaccgccgacttccctgtgagcctctgaagccgcgcaatgaatcgtgttaaaggaggcacactttggatttgtggacccattcatggtgcttcaacaataggcagataaaaattaacagtgtaataaaagatacgaaatttttggttaaataaatctttcaaa

SEQ ID NO: 29286 - protein, 316 aa, DROSOPHILA
MFLAKSSSILRPQLLNEVKGLVKSQFLALSQVDRRFAHSDDRCANKKSRKCEQSPPKGVGLPPRDRRHSHTDGVSDKCAKNKKDKRECKKFESENAKKPECKPPVVRAPKYYKQLKPCKTDKELSELHPKYLGVWGRCDIPYKPEPDCTDPCDLAVRLDDKYYKPSKSLDREFDQYWVECFFRKQKRCCRKVAPERTYRVLTKKCVSAPKKAPCFTVNPMPCKQEAKTSPCPKIKLCECPPAAAINNCKLVRRHTRCRRRACQYPSFSECQHEELNTSRPIECRCLEVPPLCLVYRHALLNRRLPCEPLKPRNESC

SEQ ID NO: 29287 - DNA, 3080 bp, DROSOPHILA
gacaaggagctctccgagctgcatcccaagtatctgggtgtatggggtcgttgcgacataccctacaagccagagcccgattgcaccgatccctgtgatttggccgtacgtttggatgacaagtactacaagcccagcaaatcgctggaccgcgaattcgaccagtactgggtggagtgcttcttccggaagcagaaacgctgctgccgcaaggttgctcctgagcgcacttaccgcgtgttaaccaaaaagtgcgtttccgctccgaagaaggcgccttgcttcaccgtcaatcccatgccatgcaaacaagaggccaaaaccagcccctgtcccaagatcaagctatgcgagtgtccgccggcagctgccattaacaattgtaaactggtgcgaagacacacaagatgccggcgtcgcgcatgccagtatcccagcttctcggagtgccagcacgaggagctgaacaccagcagacccatcgagtgccgctgcctggaggtgccgccgctttgccttgtctatcgacacgctctcctcaaccgccgacttccctgtgagcctctgaagccgcgcaatgaatcgtgttaaaggaggcacactttggatttgtggacccattcatggtgcttcaacaataggcagataaaaattaacagtgtaataaaagatacgaaatttttggttaaataaatctttcaaaatatttacatttaatgcatttagtctatgggggggttttggtctctgttgtatacgccgttaggtgggactatcaaatagaggtgctttacttagatcgagtcttctcctattggcagtgccagtaacaggtatctgatagttgaggcactcgacacatattttatttttaattatttacatatgcttagatctaatcataaattttgaatcaagtaggccttaagacaaaacttcaactgtcctagccaatttcagattactttcgaatcattcgtaaacagttgttcgagtggtcaacacacataacaccttagcctccccaaaaatccaggtttccgttttggtttcctttcaaaattccagttaaattcagttagaatgggggtgttgcagacagtgcaacgaacgctgttgatgcagcacagcttgggatcgctgacgatcaagcgcacatacgacacggtgaagaagatgaatctgcgtcgcaggcgtttggagcatctgaaagaactcaagaggctagacgaaatgtgctacaaggcggccagtcgcaacgataagaagtgccacccgccggtgctaccgctacccaagatggagtgcatagacgacccatgtgcggaatcagagatgccattggatctggaccactatactccgagcgacaaggccgcgcgcaaatatcaacgcacctggtgcgagtgctatatgatacccaaggcggctgtcaaggccaggaaatgctatccgaatagaccgcggcgtaagttcgagtgtccgagggtctctgatgtcgagtgccgctgggatcccatgccctgtgatgacgtgaagaaaaagcccgagatactgattgaagtgccgcgtatcgggaagtggccatgctgcaagatccccacgccaggttgccgcgatggccggataccgccctcctgcgacgctggtcgaattcccacttgctgcaagaagcgtcgcaccaagtatcccagcttctcggagtgcaaaaaggaactgctcgaccccatcccaccatgcgagtgcgagaagaaggttaacatgtgcgacgtgtatgcatatttccgccataagacacactaacttcggtccctgaaagagcttggaaatcaaggcggtataagaagcccacctggatgatgaagaagtcacaaaattggctagcgtgtattgctgttcattgtttatgggttcatttacaaaagtttgaccctttagcccttgccgccttttaccaatcctgattacccattttaaaaggtgacaaattcaaaaatttccatttcaaatatagcttgaatccagtcttaaattacttttggatgttgttgctaccgacattaaattgatttcacaaattaccaatctgatttttgtcttcgtctcgagcgcgacttgcacgcatccttgatggttaattctcggcaaacagcgagttccttttgctgcactgccacgccccttgtcctagttctcccactagccgccccacccgcttttcgcagctctttagttggagtgctctcctgtgcaattcctaaaagggatttgcatgccgctgagatgtttatcgcaaattgttgccgtcgtctgcgttcgtggaggatgttgtgacgatgtcgtctgacggcgcacaaatgtcaacagcacaaagctctgacgtttacattgaaagtcactttgggcgccaggcagccaaacagacaaacagagggatcctgggatcctagcatcctggcatcctcgcatcctggtatccggggggagaccaaggcgggcgatggctaatgaaaagtgccaacagaatccaatgcatttttatttaaatgcaaatgtttagcctgccggcaagtgtttaattgtggagcccgggcattgacaagggtggctcctgaaaggtcctggaaatgaggatttgccacacattcatcgtgcctgttcgtttgcctgttgttttggccaaagtatgccctggagtgacatttcgtacaaatgaaatgtatggctgaaaagttgtctatttctgtgcccaggcaaataattttattataaaagttgtttctgggaacttgtggcttttcgtgagtaatagacaccatgtttctgtggccattttcgtaagagagtatattcgcatgtaaggaaagtagagtgagatatatgtcaagtagagttgtggtaaaagtgtgaagagtagcgcactgaatagaatgcgttgtatcctttagcaattgcactttaaatatctagtaaatgtccatatccttctagtttacttatccttgtacatataatgtggatttatttttttttttttttaccaaagaatataaccgattatttgcaacttgtgccatgtt

SEQ ID NO: 29288 - DNA, 1080 bp, DROSOPHILA
aacacacataacaccttagcctccccaaaaatccaggtttccgttttggtttcctttcaaaattccagttaaattcagttagaatgggggtgttgcagacagtgcaacgaacgctgttgatgcagcacagcttgggatcgctgacgatcaagcgcacatacgacacggtgaagaagatgaatctgcgtcgcaggcgtttggagcatctgaaagaactcaagaggctagacgaaatgtgctacaaggcggccagtcgcaacgataagaagtgccacccgccggtgctaccgctacccaagatggagtgcatagacgacccatgtgcggaatcagagatgccattggatctggaccactatactccgagcgacaaggccgcgcgcaaatatcaacgcacctggtgcgagtgctatatgatacccaaggcggctgtcaaggccaggaaatgctatccgaatagaccgcggcgtaagttcgagtgtccgagggtctctgatgtcgagtgccgctgggatcccatgccctgtgatgacgtgaagaaaaagcccgagatactgattgaagtgccgcgtatcgggaagtggccatgctgcaagatccccacgccaggttgccgcgatggccggataccgccctcctgcgacgctggtcgaattcccacttgctgcaagaagcgtcgcaccaagtatcccagcttctcggagtgcaaaaaggaactgctcgaccccatcccaccatgcgagtgcgagaagaaggttaacatgtgcgacgtgtatgcatatttccgccataagacacactaacttcggtccctgaaagagcttggaaatcaaggcggtataagaagcccacctggatgatgaagaagtcacaaaattggctagcgtgtattgctgttcattgtttatgggttcatttacaaaagtttgaccctttagcccttgccgccttttaccaatcctgattacccattttaaaaggtgacaaattcaaaaatttccatttcaaatatagcttgaatccagtcttaaattacttttggatgttgttgctaccgacattaaattgatttcacaaatt

SEQ ID NO: 29289 - protein, 227 aa, DROSOPHILA
MQHSLGSLTIKRTYDTVKKMNLRRRRLEHLKELKRLDEMCYKAASRNDKKCHPPVLPLPKMECIDDPCAESEMPLDLDHYTPSDKAARKYQRTWCECYMIPKAAVKARKCYPNRPRRKFECPRVSDVECRWDPMPCDDVKKKPEILIEVPRIGKWPCCKIPTPGCRDGRIPPSCDAGRIPTCCKKRRTKYPSFSECKKELLDPIPPCECEKKVNMCDVYAYFRHKTH

SEQ ID NO: 29290 - DNA, 2413 bp, DROSOPHILA
agtcacagcaattttcacaaatgggctttctagaatttttgtttaggaaaatattttcttaaaagccgttgattttaagaattatgataaataactaaacattaaacgtaatatttaatacatataaacacatttagtttctcttatattcttttttaatgcactgtcgaaataataaataagtttttttctttaacaaattttgttcttttgtaagacaaccgcgagaaaaatcccaaataattgggtgtcgaattgacgagttgcttgtgtttagcaataagcccctcgcccactcaccattaacaatgtacagtcatcaccgctctcctgtcgaccttcgtcctgcccaaccaccagcgctccctcctggcgccacgccccctgcgccatccccgcccaccaattggatgtacgccactcgcataatcaattatgcgtctgcagtgcgtccaaagttctctctaaacttggcaatttatttgcaccggaaactcaacataaatcaaactaatttctcctgggatttttcagcacaacttccaacgtgtctcccattcgccatctctgtcccgctcgcactgctggcgcgctggtcacgtgtctcgctgcgtgtgagagagcaggatagcaaatggggcgggtgtggcaaattgaatttgtcgcggtgtatcgcataatttggggagtattgtgtttctaattggccgctcgaaggattcacaaaagtgaaagccccaagacatgaggaaattcgaaggatctactgattagacaggctgtgttctaaattatcaacggtattacatggatgtatatgcagtgaatgcaaattgcgtgagacatccctattcaactggatcgcattgtgttcttgtcgcctgttgacttgaatatttccgcatatttcagttgtccttggcagaaaggtagctcgcattcaacctgggcattaacaattttgtaagttacctaatagtccggtgaattgcatcagaagatggaatcgctggacgagtgggacacacgtgtggaccgcatcatcaagctgccggtgggaaaagcgctaatagagaaggacaagtggaggttttataacattcctgaaatgcacttttccaagtgcataaatctgtcgctacctccaattaagtccctcacctcctcattagcttagaccagatagcggtagacatggacgacggagcgaggtggtaccgggagatttatgagatctttgacgtgacatcggtgccaccacgtcagttcatctgtcacgatttggcaccgtaccacgaaccgaaacccgattcacctgaccaggtgttcgagtacaaggacttcctgagctacctgggcatactgcaaactctgcctttggacaccttgcagcgcctcgaaaagcccctctgatggtccaaatggcatcgattcctcgacggctacatcgacgctccttcttatccttctcctctacccgacaaccttgatgatgatgatgatgatgatgtggctgtgcaagatgacagcgatcgtgctgcgtggcagtaacagcaaatttgcattacctgggcaggtgtgttcctgcttccacttccccaaatgagcttaatgctagtcgcgcttaaacgagggctgattgaaaagtttgaagtttgacaaacaagcacattttaccacgtttttatttgtttattaaagtttcctttgaattttatatgcttttatatatatgttttttgatgccacaaaataaaggggtattattagtatgcattttactaagtactacaaatgggtaagctttaggctcaagcagcctctaagttcctgagtccaaaaacctcttagcacccacagccctgatttccaagcgtattgcactttcccggtgattttcgaaacaatttcctcatcagcggtaactgtgagccacatttccagcaccgtcgtcatcctggccacatcaccttgtttcggtttggaatgctcgcggcgctgctcccgagctttgaacacacacacacacaccacctcttccacctgccgccgccccctgaattttgcgcccacagcggcgcacacctggcgtcgctgggaaattgaaaatgtttgttgctgcggcaagagtctgcaaagttggcaaatcgagattgcagtttgctgtgacgatgatgtttacgaggagaatgttacctgctgccgttcggctaataactgcaagccgcaggtccgtaaaataagcatatgtataattacacaatgtcgcaggaaataaaaattcacacaagccaaaagctttaaataaataaagtttaaattcaaggaaaaaaggaaaaaacaattttctaatatgctcaacactttgaggcttagatgacgaaaatgtgagctcatgtgtgcaacctgttat

SEQ ID NO: 29291 - DNA, 324 bp, DROSOPHILA
atggaatcgctggacgagtgggacacacgtgtggaccgcatcatcaagctgccggtgggaaaagcgctaatagagaaggacaacttagaccagatagcggtagacatggacgacggagcgaggtggtaccgggagatttatgagatctttgacgtgacatcggtgccaccacgtcagttcatctgtcacgatttggcaccgtaccacgaaccgaaacccgattcacctgaccaggtgttcgagtacaaggacttcctgagctacctgggcatactgcaaactctgcctttggacaccttgcagcgcctcgaaaagcccctctga

SEQ ID NO: 29292 - protein, 107 aa, DROSOPHILA
MESLDEWDTRVDRIIKLPVGKALIEKDNLDQIAVDMDDGARWYREIYEIFDVTSVPPRQFICHDLAPYHEPKPDSPDQVFEYKDFLSYLGILQTLPLDTLQRLEKPL

SEQ ID NO: 29293 - DNA, 3384 bp, DROSOPHILA
gggttaatgtatactcattttctgttttcaaaacttatacatttatgattttatcagaatccttttggtttaattttaagttgtaaatcaacagcactttgttcagattgaacttatcatcagaaaaacacttctcaattatgaatgcaaagaagtctcattcatgaatgtatgttagaaagagaagactacataccatcgcgtgcaatgccggctgtccctctcttttcaccgctcgccacgtgttttttcacattctagaacaaaaaaaaatgagaacttagttatttgcttcccacaattgcattttaaagcaattcagttgttaaatttagtttatcagttggccgttcttattctttctacaggaaaagaatgccaaatcttgcgacttggcactcgactcttcagaaaaagaacaatcatcaagtaactattaaattcatgcattttaatgttcacttacttttaatccattcattgcagttgcatgagattgatattttagcttttctttcttttcaaatgtaagaccacatggccttgcattagagtacacattttacggaattctttcaaacacaccacagctcgccaagaaattttcaattaaaagaaatttttctggttgcacgctgcttttatagacttttgtgattttagtgtgaccagaggaggcaaggcataatttccattaatttatctatacaagtatcgaatagtgcctggcgttgccactttcttaaatcaatcgaatataaattaatttataataatttaaataaaacaactaaaatcatgtgatttaaactgaaaaggaatggtatattaaaaaatcgcattgttttatttttaaaataaaagttgaatgtttacattttgaatactgccggagctcactcttcttcttccccggcttgttgacagtgtggtggtgttcacgataaataaacgttttagcataatgtttgataataaaagcgataagctgctgcttgaaatggaggaagacgatgctgctcccgaggatcagcacccccgctgcgagcacgggccgacggttttgttcaaccgacaatcccaacttcccgaccagggttattatgcctgttcagcccatcgggactcaaaactctgcaattatcacttgccagcggatcagtggaagggtcagaccaccaggacggcactcaccaaaagggactatcccttgccatgcaggaaaccagctaatcccgccatttgtgatcccacactaagccttacagcgctttcccaggacaaagtcaatgcccaatacttttttgatgaagctgcgctcaacttcttggcaaatcagtgtgagcatataggagctaggtgggtaattccagcaatttagttaagccctttctaatctagttatatcagcaaggttatatgcatgggcgcaccgcgtctacacttccatctgcgacacaaattgcaaagttttctgttggatttggatgagagatttgccgaatatctgggtcctgaagagttctgtctgtacaatatgtgcaataatcacttcttttacgatcgaacgccctttgaacaattcctggcaggtaccaggtaatatatttattatatgatggttaccgcaattataaaatgtctcatttgccagttccgatcgactggtgattgtaacagatcctccatttggctgtcgcactgaactgatttcgcacaccctgcgcagccttagaaaactgcataatcaaatcaaccgattgccatccactccactgtccatattctggatatatccctattattcagctaaccacatcaggcaggaaatgcctgagcttgaaatgtgtgaatacaggatcaattacactaatcaccttagatatacgaatgtgggcaagcagagtcggttttgtggatcacccgtgaggctgttcaccaacgtgccactgcgacttcttcaattgccccctgaagagggctataagtactgccaaaaatgcgattgttacactgccaaggagaacctgcactgcaaccgctgcgggaagtgcccctcggtgaatggccaaacgtacaagcactgcgagtcctgcgatgcctgtgtgaaacccaactatgtgcattgctccgactgtagaaggtgcacgcagaaggagggacacaactgctccttctatcagaccaaacaacactgctggatgtgcggccagaaaggccatatcgaaaccaagtgcccaaacttccgcaagagaaagacgaactataccaaaggctgccttttgtgcggcaaacgaaatcacagggaaaagcgatgctcgtaccgctcaaaatacttcagggaacagtgttttatgaacgaaacaacaattcagtgtctttaagatacatacaaatatatatgtacaaagataaatacaaattgcatttctttatatactgaggggcactttagactgtatgcatttatgcagtttataagaacaacactgacaaaaccttcactaccatccataaacaacagggcacacatttgtttaatacaaaatttatttgttcttaacacttttcgttgaatgtcttacaagttcttgaattgcaacggctgcgcgcggaatttctgatgcacatgaccacgataaattgtggaatgaattctcagcccgccggatgaacgaacggattgggggaaaacgattaaattttgaaaatatgcattacgtttaaacaggtttttaacttaagcttaggtataattaatttcatgtggaaacacaccaatgcctcaacaagcggaatggatctcttcttatctcgccgcaaaagaaatgatgacgtcgacattgttcacgctcgttgaggtgaaagtattttattggctacgaaatgcatggcttaagaacgattgtatttgccccaaatgtgcagcatgaagacggaagcgatgaagagcagcgacatgaccagcacgggtacgggaccactgcagcaaaagtctcattagcactgggcctttaatataaatatagccgagttattcacttacactttgataccgggcgagtcgtccgtgtagaaacgccacatgccaccagttccggctccgccgggtgcacggctccgggccgctgtggtgctggtggtggtcttgcgctgcttcagggtgctgccgcctccggatccggcgctacgtggcgccgacaatttgctgggggagcgcgatccgctgcccacggacgttgaactggctggagcgggctggcaaatgtgttttaattagttgccgcactcaattgccatctagtttaactcaccattttgggctatctgttcctctggaccgactgacctggaaaatatgaacgggcgaagtggaatctgaac

SEQ ID NO: 29294 - DNA, 1050 bp, DROSOPHILA
atggaggaagacgatgctgctcccgaggatcagcacccccgctgcgagcacgggccgacggttttgttcaaccgacaatcccaacttcccgaccagggttattatgcctgttcagcccatcgggactcaaaactctgcaattatcacttgccagcggatcagtggaagggtcagaccaccaggacggcactcaccaaaagggactatcccttgccatgcaggaaaccagctaatcccgccatttgtgatcccacactaagccttacagcgctttcccaggacaaagtcaatgcccaatacttttttgatgaagctgcgctcaacttcttggcaaatcagtgtgagcatataggagctagcaaggttatatgcatgggcgcaccgcgtctacacttccatctgcgacacaaattgcaaagttttctgttggatttggatgagagatttgccgaatatctgggtcctgaagagttctgtctgtacaatatgtgcaataatcacttcttttacgatcgaacgccctttgaacaattcctggcaggtaccagatatacgaatgtgggcaagcagagtcggttttgtggatcacccgtgaggctgttcaccaacgtgccactgcgacttcttcaattgccccctgaagagggctataagtactgccaaaaatgcgattgttacactgccaaggagaacctgcactgcaaccgctgcgggaagtgcccctcggtgaatggccaaacgtacaagcactgcgagtcctgcgatgcctgtgtgaaacccaactatgtgcattgctccgactgtagaaggtgcacgcagaaggagggacacaactgctccttctatcagaccaaacaacactgctggatgtgcggccagaaaggccatatcgaaaccaagtgcccaaacttccgcaagagaaagacgaactataccaaaggctgccttttgtgcggcaaacgaaatcacagggaaaagcgatgctcgtaccgctcaaaatacttcagggaacagtgttttatgaacgaaacaacaattcagtgtctttaa

SEQ ID NO: 29295 - protein, 349 aa, DROSOPHILA
MEEDDAAPEDQHPRCEHGPTVLFNRQSQLPDQGYYACSAHRDSKLCNYHLPADQWKGQTTRTALTKRDYPLPCRKPANPAICDPTLSLTALSQDKVNAQYFFDEAALNFLANQCEHIGASKVICMGAPRLHFHLRHKLQSFLLDLDERFAEYLGPEEFCLYNMCNNHFFYDRTPFEQFLAGTRYTNVGKQSRFCGSPVRLFTNVPLRLLQLPPEEGYKYCQKCDCYTAKENLHCNRCGKCPSVNGQTYKHCESCDACVKPNYVHCSDCRRCTQKEGHNCSFYQTKQHCWMCGQKGHIETKCPNFRKRKTNYTKGCLLCGKRNHREKRCSYRSKYFREQCFMNETTIQCL

SEQ ID NO: 29296 - DNA, 12629 bp, DROSOPHILA
gcctccggatccggcgctacgtggcgccgacaatttgctgggggagcgcgatccgctgcccacggacgttgaactggctggagcgggctggcaaatgtgttttaattagttgccgcactcaattgccatctagtttaactcaccattttgggctatctgttcctctggaccgactgacctggaaaatatgaacgggcgaagtggaatctgaacgtgaatctgaatctgacgtgctcggcttcgtgtcgcttcgtcttttttcgttccacgtcactttggtggtggcaccgctgccgataggtcgtgacgctgaggtgacagctatcgtgcacttagacagctggagatgacaggctaaggcaactcaactatcggctgctttggctctaaaatgaactagtaaaaaaaaaacgaagaaataatatattcaagttatgaatttaatagataacaataatagataaaatattaattctacaaaatgaattgtttaaatcaatttgaatgaatcctattaatataattggctattattaaaactccgataataaatgctattattcttgatttcccttgatttaattatataatacatacttaataactatataattatatagaataaaaacttaatcacgcatttaatagatcatatagatatagaatatatagaaaatcaatgaaatcgattttgatagcgataatgtgcaaccttgcatgtaagttatttttagattttagctgggcaagcgcaattttcttggcgcgcaccaaacaatttgtaaataatatttttgcttaactggtattggttcgactgcgaatcactaaaaattattaagtgacttaagcaccgtgttttaaacattgttaatcggaacggccacaccgaagcgcgggctcactaaacgcttttgtcatttttgcacatctgtacaacgttcacgttaattgcagcggcatcatctttgctggatttcaaaggaatattttgcggtgaaaagaacgaaaaagtgcttgcatttgtgcgctaatgggtatatgaggtccttctgctaaaggaatgccaagtcatacaaacttttcgcgattcgccttaatggaaatagataagacgcggcgcagttgaaagattgcaaattgatccaccgatcgaccgacgcacatgaaaagtgaagtatggaggacattgaatatttagacgagtacaaagacttggtgctgccaggtgcgtgatttcagcttccaatgctataaatacttctaatgtgatttgtctgtctactttgcgcgcgcacagggattaaatcgagtgctccgacagcatcttctgccggcgttccgcggcagcggcgcatttcatcagactcgagcaactcgtcgtcgattgatgcggacattttccaaaagctcttccatggcaagtacctcgacgacgaactgcttaaggagggctctggctcgaagtcgcaggacaggcgtcgacgccccccatctccctcctccagcgacgagtccaacgatgccttggaagccctcttctgcgggaagagcagccagtcaaagctgagcaagaggcgcgaacggtatgagtcgttcgattcggtggacgacctaggtgggcatttcgcaatggtttcaatgacgcattttatcaataacatttactttatgcctacacttaggagaagccctaatgcgtccatcgcacaggctgaccgtacccaagcccagtacctctcaggcaggttccaaaaagtcacaagatgctgccccacacagaagcattagcaatagcagcagcagcaacattgccatgtcatctgggcaaacttatgcatgtccaaaaaacaagaaaaccaattctgtggccaacaagacagcagtatctgcaaatggtgataaatgggcttccggcaaaaacaagaccgttaccattgtaaagccccaaaaaacagatctaaggccttcgcggcttgaacccaaaacagatccattaagtaagttcgatattgtgctacatatctggctgtgcataaccacttcgtattttccatagatttgggtgacttatacggggactctgacagcgattcgtcctatgagtatgaatcggacttttacggcgatcaagactccgatgaagaggatgagccggtgatcgacatttcaacggacacaagcaggaccacatcggtggcgggtaagtcagcgttattaactagttgatactgccaaccctctgataatattcataatatgtaaacacacataaaccgtgtagacactgtgacacctgttgtttccgacgacgagggccaggagccgcagagtgagctgaatcagcgtcatgcgaatgatcaggagtcttttttgagcagcacctacgaacgcctgcagtcgtatttgagtaatctcagttccgccgagccgccgccaatctataagaaacagaatagtgcgagaaaatcccgctccaacgaaaagaaaccctcttcttcccaacaggttaagcatgctaatgagcaatcagcgggtaagtgtgcaccaacgtccattggggcgtccatttctgagcgccctcgtgaacccttacctctgctacacccttacatttgtaactttttctgctttttgtttcgcagccagtgacaaagaggctaataaaaaggagcgggatttggagccaccggaggcgagcagcagtgcgaaatcctcggccagcaaggctagcggtagtcgcaagctgtatgacgtagctaataatgctacgcttgaggctgtggagcgcatgagtctcgacctggccgagcaaatcatggagatcgatgtggagcgatcttacgagttcgaaaagcggtctgcctcaaagtcgcgtagcttatccagatctaagattccagcagattctagcacctcgcaattgggtcacgtgcgaaagctaacctattcgagcgaaagactggatcaaccggaacctttgggcacccagttgcgtcggtcgaagagcgagtccttaccaaagcgaggtcgccctcgtggccaaaagcagcgtaagaaccgtggagcaaccatggaggaaaaaagtgctaattgccgggatggggaaggagagccagtcaaaagaaaacgcggaaggcctcgcaaaattattccaaaggaggaggctaaaacagcagagactgaaaatacaattgaaagcttgaacacaaatgttcctctctcaatagatacgagcaaagaaaatccggaaacggagacggttaatttagaagtgccaataaaacaggatgaactagttagcgatttggacaatgccaaggagctcacaggatctaccaatttaccccaggatgatattgaaatggcgtcaaatcaccaagaaacggatcttaaatgtgctccggacagggttgcgctggataagtctgagtccacgccaaaggtcgaagaagaacagctttgtaaagtggacacacctagtgatactgcactggacgaaagcaaagtatccgaaagtgcaaaaaatcatattgaattggaagataaggataaggataaggaggaaactcagaaggaatctcccaatggcaattcgaaggaaaccaatgaaaactcggttatagttactaatgaagttgaattaccagctaaaaaggctgaagccaaggcagaagcgggaaatattgttgaggaaagcgactcccaacttgctgaggattttaaattggctgaagagatcttagccgctgaggttggtaagggagttgaagccaacgaggtatcagtgacatctgtgcagggagaacaaaatccagtcattgaaattgttaaagagttagagcaagaaaccatttcggaagtcgtgcccgctcagaatgatcaatcttcagtcgaagaccaaactttagctgataaagaaaatccagtggaaaaaccgtctccagttaaggcaccatcctctagtaaggatgaaccacctgcagaagaaaacttgcctgctcctgaccaggatccaattgaacaacagaaaacacctgtagcaaaaaatcaacagcatgacaaagaacacaatgaagctcccaaagccgaatctttgtctgtttctgatattccgtctagctcagtcactccatccaagaaacgaaatcattcctccccagctaatacccccaagaaatcgaaagaaattgaagctttgcaaagttcggtgccgcgaagagcgcttaggtctgataaagcaactcctcaaaacctaagggaaagtcggtcgaagcggacactgaaaaccgagctcacactacttatggatgatacaatgagacgaagcagtccgagactaggaaggtcgccagcggaaagtcattcctcacacgaacgctctccgatggaaaagaaagtgacagtctccaagttggccaaagatttaataacaatagataaggaaaaagagatagagctgaagtcgctacctgatgcgtctgaaactaaggatgtaaagataaccaaaaccactacagcatcagatacttccatactgacggatgaaaatcctagctctagtaagactgaaatgaagaagttgaagggtaaaccgttgaaggcaaaaaagatgagtaggaccagtgagacagaagttaagaaggcaatagcagattccaatgaagacataccttctattttttccataaaatgtgttgaagaacatttaacttctagtgaatcggaacagaaagacgaaaaagaggagttattatgtccaaaaccgcaaatagattgtaccaatacggatttagaacaatccacggctattgaaactgatacggaacaagttgaggaaaaacgatcaaatcgcagaaaatcgcgcaggattcgaaatgaaaaattcaaaactgaaacggacacactttccgaccatttggatgcaaagaaagcggagaatgcatctctggaaattagcatgcgacctaaatgtacattggagactcagcaaagtgatcctgtcactgctaagaataagcgaaactccggcagattaagtcgtaaagaaaaatctgttattaatgcggccaaatccgaaaaggacaaaagcccatccgccatatctcagtccactgaaagaaaacaacttttaaatgaaaacccttctaagaaggataaaaaaacagagcaatctggtaacaaaaaagaagcggtagtgggtccacttgacaagacggaaacgtcaagtagcacaaatataatcgataaaaaaagtaatgaaagttttgacagtgcaatgcaaccgagtgacaggctaaatcaaaaggagtcagcttttacgaaattgtcatcaatatccagtcccaaaaaaatcatgaaagatcaggataaggatttggatgcattaagcaaaggcggagactcgaatccaactataagagataccggcgaggacagtagacagactgataagaaacaccaagagaacgatactaaacatgaggaagaggatagttcaaagttaaaggctaatatagatgaaacaaaatcttcttcagaaaaggacgcggagcctatttcaaaagactcttcacaggattcagccaaacccagactctcgaaaccaaagtccagaaacaagcgtaagaaaaacgaaaagaaacctaatgatagtattgctgaatctgatatagaaggtggttttcaagttaacacagaaaccgttcaagctacatgttctacaccttcagagtccaataaaaaggacatggttaaatctgatgaaacaaacgaggaaccaaacttatccgaaacagaaataggaagaataaggaaacgcgggcaggcttttcacattgagaatcccaaagatgatttacatattactccgcaaaatgaaaaccagagcattgccggtgttaattttgagaaacaggtgccattgccagaaagtgttgaatccgatactccgattatgaaaataccaacgaaaacttacctaatgtgtacaaaaaacaaaacatcgttattgtctgcctcagaagatcctgatattgtcctcgagccacagaagttgatcaccacatcaaaaggcgactctaatccagatctagataatgccaataatttggaaaccagttcgacgcaggatccaaaagaacatgaattttctgatcaaactttcacagataattccgatatcattccttcatgtacaaaaaagtcgcagattgtttttcctactactccaacaaaaagcagcgatcaaaccaaaaacagctttataacgcccaataggtcaccaaaatccaaacgaaatgtttcaaaagaggcgaaaagattagacaacagctttgaggaaagtcagaatgcagcttcggaatcctcggcttctaaagtccaaaaagaactcaggactcctacagcatcctgtcgaaagctgcgtgtgttaataaaaagaactcccacctcaagtttgcctacaaactcaaggaagtctatatttaagaaaactcccgcgaaatcgaagcgcttgactaaaattcttgagagcatggaaaaaacgccatctagggagccgtccgtttctttaggtgaagttaatcctgactctgatcctgttgctgcagaatccgttgcagttcttcatgaatctgatagggatcttgaatcaaacgaaatcccaaatgaagaagtttttgaggatacggaagaggcgtctgctgaagacacagacaataaattaaaaaagaaagaggacgatcacgaattggaagtaaatgacatttgcgcagcgagtaaaaatcctatcacagacgattcaactaaggacgcgtcatcaaacaagtcaacagatagtgatgttttgcaggaaacaaaggacgaattatctaactcgttaatcaacgcgactcaaggcgaggataccccaataaaggagttgaccgaagaggaagttcctaataataaaaccgttgaagatgaatctaaaaaacaggaaatcttaaaagatctagaaccggataatgcagcgttagaagaggatactgcttccacagcgaaagccgccgaggagatggacctttacataaaggagaagtccaatgttaaatcggttctagccgaaccagaaactgatgtaacagatgacgaggaactcgcccaaagcccaattccgaactcatcggaaacaacaagtgtcacggatgatcccgaacccagcacatccagcgtggtgaagcgcagcttgcgcaagcgggaagcggattcttcacagccagatggttaatagcttgcccaataattccatttttttccagtacatttgcaaatcttacaaatattttctttctcatcccttctttttatttagaagctgccaaacgaaagcaacgccaagatgtggagaagtcactaactggcaaaaaggaacaagttaaaccaggtgagtctacaattcattctagttcattattcacgttatttgcttttttactaacttcgaaactatgatgcttttgattttggtaattggaaaactttgtttctatatatttctaatctatctacttaattacagctcgacgccgacaactcgctgaggtagaagaacgaccatcccttaaacgctcaaagacggagtcagaagccaagtccactgtccagggcaaatatatctctattattggcaatgagactatcatgtcatccacaacagcgcccattagggaaaccaacagagaggcggccagcacatctccatctgcaagaaagtcggcggtacaagaagccaagcacgtcgaaaccactaagcatatcatcctaggaccaccaggcaaaaagctgcttcattcagatagtccagccgcggaagtcaagaagcccatggtgcaaactctgctgagttccactctaagtcttcaaaaaccttcgacactagacgatggtagtccactgaaaataaggaaatccttgaagaagtcgattgccgatgaaaacattgacggcgatcagtcgatctttagcagttcctctgtgcttaataaaaatacgtctgttgttgctccgagaaaggttaatatatccgtgtccctattgcaatcgaaggacactcaagtggaaacggctgcatcgtcatccgaaacaccaatattgacaaaaaaggaaaaacttaaaacacagaaatcgaccaagaaaccggagggcaataagaaaacggagagcaagaaaaaatctttagtacaaggccctcaaatgaaaacccaaaaatccgaggaggctgtatcgggcccaaaaattttgaataaatacctaaaatcggaaaccgaatcctcaaggaaaacagtttccacagtaacaggccggaaacaaattgggcaactggaggttttgaagaaaccggaaagcagaaagtcggaggagtctttagtagaagcaatttctcggaaaaagcaatcccaagtccaacggttaagtaaaatagatggtagaaaatctgaaggaacatctttacctcaaccagatgtctcgaagtctgaaactgctttgaaagcagctttgcccaaggaaacagagtttccagttcaagacgcagaaatcgagaaaatgtctaaaggtcgcggacaccaaaatgcggtcaaaaacaccaaaacggaacagcccaaatcgaagcccaagactgaggttcgttccctgcaagctgaggctgctactgagctaatggattcgatggactctcaatcagatgtatccgatatccgcgcaacatttcccgaatcccaaggaatcttcaatgtgccaggtcacatgacccgagctatcagcagcaacagatcactggcacctacaccaactcccatgtctgacagtcaacgaaatgcttctaaggagcgctttacgcctgtttcggaccaaaaaaaaccaatcagggaatcacagactttatcaaagcgtcgtgcacgaggtggaaggaaccagccacttgtttcaaaaaggaaagcgggtgaagcggaagacggtacagcggtgatcaatcccaagagacccagagagatggatgaagaggaccacccacaacagaatgatcatgtccaagaatctgcatttgctgcgttcccagtaaaaataacagctgcttcttctgttattccccaagtagtgcgttctacgggtaatacagttcctcaaaatattagtccccgcaaactttgcgtgaaaataaatcggaggccctataataagtggcttcggagcacgcaggagaggaatgaagaacaagaaggatctcgtaatgtaacgtcattaccactgcttggtgaaacctcggaaacggattcagcggcggagtcgatgtcagaatcaattctgcaatcccaagtacagtcggagcctgctattcagccactgcctgcatcccagcccgattcttgtacattacaggcctcagatctccgaataagggaaagctcagctcaacttgctccaattgcagcttatgattcaccggcagctaacgattcatcgacatcacccgctttagacatcgcacccgaaagtgcacagacagctaaagcaaccttgaacactgctctctgtccatcgactgaaaaacatcttcctgacgaaccaacgttgctggaaagttccaagaaggttgcagaaccgcagaagctacaaacgtttcaagccaaatgtttgcctgtgccaattccagaggtaaagtcagagccggaagatatcatggatgagcattcacctaatgagcccatgcctatggttgctgcagcaccagcaacacctcaaccacatgcgattacggaagacgctgggcccgacactattcaagtcaacaccttgggtgtttccacttcatctaggccgcttgagttacattcaattccctccgccagtgaccctgacggaaaccccaatgccattgggcagaccaagatgtactcatttctctacccgaaacgttacaagcaatcctatgacgacgtcggtctagacttctgctgtccaaatctcgatggaccaatgcgggctattgattttactcgattgcattcgaaggccgaggtaccggtgctggaaatcccgcagttcctggttataaccaccaagtttatctctaaggcggataagaatatgccaagtaaggtgcgggcaaagctggaattactggacaagtcgaaagaacgggattccagtaaactgaccccgacggctaccactccgactgctgatcccaccggtccttcatccttttcacctgctcccgcttcggttggtccggcaactcaaccgtttccatcgattatacagaatttgctatcggctcccctacctgatccaggtctatttaatcatcccacaaccgtggacccatctacttccactcccgtagtttcaggcagttcctcttccactaccatttcggcggacttggattctttaagcaaacagttgccacgtggcacaaaactgatcaagaagtcagtgcaacaagtggctaccaatccctcattagccggcacctcgatggtaattaatgcgtcgccgtcctttattcagttacctccgatttgccccaacgacaagcagcgcgtggagttgcaggcgagggttcaaatgtttgacttggtgctccagaccctcagccggcgggcagccaacttatcagtggccgagcgacagcgtaccattgaggaaattgtaaggaccagctcgttaatggccatcgacgtggatgtgggtacaaagcttttggaaaactatgtacattacttaaacaaggctaccagcacaatgactcctctaaccccggcccaaatcaactcgagcttaggcgcttccaccagctcgacgctttccaaaagcatagccacctccgacatcccacagcaagggaagaaaatatctgcggaccatgcccaacagcggagttctctccccgctaccattcccctttacgatgggggcaggaacacacttggctttccgtatagctgctcgaaatcgacggcagggcgaaagtcttcatatgttgccaccagcacgcctgtgaaagcctccacatcccaagcagcagcagcagcagctctaggaaacgctcagccaagatccacgttggggatcccgaaaagtgttcgggaagacgctagtcaggtagttattatttacgacaaatatttatgtggtcattaataaacaatttattgttcctaaacagttcgttaatctcaacacaacagtgtgtatgccagcaccaaggacgaatgccaagaaaaaaccagggacttcgggccctttaaagtcgatgaattcttcaccagctgtgcagaaaccggcgctgtgcaaacagcagacggcgccggcaagaactctgtccaagagcacagtctcatccgttgcacgagcgaaatcaacagggtctttaagtgcagtgttgggtgagactcctgctgacgaattcgtatcccccgccggaatgagtctgagtaccaccggaaatccgaatgtcttcatcattaaccacgcggtgcagtcagaggaaagcatcctgcctgactccaacagcagcgtagggcacatggaaacgacggtgatcaaaggcgagctggatgattctgcggagattattatatagcagggcaaagactataaaccagttggaaagtattctaagttactttagcacagttaattaagagttaattatttcgttgaacgcaaaatcataattttgtaattctgaaatgaagaatttgttaaaccttacgcagcatcgtcattttttttttttttttttgaaataaatggttaaatattttattcagtgtgggactttcaagtaaatatcttatagttatcattgcatatttattaagtatccaaataaaatataaatataaacattctaacatttttttatataagccgaaacgcataaatcgtgtaaaataagaaataagaaaaattacatttcgttcgaagcttttggagccattggcgaaatcttaaagctcttgtgaaatattacagagcgataagtataaaagttgcgcaggggaaaaaccgtttctattaacaacaaatttttcaagatgacaacatctgctgttgaagctcccaatagtaagtttagttaaaactttacagaggcatattataatgatgcacatatgtatataataatctacaggtgcatatcccgatttagaaaagcgactggaaaggtatttgcgaagtgtgttttgcctaaaggaaatcgatactaaaaatgagtacattccaaccgaagtggagtactttggagttctgagtttaagcgatgttcgagcgcctcgccgaaaactgtggtacatgtactatgcgacaacagatcaggtggacaaaactgtggatcagatccatcgtaaatatggccaaaagaatatgtacgagctgttcagaaaaccggtatatacaggggctggaatgcgatcccgtgttaagaaccactttaaagggcttaagtggcacgtaaaaggaaacattttggaagccccgctaggtagctcccttaatgatgagaaagtggttaacacaattgcagatttatatcagaacgaaaggagaagatacttcgattaccttatgtctaggag

SEQ ID NO: 29297 - DNA, 9953 bp, DROSOPHILA
aaagaacgaaaaagtgcttgcatttgtgcgctaatgggtatatgaggtccttctgctaaaggaatgccaagtcatacaaacttttcgcgattcgccttaatggaaatagataagacgcggcgcagttgaaagattgcaaattgatccaccgatcgaccgacgcacatgaaaagtgaagtatggaggacattgaatatttagacgagtacaaagacttggtgctgccagggattaaatcgagtgctccgacagcatcttctgccggcgttccgcggcagcggcgcatttcatcagactcgagcaactcgtcgtcgattgatgcggacattttccaaaagctcttccatggcaagtacctcgacgacgaactgcttaaggagggctctggctcgaagtcgcaggacaggcgtcgacgccccccatctccctcctccagcgacgagtccaacgatgccttggaagccctcttctgcgggaagagcagccagtcaaagctgagcaagaggcgcgaacggtatgagtcgttcgattcggtggacgacctaggagaagccctaatgcgtccatcgcacaggctgaccgtacccaagcccagtacctctcaggcaggttccaaaaagtcacaagatgctgccccacacagaagcattagcaatagcagcagcagcaacattgccatgtcatctgggcaaacttatgcatgtccaaaaaacaagaaaaccaattctgtggccaacaagacagcagtatctgcaaatggtgataaatgggcttccggcaaaaacaagaccgttaccattgtaaagccccaaaaaacagatctaaggccttcgcggcttgaacccaaaacagatccattaaatttgggtgacttatacggggactctgacagcgattcgtcctatgagtatgaatcggacttttacggcgatcaagactccgatgaagaggatgagccggtgatcgacatttcaacggacacaagcaggaccacatcggtggcggacactgtgacacctgttgtttccgacgacgagggccaggagccgcagagtgagctgaatcagcgtcatgcgaatgatcaggagtcttttttgagcagcacctacgaacgcctgcagtcgtatttgagtaatctcagttccgccgagccgccgccaatctataagaaacagaatagtgcgagaaaatcccgctccaacgaaaagaaaccctcttcttcccaacaggttaagcatgctaatgagcaatcagcggccagtgacaaagaggctaataaaaaggagcgggatttggagccaccggaggcgagcagcagtgcgaaatcctcggccagcaaggctagcggtagtcgcaagctgtatgacgtagctaataatgctacgcttgaggctgtggagcgcatgagtctcgacctggccgagcaaatcatggagatcgatgtggagcgatcttacgagttcgaaaagcggtctgcctcaaagtcgcgtagcttatccagatctaagattccagcagattctagcacctcgcaattgggtcacgtgcgaaagctaacctattcgagcgaaagactggatcaaccggaacctttgggcacccagttgcgtcggtcgaagagcgagtccttaccaaagcgaggtcgccctcgtggccaaaagcagcgtaagaaccgtggagcaaccatggaggaaaaaagtgctaattgccgggatggggaaggagagccagtcaaaagaaaacgcggaaggcctcgcaaaattattccaaaggaggaggctaaaacagcagagactgaaaatacaattgaaagcttgaacacaaatgttcctctctcaatagatacgagcaaagaaaatccggaaacggagacggttaatttagaagtgccaataaaacaggatgaactagttagcgatttggacaatgccaaggagctcacaggatctaccaatttaccccaggatgatattgaaatggcgtcaaatcaccaagaaacggatcttaaatgtgctccggacagggttgcgctggataagtctgagtccacgccaaaggtcgaagaagaacagctttgtaaagtggacacacctagtgatactgcactggacgaaagcaaagtatccgaaagtgcaaaaaatcatattgaattggaagataaggataaggataaggaggaaactcagaaggaatctcccaatggcaattcgaaggaaaccaatgaaaactcggttatagttactaatgaagttgaattaccagctaaaaaggctgaagccaaggcagaagcgggaaatattgttgaggaaagcgactcccaacttgctgaggattttaaattggctgaagagatcttagccgctgaggttggtaagggagttgaagccaacgaggtatcagtgacatctgtgcagggagaacaaaatccagtcattgaaattgttaaagagttagagcaagaaaccatttcggaagtcgtgcccgctcagaatgatcaatcttcagtcgaagaccaaactttagctgataaagaaaatccagtggaaaaaccgtctccagttaaggcaccatcctctagtaaggatgaaccacctgcagaagaaaacttgcctgctcctgaccaggatccaattgaacaacagaaaacacctgtagcaaaaaatcaacagcatgacaaagaacacaatgaagctcccaaagccgaatctttgtctgtttctgatattccgtctagctcagtcactccatccaagaaacgaaatcattcctccccagctaatacccccaagaaatcgaaagaaattgaagctttgcaaagttcggtgccgcgaagagcgcttaggtctgataaagcaactcctcaaaacctaagggaaagtcggtcgaagcggacactgaaaaccgagctcacactacttatggatgatacaatgagacgaagcagtccgagactaggaaggtcgccagcggaaagtcattcctcacacgaacgctctccgatggaaaagaaagtgacagtctccaagttggccaaagatttaataacaatagataaggaaaaagagatagagctgaagtcgctacctgatgcgtctgaaactaaggatgtaaagataaccaaaaccactacagcatcagatacttccatactgacggatgaaaatcctagctctagtaagactgaaatgaagaagttgaagggtaaaccgttgaaggcaaaaaagatgagtaggaccagtgagacagaagttaagaaggcaatagcagattccaatgaagacataccttctattttttccataaaatgtgttgaagaacatttaacttctagtgaatcggaacagaaagacgaaaaagaggagttattatgtccaaaaccgcaaatagattgtaccaatacggatttagaacaatccacggctattgaaactgatacggaacaagttgaggaaaaacgatcaaatcgcagaaaatcgcgcaggattcgaaatgaaaaattcaaaactgaaacggacacactttccgaccatttggatgcaaagaaagcggagaatgcatctctggaaattagcatgcgacctaaatgtacattggagactcagcaaagtgatcctgtcactgctaagaataagcgaaactccggcagattaagtcgtaaagaaaaatctgttattaatgcggccaaatccgaaaaggacaaaagcccatccgccatatctcagtccactgaaagaaaacaacttttaaatgaaaacccttctaagaaggataaaaaaacagagcaatctggtaacaaaaaagaagcggtagtgggtccacttgacaagacggaaacgtcaagtagcacaaatataatcgataaaaaaagtaatgaaagttttgacagtgcaatgcaaccgagtgacaggctaaatcaaaaggagtcagcttttacgaaattgtcatcaatatccagtcccaaaaaaatcatgaaagatcaggataaggatttggatgcattaagcaaaggcggagactcgaatccaactataagagataccggcgaggacagtagacagactgataagaaacaccaagagaacgatactaaacatgaggaagaggatagttcaaagttaaaggctaatatagatgaaacaaaatcttcttcagaaaaggacgcggagcctatttcaaaagactcttcacaggattcagccaaacccagactctcgaaaccaaagtccagaaacaagcgtaagaaaaacgaaaagaaacctaatgatagtattgctgaatctgatatagaaggtggttttcaagttaacacagaaaccgttcaagctacatgttctacaccttcagagtccaataaaaaggacatggttaaatctgatgaaacaaacgaggaaccaaacttatccgaaacagaaataggaagaataaggaaacgcgggcaggcttttcacattgagaatcccaaagatgatttacatattactccgcaaaatgaaaaccagagcattgccggtgttaattttgagaaacaggtgccattgccagaaagtgttgaatccgatactccgattatgaaaataccaacgaaaacttacctaatgtgtacaaaaaacaaaacatcgttattgtctgcctcagaagatcctgatattgtcctcgagccacagaagttgatcaccacatcaaaaggcgactctaatccagatctagataatgccaataatttggaaaccagttcgacgcaggatccaaaagaacatgaattttctgatcaaactttcacagataattccgatatcattccttcatgtacaaaaaagtcgcagattgtttttcctactactccaacaaaaagcagcgatcaaaccaaaaacagctttataacgcccaataggtcaccaaaatccaaacgaaatgtttcaaaagaggcgaaaagattagacaacagctttgaggaaagtcagaatgcagcttcggaatcctcggcttctaaagtccaaaaagaactcaggactcctacagcatcctgtcgaaagctgcgtgtgttaataaaaagaactcccacctcaagtttgcctacaaactcaaggaagtctatatttaagaaaactcccgcgaaatcgaagcgcttgactaaaattcttgagagcatggaaaaaacgccatctagggagccgtccgtttctttaggtgaagttaatcctgactctgatcctgttgctgcagaatccgttgcagttcttcatgaatctgatagggatcttgaatcaaacgaaatcccaaatgaagaagtttttgaggatacggaagaggcgtctgctgaagacacagacaataaattaaaaaagaaagaggacgatcacgaattggaagtaaatgacatttgcgcagcgagtaaaaatcctatcacagacgattcaactaaggacgcgtcatcaaacaagtcaacagatagtgatgttttgcaggaaacaaaggacgaattatctaactcgttaatcaacgcgactcaaggcgaggataccccaataaaggagttgaccgaagaggaagttcctaataataaaaccgttgaagatgaatctaaaaaacaggaaatcttaaaagatctagaaccggataatgcagcgttagaagaggatactgcttccacagcgaaagccgccgaggagatggacctttacataaaggagaagtccaatgttaaatcggttctagccgaaccagaaactgatgtaacagatgacgaggaactcgcccaaagcccaattccgaactcatcggaaacaacaagtgtcacggatgatcccgaacccagcacatccagcgtggtgaagcgcagcttgcgcaagcgggaagcggattcttcacagccagatgaagctgccaaacgaaagcaacgccaagatgtggagaagtcactaactggcaaaaaggaacaagttaaaccagctcgacgccgacaactcgctgaggtagaagaacgaccatcccttaaacgctcaaagacggagtcagaagccaagtccactgtccagggcaaatatatctctattattggcaatgagactatcatgtcatccacaacagcgcccattagggaaaccaacagagaggcggccagcacatctccatctgcaagaaagtcggcggtacaagaagccaagcacgtcgaaaccactaagcatatcatcctaggaccaccaggcaaaaagctgcttcattcagatagtccagccgcggaagtcaagaagcccatggtgcaaactctgctgagttccactctaagtcttcaaaaaccttcgacactagacgatggtagtccactgaaaataaggaaatccttgaagaagtcgattgccgatgaaaacattgacggcgatcagtcgatctttagcagttcctctgtgcttaataaaaatacgtctgttgttgctccgagaaaggttaatatatccgtgtccctattgcaatcgaaggacactcaagtggaaacggctgcatcgtcatccgaaacaccaatattgacaaaaaaggaaaaacttaaaacacagaaatcgaccaagaaaccggagggcaataagaaaacggagagcaagaaaaaatctttagtacaaggccctcaaatgaaaacccaaaaatccgaggaggctgtatcgggcccaaaaattttgaataaatacctaaaatcggaaaccgaatcctcaaggaaaacagtttccacagtaacaggccggaaacaaattgggcaactggaggttttgaagaaaccggaaagcagaaagtcggaggagtctttagtagaagcaatttctcggaaaaagcaatcccaagtccaacggttaagtaaaatagatggtagaaaatctgaaggaacatctttacctcaaccagatgtctcgaagtctgaaactgctttgaaagcagctttgcccaaggaaacagagtttccagttcaagacgcagaaatcgagaaaatgtctaaaggtcgcggacaccaaaatgcggtcaaaaacaccaaaacggaacagcccaaatcgaagcccaagactgaggttcgttccctgcaagctgaggctgctactgagctaatggattcgatggactctcaatcagatgtatccgatatccgcgcaacatttcccgaatcccaaggaatcttcaatgtgccaggtcacatgacccgagctatcagcagcaacagatcactggcacctacaccaactcccatgtctgacagtcaacgaaatgcttctaaggagcgctttacgcctgtttcggaccaaaaaaaaccaatcagggaatcacagactttatcaaagcgtcgtgcacgaggtggaaggaaccagccacttgtttcaaaaaggaaagcgggtgaagcggaagacggtacagcggtgatcaatcccaagagacccagagagatggatgaagaggaccacccacaacagaatgatcatgtccaagaatctgcatttgctgcgttcccagtaaaaataacagctgcttcttctgttattccccaagtagtgcgttctacgggtaatacagttcctcaaaatattagtccccgcaaactttgcgtgaaaataaatcggaggccctataataagtggcttcggagcacgcaggagaggaatgaagaacaagaaggatctcgtaatgtaacgtcattaccactgcttggtgaaacctcggaaacggattcagcggcggagtcgatgtcagaatcaattctgcaatcccaagtacagtcggagcctgctattcagccactgcctgcatcccagcccgattcttgtacattacaggcctcagatctccgaataagggaaagctcagctcaacttgctccaattgcagcttatgattcaccggcagctaacgattcatcgacatcacccgctttagacatcgcacccgaaagtgcacagacagctaaagcaaccttgaacactgctctctgtccatcgactgaaaaacatcttcctgacgaaccaacgttgctggaaagttccaagaaggttgcagaaccgcagaagctacaaacgtttcaagccaaatgtttgcctgtgccaattccagaggtaaagtcagagccggaagatatcatggatgagcattcacctaatgagcccatgcctatggttgctgcagcaccagcaacacctcaaccacatgcgattacggaagacgctgggcccgacactattcaagtcaacaccttgggtgtttccacttcatctaggccgcttgagttacattcaattccctccgccagtgaccctgacggaaaccccaatgccattgggcagaccaagatgtactcatttctctacccgaaacgttacaagcaatcctatgacgacgtcggtctagacttctgctgtccaaatctcgatggaccaatgcgggctattgattttactcgattgcattcgaaggccgaggtaccggtgctggaaatcccgcagttcctggttataaccaccaagtttatctctaaggcggataagaatatgccaagtaaggtgcgggcaaagctggaattactggacaagtcgaaagaacgggattccagtaaactgaccccgacggctaccactccgactgctgatcccaccggtccttcatccttttcacctgctcccgcttcggttggtccggcaactcaaccgtttccatcgattatacagaatttgctatcggctcccctacctgatccaggtctatttaatcatcccacaaccgtggacccatctacttccactcccgtagtttcaggcagttcctcttccactaccatttcggcggacttggattctttaagcaaacagttgccacgtggcacaaaactgatcaagaagtcagtgcaacaagtggctaccaatccctcattagccggcacctcgatggtaattaatgcgtcgccgtcctttattcagttacctccgatttgccccaacgacaagcagcgcgtggagttgcaggcgagggttcaaatgtttgacttggtgctccagaccctcagccggcgggcagccaacttatcagtggccgagcgacagcgtaccattgaggaaattgtaaggaccagctcgttaatggccatcgacgtggatgtgggtacaaagcttttggaaaactatgtacattacttaaacaaggctaccagcacaatgactcctctaaccccggcccaaatcaactcgagcttaggcgcttccaccagctcgacgctttccaaaagcatagccacctccgacatcccacagcaagggaagaaaatatctgcggaccatgcccaacagcggagttctctccccgctaccattcccctttacgatgggggcaggaacacacttggctttccgtatagctgctcgaaatcgacggcagggcgaaagtcttcatatgttgccaccagcacgcctgtgaaagcctccacatcccaagcagcagcagcagcagctctaggaaacgctcagccaagatccacgttggggatcccgaaaagtgttcgggaagacgctagtcagttcgttaatctcaacacaacagtgtgtatgccagcaccaaggacgaatgccaagaaaaaaccagggacttcgggccctttaaagtcgatgaattcttcaccagctgtgcagaaaccggcgctgtgcaaacagcagacggcgccggcaagaactctgtccaagagcacagtctcatccgttgcacgagcgaaatcaacagggtctttaagtgcagtgttgggtgagactcctgctgacgaattcgtatcccccgccggaatgagtctgagtaccaccggaaatccgaatgtcttcatcattaaccacgcggtgcagtcagaggaaagcatcctgcctgactccaacagcagcgtagggcacatggaaacgacggtgatcaaaggcgagctggatgattctgcggagattattatatag

SEQ ID NO: 29298 - protein, 3257 aa, DROSOPHILA
MEDIEYLDEYKDLVLPGIKSSAPTASSAGVPRQRRISSDSSNSSSIDADIFQKLFHGKYLDDELLKEGSGSKSQDRRRRPPSPSSSDESNDALEALFCGKSSQSKLSKRRERYESFDSVDDLGEALMRPSHRLTVPKPSTSQAGSKKSQDAAPHRSISNSSSSNIAMSSGQTYACPKNKKTNSVANKTAVSANGDKWASGKNKTVTIVKPQKTDLRPSRLEPKTDPLNLGDLYGDSDSDSSYEYESDFYGDQDSDEEDEPVIDISTDTSRTTSVADTVTPVVSDDEGQEPQSELNQRHANDQESFLSSTYERLQSYLSNLSSAEPPPIYKKQNSARKSRSNEKKPSSSQQVKHANEQSAASDKEANKKERDLEPPEASSSAKSSASKASGSRKLYDVANNATLEAVERMSLDLAEQIMEIDVERSYEFEKRSASKSRSLSRSKIPADSSTSQLGHVRKLTYSSERLDQPEPLGTQLRRSKSESLPKRGRPRGQKQRKNRGATMEEKSANCRDGEGEPVKRKRGRPRKIIPKEEAKTAETENTIESLNTNVPLSIDTSKENPETETVNLEVPIKQDELVSDLDNAKELTGSTNLPQDDIEMASNHQETDLKCAPDRVALDKSESTPKVEEEQLCKVDTPSDTALDESKVSESAKNHIELEDKDKDKEETQKESPNGNSKETNENSVIVTNEVELPAKKAEAKAEAGNIVEESDSQLAEDFKLAEEILAAEVGKGVEANEVSVTSVQGEQNPVIEIVKELEQETISEVVPAQNDQSSVEDQTLADKENPVEKPSPVKAPSSSKDEPPAEENLPAPDQDPIEQQKTPVAKNQQHDKEHNEAPKAESLSVSDIPSSSVTPSKKRNHSSPANTPKKSKEIEALQSSVPRRALRSDKATPQNLRESRSKRTLKTELTLLMDDTMRRSSPRLGRSPAESHSSHERSPMEKKVTVSKLAKDLITIDKEKEIELKSLPDASETKDVKITKTTTASDTSILTDENPSSSKTEMKKLKGKPLKAKKMSRTSETEVKKAIADSNEDIPSIFSIKCVEEHLTSSESEQKDEKEELLCPKPQIDCTNTDLEQSTAIETDTEQVEEKRSNRRKSRRIRNEKFKTETDTLSDHLDAKKAENASLEISMRPKCTLETQQSDPVTAKNKRNSGRLSRKEKSVINAAKSEKDKSPSAISQSTERKQLLNENPSKKDKKTEQSGNKKEAVVGPLDKTETSSSTNIIDKKSNESFDSAMQPSDRLNQKESAFTKLSSISSPKKIMKDQDKDLDALSKGGDSNPTIRDTGEDSRQTDKKHQENDTKHEEEDSSKLKANIDETKSSSEKDAEPISKDSSQDSAKPRLSKPKSRNKRKKNEKKPNDSIAESDIEGGFQVNTETVQATCSTPSESNKKDMVKSDETNEEPNLSETEIGRIRKRGQAFHIENPKDDLHITPQNENQSIAGVNFEKQVPLPESVESDTPIMKIPTKTYLMCTKNKTSLLSASEDPDIVLEPQKLITTSKGDSNPDLDNANNLETSSTQDPKEHEFSDQTFTDNSDIIPSCTKKSQIVFPTTPTKSSDQTKNSFITPNRSPKSKRNVSKEAKRLDNSFEESQNAASESSASKVQKELRTPTASCRKLRVLIKRTPTSSLPTNSRKSIFKKTPAKSKRLTKILESMEKTPSREPSVSLGEVNPDSDPVAAESVAVLHESDRDLESNEIPNEEVFEDTEEASAEDTDNKLKKKEDDHELEVNDICAASKNPITDDSTKDASSNKSTDSDVLQETKDELSNSLINATQGEDTPIKELTEEEVPNNKTVEDESKKQEILKDLEPDNAALEEDTASTAKAAEEMDLYIKEKSNVKSVLAEPETDVTDDEELAQSPIPNSSETTSVTDDPEPSTSSVVKRSLRKREADSSQPDEAAKRKQRQDVEKSLTGKKEQVKPARRRQLAEVEERPSLKRSKTESEAKSTVQGKYISIIGNETIMSSTTAPIRETNREAASTSPSARKSAVQEAKHVETTKHIILGPPGKKLLHSDSPAAEVKKPMVQTLLSSTLSLQKPSTLDDGSPLKIRKSLKKSIADENIDGDQSIFSSSSVLNKNTSVVAPRKVNISVSLLQSKDTQVETAASSSETPILTKKEKLKTQKSTKKPEGNKKTESKKKSLVQGPQMKTQKSEEAVSGPKILNKYLKSETESSRKTVSTVTGRKQIGQLEVLKKPESRKSEESLVEAISRKKQSQVQRLSKIDGRKSEGTSLPQPDVSKSETALKAALPKETEFPVQDAEIEKMSKGRGHQNAVKNTKTEQPKSKPKTEVRSLQAEAATELMDSMDSQSDVSDIRATFPESQGIFNVPGHMTRAISSNRSLAPTPTPMSDSQRNASKERFTPVSDQKKPIRESQTLSKRRARGGRNQPLVSKRKAGEAEDGTAVINPKRPREMDEEDHPQQNDHVQESAFAAFPVKITAASSVIPQVVRSTGNTVPQNISPRKLCVKINRRPYNKWLRSTQERNEEQEGSRNVTSLPLLGETSETDSAAESMSESILQSQVQSEPAIQPLPASQPDSCTLQASDLRIRESSAQLAPIAAYDSPAANDSSTSPALDIAPESAQTAKATLNTALCPSTEKHLPDEPTLLESSKKVAEPQKLQTFQAKCLPVPIPEVKSEPEDIMDEHSPNEPMPMVAAAPATPQPHAITEDAGPDTIQVNTLGVSTSSRPLELHSIPSASDPDGNPNAIGQTKMYSFLYPKRYKQSYDDVGLDFCCPNLDGPMRAIDFTRLHSKAEVPVLEIPQFLVITTKFISKADKNMPSKVRAKLELLDKSKERDSSKLTPTATTPTADPTGPSSFSPAPASVGPATQPFPSIIQNLLSAPLPDPGLFNHPTTVDPSTSTPVVSGSSSSTTISADLDSLSKQLPRGTKLIKKSVQQVATNPSLAGTSMVINASPSFIQLPPICPNDKQRVELQARVQMFDLVLQTLSRRAANLSVAERQRTIEEIVRTSSLMAIDVDVGTKLLENYVHYLNKATSTMTPLTPAQINSSLGASTSSTLSKSIATSDIPQQGKKISADHAQQRSSLPATIPLYDGGRNTLGFPYSCSKSTAGRKSSYVATSTPVKASTSQAAAAAALGNAQPRSTLGIPKSVREDASQFVNLNTTVCMPAPRTNAKKKPGTSGPLKSMNSSPAVQKPALCKQQTAPARTLSKSTVSSVARAKSTGSLSAVLGETPADEFVSPAGMSLSTTGNPNVFIINHAVQSEESILPDSNSSVGHMETTVIKGELDDSAEIII

SEQ ID NO: 29299 - DNA, 2570 bp, DROSOPHILA
aaattaaaatctttgtgttacatatgtacaactttttaaaattgaaagagacacattcaatcccaaaatggtcctatgcaataaataccaaacttaaagtgaatatgaactatggaatataaatgtagttacattgaaaaacaaaattaactaaattaaaaaataagcaacatagagatgaaaacctgcaaataaacgagaaaacttaaaccaaaggattaacaaatgttgtaacgattgatattatgaaaatccgcctcattgcaatcaactgttgaatattttaatttttacacaaataaactaacaaaatgacatattttgacatacctaagaaaacatataacatagtaatatataatatacgtttatatagtatatgaaagttgacgcaccaaagtgaaaaggtaaactaaactgtatttgtacctaaaacatattttttcctgatttcatatagcaaatctttcgctcgatatacataaacataaatatatattgaatactgtaaacattatatttaaatagtgttgatagcaaattaaattggatattttatagtaacgatacgccagttcttgtgtacagcaccatatttctgaagatttttcgggtagatgaaccttaatattatgcattctgtacaactgcactcacagttatgtttgttgagccgatattaaaagaaattctctctatactcgtatatatatatatatatatatgtattgaaacaaaaagaaaatactcatatacggtatacatttatatagaaatgtacaagtattatacacaatgcgcatacatatgatacaaaggatacaatacccagcccaaaaaccgagaaaccaaaagataagtgaagtagacgaaaaaaagcaagaaatcatgtaattatgtatgtttaataaaacgtttaactaccgagtgaagtctaaagacaaaggcacaaattctttcgccaaccatctgtgtttatttttggtctttatatagtaacctatataaataaatcggagcactcgttcgtaacagccacacaaaatgcgacttgcgctggtgctcttttgttggctgctctgcttgagtttagttcatatccatggaacaccggcatattcactatcaagagcaccactgccaccaccaccgcccagaccaatagccagaccaccgcctccaaggccaaaaccaccattgccaaggctaacgatacggcattcagaccaacatcaccgcgatttgttagacctcctaatgcaccacccatcaggagaccaactattccaccacccaggcccaccagaagacgtcccataacaaggcaaccaaccaggagaatcccaaaaccaccactgacccgaagacccaccgccaggcccactaggccacctgcagtgcgaaccactagaaaatttctgatctggtcaagggcacccaccaaattactaccgactaggccaaatataaggcccacactatggaccaggccgccagtgcgtcctccattgccaacggtgcgtccaacgcgctcaagagtgggtcccactctatggacaagacctcccattagagtaacagtacgacccacgcctagacacccaatcagacccactattaggcctacaattcgagccactctatggacgcgacctccggtaagaccttcaaaccccaccaggtctccagttagagccacaaaatccactttatggacccgacctcaagtaagaactactcgacgactgacattcattttcaacgaacccacaagagagcctcccacatcaagaccaattcccatcactagagctccaaatccggacataactcgatccacaagacgtttgatttttatatttcccagggacaccacctctatatagctcgacgtcctaattggactgtacgtccaacaggacgtacgagaactactttaatagcttaatgcctataagtaagctgaaataatatatagtagctgaatacatatagaatctttaagaattcactgcaagcacgcgatgttatattttatataagagagagaaaagtctaagctaataaccttaaatatcaagtcaaggcacagatggataggctaattaaatattttgagtagctgaattgcaggctttggaatatcctatctttataaaaataaggcttttctatcaaaacggagtctgtaagttcaaaatacaatttttcaattgtaaattgtaaatgaacatacgaatcaaagatttatgaatgtttctatagttaagttaattgcatatatagtttaaagttggataaggcgaacgggaagactgcctatttactttctagctgtgatttaaacccaatctaatacaggactttaagcacaacaagtttggcggactctgttcgtaacgaccccatctccatgacaaatatccctgaagtgccgacatgcccggcaaaagtccagggaaactggagcgaggagaaaagtagctgtggcataccggaagcgcttcaagtttgccgagctcattcgtctctgcgatttgttggcatttcaacggactgacgtgctggtt

SEQ ID NO: 29300 - DNA, 570 bp, DROSOPHILA
atgggaggtcttgtccatagagtgggacccactcttgagcgcgttggacgcaccgttggcaatggaggacgcactggcggcctggtccatagtgtgggccttatatttggcctagtcggtagtaatttggtgggtgcccttgaccagatcagaaattttctagtggttcgcactgcaggtggcctagtgggcctggcggtgggtcttcgggtcagtggtggttttgggattctcctggttggttgccttgttatgggacgtcttctggtgggcctgggtggtggaatagttggtctcctgatgggtggtgcattaggaggtctaacaaatcgcggtgatgttggtctgaatgccgtatcgttagccttggcaatggtggttttggccttggaggcggtggtctggctattggtctgggcggtggtggtggcagtggtgctcttgatagtgaatatgccggtgttccatggatatgaactaaactcaagcagagcagccaacaaaagagcaccagcgcaagtcgcattttgtgtggctgttacgaacgagtgctccgatttatttatatag

SEQ ID NO: 29301 - protein, 189 aa, DROSOPHILA
MGGLVHRVGPTLERVGRTVGNGGRTGGLVHSVGLIFGLVGSNLVGALDQIRNFLVVRTAGGLVGLAVGLRVSGGFGILLVGCLVMGRLLVGLGGGIVGLLMGGALGGLTNRGDVGLNAVSLALAMVVLALEAVVWLLVWAVVVAVVLLIVNMPVFHGYELNSSRAANKRAPAQVAFCVAVTNECSDLFI

SEQ ID NO: 29302 - DNA, 4923 bp, DROSOPHILA
tataaatataattttaatttaaggcgtaagaattgctttttctgtgtgaacaagaaagaccagccaggccgttaggagtgtggttcatcccgcaaggagattttaatttaactttacattatcaaatgacattgtttttaacgcagacggcagagacttcaattaaaaatggattaaattagaggcgacgatggggaagactactgacaatattaaaaaacacaagaaagatttagacacaggacacagaggattggagtcattcgtcctgcggatgtcgattcaaacattcttatgtttatgtgttcacattgatttatattttttttttcgttgctttagctctaaataatatgtaaaaaaatcatcataaaatataaaaaatgaagaaaaaaaaaacaaaacattgaacagtagacgtacaaagtttagaaagcaaatcaaagtaaacaagaagcgtgaaaatttgcatacccaaacaaggaaaaatggaaacaaaaccaaatgaaaaaccaaacacagcacacttgaacctataagcgtggagccaaagtgtgttgttcagcaactaagctaatattagatgtaaactaagctaactaataacttaaaatggattgcaataaaagtcaaccccaaaaagaactcacttgaattgaaattatattgaaaataaatctgtaataaggaggaagtaatagttaatgacatcggtcaattaacaattacatggatatacaaacatttactcagaatttggaacgaggaccagtaaaaaaaagtcataaaaatgcctaagctattagttgtaagacaatcccaagttccaagcaggagaaccaataaatattgcaattccaatagtccaattcctcattgggccatcctgttgcgacatttaataagcaagggcagcagaagcttcagaaatccggacactatgagacataatcccgcaaagcaaaaggcagcagaatagtttcccgtgatgcctatcaatttaccagcaattgtagtcccaataaaggcgcccattcccatggccaatgaggtaatcccaaaagcgttggtcagttttgaaagtcccaggtatttcacgtatatcaaacctctcagtgtggaataaacagctattccatggaaatgagagagggtaatattgtaaacttaagtaaggtaagtaaatgtacgcaccaggcgctacagcataggagaagccatacagaaactggaaccaaatcaagttctctccatagaaggcgctaatcaaaacggaaacaccaccgaaaattagaccacaaccacaaagtccgagggtccaactacgccttttgtaagcgaggatgccaaggatgtttctcatcacaagattactaattccgataatggggccgatcatacgggcatattcgacggggatcgtggttcgtgcagacgagtaaacaaagggtatattaaagcccatcgggaacagaaaggcggacgccaccagaatcttgaactcaaactgtttcagcaggcggtagtcgaatagtttgagcacagtgagcataaaccggctattcctacaggaattttgctttttctgattctcgtttgaccatcttcgttccctatgaactctagaaatcctatcgggttcatcatccacacgaatgttcttgatgccatagttcacttgctgggtctaagtgaaagttggtggtgttcttaagttgaagcgaatttattcttaatacaacacttacgttcttatccgatcccattagtaggaactccttgccgtcgacgttctccttgctgtgcggcttttcgtattcggcaggacccgtatagaagagatcctcccgctccaggggcgccgggcggatgagcagattctgctcatcagcattttgcgacttcttccgccgcctccaacaacagttcgaacaggaggggcagaacttggcgcatcctttcttttttgggcgtggctcatatgtacttaggatactccggcttttagcagtcatcgcggattgacgtaaatagtcatgcacgtagaagttgccgtaatactcatccgaactggtatccgaagaaccgggtaaatggtacatgcccacctgggtgggagccacctccacataggcgaccaccatcaacaggatcaacattatcagccccgcctgcgtccgcagcatgttcctccatccgatgattggcaccagccagctgttgaggaacgtgaagagtactatgcccgcaccgccaccgctgcaggaaaatccattggccatcggacggtaccgctcaaagtagtagccaacaatcagctgcgaacttgcccagatcatgctcaacgtaataccacctgcgcaggctagtactattattcatcgaatatcgtacagcaatctagaatcaacctaccaaggacgctgtaaaagaagatcagcatggtcaagctgacgctccaactggacgccagtattgaaactgcggaacacaggaccccagcgatggctacctttcggaaaccaaaacgatttatcaggacagcagaaaacgctccgctagtgaagtagcaaccaatctggacactggccacaaacgataccgacgatatggagacatccagatcctgggcaatggatggcaataagaccccaatggtaaaaattaaaccatcgattatcagctgggcgaggaaggacagcaccatgattacccaaccgaatccgccgtccggtggtatcaccatatagatctgtggatgacaagagtcgtcattcgtttctcaattcaccaccacaagaatgctattcactcacttacaaaaaccataccggagccaagtcgtcttccaccacggctaaagtcaaaggactccttcgaatttttactttccatgtcgaacgattgcttgcgcgttcgatttccgtcgtattcgctgaaagattccggcgatgcggtatcggccaactgtactgtagttacattgaacgagagacccgattcctgttgatcggtttccttagggaccacatatgaatcctcggaatcgtatttgggaatcaagggggatcctgtaagaaggctacagttttagctacaagaaatgcatttggtaggttcctcaatttcaagcaaatggccaaaaatagcttagacaaaattcaattgcatgacaataaaataaaaataaaaaaaaaaacatttttgtaaaaaggaaggcagcgctatgataacttactctttttataaaacttttgcgttttggtaatgagtggttctgccctatcatattcatccgtatagctagtaaagctcaacatctgagacacctcatctgtgctctcgatatattcattctcattatccctgtgtgtggacaattccttgctaaatccacgggtcctagagtattttttctcaaaggccggttccacaaacggcacctcagatattggctcaattggcctagatggtggaattgctggctggtttttcgaaatctcaggctcatttgatgcccccacaagcatatggggaaatcttctgataggcagcttgggaagaaaagttggattaaagctttcgtagaacgaaggcaaatccacttcactcccgtgagactgactaagggacaagaatgatgtgcgcccattcaggatatccgttgaaactgtgccgacggccacactgaccatttgtggtcgcgtgtttcgcgtatcattgtaatagatggatgagttttgaaccgagatgtccagcctggacagagattgggatctcaagctacttccacttggctgtgcagcggcggtcttatcttcatattggctgctggggaagctgaaaaacagagggatttggtcgagttgagtgctttgctgggcgaacagactcagtcaccttcgcctacgattcctgctcatttttcgactctgtcgcagagtgttcctgacatctttcacaaatctctctgcgtctcgacccgaacccaatgcacagtggctggctacgtgtctggctgcaagatgagaagccccagcaacaggaacgggaattcatggggattcgtgggattcgggaactgtcgccagacattagctgctcctggctaccaaatgctgtcatggctgccaggcgagcgtgacaaacggagttggttggtagttgcttgttggtgacccccagttgctcctcctccgcaattgccccactgcaactgttactttttagccatcgcctcgccatcgccatcttcttttgcctggcgaatccctattgccacaacccgatcccagctccgttccacccgcttgcctgtttattttggggccgaaacaaaattgcatcagtgcaatttcattgattgtaagtaaatgaaatcattccttagtcgtctgagttttgcacggagagcggagcgattggagtggagcggctaaagtgcatctcagctttaggggcagtaacttcattggcagtcactcaaaggcaacaagagctgaagtattggggtcgactgtttccccagttgattaaatggaaagtgatgcccgggctcttgaattggaggcagtcggtccatgctttatgaaacaaacctcgcccctggaaactttaactaagccagccctgcttttgcaaaatgaattacaaacaaagtgcactaattaattagcgtaaaggccagcaaacttttcgaccagccacttcagcttcatctacaccttcccccccccctggatttttcctgttctcccgcgggggagcaccgattgcagcggctatttttcctggccaacaactctatgcggaaattgtttttttccaaaaggttcgctcgtacgtgctcgttttttatggcccacgttgtgttttcctatttttcgattttttttcccctgagcgccttgaaatcgaaacggc

SEQ ID NO: 29303 - DNA, 2508 bp, DROSOPHILA
atgagcaggaatcgtaggcgaagcttccccagcagccaatatgaagataagaccgccgctgcacagccaagtggaagtagcttgagatcccaatctctgtccaggctggacatctcggttcaaaactcatccatctattacaatgatacgcgaaacacgcgaccacaaatggtcagtgtggccgtcggcacagtttcaacggatatcctgaatgggcgcacatcattcttgtcccttagtcagtctcacgggagtgaagtggatttgccttcgttctacgaaagctttaatccaacttttcttcccaagctgcctatcagaagatttccccatatgcttgtgggggcatcaaatgagcctgagatttcgaaaaaccagccagcaattccaccatctaggccaattgagccaatatctgaggtgccgtttgtggaaccggcctttgagaaaaaatactctaggacccgtggatttagcaaggaattgtccacacacagggataatgagaatgaatatatcgagagcacagatgaggtgtctcagatgttgagctttactagctatacggatgaatatgatagggcagaaccactcattaccaaaacgcaaaagttttataaaaagagatcccccttgattcccaaatacgattccgaggattcatatgtggtccctaaggaaaccgatcaacaggaatcgggtctctcgttcaatgtaactacagtacagttggccgataccgcatcgccggaatctttcagcgaatacgacggaaatcgaacgcgcaagcaatcgttcgacatggaaagtaaaaattcgaaggagtcctttgactttagccgtggtggaagacgacttggctccggtatggtttttatctatatggtgataccaccggacggcggattcggttgggtaatcatggtgctgtccttcctcgcccagctgataatcgatggtttaatttttaccattggggtcttattgccatccattgcccaggatctggatgtctccatatcgtcggtatcgtttgtggccagtgtccagattggttgctacttcactagcggagcgttttctgctgtcctgataaatcgttttggtttccgaaaggtagccatcgctggggtcctgtgttccgcagtttcaatactggcgtccagttggagcgtcagcttgaccatgctgatcttcttttacagcgtccttggtggtattacgttgagcatgatctgggcaagttcgcagctgattgttggctactactttgagcggtaccgtccgatggccaatggattttcctgcagcggtggcggtgcgggcatagtactcttcacgttcctcaacagctggctggtgccaatcatcggatggaggaacatgctgcggacgcaggcggggctgataatgttgatcctgttgatggtggtcgcctatgtggaggtggctcccacccaggtgggcatgtaccatttacccggttcttcggataccagttcggatgagtattacggcaacttctacgtgcatgactatttacgtcaatccgcgatgactgctaaaagccggagtatcctaagtacatatgagccacgcccaaaaaagaaaggatgcgccaagttctgcccctcctgttcgaactgttgttggaggcggcggaagaagtcgcaaaatgctgatgagcagaatctgctcatccgcccggcgcccctggagcgggaggatctcttctatacgggtcctgccgaatacgaaaagccgcacagcaaggagaacgtcgacggcaaggagttcctactaatgggatcggataagaacacccagcaagtgaactatggcatcaagaacattcgtgtggatgatgaacccgataggatttctagagttcatagggaacgaagatggtcaaacgagaatcagaaaaagcaaaattcctgtaggaatagccggtttatgctcactgtgctcaaactattcgactaccgcctgctgaaacagtttgagttcaagattctggtggcgtccgcctttctgttcccgatgggctttaatataccctttgtttactcgtctgcacgaaccacgatccccgtcgaatatgcccgtatgatcggccccattatcggaattagtaatcttgtgatgagaaacatccttggcatcctcgcttacaaaaggcgtagttggaccctcggactttgtggttgtggtctaattttcggtggtgtttccgttttgattagcgccttctatggagagaacttgatttggttccagtttctgtatggcttctcctatgctgtagcgcctggtgcgtacatttacttaccttacttaagtttacaatattaccctctctcatttccatggaatagctgtttattccacactgagaggtttgatatacgtgaaatacctgggactttcaaaactgaccaacgcttttgggattacctcattggccatgggaatgggcgcctttattgggactacaattgctggtaa

SEQ ID NO: 29304 - protein, 835 aa, DROSOPHILA
MSRNRRRSFPSSQYEDKTAAAQPSGSSLRSQSLSRLDISVQNSSIYYNDTRNTRPQMVSVAVGTVSTDILNGRTSFLSLSQSHGSEVDLPSFYESFNPTFLPKLPIRRFPHMLVGASNEPEISKNQPAIPPSRPIEPISEVPFVEPAFEKKYSRTRGFSKELSTHRDNENEYIESTDEVSQMLSFTSYTDEYDRAEPLITKTQKFYKKRSPLIPKYDSEDSYVVPKETDQQESGLSFNVTTVQLADTASPESFSEYDGNRTRKQSFDMESKNSKESFDFSRGGRRLGSGMVFIYMVIPPDGGFGWVIMVLSFLAQLIIDGLIFTIGVLLPSIAQDLDVSISSVSFVASVQIGCYFTSGAFSAVLINRFGFRKVAIAGVLCSAVSILASSWSVSLTMLIFFYSVLGGITLSMIWASSQLIVGYYFERYRPMANGFSCSGGGAGIVLFTFLNSWLVPIIGWRNMLRTQAGLIMLILLMVVAYVEVAPTQVGMYHLPGSSDTSSDEYYGNFYVHDYLRQSAMTAKSRSILSTYEPRPKKKGCAKFCPSCSNCCWRRRKKSQNADEQNLLIRPAPLEREDLFYTGPAEYEKPHSKENVDGKEFLLMGSDKNTQQVNYGIKNIRVDDEPDRISRVHRERRWSNENQKKQNSCRNSRFMLTVLKLFDYRLLKQFEFKILVASAFLFPMGFNIPFVYSSARTTIPVEYARMIGPIIGISNLVMRNILGILAYKRRSWTLGLCGCGLIFGGVSVLISAFYGENLIWFQFLYGFSYAVAPGAYIYLPYLSLQYYPLSFPWNSCLFHTERFDIREIPGTFKTDQRFWDYLIGHGNGRLYWDYNCW

SEQ ID NO: 29305 - DNA, 2492 bp, DROSOPHILA
tcagttgcagaacctacgtcgttggatgctgatacgatagaatatttcggaatattcagtattgacgaaccaaatgtcgctgcccaaaaacggtggtacatttattatggccttagattagaaaggttaaaggttctggaaaggattcgaaagaaatatggcaataggaatgtcagagaaatatttcagatcgccacattcagcggagtgggatttcataaagtcgtcagagaatatttctccaacttaaaatggttcacaagcagaaatcaattggaagctccactaaatagttattataatgatgaaagactagtgaaaactgtttcggacttgcataacaaggagcaaaaaagaatctttgactatataatgatacaacacgcctggtttgagcggtataatgatcaaaaaccacctcctgctaaacattaaactaactaaaaacatcgacttacagtcgacatctgttgactaaaagcggcatgtgtatttgttgatagggggtattattatacattttacaacctattggtcaagttaaatgatttataaaaatatgtcgaataaaatatatacacacacaagtagcttgcggttataatatagtagtacataatagtatataccttggagtctaaagacacagtcatccgatcatcctaatcaacaaacataaacaccctagttgtctgcattaataggtattaaaaagaaacaagcgcattaaaagctcactgttttttgataggccacagggttgcttcaaaaagctcttttgttgtgaaattggaaatcgtaaacaaaacgaaacaaactttatacaaatcagttgaaatcgtatttgttgggtatttaataagagtgcgtaggaagttaacacgcattcagaagtcagagaagcaagagtcacctcgttattaaaatatgacaacgaattcagtaactgataagaacacgggtaattaaaacggcaaattatttatttggaacatcaacgatgattaacaaccgattcgcagaaggagattacaacctggatgaggaaatcgacagccatttgagaaaattgttctgtctaaaaccaaaagctgaaacacccaaactcaatccctacatagtagaattctttggagttcttagcttgacagatctccgtgccccacaaagaaaactatgggtcatatatcacgccaagcagcctgatctggacaagaccgttgatgagatccacgagaagtatggcaagaagaatatgtttgatctgtaccgcacaccagttttcagtggagttgctctgcgggacagtgtgagaaagcacttctcgaacctaaagtggtttacgacgggaaatctcctggaagccccacctaaaagccacttcaacgacgagcgagtggtgaaaaccatcacggatctgcatcatctggaacaccagagactatataattatgtgatggtgaagaatatgtggtctatgcggtatcgctaaactaacctgtgatttaggattaaatttgtatatgactatctaaaagcaagaataataaattgtactattacaaaatccatataacataatggtttgctaaccaatcaaatagtattgttttcttgtagtacaaattttgtttattttcctatatttcgttgaataaagtacataataattatgctgatttaatttgttaaatatattcgataacattaaataaattccgcttgtgttttttttttctaaatggatgacaacgccgcataagggttaaagtgccaatcgataacgcacgtcctcacctatcgccacccctgttgaagcgtgcgtctttctaaacgcagacagaataaataaaacctgccaaaggctatcaattaattggtaaacactgattgggtgtgcaatatagcagggaatcaaaccctcaaaaatggtaagaacggcaatccaaatagtgtgcacccattcatcttcttttttcgccaccattgctccgataagcgaagtttcgataggtaagcaaaaagccaatggatcgggagccactcagtagcgggcgtctccattgcagcgccagatataaacacaagcgatcggcgtcatcatcgtcagcggggacaacttcatccggacacaaggaccgcaggtaaatgtgtacacacatatgtgagacgaccctaaacgatacctcttttgacatgaagcatcgagtagttttgactggcagtttggaaaaaaggttcaactgtcatagggccctttcatttggatttgccccctcagccgattcagctggtgctcttgccaagaaagttaaaaccaaaaatcattcaagccgatttcatttcattggaagaaaccaaccaaccaaccaaccaaccaacgaacatcactatgtaagaacccaccgaagcaatcattttcattctacgtccaactaccaaagaatttggccgaaagaggtcgaacccaaccgtagcatttgtcaagtcac

SEQ ID NO: 29306 - DNA, 492 bp, DROSOPHILA
atgattaacaaccgattcgcagaaggagattacaacctggatgaggaaatcgacagccatttgagaaaattgttctgtctaaaaccaaaagctgaaacacccaaactcaatccctacatagtagaattctttggagttcttagcttgacagatctccgtgccccacaaagaaaactatgggtcatatatcacgccaagcagcctgatctggacaagaccgttgatgagatccacgagaagtatggcaagaagaatatgtttgatctgtaccgcacaccagttttcagtggagttgctctgcgggacagtgtgagaaagcacttctcgaacctaaagtggtttacgacgggaaatctcctggaagccccacctaaaagccacttcaacgacgagcgagtggtgaaaaccatcacggatctgcatcatctggaacaccagagactatataattatgtgatggtgaagaatatgtggtctatgcggtatcgctaa

SEQ ID NO: 29307 - protein, 163 aa, DROSOPHILA
MINNRFAEGDYNLDEEIDSHLRKLFCLKPKAETPKLNPYIVEFFGVLSLTDLRAPQRKLWVIYHAKQPDLDKTVDEIHEKYGKKNMFDLYRTPVFSGVALRDSVRKHFSNLKWFTTGNLLEAPPKSHFNDERVVKTITDLHHLEHQRLYNYVMVKNMWSMRYR

SEQ ID NO: 29308 - DNA, 4950 bp, DROSOPHILA
aaagcttaagcaacgcaaaacagatgagaaggactacgacgacccagacgacgtcgaggaactccatgatgctaatggtatgctacaaatcttgtatattcctagaggtgttaatactaacaactgattttcagacgatgacgacgaggcggaggatgaggacgacgaggaaaagggtcaggatggtaatgataatgatggcgatgataaagcggtagagaggttgctgagcaacgatatggtcaaagcatacacctacgacaaggagaaccatttgtggtgccaggtcaagttgaatctgagtgtgcggtaccagaagcccgatcttacctccataatccgggagttggcgggcaagagtgtggtccaccaagtgcagcacatcaagcgggccattatctacaaaggcaccgatgatgaccagctcctaaagaccgacggcattaatattggcgagatgttccagcacaacaagattcttgatctgaaccgcctttactccaatgacattcacgcgattgctaggacgtacggcatcgaagcagcgtctcaagtgatcgttaaggaagtgagcaatgtgttcaaggtctacggaattactgtggatcgccgccacctgtcgctaattgccgattacatgaccttcgacggcactttccaaccgttgtcacgcaagggcatggagcactcctcgtcgcccctgcagcagatgtccttcgagtccagcttgcagttcctcaagagcgccgctggattcggcagagcggatgagcttagctcgccgtcgagtcgtttgatggttggcctcccggtgcggaatggtactggtgcctttgagttgctgacgaaaatttgttaatttgtttaaatataaattgaaattttttaaataaacatacattaaacgtgtaaaatgttggtttatttaatcacggagaagtgtaaacatttaagttaaaagtacatatacaaaactacaatgaaaatttttggtttgctttcagaacttatcacaagtcaactggtattgccagttcctaacagccacactcggctcgaattggccggcaacagggtccaggagttcctcaacagttccaagtgtacctccaaatccggaaaccgttccagctcgtgttcctcctccatttctgacacctcctgcagttcctgttccgaatcctgctccaactcctgctcctccaatagggtgggtaatcttgaaatcgtacggttgcaactgcctgggacgtcttgtccgttgtttgttgaggacctgttctcgtcgctccccctcaagattaccgtctccacctccagattcaactgctccgcttccatcctgctcccgtttcgttgcacgaccacctttgcgccaggactcgacattagcaatgcccgaggtggatggcacctcgtccttccggcccccaaagatggtcgtccaacgaaaccacttatgtcataagctgtagcaatctgatgccgaggatgcactgcgtcttctcattgcattcggatctcttttgagtagataaacgcacagacacaggcaggcaaggagtaggcacaccaatcccaacatcgcatagaatccctggcggtagcgtgctgcatcggcactcgcttccaagagtcgtacccgctggcccagagctcctcctcccctcaagtcctcctctctttccagtggcattaacacctgccagaatccgtaaaccatttgcaagtgattggagtagcccgaatccagttgattgctggccgtgtaggaattggagggtgctgctcgataggtatcgtggcggttgctacgcgataagcttctatctagccctggagctcctgtctcccctctaagtagcttatccacctcagcctcatcgactgatcctgtctgcggcgtctttgcttgctctcccaagctataaacgaatgggttctccttgttgtacggtaaccagccgtcgtatatccgccccggagtggggttgccatttttaatgaagttcgcaaatgctcctcttattttgcgacagagctgctcctcctcgccactgaatcttcgacgagctatctgctgaaacagactcggaccgaggagaagtgggagatctgagctgtgggaggctccgccaaaaagatttcttctgcctcgcatgtccatcgagtgggagtggtcgaatacataggcatagctagtggttccatttaaaagctccaagattcgtgagtacggtaactcatagagtgattccgagagtagtcgttgcattccagccagcaagtggctgacaccctctcccttgccattgaagtacctccatctaatggccgccagttgcgtggagctctcctcacccaccgactccagtgctcgcatcacattcggcaacaatgtgtgattgatgtacttatgtagcgccacctgaccctccctggccacgtccagccagtagtcctgcaggaaggctccttcgttggaggtgatgcccagcagtacggggggcaatgttttgttacgaaggcgttgttcgagtggcaatccttcgggtagtattactcccagctgggagcttccgttgccatggttataaacgctttcgtatgcacggagcaagtcctcccggctcttgcgcctcagacaacccatcaactggcgacgttgtgcctcctcaaattggcagcccaatttctgtaccagcacttgaccagtttccactatccatttttggtgattctgacccaaggctcgcataatgggaccgggtgacatgagcaccagttgtttaacctggctggaatcctccaaagtagcaactagtgccagaggtgctcctccactcccatgacccagaagagtaatgtgatctggattgccgccaaaggcatctgcattccttcgaatccaccgcagtgccatctgaacatcacttaggccataatttccaggcacattacgatgctgttcgcctagactcagccatccgtagatattatttcggtactggacactgactaccacaatgccctctccggccagatccaagccattgatgcgatttctgggccagtcgtaggcaaactcctcacccgtgacaatgaccactatgggcagcttgccgtaccgcattcccgattccggtgtccaaatgttcaggtacaggcagtcctcgtcggtgctcactgatctgggcatggagccatcggagctctcgtcgtagatggtgttcgcgagctgcgggcacagcggctgcatggtggtggcctggagggtgcggttgaagctggagctcggcttggcgggctggaaacgaaaatatctaacttcaatcgttgctaatcaaatgtgggccaattaaagagaactcattgtaaacccaatgactgctcaatggtgttcaaaacaaatagtatctatgtatttaagagatgcatgcctaaataaaatgagatctatgttccttcattacttacagcaaatcgtagttcgttgatgggcgcctgggcgtagggaatgcccagaaaggcgtagacagcgccacgtgtcccatccggaaagaccttgagctggaagcaaagatgaagttttagcgcattaaagtagaataatttatttccaaagtggtatgtcctcaccccaatgagatccccttgctccaatttaatgtgcgtctgttgggcggaaatgtatggcgacaggtgaatcaggatcgggagtagacgcaaaatctgctgaatccttaatgcattccacatgattgccagttgcaacgctcacttgttagctctcacttttagcacataacttttgcatagttcatggcgcatttaagcgcatttattaattatcgtacgtcgtttttctgcactttttttcgaccacaaaatatatagatatgtatatttcacagaattttcggttttttcgctgcaacttttcgttcgctcggtgttgaaatgaaaactgagctacaaaaaacaaattgtgaaacacacacaccacgaataaagttaggctgctgccctgggtcgctgagctaacaaaaatttctgctagaattatttcaattgttttctggtgtcattacgccgttgttgcttttgctgctgcggtgcgcagcgaatcattcatgcatccatagatcaaaacaccagcgacaccaccaaccaacataccaaccatccattccattcagcagcgaaatgagtgtggaaagcagcggcgcgttgggcaggttgcttatacggccatggtaacggacctcaacttcatgtcgatctggaccctaaaacccaagaggcagctctcccgaatggccacaattaagtcccaacgagggtggatcgggggttattagagtatctttcctattttctaacatttgtatggtttttcaccatttattaatttttcacataaattaattactcattactcactcagtaaggcataggttgtgcctcggcatttcgcagaatcagactgaattcatctctcatgtgtaagtttaattaaattgtctagaggctgtctatattatacgctcaaattctagcatattctttgggcagtcttcttcagcaaactgaaacaattatgattttcgatgtatctacagttcctatgtttaagctatgcatttccatggcttttataacttcaagatatgtggataactatttaaacttctcgaccctccctcgttcttgtttttcattgaattccgcactgctgttaatgtcaaacataaatttttctctgcttcacaactctctattcctgcctctttcccaccctcgtgccatctcactcccgcctgtggcaaatgaagttgtcgctgggtttttggggtctgcagcgcagataatgtaccataatgctgccgtaatttctccacttgcccaatatgctgttgccggtggtggctgaatgggatggtgtggatc

SEQ ID NO: 29309 - DNA, 2594 bp, DROSOPHILA
agcgaacgaaaagttgcagcgaaaaaaccgaaaattctgtgaaatatacatatctatatattttgtggtcgaaaaaaagtgcagaaaaacgacgtacgataattaataaatgcgcttaaatgcgccatgaactatgcaaaagttatgtgctaaaagtgagagctaacaagtgagcgttgcaactggcaatcatgtggaatgcattaaggattcagcagattttgcgtctactcccgatcctgattcacctgtcgccatacatttccgcccaacagacgcacattaaattggagcaaggggatctcattgggctcaaggtctttccggatgggacacgtggcgctgtctacgcctttctgggcattccctacgcccaggcgcccatcaacgaactacgatttgctcccgccaagccgagctccagcttcaaccgcaccctccaggccaccaccatgcagccgctgtgcccgcagctcgcgaacaccatctacgacgagagctccgatggctccatgcccagatcagtgagcaccgacgaggactgcctgtacctgaacatttggacaccggaatcgggaatgcggtacggcaagctgcccatagtggtcattgtcacgggtgaggagtttgcctacgactggcccagaaatcgcatcaatggcttggatctggccggagagggcattgtggtagtcagtgtccagtaccgaaataatatctacggatggctgagtctaggcgaacagcatcgtaatgtgcctggaaattatggcctaagtgatgttcagatggcactgcggtggattcgaaggaatgcagatgcctttggcggcaatccagatcacattactcttctgggtcatgggagtggaggagcacctctggcactagttgctactttggaggattccagccaggttaaacaactggtgctcatgtcacccggtcccattatgcgagccttgggtcagaatcaccaaaaatggatagtggaaactggtcaagtgctggtacagaaattgggctgccaatttgaggaggcacaacgtcgccagttgatgggttgtctgaggcgcaagagccgggaggacttgctccgtgcatacgaaagcgtttataaccatggcaacggaagctcccagctgggagtaatactacccgaaggattgccactcgaacaacgccttcgtaacaaaacattgccccccgtactgctgggcatcacctccaacgaaggagccttcctgcaggactactggctggacgtggccagggagggtcaggtggcgctacataagtacatcaatcacacattgttgccgaatgtgatgcgagcactggagtcggtgggtgaggagagctccacgcaactggcggccattagatggaggtacttcaatggcaagggagagggtgtcagccacttgctggctggaatgcaacgactactctcggaatcactctatgagttaccgtactcacgaatcttggagcttttaaatggaaccactagctatgcctatgtattcgaccactcccactcgatggacatgcgaggcagaagaaatctttttggcggagcctcccacagctcagatctcccacttctcctcggtccgagtctgtttcagcagatagctcgtcgaagattcagtggcgaggaggagcagctctgtcgcaaaataagaggagcatttgcgaacttcattaaaaatggcaaccccactccggggcggatatacgacggctggttaccgtacaacaaggagaacccattcgtttatagcttgggagagcaagcaaagacgccgcagacaggatcagtcgatgaggctgaggtggataagctacttagaggggagacaggagctccagggctagatagaagcttatcgcgtagcaaccgccacgatacctatcgagcagcaccctccaattcctacacggccagcaatcaactggattcgggctactccaatcacttgcaaatggtttacggattctggcaggtgttaatgccactggaaagagaggaggacttgaggggaggaggagctctgggccagcgggtacgactcttggaagcgagtgccgatgcagcacgctaccgccagggattctatgcgatgttgggattgtggtttcgttggacgaccatctttgggggccggaaggacgaggtgccatccacctcgggcattgctaatgtcgagtcctggcgcaaaggtggtcgtgcaacgaaacgggagcaggatggaagcggagcagttgaatctggaggtggagacggtaatcttgagggggagcgacgagaacaggtcctcaacaaacaacggacaagacgtcccaggcagttgcaaccgtacgatttcaagattacccaccctattggaggagcaggagttggagcaggattcggaacaggaactgcaggaggtgtcagaaatggaggaggaacacgagctggaacggtttccggatttggaggtacacttggaactgttgaggaactcctggaccctgttgccggccaattcgagccgagtgtggctgttaggaactggcaataccagttgacttgtgataagttctga

SEQ ID NO: 29310 - protein, 800 aa, DROSOPHILA
MWNALRIQQILRLLPILIHLSPYISAQQTHIKLEQGDLIGLKVFPDGTRGAVYAFLGIPYAQAPINELRFAPAKPSSSFNRTLQATTMQPLCPQLANTIYDESSDGSMPRSVSTDEDCLYLNIWTPESGMRYGKLPIVVIVTGEEFAYDWPRNRINGLDLAGEGIVVVSVQYRNNIYGWLSLGEQHRNVPGNYGLSDVQMALRWIRRNADAFGGNPDHITLLGHGSGGAPLALVATLEDSSQVKQLVLMSPGPIMRALGQNHQKWIVETGQVLVQKLGCQFEEAQRRQLMGCLRRKSREDLLRAYESVYNHGNGSSQLGVILPEGLPLEQRLRNKTLPPVLLGITSNEGAFLQDYWLDVAREGQVALHKYINHTLLPNVMRALESVGEESSTQLAAIRWRYFNGKGEGVSHLLAGMQRLLSESLYELPYSRILELLNGTTSYAYVFDHSHSMDMRGRRNLFGGASHSSDLPLLLGPSLFQQIARRRFSGEEEQLCRKIRGAFANFIKNGNPTPGRIYDGWLPYNKENPFVYSLGEQAKTPQTGSVDEAEVDKLLRGETGAPGLDRSLSRSNRHDTYRAAPSNSYTASNQLDSGYSNHLQMVYGFWQVLMPLEREEDLRGGGALGQRVRLLEASADAARYRQGFYAMLGLWFRWTTIFGGRKDEVPSTSGIANVESWRKGGRATKREQDGSGAVESGGGDGNLEGERREQVLNKQRTRRPRQLQPYDFKITHPIGGAGVGAGFGTGTAGGVRNGGGTRAGTVSGFGGTLGTVEELLDPVAGQFEPSVAVRNWQYQLTCDKF

SEQ ID NO: 29311 - DNA, 3556 bp, DROSOPHILA
caaggcaattggcagcaggagaagcaaagcttctcatgcaattaatggtatgtagcttatacaaaacatttcatattagtgaaactaagtaataataacttcaaaggttgttgcttttatctgaccctttttcacagtgtttagcatataagtgtgcttacaattgttgaaaagctattgctgctttatcctagttagatattatattgttagattagttttaaaagttaatattttatgaccacttggacgcaaggatggattcagatgaaaaagaatagaaaatattaacatcagctggctgttcttaacatttgccttgtcctgcaacgtataacagttttcagggcatgccataaaaatactggtattttcgagtgacgaggcgcaaaaggacatttctgaaggttctatttaaagcgacaagtggtacggaaaatcattataaaagctctgactaaattggaaactgaatttttacatgtagatattacgattttaatttaaagatataacattatatttttatttaaattataaatcagaaaacaagccttggcagtcaatttcaaatgtggctggcgctttcgaaaagcctgtgctctcggctgctcggattctgcgctctgtggcgacgggagccgaaaggacctgaaaggacgaggcttgcgacttgtgaatggcgcctggagcgaggaaacgagccagttgggatggcgagagggacggagagagggccggagagcaaggattcagcaaggagcaggcggcgcgagtgagagcgagccattcgtgaatatttcatgaacgatggctgcgatggcagccagcttcgtgccgccgttaaccgaactcctcgccgccgaagagaaatgtagggaaacgcatcccgtcgtcgtcatcgacggcagaggcagcagcagcagcggcgacagcgattttcacagcagcagcgacagcgggaaaatcggcagcctttctgccgtcgttgcagtggcagcagcgcctccgaattttggccaatgcgtgtgctcctggcgttcagtaagaaaagcgtcgcccagcggtctagtacgaacgtataccgaacgctttgtatatcctgtaaattatatcctgtgtgtgcgattgatcacgtcggcctggttcgtgcgtagttcgaaacatagacttcacaccttgccttgccgtagtggcaaattattctgggctttgggctagaacctattattttttaaagatcactcaatcttaacctatacacgacatttattaagctggtcttatcacgcacttggagtcagtgacttctaaagttgccagcaaattcgcgcgcgacaaaaactcagaggctgccggcaaaataataattgccattgcagccagctacttgaaactttcccagcgactttgaaccggctgagcagggcttcacttttttgtttggcattttcccctgttattttctcacatattttcattttttttttttttttcatattttcgttttcttttttggcctgacattttacataccagacattgatattaaaacagaagacgtctggcaggcagagaactgaactcgtagtactactcgcatgacaggaatatttataatttccgctgccagcagacacaacagaaaagaaagaataatttgcgattactggcaggcagaaggcgaaggaaatccctgaaacgatattacaagccaagtgcgcttgagttcgtgtatttccggttgaacaaacacataagcgaaacataaaagaaaggcgaaaaaaatatacttacatattttccacatgcccccatacttacgtcgatatatatatatatacatatatgtagtacataaatagagtaaccagccagcacgaaaagtgaaaatacatagaggcgaagcaaggcgagagcatatttcataagtttgcactccgcacacatagaaagtagaaagcagcgacgagagccagagaaagctggcgacaaaggctaacgcacgacctttggcaccgagttcagatcctgcggaggagtcagcagcaaatcaataaagacaaagactcccagccagagcaactgcatcaccagccaacccagcttcgcttcccgagtccagcgaccaaaattcactcgcaaattatgctgaccatgtcgaccctgatgatgccagcaccgaccatagccatgggtgccccgcagatcacaatgggtccgcacaagccgccggaaacgaagctgttggccatccatcccgctgcagcggccgcagcagccgcccagcagcagcagcagtcggtgacagctgctcatttgcagcacaatggccaacagcagcactcgcagcagcaacagcaacagcaaatgtcgcaacagcaacagcagcagcagcagcagctcgtgggcaacaactccaagccaggtgagtggaaaagcgagtttcccggggtgaatgtccttttcgtcccgtttcggttctcggtcttggtctcggtttcgttttcgatttcggtttcggcgcaatttccaccggcaaaaggtgttgcataaattgagaaatgtctctgccactttgcccctgagacgtgtttcgaatgcggcagacaacgatctgcgttttgttctggggggtactattcgcatcaacaactggaataaattttcaatagacaacgatttcattcagcgactaaacttgtgtttatttgcaatatcaaaacttaattaaatgcatcataacggactgggctgcaaccaaataacccaattttctttctgatattgggaatgaaggcaaatctatgaaaattgacaaatatttttgcctaatttattgaaatgtctatatgaaaactctgggaaatgcaaaccgtttaatatcatgtaaagaccaataaatcaagtattattctcaacaaaaaaaaaaacaaaaacgccatcatagtcatttgcaattctaaacgtattcagattgggcttcagttaggatttaattgaatgaattttattttgcgatataattgcatttcattttcagccaaggatttgtgcaggcttaaaaagttagcaaatcattcaaacacggccatggcaaaaaataatttatcctattagttgtatcctaatgaaatgctgtttgtgctaaaatgtgttctatttgtcaaatttgtgcatttatcttaaagagcaataaattagagtatgcaaaataacacaatatgctacatattatatataataataaaatgcgaaactttaaaataaactagaattcaagtgcagcaaaaacttcaagcaaaagctcagttaacaacaacctctagagaaataacaacagcttacgtattcacaacaatgtctgaacaattacaattcaaaccaaaaaacaccccaggcgatcgatatcagggcacgataacgtacatatttatagaaattttgtatgcgtcagatggccaaaatcatactggcaacacattcaattaaacgtggcccagtcagtcggaagtcaaggaggcagatttcgaaaataccaatagagcacacgtat

SEQ ID NO: 29312 - DNA, 923 bp, DROSOPHILA
cagcgcctccgaattttggccaatgcgtgtgctcctggcgttcacagaaggcgaaggaaatccctgaaacgatattacaagccaagtgcgcttgagttcgtgtatttccggttgaacaaacacataagcgaaacataaaagaaaggcgaaaaaaatatacttacatattttccacatgcccccatacttacgtcgatatatatatatatacatatatgtagtacataaatagagtaaccagccagcacgaaaagtgaaaatacatagaggcgaagcaaggcgagagcatatttcataagtttgcactccgcacacatagaaagtagaaagcagcgacgagagccagagaaagctggcgacaaaggctaacgcacgacctttggcaccgagttcagatcctgcggaggagtcagcagcaaatcaataaagacaaagactcccagccagagcaactgcatcaccagccaacccagcttcgcttcccgagtccagcgaccaaaattcactcgcaaattatgctgaccatgtcgaccctgatgatgccagcaccgaccatagccatgggtgccccgcagatcacaatgggtccgcacaagccgccggaaacgaagctgttggccatccatcccgctgcagcggccgcagcagccgcccagcagcagcagcagtcggtgacagctgctcatttgcagcacaatggccaacagcagcactcgcagcagcaacagcaacagcaaatgtcgcaacagcaacagcagcagcagcagcagctcgtgggcaacaactccaagccaggtgagtggaaaagcgagtttcccggggtgaatgtccttttcgtcccgtttcggttctcggtcttggtctcggtttcgttttcgatttcggtttcggcgcaatttccaccggcaaaaggtgttgcataa

SEQ ID NO: 29313 - protein, 135 aa, DROSOPHILA
MLTMSTLMMPAPTIAMGAPQITMGPHKPPETKLLAIHPAAAAAAAAQQQQQSVTAAHLQHNGQQQHSQQQQQQQMSQQQQQQQQQLVGNNSKPGEWKSEFPGVNVLFVPFRFSVLVSVSFSISVSAQFPPAKGVA

SEQ ID NO: 29314 - DNA, 2635 bp, DROSOPHILA
tttgggctgctgggaatgccatctttcggggtcctgtcgtaaaagcccaactccgttccttgtgcgtgttttttggcacttgtattccgctgcttttattattattgttataattttttttttttttcgcctgggagctgactgagctggctgagctgtctgtttctgcttttggcacttagacattgcgttacgcgcataactttttattttttgttggctcatgtttcgctttgtatgcgtatgccggagcacacaaatcgtaaaatattaaatttaatttttcaaatgatgtgtgaatggcttagtcttgatatatgataatggttgtgcgcgctgccaataaaaacagggcgagtcgtcagttttatttacttttcttatgcttcgaaagactttgatcacactagcagccaggcgaagttaattatccttgcttgttcgtttgtacttatgatttacagcttgaagaataatttcacttttcgtttgcaaatatttcgtcaagctaaagaattgtgtgctttaatatttccatagaaaaatataaccaagggaatccgcttgccttgagtgcgtggggattctgcctggaaacataattgaaaaaccaaatgaacttttcgaaaacaaaattcattggtctgtgataagtgaaggtcaagcaaagagaaaattttttataaaaactaaaaaaacttaaaacaaccacaaaataacacaaagcggaacaaacatcaaggaaaaccacaaaaaaggcagcattttccaaattagcaaaattgtagaaattatttaatgcatcaaatcgtttgaccaaacaacaagcggcagcatcacaacaacgctgcggtttcacacaaaaaggcggccattcgaataaaaacccgaacctagccaaattataacacaatttatttatatcatcaactgcaaggcgccaggcacttcattaagcattaaagcgagctgcgtttaaccgcagaacgtgcaaatttcgcaccgcaaaagtaccagcaccactgagccagccggaaaatgttggccatgcccacgctgatgatgccagccaccgcccagatgacgctcagcgccgcccacggaaagccctacgagacaaagctgctggccatccaccagacgcacctccagcagcagcagcagcaacaggcacccgctccaccgcagcagcagcagcaggtgcagcagtcgcagcagcaggcacccaacggcaagcagcagtcgcagcagatgaccattgtcaccacccagcagcagcagcaacagcagcatccccagtcgcagtcgccgcaccagcagcagcagtcgcagcagcaggccgccgcagcagccgccgctgcagccgcagcagcccaccatcagcagcagcaggcggtggccgcagcagtctgtgctgcccagcagcaggcggtggtggtgcagcagcagcagcagcagcagtaccagatccactcgcagcagcagtcgccgcagcagcagcaggtgctctgcatctcgcccaagcagggtaagccaaagaaacagcaaatacttcaaatggaatctccacccttttctccatcattatgttctaggactaatggtagcattaatattagtgcttcctgtccgtaattgtcataatcgatatgttgacgggctagctaataaattcgtaccccaaaactgggcagctcccttgacgattccctgatggatgagcgttacccattgaggtgtgggctcggcccatttgtttacgaggacctccaacactttgggcacttatcgattggcttttattgcctgcctacgcctatggccgtactcattcccattcccattcccagtcccagtctgagtcgcaggtccatacaaatttcacgagttttacgagcagcttgagcagttcaagtaatgctttttatggtcttcgtcgtaaaagtcggccaagcctctaatagctgtctaatgttatttggccccagaacgagggccgcgtgtttgtcaaagtttacgttttcacttagcctctaaatataaagaaaatcagcccacacacatcacctataggtatcactatcacaattatagaagcaaaggtgtttgtctgcctttgttgcccagctaaatcaaatagaaatcaatttgaaattattgacaatttccacagtggcattggctcagtcaatcgactcgactcgattcgattcgattttgatttggactccctgattcttcgattttgtcatagttggcatgctgactaaacgaaaggcaaacacactcgtggcaaaagcaaacagacggcgtgggtggtaatgtaaataccagaatggggcgtggcacttgtctgtctgctgctcttgtttcttcgcttttttttttttttttttttttttggagatccacagtcagaggaaaaagtgcaagacaagacgagccagtgaagtgcggcggacaacgcggcgtatacgtaacatttaaacgcacgtccacacttgaccagcttttccgagacagggaattgaaaatcgaactggcgaactgtggagctgtggagctgtgcagctgtagtggaactgtagaaagaaaagtttctttcgcaagtttgctggcgttgctttgcggcaaa

SEQ ID NO: 29315 - DNA, 635 bp, DROSOPHILA
caccgcaaaagtaccagcaccactgagccagccggaaaatgttggccatgcccacgctgatgatgccagccaccgcccagatgacgctcagcgccgcccacggaaagccctacgagacaaagctgctggccatccaccagacgcacctccagcagcagcagcagcaacaggcacccgctccaccgcagcagcagcagcaggtgcagcagtcgcagcagcaggcacccaacggcaagcagcagtcgcagcagatgaccattgtcaccacccagcagcagcagcaacagcagcatccccagtcgcagtcgccgcaccagcagcagcagtcgcagcagcaggccgccgcagcagccgccgctgcagccgcagcagcccaccatcagcagcagcaggcggtggccgcagcagtctgtgctgcccagcagcaggcggtggtggtgcagcagcagcagcagcagcagtaccagatccactcgcagcagcagtcgccgcagcagcagcaggtgctctgcatctcgcccaagcagggtaagccaaagaaacagcaaatacttcaaatggaatctccacccttttctccatcattatgttctaggactaatggtagcattaatattagtgcttcctgtccgtaa

SEQ ID NO: 29316 - protein, 198 aa, DROSOPHILA
MLAMPTLMMPATAQMTLSAAHGKPYETKLLAIHQTHLQQQQQQQAPAPPQQQQQVQQSQQQAPNGKQQSQQMTIVTTQQQQQQQHPQSQSPHQQQQSQQQAAAAAAAAAAAAHHQQQQAVAAAVCAAQQQAVVVQQQQQQQYQIHSQQQSPQQQQVLCISPKQGKPKKQQILQMESPPFSPSLCSRTNGSINISASCP

SEQ ID NO: 29317 - DNA, 2258 bp, DROSOPHILA
tttttcctctttttttttttgcccagcatttttggccgagttgtttgctcactttttatgcgtttggatttgcacatttggacactagttaattatgttcttagtcccttttatgtcacaattttcatttggcaacatcaaataaactaaatgtccggcaggggctcggccggaaaatgccgcccgatttcgggggaaaactgtctaccgcaattgtcgtggcaaggtaaacaaatatgcgtgtacggctggctggctaactacattgcccattggctgcagtcgtgatcccggggttcctggggttcctcgtgttctccgggttccaagtggggtggattgggatggctttggggtggaacaaatgtgcctatttgtcgctggtgtggggtcctttggtgcggtcgtctgctataaaattctgtgcggaatggacattcggacttttaatatgctcgagtaatgtctgcattaacagaattcatttgcaggacatggccagcagccaggacaaccccatccatgtgtgcttgtgtgtgtgtgtgtgtatttgtctctgtgtgtgtgtgtgtgtgcgttcgcatgttgtgttggtgtggaggaaacaaatttatgtcgtgctacttgctgaaattggatttctggccgctgctccccttggttgttattgttgtcgtcacatcgttgctttttagtcaccgaaatgagcgtagaacgcaaggagaaatacaaaacttaacccacaggactagggtgggggtgaagtttgtttccattcctggctttagtacgtgtaatcctttttcatgatttgcacgccacttcagaggacatttgtcggccttggcattagtctcaggttagtcgtttgtcctcagctcagctctcccagtcgtaatcaagttgaatgcctcaattaggttgctgtctctacctcgaaattggaatgacctggcacgtgtttttattttcatctttatctatttattgtctaattttaatggtccatcgcatcgttcgctctccattgcagaatggcaaattgcccaggaacctgcccgcgctgcgtgccatggaaatggcgttgcgtaccaactcctttgccacgccccctgctccgcactctctcccactaccaccgcctcacgcagcaaggaccgaaggaggcggacaggacatggaggactctgacgaggaaatggagtacatgccgccgctgcacagtgagtacagttgcaatgccgcaaagttaatatagataaaaaaaaaaaacaattaatatgtatttttaaaaataagtacgattttcctatactttactatttaaatcattcttttcgtatttcttatcataagaaataccgtattgaagagaatgtgtcccaattatttccccagaaaaaaggctgagatgtttttgagttataagcttacaccttaaagtcagcaatatctaaatattttctcgcagtgtaagagcacctttctctgtccagtggcaaattcaattaaaaatttttgaaactgctccacctgcacgtgcgtgacgagcttctgacgtccggcaatgatggtcgggagcagcagcacctggccatcccgtctatactgccatccattggtcctttggtccagtggtccactggctcagtggttcagtgctccgttgtcagaggcactgtcaggcgtttcaatttacttttatgtctcgcagccttatcgcggcgcaaattgaaatgaaatcttgacacaatcagcatgcccatgccaccggcagctcggattcccacatacaattaagttaaacgctgaccatcaattatgggacggactctaaggcagctgggtgccggtgtgtttcacaatggggcaaaagtttgcagcccaaatatatatctttgtatatttatcccagggtggtaaatagacaagcagaacagcaaaaaaaaaaaaaaaacccgccaggggataagccaagtcagagcggcaaaaaattgtcaacttatgagaagtccgctcccttttcaccccaactttccgggatgtttcgctatagataatatcaaaaactttgctgggcaaacaaaagccttggtagcactggcaaatcgtaccgaaatctcctccaaactcgcctgtttatttatattaatatttttatcattttatgacgactctacaaatgcggaagacgccgttctgaccaccttgagccgggattgtggccgaaactttctgcaacttaaattcactttatt

SEQ ID NO: 29318 - DNA, 258 bp, DROSOPHILA
atggtccatcgcatcgttcgctctccattgcagaatggcaaattgcccaggaacctgcccgcgctgcgtgccatggaaatggcgttgcgtaccaactcctttgccacgccccctgctccgcactctctcccactaccaccgcctcacgcagcaaggaccgaaggaggcggacaggacatggaggactctgacgaggaaatggagtacatgccgccgctgcacagtgagtacagttgcaatgccgcaaagttaatatag

SEQ ID NO: 29319 - protein, 85 aa, DROSOPHILA
MVHRIVRSPLQNGKLPRNLPALRAMEMALRTNSFATPPAPHSLPLPPPHAARTEGGGQDMEDSDEEMEYMPPLHSEYSCNAAKLI

SEQ ID NO: 29320 - DNA, 3333 bp, DROSOPHILA
atgtaaatgcataaatgcatattttttactcactatgtcctatggtttacgaaattgaacttcttcctagatcaatactaactgttcacatcgttgaccgattgccaggactcaggattaacccccgtattcatttcagacctgcaattttagaagtcctctgtcaagtacccccatcgacttctgattgatactgtacgtatgttgtaaaatggggatttatggcctccagcatgcagtttgacaattaaccatggccattgccaactggctgaggcgaatgcaaagcttccagctcagaaatttggctacaggcagttgctactatggctggacacgtgcacctgttttgtcacatctaatattccattgtttggtctgtggcaaggactcgttgctggccaaaatgcgttttggaacattccaagaagcgaagccaacggagtcaacaatgctctatggacagaggcatgcaaattggccaggaaaagggaacggaatgagagctggccagaaggaaaaagggcacaggcccagccaatttttcttgcatttgccttcgagtttttcggtttttcccgtgttattgttacccctgcccgtcctgtttgtccaagttgccatttcaagcgtattgcaatgaaaagcaaactttccatcgcacacgcagttcgggttaggcattcggtcttctgtttttggtctctgggctgttgggctgcttctctgctggactcaacaggcgaacacggggcgtatacgaaattaaaatgcactcagctgaaaaattggttttctcgttcttgacaaactttgagtgatttctgaaagcctacgacggatgccagcccatggagggcgaatcggcaaacgaggcgccaaaaccccacccacgggaagatactttttgaaaagccagcgcctccttaccttgttttctcaaagatgttttaataaggcgtacattttaatcaagcgtgccgaaaataactcataaattatggaaagccaaagtaagcagatgccgaggccaaaggaatgataacaagaagccctgaaaattgcttgactcattaaaaataaatgatttggtattttaagccctcttctgaacttggctggctgttgcccactaaatggctgattgataatttaattgtttataagtttcccatttgatttatagttaaaatatcttaccaaatgacgtcttccaactgtagtcattaatgagtatacatttttctgattttggtattttatttgcagttaaataaagctgaccttgctgtcgcggccaaaatagcgaacctgtcgaccggagtatcgaccagtcccgcctcgggactgggaatcgtgggtatcctgccctgctcgctccattggcagccgccgggcaaggcgcccaagctgctgagttactcctccggtgcccgtgcaaccagtcagccctatgcgatgcccgcctccgggaacggttgctgcagcaccagaactgcaggttgctgccaggactgcagtggctaccagcagggctacgagcacttgcctgttccgcgactgcagcaccaacagcctccaccgccgctctaccaaaatcaacagcagaagcaggatcatcaacaaggcagttgcacttccaccttgcagcagacaaccactactacatccaactgttcatacggcaattgtctgatgccagcacctgcaactacgagcacctatgtgagcaatattggaacagagccgccgctgttgagtatgcaatattgtcgttctcattgcaacatgcaacattgcaacagcactggcggcagcaacaaggcacctgctatttataataacatacctgctcagtcgatgatctttgtacccgtgatgttgcccatgcaacagcaacatccacaacagcaacagcatgatttgcatatgcaacatcctctgacgccgtcggaggattgcaaaccattgttgcacgccaagagcgtaccaccgccgccacagccgccgcctatgctcacccacttccaggcgatgatgcaaccaccaccactaccaccatcaccgatgatgcctccacaaagctttgggtgcccacttcccagcaggactcctgccactccccccctgccgggtacctaccgcgttcaaagcctcaaatccgcggctgcagcggcggtcagtgcttaccagcgggtaagtacaaatttaaactatctgaaaaatataagaactttgaaatttaatttcttcgttaaattgttaaaccaaaaatcgaattaaagtctcgccaaaatacctgtgaggtgtcggacatttatccaagtggctagctgtaaatctagaatatttgtagtacatcagcggcacttagtcaatggatgcaaatcctcctgggctactaaaatgttgcaatttgcgaagcacagcagaggcagggacaatgccacgtatacttaatatttatgggtgtactgctgctgctgccaaacttcaatttacataaacataaaagacaagcaacatcggaggagctctttttcttcctctaccctttggaatctgcatgcatgttgttggtgagatttagcgcagcgacaggacacaaaaaatcaaagcttcaggaggggggaggggtgctccaaatgcaaatcggaacgagcggaagtgaaagcgcagatatggaaaggtatatggggggttaaggcgggcttacggcgaacacgaaaaactaatgcataacctagtaagatcatcaacacgaaattttacagcaaactcatgtccaaggatgcggaaataaactagttgtttttgttaccaggtccgctacctctgccacatccacgccacctttcccctcctttaagttccccctgccacagtgttgtcctgcgctcaatgacttttgcatttaatatgagtaaagaagcgcaggacaacaagagaaacaggcagcagataaatacactgggaaagttcagagttgctacgatcattgcagctttgaattttataatagttaataatcaaattatataatatgtatatataaacctatcgttcaaggagtatttcatgagatttttaaacctgtttaagttcttttcttttttagtgtgcagtggtgggctaaaagctgagctggacttgaggattgggcttcggccctttacggcgggttgagtcctggccagcgacatgcaaaacgtgctgtttaaattacgttcttgccggcagatttctgatttcggatttcaggaggggccacctgcaaggacaagcagatagtgtctgctgtccgttcggctcctgagttgctgagctgctcag

SEQ ID NO: 29321 - DNA, 951 bp, DROSOPHILA
atggaaagccaaacgaacctgtcgaccggagtatcgaccagtcccgcctcgggactgggaatcgtgggtatcctgccctgctcgctccattggcagccgccgggcaaggcgcccaagctgctgagttactcctccggtgcccgtgcaaccagtcagccctatgcgatgcccgcctccgggaacggttgctgcagcaccagaactgcaggttgctgccaggactgcagtggctaccagcagggctacgagcacttgcctgttccgcgactgcagcaccaacagcctccaccgccgctctaccaaaatcaacagcagaagcaggatcatcaacaaggcagttgcacttccaccttgcagcagacaaccactactacatccaactgttcatacggcaattgtctgatgccagcacctgcaactacgagcacctatgtgagcaatattggaacagagccgccgctgttgagtatgcaatattgtcgttctcattgcaacatgcaacattgcaacagcactggcggcagcaacaaggcacctgctatttataataacatacctgctcagtcgatgatctttgtacccgtgatgttgcccatgcaacagcaacatccacaacagcaacagcatgatttgcatatgcaacatcctctgacgccgtcggaggattgcaaaccattgttgcacgccaagagcgtaccaccgccgccacagccgccgcctatgctcacccacttccaggcgatgatgcaaccaccaccactaccaccatcaccgatgatgcctccacaaagctttgggtgcccacttcccagcaggactcctgccactccccccctgccgggtacctaccgcgttcaaagcctcaaatccgcggctgcagcggcggtcagtgcttaccagcggtctcgccaaaatacctgtgaggtgtcggacatttatccaagtggctag

SEQ ID NO: 29322 - protein, 316 aa, DROSOPHILA
MESQTNLSTGVSTSPASGLGIVGILPCSLHWQPPGKAPKLLSYSSGARATSQPYAMPASGNGCCSTRTAGCCQDCSGYQQGYEHLPVPRLQHQQPPPPLYQNQQQKQDHQQGSCTSTLQQTTTTTSNCSYGNCLMPAPATTSTYVSNIGTEPPLLSMQYCRSHCNMQHCNSTGGSNKAPAIYNNIPAQSMIFVPVMLPMQQQHPQQQQHDLHMQHPLTPSEDCKPLLHAKSVPPPPQPPPMLTHFQAMMQPPPLPPSPMMPPQSFGCPLPSRTPATPPLPGTYRVQSLKSAAAAAVSAYQRSRQNTCEVSDIYPSG

SEQ ID NO: 29323 - DNA, 2677 bp, DROSOPHILA
catcatcatcatcagcagcagcagcagcagcattcccatctcaaagatttacatgacagcagttgcagttcgttcgctattcatttgctggcagtccttttgattgcttgtattagtgattgtcagttggccaaaagagggcggaagagggggcgtggctgtctctccatttgattgccattgcaacacgtaaatctcttatgcttatgaatatgcgcatagcgagtaaaaaatttcatgtttgtcgctcggcattgattgaagtgtgagtcccctgctacattcactacatatagatatccatcctcttcattatgcgagtgcaaccattatcgagctcctcaaaaggactttgcgcgctttgagaccaatttattgatttctggctgagcagcagaaagtcgcccaaagcaacaaccctcattacaattccgaataccaatcaaacagtttctcatggcattgtgaatgctgtcgacactggcctaaacatttaagccattaacacgcaaaggtcgccaaattctattgattatgaccgctggccagacgaaagggccaagagcgaccgcccagcgaaacgataacaaataacaataacaaacaaacaatcgacacaaagagtcctgttgaatttcttggtagggggtggggtttgtctgggggaaattcggcgcttgaacgactaaactgtttttcctttttactgtctggcagtcgcagtcgttggaggaggaataaaagtcgatttgagttaatgccaactgacagccagttgtcaattaaagcaaacaatcgcatgttattacaattttcgttaagtactgagtgtgtaagaaacaactataaatttaatataggatagctaagtaaaaaaaaaaaaaacagtaatacaaccaataaatgatatccttaagatatgtacaaacatccagtacgcatcactagcttctgcgtctaggatttttcaactcctttttccttgccctcttcgaaggtttcatgtaagacctgcgggttcaggacaagtattgagccaatcgacgaagtccggcatgccattaatcaataaataccattcgccgctgggaatgtaaacgttgcacacgcaggcattcagcaaatgcaggaccccagcgattacgccaaaggcgctcgacatatagaatatgtatgcgaactcgttgccgcaatgatcgaccatggacaccaggagggcaagtgcgcttcctaggcacaggaagccgctggcgaaattaaacgtcatcgcctgtaaaacacactcgttgagcattcatcatcgccaaataactatcgaaaccagaacaacccaacccagcccagcaacgccccgcccagcccaacaaatgtatgtgtacgcacaattggatcgaggcccacggtggtgcagcatagccggaatatgacgagaaccacgctctgacaggcgatggcgggtaggatgaacgtgtacatccacaccgatatgccgtactcctcgcccaggacacagtgcgtggataggattcggatgagcagacccagggccacaacctccaggacctgatggacaaaggcagatacgttaccacgcccattgcactgcaagattgcagttatagtcaccgccgttagcaactgcagcacaaagttcaccaaacgaaaggggaagctcataatggtaaccagaaattttgttcaaagcattgacagtaaaagcaaatctgccatctaatgaaggaaaaaaggaaaccgtttttccttacttcgattggactttgaattggctacattttaaaagtaggtgaactgtagcatcaaattacaagatattaagataccccaataacatagtgtgaccagtatccccaaattacaatcttatgtagctttgggcacactgttttactgtaaatgctttattcaagatgccaacttgtggaattgcttcactcgtagcaaaattttattgttttctcttgctcctcttattttttgcgtttttcatttcgttttggcccagctaatctaattggcctcgatagcgcttgttgagtgcccgagtcgttgccccgctgccacgcatttgttgctttgtttgcactaatttcattacttgtggaatgtggcgatgatttcatgcaatttaaagccacatttttcagtggcaaaacatttagcgaagtacctgaccggacccgatccgagccggacccatggaactcgggcccaagtgcccaagtggccaagagtagtcccataaccggctagcgtcgtcgacccactccaggctttcgtttcggaacgccgactgggatcgagcaatggaaataccgttgataaatgaaaatttcaaaacgtgaaccaacaaaaggggacaaaaacaaacgaaagcaaaccgaacacaaaacaagcggaaaaaagggggcggcaaatataatataatttaatttgttcgcttttcaaaaggtgctcagccccaattgtcccgccgccccttttccatataaaccaaactaggtttgtttaagcattttgattgagcaaaaaactcttaatttcttagggtgaaaaagtgatcgatactttagcaagtcaatcgctggatgggaggacaactctcccgagtggcataaattttggcagctttgttgcgacaattgcatattagccaaac

SEQ ID NO: 29324 - DNA, 564 bp, DROSOPHILA
atgagcttcccctttcgtttggtgaactttgtgctgcagttgctaacggcggtgactataactgcaatcttgcagtgcaatgggcgtggtaacgtatctgcctttgtccatcaggtcctggaggttgtggccctgggtctgctcatccgaatcctatccacgcactgtgtcctgggcgaggagtacggcatatcggtgtggatgtacacgttcatcctacccgccatcgcctgtcagagcgtggttctcgtcatattccggctatgctgcaccaccgtgggcctcgatccaattgcgatgacgtttaatttcgccagcggcttcctgtgcctaggaagcgcacttgccctcctggtgtccatggtcgatcattgcggcaacgagttcgcatacatattctatatgtcgagcgcctttggcgtaatcgctggggtcctgcatttgctgaatgcctgcgtgtgcaacgtttacattcccagcggcgaatggtatttattgattaatggcatgccggacttcgtcgattggctcaatacttgtcctgaacccgcaggtcttacatga

SEQ ID NO: 29325 - protein, 187 aa, DROSOPHILA
MSFPFRLVNFVLQLLTAVTITAILQCNGRGNVSAFVHQVLEVVALGLLIRILSTHCVLGEEYGISVWMYTFILPAIACQSVVLVIFRLCCTTVGLDPIAMTFNFASGFLCLGSALALLVSMVDHCGNEFAYIFYMSSAFGVIAGVLHLLNACVCNVYIPSGEWYLLINGMPDFVDWLNTCPEPAGLT

SEQ ID NO: 29326 - DNA, 3140 bp, DROSOPHILA
gaaacaagcaagccagctagcagacaatgaaatgaacagactttgcgtgccagacattaaagaacaaataaaaattcaaatgaaatgataatgatgaaatgtttcactgtttactcgcactcagacacgactatccattcccggaggggggggggaatgggtaagagaaagggaaaggaaacggcgaatggcccactcgagctgaaggattactcttgcggggtgcaaggatccgtaataagtgtttaaaggcattttcatattatatggaaatgctcacacgcgccctttgtctctgtttgagtgtatgtatgtgtgtggagtgtatgtatgagtgtgaatgtgattttctttctctcaaattgtacgagtacgcatcgcatcgcataaaacgaaatgaaaatgcgcataaattgtacaaagtgccgggtgagagtctcggcggtttagtgcggttttaaaaattctatcaattatttttttttctttacactttatgttcgcggccataaaaagggatgtgttccggctcacctgcacccgcaatcaggctaaatcgccggatactcgttgccaatcatatttcagaggacctgaccccataaagtatgccatattaaaaacaagaaatcgcgaggcggcttcgctcttaattattccgtttaagggcgcaagtaagccgcgagctgagcaatggctgtaatgaaattgtcgtatgggcactttattagcataatgccgcattagccatggggacaaagccagcggggcaaaagtgcagagtaaaccaaaccatgccaaacgcccaggcaatttatttttcccctccaaccctgcgtgtcctgcccgtttatgtatttactttcttgtactttattctggtattttctattctcagccatgcttttttattattagtacccaaatgcccgcagctataattttgttgcagaaattgtctgagtatcgcatcgcctgcgttgccagctccacctccagctcaagcttcatcttcgtcctcggcccggccttggtagctatgtcccagcgtcctggtcgaagttgcagagttcgtccttgtcggaggcaatcaagtgcaagagaaacgcaaatgaaattctttgttctgtattcgttttcttataaacggataccaaccaccgcagacgtctcaagctcatatgcatctacataaggggatacatcctacacgtcctgtacacttggaaaatggattacagctactatgtactaagaatatcaatattgcaataagtatagtagtttaagtaacactttgccaaattaaacccattcctagtaaatttatattagctaaaagtcaaggaattccgaaaattatatgaatttcttttcatttcagatactttctcagtgtacgaataaaatgtattccaagtgtttgggtccgagtttttatgttgcgttttgtccccgacgagtggcacaagtttcgaccatcttgcccagctttatttcagccacccacagctttttcattcgaattgcctgctcctcgctgttgctgttgcttatgctaaatccctgttatgtacaaataatctcgcacacacgaccgcatttaaattgaaaaacgtacatggaccgaccacggctcaaatgccaagacttgagtgaaacgcaagcaaggaagcacggaaggatggacggatggatggaaggccaggaaggataccacagcaaaaacgccgtaaccactacacatgtcttggatggacatctggccgtccgtttcgaccgctgctcctgtttttctgcggtcgaagtgccccggcagcaggatgatatttagtcctgttggggggattaatgcatagttgtggccatcgcataatgtcggcttaattatttgtatggcagagccttcgacagcagcatttaaatgcaaactgcgtgtgtgaatcagctcgtgtcggtatgcctgatggaaaatgctcggaaaatgtgtggaaaagggggggggtggtgtttggactactgtatatatactgtactcacccgtgttggcaacttcgcagggcagcactattgtctcgccggtgatgaatttgaatgtctccgaacgtgatatgaacatgggctcgttcttggtcatcatgctctgggcagacactggaaatggaagagatgggggtaggagatactattttaatatgaaatgctttttggtattttcgtacgcaatataagtaaattactcaaaatattattactcggcctgaccgacgtgtgtgtacacacacgaacacatcgacgatgtcatctagatcaacacaacatcttgtggatggtcagatgtgtggctaattggtttagtgcatttaagaatatttgtcagatgtcggaaagttcataaagtgcattttattatgcccatccaatgaaacttgtcaaatttacacacatcagaagttgccaggggatgggcgaataatttaatgcacttgctgttgatttgctaatcaattttatatgtcaatctcggcgtttatgtgagcggagtgtgggagctttgtgggttaagtttttgtatcttgtagctttgcagcttgtctgtgcgagtgtaaagtgttaaaatgcacttaaatattaaagcccactttctgggcctaagccccaagtgagccctgaattaattcaattgccaacacccaccggcacgcacagataccgatgcatcgtgcatttgcgtattaggtaattcgtgtcttgcataatttgttcaggcccacggtgaccacatcaaaggacctgctgcatgcctgggcattagggtatttatttggttttgtaattaaacaatgattattgcataaatagccagacattgcggccagccccaattaaactcaattaaatgccgcacacacacacataaattatccaacttccaacttttcgggtcacagtgggtcacagagggagtggagtgaaggaaatcgccccgaaaagcggatacgctcatatccggttacaaggtaatcgattacttttagtgtgacaggacagaacgcggatacagatacgactatgctggccgcacttccgagtcgcacgcaaaagcggagtgccatcaaggatcgtcgagagtcgggcaa

SEQ ID NO: 29327 - DNA, 357 bp, DROSOPHILA
atgatgaccaagaacgagcccatgttcatatcacgttcggagacattcaaattcatcaccggcgagacaatagtgctgccctgcgaagttgccaacacgggactaaatatcatcctgctgccggggcacttcgaccgcagaaaaacaggagcagcggtcgaaacggacggccagatgtccatccaagacatgtgtagtggttacggcgtttttgctgtggtatccttcctggccttccatccatccgtccatccttccgtgcttccttgcttgcgtttcactcaagtcttggcatttgagccgtggacgctgggacatagctaccaaggccgggccgaggacgaagatgaagcttga

SEQ ID NO: 29328 - protein, 118 aa, DROSOPHILA
MMTKNEPMFISRSETFKFITGETIVLPCEVANTGLNIILLPGHFDRRKTGAAVETDGQMSIQDMCSGYGVFAVVSFLAFHPSVHPSVLPCLRFTQVLAFEPWTLGHSYQGRAEDEDEA

SEQ ID NO: 29329 - DNA, 2189 bp, DROSOPHILA
tctcagtgtatttgtgtatctgtagcatacgctgcgggggcgtatggtttgctgtacgtgtttccaagtgagctagcgcgataatgaaaatttatgtatgaaatttaattaaaacatacctcaggctgtgtttcgccgtggacgatgcagaccagcgtggcctcgtgcccttcgccggagaagaccacaggacgctccacggagatttccggcgaaactgcgggcgcaaaataacgaagagaatgttaagaaattagttaataacatgaacattgtcctgtctcacggaatggcagcgactggtagcgaacgcgaaaaatcaatgacccaatggcgacccccctagacattggtatcagtaaagtgtaaattgggatgggagccatgtaattagcacatgtaatgaccagagggggcaacaagatcggtaacgaactcgcatcaaaattatacggacatataaattcttaataaatgtcagaacgagcgggagtccccgccaggcatttcaataattgccagccagccaaccaataaatgtcggtaagtgtgtaaatgtaataagagcaatccccatttcagttgggcatcgctcagcccacaacccacaacccctgaccactgaatcgtgacctctgcccttccatgactccatcatctacgcgaatgcatgtgccgcgagagcgttaaaagtcaatacccgttcgaaatcgaaatcagatttgacataaattggactgacaggcggactccgtggcacggtcgcgcacagaaaaaattaattcgtttcgctgccattgtgtacctacacttggaaaaaaaaaaaccaattcgaatatcgaatgtatttactatgagaaaaagatcctacctacagtagttttttttttacaaaattgtttcaaactaaaagagatgtttttattccgtttaacaaatggatgtgtacactgcttgtttcgaaaatatttatattgttgatggttttttttttcagtgtttaaatatggttgtgggtggcatacttacacaggacatggagcacgacctggctggaagcgggctggcccacgcgattgttggccgtgcatatgtagacgccgcccttgtgccgatccacattctcgatggagaggacgtgcgagtggagcttctcctcgcctgaaacggagaaccatgaaaaccgcatgaaaaatgcaacccaataaggcccgctgccacacggacggacatccaaagtacgcttctggttgtccgttagttcagctgtccgcttgtccgcgagtccaatagtacgatagtccgagtgtccgcagcccaagaaatgacagagccaattacgaagaatcaacgtgcggccaagtgacagtgatttccggcagaagtcctccttcaccacggtccggctctgttgtccaccaaacaacgaagaaaccaccaacagagccactcacacacactgcgattttgccggcggagtgagcattatatttaataataaaggacgagcaaagcggtcgccgaaagcggggcagaaaatataatttctttgactttccatttttatggaaattgtttaaagtttcttttacgactgtattcatttacgttttcgccaccgcgtcgtcctttgttgctctttacgattttaatttgcgtggcctttggttggtttattctggttgcacggttgtttggccgggcatccttttttggttgggccacggcacactcgtcctggcacttatgcgcaatcttaccgttgggcaaaatattattcttgcggctccaagtcacattcggcattggattaccagtggccgagcactcgatgcgcaccgacgagcccttcttgacttgcaaatgtccaccggtgctaatgtgatgaatcctcggcggcactggagggaaaaaagaatgaaaagagcacagtgagagagtagaaaaacacattagaaatggccagtggtcccagtgtccccgctgtccaccccaaaaatgtgtatgcaaagtggggctgggcaaggacatcacacaatttgaataaataaatgcgccccgaatgcaaattgaatgagagaaaacggcatttacgcgtctccaactttgggcttcgactgggaaagtgcccctagaagttcccttttctgttttttttttttttatttcattccttgaccccactgggg

SEQ ID NO: 29330 - DNA, 189 bp, DROSOPHILA
atgcggttttcatggttctccgtttcaggcgaggagaagctccactcgcacgtcctctccatcgagaatgtggatcggcacaagggcggcgtctacatatgcacggccaacaatcgcgtgggccagcccgcttccagccaggtcgtgctccatgtcctgtgtaagtatgccacccacaaccatatttaa

SEQ ID NO: 29331 - protein, 62 aa, DROSOPHILA
MRFSWFSVSGEEKLHSHVLSIENVDRHKGGVYICTANNRVGQPASSQVVLHVLCKYATHNHI

SEQ ID NO: 29332 - DNA, 3424 bp, DROSOPHILA
ttcttttaactttaagaccatttttagtgaagctatggtcaaaaaatgtattaaaatcaactatttttttttactaaaactcgatctaccgattttccgtcaaaaatgtatcagtttttcacccataaatcagaaaataattgtccaaatatggaatggcatgcctttttaaactcctaatttaattccctaacgactggtaatcaaaattggcaatgttaatttttttcgatttttttcaaattttgatgatgttaccccttacaaaaaagtgaaaatttcatcgaaaaattttttttcccatatccaccaaagagtgatagggatcgttagtattgataaaaagctacacaaaactgtcattcttcaagctatacgaccatttttagtcatattgcaactaaaaatgctttagaaatatctaattttttgacaaaagttgtgttttgtgttgtatcaaatcgattatatttggacttttgatgtggtttaaggtaacaatgatgaagatcccacgatcctgtggtgtggttaatgtttacccagatgagcagcgaagatgatcaccaatcaaagaattcattaagctgcgatttctatgtgcgagtgcactaaggactgtgtgtgataacagacatgctgtgcatgtgcaaggtggtctgagtgtctgggtgtgaattgattgcggaaactctcgcagcgaaaacaaacgagaaagcgacgtgttcacttcacgcttcactggccagcttcggcaataaatttaactgcattaagttatgacagcttgaacatgttttctcctcgggctgcgatacaaagcgattggagaattttattctttgctatttttatggcttgccattctgtttgcctgctgcagcttcattgtgatttttgtggattatcgtcgaaatcagggcataataccaaattattatgcatacagccagcaacagaaagcacacaagcaaatgatatgtattcgattgacccacggctagccgaggtagtaataccctaagggattaaacgacttgtgccaatcaagtggtacaagcgggtttttttctgtaattttgtgtaagagtatttgcatgattgccacacggaaaggatgctctattgtgtttgcacaagctacagaacgaacgagttattactgctgaacgagtgtactcaccatttgatgatgtggagaagacgaaactgttggtcaaatcgctccatccgtatcgattcctgaaatggatagccgtttgctgtattaatcatggagcttagtaacataaccggtattaatatgcaaatgattgctaatgatggcagctcgcccgttatgcgactataaataatatctcgagtggtcaaattagccaggttggctcacttgcagcgaaccgtgggctcaaaactgcatattactccactccgtcaatctatttcatagaacaatatcccatctaactaatctcataacttaatctcggctcccagctccactgtgcggcttaaaactccctacagtgcgccgtaaagttttgctcttataatctgacaccatccgactaacctggactgcacggtggcctcgtaatgctgatcgggatccaggccgcgtaccatgtagctcatgccctgggcgtagtggtgcgaaacgggaactgccggcaggacgacgttgcgccagtcgttgtggccccagtgaatcacgttgccgtagccggagtagctgccgctgccagacagtccggacagtccgcccatgttgctgccaatccgatgcgcatgtagcccagagccgtacatctgggacgaggaggaggacatcgacgaggaggaggaggacgagtcgatggcattgccaacgacctcgtgtccttgcggcaacttgcggaaggacagcttgtactcctcgatgggagagtgcgagtcgacggcccaggagatgttgtatctgaaaatggaggacggagtgagtcagtgagtgagtgagcgagtgagtgagtagcttggttatcgcaaagtttttcgcgtgcaacagttggcgggggatttattccgaggcgctggcaatcaatatgtaattgttaaattctccattgagagcttcagccactgcagttaaggccaacacgcagccggcagtcacgtcaagatgctggaagggcatcggggcaggaggttgggaatagggacctccagagtgacaacaacaacgtaatcaatggctgacgacaatggctgggttaagatactgcgtatgagccagcagccagccgctttgttgtccgggaatcgggatcgggagtaagggatcccggggttgaggagctcgggcttcgaggttcgtcgtccgtcgtttgctgttgctgcagtcttaacataatgcccgccctcgccattgttattggctgctcgcatctcagtgcttggttcctgggtaactgaaactgctcgcacaatgcgtccattcaaccgaaaagccaacagtcctgccacattctcatctcaagtgtaaatgaagttatatgaccgaccccgactccttcagctgggtgcattgtaccgcgattaggaagccaagtggaggtgggtgaaacttgaaactgcatttttggccattgccccacggttggcttaaaggttggggcaatgccgttctttaaagtcggaacagctcattagccggcagacgatggacaaagttatttatggccacactccaatggagctgctcaagtaaacaacaactaattacggatgccccacttcgtcctgggatgtcgcaatacgccattacaaaaggcgcaagttcattgctttgcgataaagtcggcacacaatttgaatgttaatcagcattgggatgctgatggcatagaggacgaaagtcctttggcatcctgtttgtgtcggcacggcccatcatttgttttgccctcgaatgtattctgtatgattattaggccatgcgaactaataacttcaagtcctgggcacaataaaaacataaaacgccaatcaggaaacttttcgcatatagcataaaactaacgcaagcaataaaaatgattattaacaattgaagagccggcgactggcgccagacggctgagaagggaccggaaaaaaaagaaggaaaaggcgcttttgcgtactttgtatgctcgattcgggctttttggtagcttaattgccggcagcagtttccggcggcagggaatcaaagcaaatgaaacgaaatgaaatcagcgccaaagttgacatggccaaaatgttcggttagttgctttttgcaaagttgcgttaatatggctgcgtatggcgtatgcgcaatatggctgctatgctcgcaattacagctgacgttttggcccgctttgacctttttgcagcagattattggatttcatttggtttg

SEQ ID NO: 29333 - DNA, 735 bp, DROSOPHILA
atgcgagcagccaataacaatggcgagggcgggcattatgttaagactgcagcaacagcaaacgacggacgacgaacctcgaagcccgagctcctcaaccccgggatcccttactcccgatcccgattcccggacaacaaagcggctggctgctggctcatacgcagtatcttaacccagccattgtcgtcagccattgattacgttgttgttgtcactctggaggtccctattcccaacctcctgccccgatgcccttccagcatcttgacatacaacatctcctgggccgtcgactcgcactctcccatcgaggagtacaagctgtccttccgcaagttgccgcaaggacacgaggtcgttggcaatgccatcgactcgtcctcctcctcctcgtcgatgtcctcctcctcgtcccagatgtacggctctgggctacatgcgcatcggattggcagcaacatgggcggactgtccggactgtctggcagcggcagctactccggctacggcaacgtgattcactggggccacaacgactggcgcaacgtcgtcctgccggcagttcccgtttcgcaccactacgcccagggcatgagctacatggtacgcggcctggatcccgatcagcattacgaggccaccgtgcagtccaggaatcgatacggatggagcgatttgaccaacagtttcgtcttctccacatcatcaaatgggtattactacctcggctag

SEQ ID NO: 29334 - protein, 244 aa, DROSOPHILA
MRAANNNGEGGHYVKTAATANDGRRTSKPELLNPGIPYSRSRFPDNKAAGCWLIRSILTQPLSSAIDYVVVVTLEVPIPNLLPRCPSSILTYNISWAVDSHSPIEEYKLSFRKLPQGHEVVGNAIDSSSSSSSMSSSSSQMYGSGLHAHRIGSNMGGLSGLSGSGSYSGYGNVIHWGHNDWRNVVLPAVPVSHHYAQGMSYMVRGLDPDQHYEATVQSRNRYGWSDLTNSFVFSTSSNGYYYLG

SEQ ID NO: 29335 - DNA, 3257 bp, DROSOPHILA
atatatatttatagttattactgtttgcgattcactggtatttactgttagccatcatcaatcatatttatttacacttacgcactaattgtaatccaatagccatgtggaagcttctatacgctgccattttcgtgtgtcgattaatttacataccaaatcaataggtctgttgactaatttaattgcatttatgcggtcaattaagctacttagcgctacatacatacaaattgcaaaaagctagaaaacgctgtctgctgtaagccattcaaatgcactccgtctcgaatgctgcaaattagttggagtactgggggactttgaatttgactaaaacgcatggtgtggcgcgcagtggcagtgccgtatccaataattagtttatgcatttatgtattaattaaattaactatccgcaaaatgctacaaagtactccacacaccgccgtgacgccggtagcttaacccccggctcatctgtggccatcatccagtacatactagttatatttaaatgtattttttttcggtcgtcgagtgactatttctttggtgcagtttatacctaggagtatgcaataaaatctatgtacagtgggttttctttacttatttttgagtgctggaatggtcggcaaatgtggctgtgagtgggtgtagtgaatgttttatgggtcctagtttgaacagttgcatgctcttttacattgattgttacatgtataatgaatggttccgttttgcgtttcttgattaattcactaaatttgcttgagaaattcgagtcgaacattgagaaatgcttatgcctatgtggatcatcgcttaggctatcataaacgactaagagtgttgtgcaggaccgcgatatccttgggtatccttgggtatccttgctgtccaatctccgttcgactatcccagatcaaagtcaatcgattcactttactgtgctattggcggtgaaattcgtaactcaggtcgaattggaaagcaattaggccacgagcaggctcagagccaaagtggcggaactcagggccagaaggcccagtttctgtcggttgatggcgctgctgccgtagaaggtgacgctcagatctctcatctcgttatctgcaataaagatggattgcatacgcttttattaatccactcgcaaaagcctcaaaaagaaatggtacatagaaatccatatcgcatatcgcacacgaatgtgtgcatttccatattcattgctctatatacggtcgtaaaacaaattggtcgggcatgcaagtcaacagattgaaatgtactcaatggctatggatatgtggatatacgaatatatggatgtatggatatatggggatatatatatatatatgaaatacacctcgccaggacaaacacgcacacatgcacacgtaccatctaaacggactttgaatggcatacattaaaacttgttttcggctctcgtctacgtagttttctgtttttgatcgagcattgaaatggcaacggaaatggcacgccaaatagttggtaaactgtccggacaaacgtatatagtatttggtttatttccgattttattttcttattattatattgctatatttcagttattccgtatggcttagcgcaaatatcgagctgtgtgcacaaggtattaaaaaataaatatcatgcagatagaaacatgcaaagagttagaaagagagggaggcagacagatacagattaagacagagagagagagagagagggaatgagagttagaaagagaaagagctggatggcagaaagagatagaactagagctagagcaagactaacctgacagaccgtgattcaaaaatgttgacagatcgacaggtccatctgcaattagtacgtgtagcagtcgttgaaagttaggatagttgaaagtagggatagtgcgatggttgccagggcctactggtgctggtagattgcattaagtgccccaaactgctgccgatatttaaatcaaatacatgcgggcaaataaatcattaacgcttaaaatgcaatctgcaatcaggcggatttacttttgcgccaacgactgcgaatgcggatgcagatggccaatcaagtgggctgctagcaggcaagtaggtgggctgtatgacgacgaggtcagtccacgcattccacggatgcttggatgctcggatgctcggatgctcggataccagatcatttcgttaaggccgccaattaaattggcaacgtgctgcatctgtcaataatgacaaatgagcatttggccactggagtcgggcttcaaagggcgaatctgactcagtaaacacccgtaaatgaggcgacctacggaccaggatcagctcctgcctgcacatatacacttatacaataatacgtgtgtacatatatacatacatgcatcatccgtccgcacatcgattttaatgaaatgtcctggctgccagggacatcgacttctttgtctgccgctgtcgattgccacactgtcacaagttgcgggcgaataaatcttataaatatttgatggcctgccaaccagtcggcagcgacatatctaaagcacacacatctcctcaatgctccacatgccccccagtcaacaagaaaggatgccgccccgcccccagtgattgctgacacttttaatagacagccaacatcggactctcctccggatggaagctgctttctggcgaagaatgggtctgcgaggcggcgccaagtgccggacgtggtatcaatgtaggttgcatgttgcacacgtgtttggccagcaaccgggacagcttatctatcgaggcatctaggttgccaacgcctccaaaacatgactactctcattttcgaactccttcgaaacgatgcttttatgagcaggtcgtacaagatcataaaaatatgaacaacatattttcccaaagccattaaaatatagatcctttagaattttggtttatgtaaaaatggtagattgttagatagattgttagattctaaaagaatcacctttacgcaccaattttcgagcgagactgtcttctgcctgtgcatcaaatgtttccaaagcgctctcgtatgtctctattcatttggccatttagtcgttcgccgatggctgttggcggtaaagcgactaagaaaaatggccgacgggcaatgcacacacagaaactcccccggcattaccatataaattccccaactgtcaacataaaataaaagcaaattgtcaa

SEQ ID NO: 29336 - DNA, 258 bp, DROSOPHILA
atgcagcacgttgccaatttaattggcggccttaacgaaatgatctggtatccgagcatccgagcatccgagcatccaagcatccgtggaatgcatggacctgtcgatctgtcaacatttttgaatcacggtctgtcagataacgagatgagagatctgagcgtcaccttctacggcagcagcgccatcaaccgacagaaactgggccttctggccctgagttccgccactttggctctgagcctgctcgtggcctaa

SEQ ID NO: 29337 - protein, 85 aa, DROSOPHILA
MQHVANLIGGLNEMIWYPSIRASEHPSIRGMHGPVDLSTFLNHGLSDNEMRDLSVTFYGSSAINRQKLGLLALSSATLALSLLVA

SEQ ID NO: 29338 - DNA, 5414 bp, DROSOPHILA
gcagcaacgcaatgatcccagccatgtgggcagtgtccagatgcattctctggctagccaaaatcaggcgcctcagcagcagcagcagcagccactgcatcaggaacaacgaaatgcgcccaagcgctactccagcttgcgtcgctcacagcaggaggcatcacagcacttggctgagcagcagcaacagcagatgcagcagcagttgcatcttcaacagcaacagcagcagcaacaatcgcagatcatgattcaggacccccatgttctgatgcagatcgcctatcagcaacaggagctgcaggcccaactgcagaccatgcaacttggaccacctactgccgcaggagcagttccaacaccaccaaagccacatgccccgccggcagccgcatatccgcaagcacaggcggcaccgtactatgtgaccggaacggagccagttccagtgcccgttccccaggcaccgtatgttaatccggctagtgccgcttacttgccaaccactccggctgccgtggcgtacgcccaagcagggcctccggttgtaacacaacccacaccgccgcccgctcaggcgccgcccgcaacgcagccggctcagccgtatcagaactacaacacggtcggtggcacaacctactttgtaccgccggctcaaaccactagccgaccaagtgctctgccccagcgtcgtcccaccaacgcgattcccattctcccgccctccgaaaagcataaggtcaagggtggagcgaaggaggagggcatctcggacaacatagatcacatcattgacaacatgttcgtgcagcgaccttcggccttccaggctaccggcgaaggcgcaactccaggtgggggaacaaaggaagaggcggcagccactccaccggctgccgagcagaaccttcagccagttccggccactgggcaggaatgagtgcaggcgtacgccggcttgccgccacagcagcagcagagacgaggccaacggatagcgccgccgccctcctccggctactcaatgctgcagccgcacgctggctactatcgacctccgcccccgccgcactagtgcggacagcccagctcctaactcaactcatacgattttttttcccccattctgtccttgggtctgcgactcaaaaagtactgcataaataaagaaacgcagtgagaaccacttgtaattagcatttagctcccagataatcgaaattactaacgaaaagttttcgtatatagacgattatatatatatatattgtaatccggcgcaagctccaattaatttgtacgtagtatctagggccggctaacgtattgaagcggctgggcgcttagcttatttagccgcattttagaattgaaacacaagaattaccgagagaaatgtatttgcaaaaactaatcgatcattgaatttaaataaacgtttaacacgaagttacaaatgctgcacaccctttctgtcaaactacaaactaccaacgaagtctgcgttttcacttagtttccggtgaaaggtgggttgaactagggatccaatttcaaataaaaaatatttaaattcgactgttcgttaaaatctaggtaattgtgctaattgaaacaaaatggaaagaaaaaccaaaaatctactttctgattggaactaaaaatgagaactgaatttcaatgacgacataaagtaagattagatcttttcttaatactagatgagcttttcatagcttggattccttggccaattgttccaggagaacgctgatgcggcggaatgagtccttgaaaatgtcgttgaacttgcgagcgcttgtctttaggctatcccgataggcggtggtattaatgaacacactagaatgtacgaaattaaagaacaattcaagataatggaggagtgtctagcttacgcttccgaggtgatggagtaaaagacgccatagccatcgaagaccatgggcgccacgaaaccaacgttggccgtgaagcccagcgtgctggacgagagcacaaagttacctcctccgccgctcttggtgtacatcggatcgtcgtagaaggcgggaatgtccattttgctttcatacgccgcgcaccacaggccaaacaagtgcctatcgatgccgtgtcccttgcgcgcctcgttcatgaagtgcttgtgctcatcgactgccctacggaacgccctggccagtgacatatcgccaacctgcttgttggatgacgccctcaggaattcagccacagcggaagtgcatgatcgcagggtctctgttcgtccattgtagtactgtcgcatcagagcagtctcatatgtgggagcaattctgttggatatccatggagtgttgttagtgctgttttttttagtccagaggtgaactcactctttatgcatttggtagtaggcccactgcatgaccacctgaacaaaggagtctggatgcagtcgatgggttttcataaagtccttgccgtagtcatcgaacgcagtgaaggtcacagtaacgtcaataccctaaggataccacatacaaaaggattaactagttcaataacaggtttcggaaaaaggcgttttgcctaccctgtcatcaatatccttctgcacgcgcttgatctcgttcttgagcgtatcatccagctggaagtgcagctccttgacctccaaaacattgcctttttcggcctctgcccagtctggctctggcacctccaggaagctcagttgcatgaatgtggcgtaacttatgctgaccgtgccatcgtagcagctgtgctcacccgtccagttgcagcgtccgttgcggaaggcgatgatgctgctgctgcggtctgcccagcgggaatggagatcaccgtagagacccagctggcaggactcctcgtagtccttgggcgattgctcgtaccagcagatctccatacatgcgctctccaccagaagcagcgtctccttgtttgcaactgagatttccctcaaacggttgcggttgcgtgcccacgtggagcgttcgtcatggctcagggtgggcacacaatcgcccaacggctcgtagtcgaggatgctgcgcactctttgcagggccacgaggatttcgggagccgataggatagtgtcgtcctcgtgcacacaatcgaagatgaactgacgtcccttgccggaaataagcatgtgactcggcgttttgccctcatccttggtgagaaaatgcttctctatatgatcctgctcctcgcctggcacacggcacgtggagaagaagtgcttgtacagcgcggaggagtactttattttaccgccgttcgaggagagcggtttgatgctggactttctagtcagatcccaaaactccagcgagtggtgaatgtggcgcgccagactcttcgaaaattatacagtcaattaggcaatcttaaactttgtgttcttatagagcttggggtgtgggtccactcaccttcagcatgtactccggtgtctccggcacgcccaccatttccaattgcgagggcatgaccatgagctggtagggcagcagcggcatccgaatcaggtgatatccgtagtcctcccaccaggtgcccagccagttcctcatgccggccgcccgcttcttgagctgttcgtgcagctgggctcccactccgttttggaactcatcaatagtcttgcgggcctgggccaactcctccttggtcccgaatggctggatgcagctgtagtagcgctccatggtgtccctaagctccggcagcgggagcgaaggtaaggtctcgtcgaagtcgaaggtgttcttatcatccttgctcataaaatatagactagcccggtccatggtggtttagctgcgggggacacgttggaatcgttgatatcagtctgcgcgtgtggtggttttctataggcctaagtcagattagtacaataatcatatcgggaatcgcttttacgttcgtcaggtccaaagttcacccaatacattactgagtacattcacatcggaaataaattgatctcatcttataggttaaacattaaaatggtgtgcaaattaataccacacaactaagaacacttaatgtgcaactaagcggattatgcgtcaagttgaacgtaatctttcttggactgcagctagacgactatcttcactaatctcctcaagctggacaaagtccggattggggagctttataaatatttatactcccggcgcactggtgaaatcataggcgaatttctagcccactgacctttgtactcgatggggaattcacttttgccggagacaactgaagcgccagactgccgttatacgactgaatccataggttggttccatatcacagcaaaccttgccggagggggagcacttgaattatcgcaccgtgggatccgccacccgcgtccactgactcagtgcgataatatatcaccctaatcattgctattgcagacagtcggccaccgataatggccggtttcatttgaatttctatatgaatttcttttttaataacatattccagcagacacacccacacaaaccttcgatgaggcggcagttgaatgtcgcgcccgaacttcagtttgcgatgcactcgatcgaaattaaaacggttccgcagctatcaagttcattaggctagataagcaaacaattttataggttaaacaattatttttattattatactgctgcgtttttgtttacaagcggcgaagaccctataggaaattggcacagcaaacagctgtttgcaggagttgccagactttttacaccatttgtttataccgttagtcaccacattcttattacgtacatcttattcttattaacatcgcatagcattgtacatcgtaccgcaagatataatcctcccggattgatgcaatcaactgccataaacgtacattgtaaccgttaacaaaatgcgaatattgtttacaattattaattaaataggtcattcaatgttttgtaaatatttaaaacttatttaaatttatttaatttaattccttagcatccattcatagcatccatgctgacgcctatctggcaacgccgccagcagctgaaacagctgacatctgtcgaaatgagtgaaagagacaggcagaaagaatagaaagaaatttgggacgcttgttttctcaagcggctttattaaatttctaatcccagcaagaggtggaaatgctgccatccacgggtctctttaagggcttcttgtgcccttactttgacggccaggatgcggcgtcctgcaagcgccccttttgccactttaagcatgctcgcaaaggtgagtgaattacgtccagttaatttcgcaacaaattctatccactctcggtttacagacgaattggaggccgctccacctgcaga

SEQ ID NO: 29339 - DNA, 2745 bp, DROSOPHILA
cggatcccacggtgcgataattcaagtgctccccctccggcaaggtttgctgtgatatggaaccaacctatggattcagtcgtataacggcagtctggcgcttcagttgtctccggcaaaagtgaattccccatcgagtacaaagctaaaccaccatggaccgggctagtctatattttatgagcaaggatgataagaacaccttcgacttcgacgagaccttaccttcgctcccgctgccggagcttagggacaccatggagcgctactacagctgcatccagccattcgggaccaaggaggagttggcccaggcccgcaagactattgatgagttccaaaacggagtgggagcccagctgcacgaacagctcaagaagcgggcggccggcatgaggaactggctgggcacctggtgggaggactacggatatcacctgattcggatgccgctgctgccctaccagctcatggtcatgccctcgcaattggaaatggtgggcgtgccggagacaccggagtacatgctgaagagtctggcgcgccacattcaccactcgctggagttttgggatctgactagaaagtccagcatcaaaccgctctcctcgaacggcggtaaaataaagtactcctccgcgctgtacaagcacttcttctccacgtgccgtgtgccaggcgaggagcaggatcatatagagaagcattttctcaccaaggatgagggcaaaacgccgagtcacatgcttatttccggcaagggacgtcagttcatcttcgattgtgtgcacgaggacgacactatcctatcggctcccgaaatcctcgtggccctgcaaagagtgcgcagcatcctcgactacgagccgttgggcgattgtgtgcccaccctgagccatgacgaacgctccacgtgggcacgcaaccgcaaccgtttgagggaaatctcagttgcaaacaaggagacgctgcttctggtggagagcgcatgtatggagatctgctggtacgagcaatcgcccaaggactacgaggagtcctgccagctgggtctctacggtgatctccattcccgctgggcagaccgcagcagcagcatcatcgccttccgcaacggacgctgcaactggacgggtgagcacagctgctacgatggcacggtcagcataagttacgccacattcatgcaactgagcttcctggaggtgccagagccagactgggcagaggccgaaaaaggcaatgttttggaggtcaaggagctgcacttccagctggatgatacgctcaagaacgagatcaagcgcgtgcagaaggatattgatgacaggggtattgacgttactgtgaccttcactgcgttcgatgactacggcaaggactttatgaaaacccatcgactgcatccagactcctttgttcaggtggtcatgcagtgggcctactaccaaatgcataaagaaattgctcccacatatgagactgctctgatgcgacagtactacaatggacgaacagagaccctgcgatcatgcacttccgctgtggctgaattcctgagggcgtcatccaacaagcaggttggcgatatgtcactggccagggcgttccgtagggcagtcgatgagcacaagcacttcatgaacgaggcgcgcaagggacacggcatcgataggcacttgtttggcctgtggtgcgcggcgtatgaaagcaaaatggacattcccgccttctacgacgatccgatgtacaccaagagcggcggaggaggtaactttgtgctctcgtccagcacgctgggcttcacggccaacgttggtttcgtggcgcccatggtcttcgatggctatggcgtcttttactccatcacctcggaagctgtgttcattaataccaccgcctatcgggatagcctaaagacaagcgctcgcaagttcaacgacattttcaaggactcattccgccgcatcagcgttctcctggaacaattggccaaggaatccaagctatgaaaagctcatctagtattaagaaaagatctaatcttactttatgtcgtcattgaaattcagttctcatttttagttccaatcagaaagtagatttttggtttttctttccattttgtttcaattagcacaattacctagattttaacgaacagtcgaatttaaatattttttatttgaaattggatccctagttcaacccacctttcaccggaaactaagtgaaaacgcagacttcgttggtagtttgtagtttgacagaaagggtgtgcagcatttgtaacttcgtgttaaacgtttatttaaattcaatgatcgattagtttttgcaaatacatttctctcggtaattcttgtgtttcaattctaaaatgcggctaaataagctaagcgcccagccgcttcaatacgttagccggccctagatactacgtacaaattaattggagcttgcgccggattacaatatatatatatataatcgtctatatacgaaaacttttcgttagtaatttcgattatctgggagctaaatgctaattacaagtggttctcactgcgtttctttatttatgcagtactttttgagtcgcagacccaaggacagaatgggggaaaaaaaatcgtatgagttgagttaggagctgggctgtccgcactagtgcggcgggggcggaggtcgatagtagccagcgtgcggctgcagcattgagtagccggaggagggcggcggcgc

SEQ ID NO: 29340 - protein, 610 aa, DROSOPHILA; identical to SEQ ID NO: 27495

SEQ ID NO: 29341 - DNA, 5740 bp, DROSOPHILA
tctcagctgcttaacatgcagcaatttctgcgaaagtacggtgtcctggatggggatagcacccactgggcggcgtaccagtacaagaaagccgacgaagtgccacttagttgccgcagcggcatcggtttctccagctttggcttcccggacatcggcaacgactaccgcttctggctgggatcggagcaggccaacacgccgtgtcactacgacacctttggcgtgaacatagtggtgcaggtgcatggctgcaaatcttggctgctctttccacccgaaacgccgctgcagagcaccaggataccctacgaggagaccagtgtctactgtctggagaacttttacgccccggatccggcaaagatttcgagctatgagcatcttggccggcaagcctatcactgcaatctgcagccgggcaacgtactaatcgtgccgcgtcactggtggcactacgttgaggccaaatccacatcgctgagtgtcaactactgggtaccgctaaaggtggatatggacctgattttggacgagttcctggtcatgcacattgtggagagctttgttaggggtgagagcaatcaagttaagcagtatctgctcaatcccaaccagctggataatgtgtctaccaagcccagcgacctctttgcccagttcgagcaggcggtgcagaatttagagagtggcaagagcactcgacagctctacgataccgactacatcagccaagcggattggaaaactttgttgaacagtatcaacctgtcagtgcgtcctttggaagtgatgccccacgaggagtacaaactgctcctcaacgccaactccaagagattccgagtagctgccaatccaccggagacaactcccattagttctaattgcgagcttttagtaagcagcatgtgtgctccacgggtaattgccgaaatgaagcgcgagttctttcgcaggctaggaaaaagtaactcactctagcttaacacacgtgtctagggtaagaacgtttactgtgatacgtgataataatgttttcatatatgagattaaaatccaataagccatcaacatgtatgatacaatttccaaacagaaccagaacacggagcattaaatgccgaataccacccatcttgtctgcccaccatccagactcatctgaggctctgccatgcgattgacccttgggcggaacggactgcgcacatgtggacatgaacttgattacagctacagcgccatttaccagccaggtggcttctggttgggatatccaccctgctggttggcataactgcctgggtatgttccgtagtggccgggtggcggtccctgcgggaatccctggtactgatagtctgcagaagatgatcagcattattgaagattcattttaagcggtgacgttaacttactaccaggatacggcaaggtggcgtatggattgaagctctgcggcatcggagcgggcacataggcggggtagggcacacctggctgggctccatatggaataggcatgccttgcacttgggccggatacggaatgttggccgttgatgcggcaggtggcacactaggtgcggagccaggtggaatatctaaaaagaaatggacggtttatatattctgttaagttcggcttaagatgcttcactcaccgctgccactgcccgatgtggatgcatagtgcgagggaagggctggagtggccggacatgcctggcggctggactctgtggtcaagtccttgagcagctcctccttctctgtcttgcgggcgaacacaaagtcgctgatcttgttctggaacacaaccagcaactgcgtgaggtcgttgtagaacttggtgccctcctgcagatttccagaaagttcaatgtagctatcgaaggcggttgctagctcctggtataaagtatcccgcgagctgccgcagctaccagtttcagagacaaaggcaccatgggcgctttggatctcgctgaccaaggactgctgacgttccacgctctcgcgcacctgctgctgcaggggattgagcacttggccaatacgcgccaacgagagggcgggctcgtcaatagcgccatccttctgcagggcaatcaaaaactcgtccttcatgttgaaagtggcacctttcagctcggactcaatggcctcacgctccgccttaatggtctccacgtcgtccatcagcttcttaagacgctgcacgctggagcagtttgggtccacactgccactggccgagggcagagactgttggatttgatcgggtggcaaggacaagagttggatgcccttctggttggcctcaaacttctggcgaaccaccttgtcggcttcgatggcattggtgatgacttcgcgatactttttcgcgttggtgcggaacatctctgttagcttgtcggagctgatgcgagtccaacgatccttgaactgcgcccgcaactggttatcggagtcgcgttcttcgtccaagagccgctcggtttcgtcgaggatctcgcggttgcggttcagaagctcgggaagatccttaagcatcgtctgcacattttcaatgccccccttctggcgaacttcattggccttttcctttagcgacggcggaagcccactgttgccatcggctgtctccacggccgctggaagattcaagctggccaaaacagcattcagagtctgggtggcttcacgcaacttcatgatctccacgttgacgatctcattgcggcgcatatcggaggcggtcagagcacgatgaagctccacgggcactaggctgctgaatatatccttaaaattttcagccaaggggacagcaatgggcagtggcttggccaactgggcttttccaggagaggtcaaggtgctcagctctggtatgatctcgttgtagatgaactcgttgtccttggtggactcggtcaagttgcgcttggcgcggctgaagtattcatccaagtaggtctcatttccgctacgcgtctgagccgccttgaaaagatcaatggcgttgcgcaagcgagcaatctcctcgccaatcttcttggcggcacggcacaccagactctggtacaactgggtgagggcatggaagccggcctgctttccagcaatagtaggtatccactccttctcccacaggctgcgcacagactccttttgcatagcgcgcagcacatcggcgtaagactcctccgcctggcagcaaagcttggcgatgatctggtccttcaagttatctgccggaatgtaaatacttgaacatgttaacctcgattcatagcggaatgtgtttccattactctagagccattgattggtacattatttttgttgaatggaatgattcatttcaatcgttcttatcatataatttcaaaggaaataactgggtaatgtccccacgtatcaaaagtaatatcttcggataagctttgtccgaaaaatattgcattgagtgcttttattgtatgccaaagacgcttttacctgataaaatagtttatcgcccaatgtaaacaactaaattttgctcatagataagcatttaaatgtgaacggtgttcgtgctctttgtgaattaattttacatacccttaattgccttcagaatgaaaacctcctgcgcttgggcgaccatcagagcctgcagcacggttagcgtatcctggctgagatcgggcgtgggttccgagggcactgccgctggcgtcgctcccttcaaatactgaaagatgccggcgctctgctggagcagtttgatggtcagcttaaggccgtcatccgaatccagggactggttggcagcgatgttgctctgcagggcggcaatgttgaagagcacacagaccttctcgtaaagcaaggaggtgtgagctgtggatggtggatgccgttgggttagtggtgaaatatacttggcacatggcaatgaatcactcactcaggctgatcttgccgccgaaaatggagcccttgtcgaaggcatccttccacttaaagggtatctgaagttcgctaaccgatatcttggtctccagcgcacaaatctggtcataatagctggaaatacagagcaggcaacaaaacccggaggcaaaacatttagttaacgactacgtcatccgagagcttgtttacgtctgaccaccacaccaatacagaagcaccaggtggaatcgaatcgaatggaatgggtgtgattagctgccccgttgtgcgggtgactcatcgggagattcccggaagaaggccacaaagacatggtggtacttacgcgtacacaatctccagcgaagcctcgtacttttcaaagaatttccaaattgccgtattgcgttgtttcgaaaattcgttgacggcctctccgtacttgcccttctcctcctccgacgcaccgttgtaggtgctctggatgagattgttcagcggcttgatcacatccacctccgacggcttcttcagcggcacgcccagaaacttcgacatcttttcctgttctgcggagtctgcttcttgtccgacttctgattccaagtgatattaattaatcgtctgtcgctctattcgaactccgctttacgctctctttccttcccctacaacagctggccagcgatgtccagccgtcgataccgttttcgatagccactaaagaaatactaaggatttagttctatacttcaaaggtgaatttttgtcaaagatacttaatattgtaaactattaaaaaaaagtaatagaatattttttctatgttctatgttctatatgttttttattactaacatgaaccggtaactaccagagctgccactatttcaatacgtatgcacattgctacgtttctcgccctgtcgttacgttttcaacagtgtggcatctctgcggcgagagaaaggtaaccctagactttctattttctgattgcgttgttgtcgagaaaattgtgcgaaattattggttttttcttagaatttaccgtaacaagaagcacgcttactagagtagttaggccttgtcaagaattcgcacgtgagttgatatacggagccctggcttggatatcccagtgacacctagaatcccgttctatgtcattccgcagaagaagcagcagcagcagtagcgaggcagaaaaccgaagagaccccgcgatggccgaagtggagaaaccaacggcggccacgcccccgaccgacatcccccaggccacggctgcacctgccagcgaggcgccagtggctgtaacgcccacagcggataccaccgtggacgtcgagccgggcacctcgcccacccaggagcccaactccaattcgcatccgcacgactccgagtacgacacggccagtgatctggagggcggagaggactatgacgacgaggagagtgccagcggcagcgccagtggcagtgggagcgaggaggaatctgagacggacgacgaggacgatgaggtgggcagcgaaacggacgatggcgaaggggagcaggcgatggaccgctccgtcgcagacagtgaggcccagaagaaggtggacgaggatcgcagcaatccgcagtacatcccaaagcggggcactttctacgagcacgacgatcggacggcggagaccgagggagaaatcctgatcgaacccgaaaacggtgctggccaggcggcggcggagccaaatggcgaactcaatggacttgcggccgccggtgccacgcc

SEQ ID NO: 29342 - DNA, 2987 bp, DROSOPHILA
atattaagtatctttgacaaaaattcacctttgaagtatagaactaaatccttagtatttctttagtggctatcgaaaacggtatcgacggctggacatcgctggccagctgttgtaggggaaggaaagagagcgtaaagcggagttcgaatagagcgacagacgattaattaatatcacttggaatcagaagtcggacaagaagcagactccgcagaacaggaaaagatgtcgaagtttctgggcgtgccgctgaagaagccgtcggaggtggatgtgatcaagccgctgaacaatctcatccagagcacctacaacggtgcgtcggaggaggagaagggcaagtacggagaggccgtcaacgaattttcgaaacaacgcaatacggcaatttggaaattctttgaaaagtacgaggcttcgctggagattgtgtacgcctattatgaccagatttgtgcgctggagaccaagatatcggttagcgaacttcagataccctttaagtggaaggatgccttcgacaagggctccattttcggcggcaagatcagcctgactcacacctccttgctttacgagaaggtctgtgtgctcttcaacattgccgccctgcagagcaacatcgctgccaaccagtccctggattcggatgacggccttaagctgaccatcaaactgctccagcagagcgccggcatctttcagtatttgaagggagcgacgccagcggcagtgccctcggaacccacgcccgatctcagccaggatacgctaaccgtgctgcaggctctgatggtcgcccaagcgcaggaggttttcattctgaaggcaattaaggataacttgaaggaccagatcatcgccaagctttgctgccaggcggaggagtcttacgccgatgtgctgcgcgctatgcaaaaggagtctgtgcgcagcctgtgggagaaggagtggatacctactattgctggaaagcaggccggcttccatgccctcacccagttgtaccagagtctggtgtgccgtgccgccaagaagattggcgaggagattgctcgcttgcgcaacgccattgatcttttcaaggcggctcagacgcgtagcggaaatgagacctacttggatgaatacttcagccgcgccaagcgcaacttgaccgagtccaccaaggacaacgagttcatctacaacgagatcataccagagctgagcaccttgacctctcctggaaaagcccagttggccaagccactgcccattgctgtccccttggctgaaaattttaaggatatattcagcagcctagtgcccgtggagcttcatcgtgctctgaccgcctccgatatgcgccgcaatgagatcgtcaacgtggagatcatgaagttgcgtgaagccacccagactctgaatgctgttttggccagcttgaatcttccagcggccgtggagacagccgatggcaacagtgggcttccgccgtcgctaaaggaaaaggccaatgaagttcgccagaaggggggcattgaaaatgtgcagacgatgcttaaggatcttcccgagcttctgaaccgcaaccgcgagatcctcgacgaaaccgagcggctcttggacgaagaacgcgactccgataaccagttgcgggcgcagttcaaggatcgttggactcgcatcagctccgacaagctaacagagatgttccgcaccaacgcgaaaaagtatcgcgaagtcatcaccaatgccatcgaagccgacaaggtggttcgccagaagtttgaggccaaccagaagggcatccaactcttgtccttgccacccgatcaaatccaacagtctctgccctcggccagtggcagtgtggacccaaactgctccagcgtgcagcgtcttaagaagctgatggacgacgtggagaccattaaggcggagcgtgaggccattgagtccgagctgaaaggtgccactttcaacatgaaggacgagtttttgattgccctgcagaaggatggcgctattgacgagcccgccctctcgttggcgcgtattggccaagtgctcaatcccctgcagcagcaggtgcgcgagagcgtggaacgtcagcagtccttggtcagcgagatccaaagcgcccatggtgcctttgtctctgaaactggtagctgcggcagctcgcgggatactttataccaggagctagcaaccgccttcgatagctacattgaactttctggaaatctgcaggagggcaccaagttctacaacgacctcacgcagttgctggttgtgttccagaacaagatcagcgactttgtgttcgcccgcaagacagagaaggaggagctgctcaaggacttgaccacagagtccagccgccaggcatgtccggccactccagcccttccctcgcactatgcatccacatcgggcagtggcagcgatattccacctggctccgcacctagtgtgccacctgccgcatcaacggccaacattccgtatccggcccaagtgcaaggcatgcctattccatatggagcccagccaggtgtgccctaccccgcctatgtgcccgctccgatgccgcagagcttcaatccatacgccaccttgccgtatcctggtaactatcagtaccagggattcccgcagggaccgccacccggccactacggaacatacccaggcagttatgccaaccagcagggtggatatcccaaccagaagccacctggctggtaaatggcgctgtagctgtaatcaagttcatgtccacatgtgcgcagtccgttccgcccaagggtcaatcgcatggcagagcctcagatgagtctggatggtgggcagacaagatgggtggtattcggcatttaatgctccgtgttctggttctgtttggaaattgtatcatacatgttgatggcttattggattttaatctcatatatgaaaacattattatcacgtatcacagtaaacgttcttaccct

SEQ ID NO: 29343 - protein, 836 aa, DROSOPHILA
MSKFLGVPLKKPSEVDVIKPLNNLIQSTYNGASEEEKGKYGEAVNEFSKQRNTAIWKFFEKYEASLEIVYAYYDQICALETKISVSELQIPFKWKDAFDKGSIFGGKISLTHTSLLYEKVCVLFNIAALQSNIAANQSLDSDDGLKLTIKLLQQSAGIFQYLKGATPAAVPSEPTPDLSQDTLTVLQALMVAQAQEVFILKAIKDNLKDQIIAKLCCQAEESYADVLRAMQKESVRSLWEKEWIPTIAGKQAGFHALTQLYQSLVCRAAKKIGEEIARLRNAIDLFKAAQTRSGNETYLDEYFSRAKRNLTESTKDNEFIYNEIIPELSTLTSPGKAQLAKPLPIAVPLAENFKDIFSSLVPVELHRALTASDMRRNEIVNVEIMKLREATQTLNAVLASLNLPAAVETADGNSGLPPSLKEKANEVRQKGGIENVQTMLKDLPELLNRNREILDETERLLDEERDSDNQLRAQFKDRWTRISSDKLTEMFRTNAKKYREVITNAIEADKVVRQKFEANQKGIQLLSLPPDQIQQSLPSASGSVDPNCSSVQRLKKLMDDVETIKAEREAIESELKGATFNMKDEFLIALQKDGAIDEPALSLARIGQVLNPLQQQVRESVERQQSLVSEIQSAHGAFVSETGSCGSSRDTLYQELATAFDSYIELSGNLQEGTKFYNDLTQLLVVFQNKISDFVFARKTEKEELLKDLTTESSRQACPATPALPSHYASTSGSGSDIPPGSAPSVPPAASTANIPYPAQVQGMPIPYGAQPGVPYPAYVPAPMPQSFNPYATLPYPGNYQYQGFPQGPPPGHYGTYPGSYANQQGGYPNQKPPGW

SEQ ID NO: 29344 - DNA, 5587 bp, DROSOPHILA
cgtcaagttgaacgtaatctttcttggactgcagctagacgactatcttcactaatctcctcaagctggacaaagtccggattggggagctttataaatatttatactcccggcgcactggtgaaatcataggcgaatttctagcccactgacctttgtactcgatggggaattcacttttgccggagacaactgaagcgccagactgccgttatacgactgaatccataggttggttccatatcacagcaaaccttgccggagggggagcacttgaattatcgcaccgtgggatccgccacccgcgtccactgactcagtgcgataatatatcaccctaatcattgctattgcagacagtcggccaccgataatggccggtttcatttgaatttctatatgaatttcttttttaataacatattccagcagacacacccacacaaaccttcgatgaggcggcagttgaatgtcgcgcccgaacttcagtttgcgatgcactcgatcgaaattaaaacggttccgcagctatcaagttcattaggctagataagcaaacaattttataggttaaacaattatttttattattatactgctgcgtttttgtttacaagcggcgaagaccctataggaaattggcacagcaaacagctgtttgcaggagttgccagactttttacaccatttgtttataccgttagtcaccacattcttattacgtacatcttattcttattaacatcgcatagcattgtacatcgtaccgcaagatataatcctcccggattgatgcaatcaactgccataaacgtacattgtaaccgttaacaaaatgcgaatattgtttacaattattaattaaataggtcattcaatgttttgtaaatatttaaaacttatttaaatttatttaatttaattccttagcatccattcatagcatccatgctgacgcctatctggcaacgccgccagcagctgaaacagctgacatctgtcgaaatgagtgaaagagacaggcagaaagaatagaaagaaatttgggacgcttgttttctcaagcggctttattaaatttctaatcccagcaagaggtggaaatgctgccatccacgggtctctttaagggcttcttgtgcccttactttgacggccaggatgcggcgtcctgcaagcgccccttttgccactttaagcatgctcgcaaaggtgagtgaattacgtccagttaatttcgcaacaaattctatccactctcggtttacagacgaattggaggccgctccacctgcagaaccttcccccgtgcccaagtacaagccggcacccaagttgctctcccttccactgccccagatcacgctatgtgcgccccggaagaagtccaatctggagtaccacccggagaagccggctcttgacgcatcgccggctaagaagaagcaggaggcgtccgtggacagtgctcccaaatatgtgcccggccagccatctgttacaaatggcgaagaatatgacgattggcaggcggtactcgaaaaggaaattgatgagcagatgcaggtggagattgaggagcaagtccagaataacgacgaagaacagaagatagatacggtagctgaaaacgaggaggaccaggagaatacgcaactgacggatgctagggatagccacgaaaaggatcgaaagcccagcaaggagcgggaaagggatatagaaaagaagaagatcagagagctgaaaagggaaaagatcaaagacagggatcgggaccgggaccgggaccgggaaaaagacaaagagaagagcaaggaaagggacagagagaaggaaaaaaatgatagggataagcgaaagtcctcccacagcgacaaggagcgctccaaggagcgaaatacttcaagctcaagttcctctaagcacaagtcttcatctagctcctcttccagcaaaaagtcatccagcagcgataagcaccgcgacgacaaaagttccagtagcaggcacaagagcagttcttcatcatcctcctcgaagagccatcatcacaaatctagttcctcgagttcacggtccaaaactaagaggagctcgtcttccagcaaaagcgctggcacttcaaagagcgaaccggaggcggataaggatactgaagcagctgtactgacaccagcagaacctatggatgatctggatgacatggactttgattttgaagcagacacctcggaaggagaaattgtacgccagtgtgaaatgatttttgacgagatggaaaaaaaatttgcgcagatgcacaaggacgaaggcggcaatgccaacccggagagttctcgcaagcgcaaagctccttctccggacattgataccttcaccgaggcagccacggcggctctgcagaagcgccgggtggcccacgagaatgctgacaagatcacgcctcatttggctccttcggcggcgatgcgcaaacccaatcacgtccgtaatgccatgcaggcgatcttcaaccgccgcgcggagctgcggcgccaggagaagctacaagccgaagcctcagcggagcaggtacgtcaggcacaggagcgggtgcgccaagcgcaggaggagctccgtcaggccaaggtcaactccaacctcacgccacttatttcgcgaagtgctctgaccccaccagtgcgatcaggtgagcataccactttggaatatataataattcaaattcaaatatttttggttaccagctcgcagcatagcacctgtggccaacattgtggccatcgctcgggccaaaaaaaagatcgaggagctgcaggccgagaagaagccagcctttacgcctgcacaatcattcaagggcgccggccgtgtggctcacaagcccactgctgcgctagacaaagcggctcctgtgtccaacgcggagaagccaaccgtcctagatcccagcagctccaagatatcatacaacgtgcgcattcagtattatgagatgatggtaaggcactgcaccgtcatctatccgcagctggcagatgcctgggagcgcgcccaggtggaggagttgaccgtctttaagaagtgcaacacgcctgccatctacaagaacagctgcatgctggcgattaacaagctccgcaaggaggccttagaggcgggaaacaagccgagcgtagcctgcaagactgtgtcgcacgagatgatgctgggcggcaagcgggcgctcaccacatcctggagcgtagagaaaaaggggtgggtttgtatactaaactatagttattctctatgtgcacattataagatgaaattcgcttaattgtaaatactgccactggccacaagcataaacgtaaacataagcataatttctctttatgacttcacatttcttcctggaagtcatgaatgttaacttttatgacatttgtacgtatttctaacatttcaattgcatataaaaagtttttgatatctttaccctaacaaacattaaatatatatctattgcagaaaactgagctccttgggcaatggcgaacctttcgatgctttagacgccgagaaagcttacaaaatggtattcgatcttcgcctgactgaagagcagctggtggagaacggatatccgcgtccgggcgataagcgcggatccgcagtgatacgcgcctgccgccccaaccgtcgtcccaaccagaaagagcgctactgttcccgctgcggcaaggtattcagcttggacatatacgagcaccagagctttgacatgtgcaactaccatccgaaaagcacgggatatcgacgaggattcacggaccaccagcatcgctgctgccagcagccggcgggcactccaggctgcacctatgccaactaccacgtcagcgactattacgatccggaaaagctcacctgtttcgtgaagacgatcgaacggggtgaggaatttgtgcccactaagaaggacatatatgcactggattgcgagatgtgttataccacacacggaatagagctaacccgcgttacggtggtggacataaatggacgcagcgtttacgatgctcttgtcaagccggacaaccagattgtggactacaatacgacgtgggtgaatgtagcttttcggttgtttcgtattaatctgcaatactctgacttcagctactcgggcatcacggaggcgatgctctccaatgagacgcgtaccatacgcgacgttcaggcggtgctgatgtccatgttccatgccaaaaccgtgctcgttggccacagtctggagagcgatttgaaggcactcaaactcattcacgacgttgtggtggacacatcggtgctgtttccccacaagatgggaccgccaaagaagcgagctctgaaaacactgtgcattgaaaacctaaagcggattatacaggagagcggtgagtgtgtctagtcttttactttatcacttgacgtaagaagtttattataattattatatttccttcttccacagaggctggccacgacagtgccgaggatgctgaggtgtgcattcagctcatcaagtattatctgcgcaacaaaatcagttgagctgctatcacgcaccatcgcaagcattcagttcaaaagcattacgtacatctgttaatatgtatatcatgcccatcaaaaatcaaagccttagcctttaagctaaccatattatgtaaaatcaaactgtataaatatatcaccaagcgatgacagcgaaaaataagtaaagcttgctttaaatgccaatttaaagtgattgaagtgtggcacatggaacttaaagaacgctgtacagtacgctacggatttggcgagtcctttgaagaatttcttacctcgagccttcaaccaggtatatttgttcatttttctctatttttgccttgcccatttttccttgcgttttttccattctcttcactatcgataacaattcaatgaaaagcaattggaaagttttgtaaagttttttacctgccaccgcgttacaaactgtaattgcaagtttcgtgcctgacgcacatcacagaatattcgccgctgccctcgtcccgcccccaggttggccgccttgtttttgttgttattatttaaatgtaattttaatcagattgcggcgatactttatatttttcaattatactcggcctcgtctgctggccgtgggcaccatctggatattggcttctggttgctcctcactggcgcatgatttttcaattttaacgttttataattttccgttctgtgcgttccggtaaaagtttggcttattgagaatgcagccaaagtttcagcacttaattcggcataattgttgcccccggccagctccagctccaccgaatgacaggaggagccataggcattaagtgggatcccaaaccccaatccttgcgggaaatggctgatggcgacacgtgtttatctattgagctggcacaacacaacctaacgaaaagtaaataatattagtgctacttggcaatgacaatgtgcatatgtggcccagtatgaggagcaggcccaacggccacaggagcacacacaagccagg

SEQ ID NO: 29345 - DNA, 3136 bp, DROSOPHILA
tcgaaatgagtgaaagagacaggcagaaagaatagaaagaaatttgggacgcttgttttctcaagcggctttattaaatttctaatcccagcaagaggtggaaatgctgccatccacgggtctctttaagggcttcttgtgcccttactttgacggccaggatgcggcgtcctgcaagcgccccttttgccactttaagcatgctcgcaaagacgaattggaggccgctccacctgcagaaccttcccccgtgcccaagtacaagccggcacccaagttgctctcccttccactgccccagatcacgctatgtgcgccccggaagaagtccaatctggagtaccacccggagaagccggctcttgacgcatcgccggctaagaagaagcaggaggcgtccgtggacagtgctcccaaatatgtgcccggccagccatctgttacaaatggcgaagaatatgacgattggcaggcggtactcgaaaaggaaattgatgagcagatgcaggtggagattgaggagcaagtccagaataacgacgaagaacagaagatagatacggtagctgaaaacgaggaggaccaggagaatacgcaactgacggatgctagggatagccacgaaaaggatcgaaagcccagcaaggagcgggaaagggatatagaaaagaagaagatcagagagctgaaaagggaaaagatcaaagacagggatcgggaccgggaccgggaccgggaaaaagacaaagagaagagcaaggaaagggacagagagaaggaaaaaaatgatagggataagcgaaagtcctcccacagcgacaaggagcgctccaaggagcgaaatacttcaagctcaagttcctctaagcacaagtcttcatctagctcctcttccagcaaaaagtcatccagcagcgataagcaccgcgacgacaaaagttccagtagcaggcacaagagcagttcttcatcatcctcctcgaagagccatcatcacaaatctagttcctcgagttcacggtccaaaactaagaggagctcgtcttccagcaaaagcgctggcacttcaaagagcgaaccggaggcggataaggatactgaagcagctgtactgacaccagcagaacctatggatgatctggatgacatggactttgattttgaagcagacacctcggaaggagaaattgtacgccagtgtgaaatgatttttgacgagatggaaaaaaaatttgcgcagatgcacaaggacgaaggcggcaatgccaacccggagagttctcgcaagcgcaaagctccttctccggacattgataccttcaccgaggcagccacggcggctctgcagaagcgccgggtggcccacgagaatgctgacaagatcacgcctcatttggctccttcggcggcgatgcgcaaacccaatcacgtccgtaatgccatgcaggcgatcttcaaccgccgcgcggagctgcggcgccaggagaagctacaagccgaagcctcagcggagcaggtacgtcaggcacaggagcgggtgcgccaagcgcaggaggagctccgtcaggccaaggtcaactccaacctcacgccacttatttcgcgaagtgctctgaccccaccagtgcgatcagctcgcagcatagcacctgtggccaacattgtggccatcgctcgggccaaaaaaaagatcgaggagctgcaggccgagaagaagccagcctttacgcctgcacaatcattcaagggcgccggccgtgtggctcacaagcccactgctgcgctagacaaagcggctcctgtgtccaacgcggagaagccaaccgtcctagatcccagcagctccaagatatcatacaacgtgcgcattcagtattatgagatgatggtaaggcactgcaccgtcatctatccgcagctggcagatgcctgggagcgcgcccaggtggaggagttgaccgtctttaagaagtgcaacacgcctgccatctacaagaacagctgcatgctggcgattaacaagctccgcaaggaggccttagaggcgggaaacaagccgagcgtagcctgcaagactgtgtcgcacgagatgatgctgggcggcaagcgggcgctcaccacatcctggagcgtagagaaaaagggaaaactgagctccttgggcaatggcgaacctttcgatgctttagacgccgagaaagcttacaaaatggtattcgatcttcgcctgactgaagagcagctggtggagaacggatatccgcgtccgggcgataagcgcggatccgcagtgatacgcgcctgccgccccaaccgtcgtcccaaccagaaagagcgctactgttcccgctgcggcaaggtattcagcttggacatatacgagcaccagagctttgacatgtgcaactaccatccgaaaagcacgggatatcgacgaggattcacggaccaccagcatcgctgctgccagcagccggcgggcactccaggctgcacctatgccaactaccacgtcagcgactattacgatccggaaaagctcacctgtttcgtgaagacgatcgaacggggtgaggaatttgtgcccactaagaaggacatatatgcactggattgcgagatgtgttataccacacacggaatagagctaacccgcgttacggtggtggacataaatggacgcagcgtttacgatgctcttgtcaagccggacaaccagattgtggactacaatacgacgtgggtgaatgtagcttttcggttgtttcgtattaatctgcaatactctgacttcagctactcgggcatcacggaggcgatgctctccaatgagacgcgtaccatacgcgacgttcaggcggtgctgatgtccatgttccatgccaaaaccgtgctcgttggccacagtctggagagcgatttgaaggcactcaaactcattcacgacgttgtggtggacacatcggtgctgtttccccacaagatgggaccgccaaagaagcgagctctgaaaacactgtgcattgaaaacctaaagcggattatacaggagagcgaggctggccacgacagtgccgaggatgctgaggtgtgcattcagctcatcaagtattatctgcgcaacaaaatcagttga

SEQ ID NO: 29346 - protein, 1010 aa, DROSOPHILA
MLPSTGLFKGFLCPYFDGQDAASCKRPFCHFKHARKDELEAAPPAEPSPVPKYKPAPKLLSLPLPQITLCAPRKKSNLEYHPEKPALDASPAKKKQEASVDSAPKYVPGQPSVTNGEEYDDWQAVLEKEIDEQMQVEIEEQVQNNDEEQKIDTVAENEEDQENTQLTDARDSHEKDRKPSKERERDIEKKKIRELKREKIKDRDRDRDRDREKDKEKSKERDREKEKNDRDKRKSSHSDKERSKERNTSSSSSSKHKSSSSSSSSKKSSSSDKHRDDKSSSSRHKSSSSSSSSKSHHHKSSSSSSRSKTKRSSSSSKSAGTSKSEPEADKDTEAAVLTPAEPMDDLDDMDFDFEADTSEGEIVRQCEMIFDEMEKKFAQMHKDEGGNANPESSRKRKAPSPDIDTFTEAATAALQKRRVAHENADKITPHLAPSAAMRKPNHVRNAMQAIFNRRAELRRQEKLQAEASAEQVRQAQERVRQAQEELRQAKVNSNLTPLISRSALTPPVRSARSIAPVANIVAIARAKKKIEELQAEKKPAFTPAQSFKGAGRVAHKPTAALDKAAPVSNAEKPTVLDPSSSKISYNVRIQYYEMMVRHCTVIYPQLADAWERAQVEELTVFKKCNTPAIYKNSCMLAINKLRKEALEAGNKPSVACKTVSHEMMLGGKRALTTSWSVEKKGKLSSLGNGEPFDALDAEKAYKMVFDLRLTEEQLVENGYPRPGDKRGSAVIRACRPNRRPNQKERYCSRCGKVFSLDIYEHQSFDMCNYHPKSTGYRRGFTDHQHRCCQQPAGTPGCTYANYHVSDYYDPEKLTCFVKTIERGEEFVPTKKDIYALDCEMCYTTHGIELTRVTVVDINGRSVYDALVKPDNQIVDYNTTWVNVAFRLFRINLQYSDFSYSGITEAMLSNETRTIRDVQAVLMSMFHAKTVLVGHSLESDLKALKLIHDVVVDTSVLFPHKMGPPKKRALKTLCIENLKRIIQESEAGHDSAEDAEVCIQLIKYYLRNKIS

SEQ ID NO: 29347 - DNA, 4566 bp, DROSOPHILA
gttgggttagtggtgaaatatacttggcacatggcaatgaatcactcactcaggctgatcttgccgccgaaaatggagcccttgtcgaaggcatccttccacttaaagggtatctgaagttcgctaaccgatatcttggtctccagcgcacaaatctggtcataatagctggaaatacagagcaggcaacaaaacccggaggcaaaacatttagttaacgactacgtcatccgagagcttgtttacgtctgaccaccacaccaatacagaagcaccaggtggaatcgaatcgaatggaatgggtgtgattagctgccccgttgtgcgggtgactcatcgggagattcccggaagaaggccacaaagacatggtggtacttacgcgtacacaatctccagcgaagcctcgtacttttcaaagaatttccaaattgccgtattgcgttgtttcgaaaattcgttgacggcctctccgtacttgcccttctcctcctccgacgcaccgttgtaggtgctctggatgagattgttcagcggcttgatcacatccacctccgacggcttcttcagcggcacgcccagaaacttcgacatcttttcctgttctgcggagtctgcttcttgtccgacttctgattccaagtgatattaattaatcgtctgtcgctctattcgaactccgctttacgctctctttccttcccctacaacagctggccagcgatgtccagccgtcgataccgttttcgatagccactaaagaaatactaaggatttagttctatacttcaaaggtgaatttttgtcaaagatacttaatattgtaaactattaaaaaaaagtaatagaatattttttctatgttctatgttctatatgttttttattactaacatgaaccggtaactaccagagctgccactatttcaatacgtatgcacattgctacgtttctcgccctgtcgttacgttttcaacagtgtggcatctctgcggcgagagaaaggtaaccctagactttctattttctgattgcgttgttgtcgagaaaattgtgcgaaattattggttttttcttagaatttaccgtaacaagaagcacgcttactagagtagttaggccttgtcaagaattcgcacgtgagttgatatacggagccctggcttggatatcccagtgacacctagaatcccgttctatgtcattccgcagaagaagcagcagcagcagtagcgaggcagaaaaccgaagagaccccgcgatggccgaagtggagaaaccaacggcggccacgcccccgaccgacatcccccaggccacggctgcacctgccagcgaggcgccagtggctgtaacgcccacagcggataccaccgtggacgtcgagccgggcacctcgcccacccaggagcccaactccaattcgcatccgcacgactccgagtacgacacggccagtgatctggagggcggagaggactatgacgacgaggagagtgccagcggcagcgccagtggcagtgggagcgaggaggaatctgagacggacgacgaggacgatgaggtgggcagcgaaacggacgatggcgaaggggagcaggcgatggaccgctccgtcgcagacagtgaggcccagaagaaggtggacgaggatcgcagcaatccgcagtacatcccaaagcggggcactttctacgagcacgacgatcggacggcggagaccgagggagaaatcctgatcgaacccgaaaacggtgctggccaggcggcggcggagccaaatggcgaactcaatggacttgcggccgccggtgccacgccgactggccaaacgccacagatctcacaggcatcgaagaccatgcgaaaatggcaaccagcttcaggcggtgatcgctggtctcacgatcgattcgaggccacggagcaggctcccaaatcccgtgcagagttgctgcaaacatacggctacgacattagaaacgaggacgcaccacccagagccagacgtcgccggcgatatacgcgtgggcctagtaaatactcaagaaactgggaggacgagcaggcctacctcaaagccagcaataaggagcgcaagccgccgcggccacaggacttcccggcgctcaacgaaagaaagccacgtggtccacgaacatcatcctcgcgtgaggaaaaggaaaaccgacggtccgtcgctgctgaaggcttggttccagagaagcaacagcccttggccagtagctccaatccacacagatcccaggagcgtgaacgtgagagggaaagggagcgggaacgcgatcgagagcccaagaatcgcaacttcgggcggatgaacggcggccccggacgtcagaatggcatggaatttaagaagaacaaccgtggacagcagctaagagagcgggagcgggggccagaccaactggacaaccgtaaccagaagccatccactccacgctccaaccaacaacaacagccgcagcagcaacctcatcatcagcaacagccacagcagcaacgacagccgtcccagccgcagcagtctccacagacgccgctttccacgtcgaacctttcgcagcggctccagcaggtgcagcaacgcaatgatcccagccatgtgggcagtgtccagatgcattctctggctagccaaaatcaggcgcctcagcagcagcagcagcagccactgcatcaggaacaacgaaatgcgcccaagcgctactccagcttgcgtcgctcacagcaggaggcatcacagcacttggctgagcagcagcaacagcagatgcagcagcagttgcatcttcaacagcaacagcagcagcaacaatcgcagatcatgattcaggacccccatgttctgatgcagatcgcctatcagcaacaggagctgcaggcccaactgcagaccatgcaacttggaccacctactgccgcaggagcagttccaacaccaccaaagccacatgccccgccggcagccgcatatccgcaagcacaggcggcaccgtactatgtgaccggaacggagccagttccagtgcccgttccccaggcaccgtatgttaatccggctagtgccgcttacttgccaaccactccggctgccgtggcgtacgcccaagcagggcctccggttgtaacacaacccacaccgccgcccgctcaggcgccgcccgcaacgcagccggctcagccgtatcagaactacaacacggtcggtggcacaacctactttgtaccgccggctcaaaccactagccgaccaagtgctctgccccagcgtcgtcccaccaacgcgattcccattctcccgccctccgaaaagcataaggtcaagggtggagcgaaggaggagggcatctcggacaacatagatcacatcattgacaacatgttcgtgcagcgaccttcggccttccaggctaccggcgaaggcgcaactccaggtgggggaacaaaggaagaggcggcagccactccaccggctgccgagcagaaccttcagccagttccggccactgggcaggaatgagtgcaggcgtacgccggcttgccgccacagcagcagcagagacgaggccaacggatagcgccgccgccctcctccggctactcaatgctgcagccgcacgctggctactatcgacctccgcccccgccgcactagtgcggacagcccagctcctaactcaactcatacgattttttttcccccattctgtccttgggtctgcgactcaaaaagtactgcataaataaagaaacgcagtgagaaccacttgtaattagcatttagctcccagataatcgaaattactaacgaaaagttttcgtatatagacgattatatatatatatattgtaatccggcgcaagctccaattaatttgtacgtagtatctagggccggctaacgtattgaagcggctgggcgcttagcttatttagccgcattttagaattgaaacacaagaattaccgagagaaatgtatttgcaaaaactaatcgatcattgaatttaaataaacgtttaacacgaagttacaaatgctgcacaccctttctgtcaaactacaaactaccaacgaagtctgcgttttcacttagtttccggtgaaaggtgggttgaactagggatccaatttcaaataaaaaatatttaaattcgactgttcgttaaaatctaggtaattgtgctaattgaaacaaaatggaaagaaaaaccaaaaatctactttctgattggaactaaaaatgagaactgaatttcaatgacgacataaagtaagattagatcttttcttaatactagatgagcttttcatagcttggattccttggccaattgttccaggagaacgctgatgcggcggaatgagtccttgaaaatgtcgttgaacttgcgagcgcttgtctttaggctatcccgataggcggtggtattaatgaacacactagaatgtacgaaattaaagaacaattcaagataatggaggagtgtctagcttacgcttccgaggtgatggagtaaaagacgccatagccatcg

SEQ ID NO: 29348 - DNA, 2493 bp, DROSOPHILA
agaaaggtaaccctagactttctattttctgattgcgttgttgtcgagaaaattgtgcgaaattattggttttttcttagaatttaccgtaacaagaagcacgcttactagagtagttaggccttgtcaagaattcgcacaagaagcagcagcagcagtagcgaggcagaaaaccgaagagaccccgcgatggccgaagtggagaaaccaacggcggccacgcccccgaccgacatcccccaggccacggctgcacctgccagcgaggcgccagtggctgtaacgcccacagcggataccaccgtggacgtcgagccgggcacctcgcccacccaggagcccaactccaattcgcatccgcacgactccgagtacgacacggccagtgatctggagggcggagaggactatgacgacgaggagagtgccagcggcagcgccagtggcagtgggagcgaggaggaatctgagacggacgacgaggacgatgaggtgggcagcgaaacggacgatggcgaaggggagcaggcgatggaccgctccgtcgcagacagtgaggcccagaagaaggtggacgaggatcgcagcaatccgcagtacatcccaaagcggggcactttctacgagcacgacgatcggacggcggagaccgagggagaaatcctgatcgaacccgaaaacggtgctggccaggcggcggcggagccaaatggcgaactcaatggacttgcggccgccggtgccacgccgactggccaaacgccacagatctcacaggcatcgaagaccatgcgaaaatggcaaccagcttcaggcggtgatcgctggtctcacgatcgattcgaggccacggagcaggctcccaaatcccgtgcagagttgctgcaaacatacggctacgacattagaaacgaggacgcaccacccagagccagacgtcgccggcgatatacgcgtgggcctagtaaatactcaagaaactgggaggacgagcaggcctacctcaaagccagcaataaggagcgcaagccgccgcggccacaggacttcccggcgctcaacgaaagaaagccacgtggtccacgaacatcatcctcgcgtgaggaaaaggaaaaccgacggtccgtcgctgctgaaggcttggttccagagaagcaacagcccttggccagtagctccaatccacacagatcccaggagcgtgaacgtgagagggaaagggagcgggaacgcgatcgagagcccaagaatcgcaacttcgggcggatgaacggcggccccggacgtcagaatggcatggaatttaagaagaacaaccgtggacagcagctaagagagcgggagcgggggccagaccaactggacaaccgtaaccagaagccatccactccacgctccaaccaacaacaacagccgcagcagcaacctcatcatcagcaacagccacagcagcaacgacagccgtcccagccgcagcagtctccacagacgccgctttccacgtcgaacctttcgcagcggctccagcaggtgcagcaacgcaatgatcccagccatgtgggcagtgtccagatgcattctctggctagccaaaatcaggcgcctcagcagcagcagcagcagccactgcatcaggaacaacgaaatgcgcccaagcgctactccagcttgcgtcgctcacagcaggaggcatcacagcacttggctgagcagcagcaacagcagatgcagcagcagttgcatcttcaacagcaacagcagcagcaacaatcgcagatcatgattcaggacccccatgttctgatgcagatcgcctatcagcaacaggagctgcaggcccaactgcagaccatgcaacttggaccacctactgccgcaggagcagttccaacaccaccaaagccacatgccccgccggcagccgcatatccgcaagcacaggcggcaccgtactatgtgaccggaacggagccagttccagtgcccgttccccaggcaccgtatgttaatccggctagtgccgcttacttgccaaccactccggctgccgtggcgtacgcccaagcagggcctccggttgtaacacaacccacaccgccgcccgctcaggcgccgcccgcaacgcagccggctcagccgtatcagaactacaacacggtcggtggcacaacctactttgtaccgccggctcaaaccactagccgaccaagtgctctgccccagcgtcgtcccaccaacgcgattcccattctcccgccctccgaaaagcataaggtcaagggtggagcgaaggaggagggcatctcggacaacatagatcacatcattgacaacatgttcgtgcagcgaccttcggccttccaggctaccggcgaaggcgcaactccaggtgggggaacaaaggaagaggcggcagccactccaccggctgccgagcagaaccttcagccagttccggccactgggcaggaatgagtgcaggcgtacgccggc

SEQ ID NO: 29349 - protein, 761 aa, DROSOPHILA
MAEVEKPTAATPPTDIPQATAAPASEAPVAVTPTADTTVDVEPGTSPTQEPNSNSHPHDSEYDTASDLEGGEDYDDEESASGSASGSGSEEESETDDEDDEVGSETDDGEGEQAMDRSVADSEAQKKVDEDRSNPQYIPKRGTFYEHDDRTAETEGEILIEPENGAGQAAAEPNGELNGLAAAGATPTGQTPQISQASKTMRKWQPASGGDRWSHDRFEATEQAPKSRAELLQTYGYDIRNEDAPPRARRRRRYTRGPSKYSRNWEDEQAYLKASNKERKPPRPQDFPALNERKPRGPRTSSSREEKENRRSVAAEGLVPEKQQPLASSSNPHRSQERERERERERERDREPKNRNFGRMNGGPGRQNGMEFKKNNRGQQLRERERGPDQLDNRNQKPSTPRSNQQQQPQQQPHHQQQPQQQRQPSQPQQSPQTPLSTSNLSQRLQQVQQRNDPSHVGSVQMHSLASQNQAPQQQQQQPLHQEQRNAPKRYSSLRRSQQEASQHLAEQQQQQMQQQLHLQQQQQQQQSQIMIQDPHVLMQIAYQQQELQAQLQTMQLGPPTAAGAVPTPPKPHAPPAAAYPQAQAAPYYVTGTEPVPVPVPQAPYVNPASAAYLPTTPAAVAYAQAGPPVVTQPTPPPAQAPPATQPAQPYQNYNTVGGTTYFVPPAQTTSRPSALPQRRPTNAIPILPPSEKHKVKGGAKEEGISDNIDHIIDNMFVQRPSAFQATGEGATPGGGTKEEAAATPPAAEQNLQPVPATGQE

SEQ ID NO: 29350 - DNA, 4134 bp, DROSOPHILA
ttatgctttttgatgtcttttttgtgttttgttgtgcttttttggcgactcgggcgcataattgttttcgcagcttatgttttcccaattcggcgaccaagtctgctgactcacgagcgttgaacttttcacccgtatccgtatccgtggcacatggagtgcgcggcctaagtagatttaatgacttgtagtttcgcaactgagacgtaaatcacttttatgacaactggaggatgggaccttctcatcgattttttacggccgtcgtcatcaggggatgcgccatacccatacccatacccatacccatttccatttccatactggcaatcaaatgtcggctaacatcgctttggacgaatgtgcaacaaattctgggccatcgttgtcgctgttctagccacttgttaacgccacttccgcccgtcatatcaaaataattatctcaaagtgttggctcaactctggagtcccgggattcaaccaaatacagcataagccataccataccaaactgaatcgaacccaactgaaaaccaagactcgtttgcgtgcggggcagttcggggttccatgtggcactactggacaagttgatctgcagaacaagttactcacgcaatcttgattgcaattatgtaattcgaaattcctactaattaaaccaacatttcgcctaatcgtatttgcacttgaaacacgctcgaaatcaataagatcgttgataccctgtacgtggtattggaaatatgttagcctgttgacgcctgttactgtttgcaagtaaagcgaaatttatttttaacacaatttaacacaaatttttaaatgcataccattaggtgggttaacatacataacataacatgaattccaaatatataaattaaaaagcctgagttcgattacaatcttaagcaaattgccatattgaattgatttgttttgccaaataagttatgcctataaaagtcagcatttgtacacacgtcctaccaaaatgaggctggtcatcatctacgcggccatcctggccatctttgccattgtggcatccggtcaaaaaggaaagtggaaagggtacaaggacgaggagatggggaaaagcagctactggaagaaggtcggtaatgctgaatcgatcgttggaaatgaaataaacagcattgattgaactaacttctaagtgatcgaaatgaaatatataaatcaaaaatctaaatgaaaaagtcggttcttttatttgcaatctcaggcaatgtaaatttatttgattaatttgatctacctggtattagtaaaaagaaaagggattggaaaaagtccaatggatggagtaaacaggattgatctaagggatacaaatttttttacgcttcaaagtaaattaataacgtaattatagttaatcattatataatatacaatgtaattaaatagaaagtatgtgtgacaattggattagttggtttttaatttcaatgacagcaccataatccatagagaattatttagatccacttaaaaggttttgagtatatatataaggcggccaatagaagccagtttaaccaaaaatgaagttactaatcctgttcttagccgcattgggcgcagcctccgcacgaataaggggacacactatcaaaggatgacgaggatgtccaagtgaatcaccagctaaagcaaggatattatgtatatctaaggaaatcaaataaacttgcatgctctaaaaacatttctagtagaatcataaatccatcattaagcgggggcatagtgaaattgaattacacgttagattagattacgaatttaccagagctgagaattccatttaatttaaatggtcccgccaaaaaacgttctatttgcagtgtgaccatagcgcaatgaagttctatttcatactggaccaggaaagtaaacaaaacatggaactgagctccaaacttagggatctcatcctgaacacccacgtcccgctggtcctggagcagtttccgctgaaatgggagtgcttcgagggatccctccacgactggtgcaagagattcgacaaggaggccacctgtttgccagccttcgagctgatggccttggcggacagcagtacgccgcaatgggagcgaaagcgcaccaaatcctctcagctgcttaacatgcagcaatttctgcgaaagtacggtgtcctggatggggatagcacccactgggcggcgtaccagtacaagaaagccgacgaagtgccacttagttgccgcagcggcatcggtttctccagctttggcttcccggacatcggcaacgactaccgcttctggctgggatcggagcaggccaacacgccgtgtcactacgacacctttggcgtgaacatagtggtgcaggtgcatggctgcaaatcttggctgctctttccacccgaaacgccgctgcagagcaccaggataccctacgaggagaccagtgtctactgtctggagaacttttacgccccggatccggcaaagatttcgagctatgagcatcttggccggcaagcctatcactgcaatctgcagccgggcaacgtactaatcgtgccgcgtcactggtggcactacgttgaggccaaatccacatcgctgagtgtcaactactgggtaccgctaaaggtggatatggacctgattttggacgagttcctggtcatgcacattgtggagagctttgttaggggtgagagcaatcaagttaagcagtatctgctcaatcccaaccagctggataatgtgtctaccaagcccagcgacctctttgcccagttcgagcaggcggtgcagaatttagagagtggcaagagcactcgacagctctacgataccgactacatcagccaagcggattggaaaactttgttgaacagtatcaacctgtcagtgcgtcctttggaagtgatgccccacgaggagtacaaactgctcctcaacgccaactccaagagattccgagtagctgccaatccaccggagacaactcccattagttctaattgcgagcttttagtaagcagcatgtgtgctccacgggtaattgccgaaatgaagcgcgagttctttcgcaggctaggaaaaagtaactcactctagcttaacacacgtgtctagggtaagaacgtttactgtgatacgtgataataatgttttcatatatgagattaaaatccaataagccatcaacatgtatgatacaatttccaaacagaaccagaacacggagcattaaatgccgaataccacccatcttgtctgcccaccatccagactcatctgaggctctgccatgcgattgacccttgggcggaacggactgcgcacatgtggacatgaacttgattacagctacagcgccatttaccagccaggtggcttctggttgggatatccaccctgctggttggcataactgcctgggtatgttccgtagtggccgggtggcggtccctgcgggaatccctggtactgatagtctgcagaagatgatcagcattattgaagattcattttaagcggtgacgttaacttactaccaggatacggcaaggtggcgtatggattgaagctctgcggcatcggagcgggcacataggcggggtagggcacacctggctgggctccatatggaataggcatgccttgcacttgggccggatacggaatgttggccgttgatgcggcaggtggcacactaggtgcggagccaggtggaatatctaaaaagaaatggacggtttatatattctgttaagttcggcttaagatgcttcactcaccgctgccactgcccgatgtggatgcatagtgcgagggaagggctggagtggccggacatgcctggcggctggactctgtggtcaagtccttgagcagctcctccttctctgtcttgcgggcgaacacaaagtcgctgatcttgttctggaacacaaccagcaactgcgtgaggtcgttgtagaacttggtgccctcctgcagatttccagaaagttcaatgtagctatcgaaggcggttgctagctcctggtataaagtatcccgcgagctgccgcagctaccagtttcagagacaaaggcaccatgggcgctttgg

SEQ ID NO: 29351 - DNA, 1377 bp, DROSOPHILA
atgaggctggtcatcatctacgcggccatcctggccatctttgccattgtggcatccggtcaaaaaggaaagtggaaagggtacaaggacgaggagatggggaaaagcagctactggaagaagtgtgaccatagcgcaatgaagttctatttcatactggaccaggaaagtaaacaaaacatggaactgagctccaaacttagggatctcatcctgaacacccacgtcccgctggtcctggagcagtttccgctgaaatgggagtgcttcgagggatccctccacgactggtgcaagagattcgacaaggaggccacctgtttgccagccttcgagctgatggccttggcggacagcagtacgccgcaatgggagcgaaagcgcaccaaatcctctcagctgcttaacatgcagcaatttctgcgaaagtacggtgtcctggatggggatagcacccactgggcggcgtaccagtacaagaaagccgacgaagtgccacttagttgccgcagcggcatcggtttctccagctttggcttcccggacatcggcaacgactaccgcttctggctgggatcggagcaggccaacacgccgtgtcactacgacacctttggcgtgaacatagtggtgcaggtgcatggctgcaaatcttggctgctctttccacccgaaacgccgctgcagagcaccaggataccctacgaggagaccagtgtctactgtctggagaacttttacgccccggatccggcaaagatttcgagctatgagcatcttggccggcaagcctatcactgcaatctgcagccgggcaacgtactaatcgtgccgcgtcactggtggcactacgttgaggccaaatccacatcgctgagtgtcaactactgggtaccgctaaaggtggatatggacctgattttggacgagttcctggtcatgcacattgtggagagctttgttaggggtgagagcaatcaagttaagcagtatctgctcaatcccaaccagctggataatgtgtctaccaagcccagcgacctctttgcccagttcgagcaggcggtgcagaatttagagagtggcaagagcactcgacagctctacgataccgactacatcagccaagcggattggaaaactttgttgaacagtatcaacctgtcagtgcgtcctttggaagtgatgccccacgaggagtacaaactgctcctcaacgccaactccaagagattccgagtagctgccaatccaccggagacaactcccattagttctaattgcgagcttttagtaagcagcatgtgtgctccacgggtaattgccgaaatgaagcgcgagttctttcgcaggctaggaaaaagtaactcactctag

SEQ ID NO: 29352 - protein, 458 aa, DROSOPHILA
MRLVIIYAAILAIFAIVASGQKGKWKGYKDEEMGKSSYWKKCDHSAMKFYFILDQESKQNMELSSKLRDLILNTHVPLVLEQFPLKWECFEGSLHDWCKRFDKEATCLPAFELMALADSSTPQWERKRTKSSQLLNMQQFLRKYGVLDGDSTHWAAYQYKKADEVPLSCRSGIGFSSFGFPDIGNDYRFWLGSEQANTPCHYDTFGVNIVVQVHGCKSWLLFPPETPLQSTRIPYEETSVYCLENFYAPDPAKISSYEHLGRQAYHCNLQPGNVLIVPRHWWHYVEAKSTSLSVNYWVPLKVDMDLILDEFLVMHIVESFVRGESNQVKQYLLNPNQLDNVSTKPSDLFAQFEQAVQNLESGKSTRQLYDTDYISQADWKTLLNSINLSVRPLEVMPHEEYKLLLNANSKRFRVAANPPETTPISSNCELLVSSMCAPRVIAEMKREFFRRLGKSNSL

SEQ ID NO: 29353 - DNA, 7838 bp, DROSOPHILA
ggggggggtatggtgggatgggctcggacctggccaagtcgcggcgacgtcacagtcgttaagcgtgacttttgttattgttgtttgttgccttttgcataccgtcggaaaaatgggtaaaatatggtgtggggcaggcggcttggggcacgggtacgtaaacaaaaagccgaactccaaactcgcagacgaagccagtccacgaataaccaaaggcggagaagaaagagccaagaatcgttctgcaagcagcgaattccgaatacccttacatttggcaaggatatggacggataaacgtaacttattttatataagaaattttaagaaacaggcaagcatttcaaaatcgaattaaaaagtatgtcataaaaactttaaatttaaaaacttaagacgttacagtctaatttaaaaacttaataatataataagactaatgaatggatgtaaaattctatcttagaaagcaggaaatacatatttgcatagcaactaaaaaactcccagttcactttcttccgagaatcagagtgtttgtgcccgggcactggtccaacccaacgtggtgggttagtcatgttggccactcacacatggcgcagctcccagctgaactacccgaatccactcggtggcttcgttctgtttctgtggcataaactgcgacgacgaccggcccgcttcattcagtctttggcgagattttatcgtgtgcggacgtatctgcggtcgaattgcggaacttgaaaatccaaatccgagtggcaaagataccgaatttcgaactgaaaaccgtgctcgtagttgacgcgaatttttagatgcactttctcagcatttggcgccacaagcaaaagacttagaaactctaattcgattgcgtttactcgaaatcgttgcttgccacatgctaaaagtgtcagtcggcaagcacaagttcatcaacatgcgtccaagctggatgggaacggcggcctggctgctggggtaagttgccaggacatcgtggatccgctctagctgcgcatgagattccagcgtacacgatccttgctcgtctgcgtggccacctcgtccatgaccaccgcttcctttgtcttctcctcttccgtttgggtttcatggtttctgcgggacatacaatatgtacataagtgcagattggctatggcgatctgagtcacctactcgctgggcacgcgttgcctggtgcggtgcatgtgcagaccacagcttttgcacttcatcgtacagtaccacgagggaccaatggaacacctcttgccgaatctgcggatggagggatgtagggatgtagggatgggcgcttttagttgcctgcgaaatcagcttttattgttattggcctggcaaatctcactgggggaagtattcctgctcaaaatctataaaaatatttctgttctttatggaactcgcatatagcttggcattcttataaattaaaaattggcggaatttccctgaagtgatttaagatgaacgtgtgaaaatgtaatatatgcgcagctgtgctattctgcttatttgcgtcatgtgactttagttacctatggaaaatggaatgtatataacgaaatttgaaatattctttccactcttactaaatcattcaaaatccgcaaactttcttcattaccttacaatcctgtatttgggcttcaacttgaaggagtctttcttggtctccgcttcgcccgagagattctcccttgactcgctatccccgatctggctcgacaaattgggtgtcattggctccaaggacgcctctctgggcaggtccaactccattcgtatttgcttgatttggagcattgtgatatcaaccagttgattgacggcttccagcacctcgttctggatgaggtcgctctggttctggatagattcttgtatgaggtacagggcctggatatgcggtttgattattatctcctcgtcgtcgctggtctgggtactggtgtgttggtggtccacattggtttgcaccgtggcatcggtacactgaaccgtcgcttggatgcccagacaggcgttgaccagcttggtctgcgtggtgatggtcatggtgctcaattccgtttggctggtgcgatagttcagttcgttactatctgtttggctggcaaaggtcccatgttcgggattgaatgtctgctgatccttggaaacggctatgatcaaatcggaggtgtccacatgactggtaatacactcttggatacgcgtttggctggcactactgtccagatgcactgttgtgcccacagcaatcgtcgtaaattgctggtcgggatcgggggtctgtgattccgcggagttggtgcaaatcaagtccgcggtgtccacctggctgctgaggcagtcctggtgcggcgtttggctggtagcgctttccatcaccaaatctacgcccacggctatggagttgtgttgcagacaggtttgagtgcacccatctacccgtgcaaatggcggcttggcgaccactgtggatgcacttcctccatgcaaaatccgcttcagaagacgacgacgtctgtgcagacgactggccaaggagggagtgcgtcgaatctgcttcacatggcaaatcatcagcttacccttctgcagctcatagtgcaccaagtagctcacttttccgaagttgaatctcttgtggcgacgtatgactccattcggactggtggacatggaaaccagtagcaattccttcagatcaaagcgcattttgaataaccccttttatttttcactctctgcttacaatattttcacaattatacaacgtacaattttgatgagaacgtttgatgtgcactaaattccaaggactctaagcttctgaattactcgtattatagatgtccgggccaaaaacagttcaaaattatcgaaggtgatgtgatgtggtgtcgttttggccgaattttcacacgaaaaccctttttcgaatgccttgtctttcagaacacagaacgcaacacgcaacctcgtgttgcacatacatcgacttgtgttgcatggctgcgggctcctttgtgcctggtaattcattaataattcaaaaatgccgcatatgttcgggaccagcaggacggcagctacaaaataaatacgaattgcaaaaaaaaaaaaaaaatgcattcacttattctgcaatttatcaatacggagttaacatgaaaatggccacaaaaaccacagcgcagacacacagaggacacaaaggagcaggagcaatccgcctggggtgtttgtttggcttgcatcgggatggggatggggttgggaatgaggattgggttggtaatgggtgatgggtgtgctccatggttgtggatggagcactccagacgatggcagcatgtggtggccagtgctaagtacgtgttgatttgggcgctttcgattgggctcccatggatttgcaatccacaaaatcgattggcccccatattcccataaacccgtccatcagttccagctgcctgctccagctccctgctcctggtcctgctccctgctccctgctcccgactggcctctaatcccgcctggaggcgttgttggtttcctcgccttcctgcactcgaaatttatgcagcttctttggcttctaaggtttttgagctcttttttcgttgtgtttttgcatgcattatctttgggagctggaaggctaagacttggctccgaatgccgggcacgtcgtctggccttcggttacatttattgcataaagcccagccaatttccatgataatttgtaacgagcgccggaccgccaaggggctgcactcactcccatgtggaactatctggaactatgaggaactatgtggtactatgtggtactttgtgctctggcttagtcggtcaatagcatttcgcttgacaaagtcgttgagccgatcttccagagacctcaagaccagctgaaagtccagcaatctaatagcatattgttgcattctgagcgaaaggcatcggtgattgcaacaccaacaccgatgggtggagatatgtggaaggttctaatgctcccatggctcttgggtttcccagctctctcacccatgatagccacacacatcatacccgtaattgtacgtgcccatttgcatttttatctgctttgttttccgctttcttcctcattaccacttgacactcgagcaacggcgagtgtagttttcagtggtttccagtttcccagtttcacactggagctgccccccctcccaacaacatctatttaaagttgagcactcgacaccggtgccgccccgaaatccgacgcgaaatgaagacctcgagccatctcagctgtcaaagggagtgccgccagaacgaccctgaaccttggagcccaagccgcaggccacctaatcccctatagaatttcgcgcataaaaactgccagtgccgccggtccataaaacgctgaccattaaagctgtgttcctccattccgcaggctctactgcctcctgtgcatcgccgcgatggtcgaaggtgccagcaattcggtagctctggctgcgcccactgcatccgctgccaaggatgtcgcccatatgcacaggtcgaagaggctggacaggcgatcaggagcgggatcgagtcctctgacggctatcaagcagcccaagcaactggccagaagcgcccatggactcaacaagaagctgctcaggtgagccaacacacttggggaaaaacttggtggtgaaccatcagagggctaagtaccagtagttttgtactcataaaatattaataaaccgggccatacaatttgcttaaaaattactttgcttaatagcgctacttaagggcaaatatgggttgtgctactctagactaaactatgattaataatagtgcacattttaggcccagagattctttagctactttaattaagccatcatactgcatcccaattaagctgtctgattaaatgattacagggacttagaaatggtagttcttgacatgggatagcttagctacgcatctctcagtttgcatagttgaatagaaacacctgaggattatagccaccacatttctttcgctgccaagttagacaaccacttattttgggcctaattaaagtcccatgtccaacccatcccttcccccgttttgtgagccataaattaagtagtgaaatattcatggcaaccgcttacaacgctagccacacgacacttacaccaactcacttggtcgttgcagccagatgggcttcatgaaggtgaaggcgcccaacagccacaacaggaagcgactggcggttgagtcacgacgccactcctcgcgcgatgattcacacatgttcatcatcaaattgccgccaaatatgcactactatgctggacccggtgcgaagaattccatcgcagagcagcaggacaagtctggccacaaaggtaacgcacccagcacgatggcatccagcacaccagtcgcagcagccgcatcagcagcagttgcaacatcaccagttgccgaagcgtcggcgttgaaagctaacgggaaaaaggtaaacgggattccattaggttacaccatagacacacacaatgcactgggtctggatctggctgactgccgggctggccccttctggccatggccagaactggctctcagccccgtcgatctggggagatgtggccaggtttggacctagaccgcgataaacatcggtgcgcatgcgcataaaacaaattgcaaaatactcggcggcgaggaggagcagcagttgtggtggcagtggaagtggattacccattttgcaacagttggtagccaagaacggcagttgctatatttatatgcgtgttacccccaatgccccaaaatgggtatgtgctgggccccggccagcttgtcctataaatagatcctcgatagggtcatggcgagcagctattgggtatctgagagttaccgccacagcggcgatccgggtgctctgggtgcccatgtcatacaacagcattccgatctgtaatacatggccttattgtgtgaattaatgcggcaagtgtcaatgtcagtggatgtccgacaggcagtggcacgaaaattattacgctctcacgactccgttgctccactgcatcgctgctccactgctgctccaatccccgggctgaaccagaaattaatatgcaggccattaaccaagtccgagcctcaattaaaaatgcaatttgtttgagccaccccactccaagctccaatgcaatccactacactccactccactccaaacgactccacttggccagagcaagagcaagtgcgtggcattcccgatttagttgccagagcacggctgatttatgggacgccagtcgctgagcccggttaatgttgtctaatcagtgcgcttcgattgcaggtctcgtttcccttcagctcgaatggccggccgggccgcatctaccactggaacctgcccgtcctgaaggaggcgctggccaagaagccccacttcgcccacgtctcggcggcggatcgcaatagactgctggacatccagggtgtgcccacgtggcgccagccctgggagaacgagaccgccgagaagggcttcagtgccggcggcgggaaggccaagtatcgcaaatccctgaagcccaagtcacccacatattatgcacccgcccaggcggtcagcaagcagagcttccacaagtacttcgcgggcaatggcaagcccaagggattctatgtcatcaaggagcaccagaagaagccgcagttctaccagaacatcatctcgtaatccaacggcataccctcggtatacccagggaatacccttgaaagactgcggtgccgggcgttctattttcaatattctaacgaaggggagcttctcccctcttccgtccagtttccacttggaatacccaatcctggcgaatcccgatcacatctatagcatcctggccaaatgtttaacaattgcgatgggtgcgttctatttttatataacggcaatgaatacaataacaggtgggctggtccaggtggggtgcatctcatatccatccatgtggtcagccatatcagcacaaagaacaaagtgtcaaagtgacatgacttcattcgagatttcaatgtaaaaacaaagagtttaaagttcagaaaggggttttgatttgagcacaaactgagttgaaactaatcggattatatatttaattgaaatttaatatctaaagtttaatcagcttagcagcagagtgtgaaatattcgagtggcacttcttcatacacatatcgttttgatcggaaatcccaaaatccttttcctatgaaggacaccccatccgaaggaccagtccaaactgcatttagctaagcaactgcggcaagcaataaattatggcataatcaagctaggtttaagtgcatgaacgactttgttttgataaataaaaatattgactgatttttaagtgcaattcccttaaagagctgatactcgcaagcagacaaagagctggacaaaaaaaaaaaagaactgtctgctgcgagtttgttgacttggacaaaggtgaacttgttggcaggaggactggttggggggaaaggtgagtgtctggcgaatttggctgccattcagcggagcaagaaatatataattatataaggggctatatgttctgactaagccctatgggaagatttaagattgggctcaaaaaaaaaaaaaaaaaaagaaaaaagcaaaacggaagcgggcgagcgtgcgcatgcgcagtttctcattcggcaga

SEQ ID NO: 29354 - DNA, 1335 bp, DROSOPHILA
tttatcgtgtgcggacgtatctgcggtcgaattgcggaacttgaaaatccaaatccgagtggcaaagataccgaatttcgaactgaaaaccgtgctcgtagttgacgcgaatttttagatgcactttctcagcatttggcgccacaagcaaaagacttagaaactctaattcgattgcgtttactcgaaatcgttgcttgccacatgctaaaagtgtcagtcggcaagcacaagttcatcaacatgcgtccaagctggatgggaacggcggcctggctgctggggctctactgcctcctgtgcatcgccgcgatggtcgaaggtgccagcaattcggtagctctggctgcgcccactgcatccgctgccaaggatgtcgcccatatgcacaggtcgaagaggctggacaggcgatcaggagcgggatcgagtcctctgacggctatcaagcagcccaagcaactggccagaagcgcccatggactcaacaagaagctgctcagccagatgggcttcatgaaggtgaaggcgcccaacagccacaacaggaagcgactggcggttgagtcacgacgccactcctcgcgcgatgattcacacatgttcatcatcaaattgccgccaaatatgcactactatgctggacccggtgcgaagaattccatcgcagagcagcaggacaagtctggccacaaaggtaacgcacccagcacgatggcatccagcacaccagtcgcagcagccgcatcagcagcagttgcaacatcaccagttgccgaagcgtcggcgttgaaagctaacgggaaaaaggtaaacgggattccattaggttacaccatagacacacacaatgcactgggtctggatctggctgactgccgggctggccccttctggccatggccagaactggctctcagccccgtcgatctggggagatgtggccaggtctcgtttcccttcagctcgaatggccggccgggccgcatctaccactggaacctgcccgtcctgaaggaggcgctggccaagaagccccacttcgcccacgtctcggcggcggatcgcaatagactgctggacatccagggtgtgcccacgtggcgccagccctgggagaacgagaccgccgagaagggcttcagtgccggcggcgggaaggccaagtatcgcaaatccctgaagcccaagtcacccacatattatgcacccgcccaggcggtcagcaagcagagcttccacaagtacttcgcgggcaatggcaagcccaagggattctatgtcatcaaggagcaccagaagaagccgcagttctaccagaacatcatctcgtaa

SEQ ID NO: 29355 - protein, 376 aa, DROSOPHILA
MLKVSVGKHKFINMRPSWMGTAAWLLGLYCLLCIAAMVEGASNSVALAAPTASAAKDVAHMHRSKRLDRRSGAGSSPLTAIKQPKQLARSAHGLNKKLLSQMGFMKVKAPNSHNRKRLAVESRRHSSRDDSHMFIIKLPPNMHYYAGPGAKNSIAEQQDKSGHKGNAPSTMASSTPVAAAASAAVATSPVAEASALKANGKKVNGIPLGYTIDTHNALGLDLADCRAGPFWPWPELALSPVDLGRCGQVSFPFSSNGRPGRIYHWNLPVLKEALAKKPHFAHVSAADRNRLLDIQGVPTWRQPWENETAEKGFSAGGGKAKYRKSLKPKSPTYYAPAQAVSKQSFHKYFAGNGKPKGFYVIKEHQKKPQFYQNIIS

SEQ ID NO: 29356 - DNA, 2833 bp, DROSOPHILA
caatttaccaagtgaatgtgtgaaagtgaaataagtcaaatgtatttaaataaacactaagaataattgtgcggccgatgaggtgttgcacaatcaatataaaagaagatcagggtggtggaaaatttgggattatgctatataggcagccaatattaatacaagatgtggctgacttgtttaataaactaaaagtaatagagaaagtttaaaaatcttatactgaatccacaaagaaatatctagatattttcgccgcagactgcaatacttcagctgagacacaaaccaccaacgagaagcaggcgaaagactaaaataccgtgtactaaaatgtcgttttcgctttttctcaacgagagagagctttcgaaatgtttgttaagcttagagcttggttaatatggtttttgtctctactttcgtaattattatttatttattatattaaaatagtaagtgtaagaaggggtggaaatacccgcatcctggtatctaccttcctcgtctagtcaacaataacaattataaactaatcacaaaaatagcttgggggttgagattccgctgagcttttgcgtcgacgtcgaatcaaaaaagtgtcagaaaagtttcggttaaatacgacgactacgaatcagttgaaatcgagataacaaaccgacaagccgaccgagcgggagctgtctcgctttttttaaaaatttgcaccagcaaaaatccaaataaattagcagagtgccagtgaagtaagtgagcgtgagtgcgccaagtcaaaatataaatattgtcatttacgccgtttcaaaatatatttccgcgagcatttctcgaatcgaaagtgaacccaaaatatattattccaagtgaaaaggactagcccaaagatacacacacacacacacaggaaaaataccgacagatctgtagtccttttcgagttttcccgtgagtgcaacaaatacagacacaccacacacacactcgttcgactttcaatatggcggatgtcctggagaaaagctcactgctggatgctgtgccaccactaggcgacccccacccaccgctgccccaccagcagctgcaacaggaagcagcagcagcagcagcagcaaatgccgcaccaccagcaccaccgcagcagcaacaaccaccaccccatcagctgcagcagcagcagccgcaacaacagcaactgcaacagaagccagcaaatgcgagggctaatcaggatcaaaaaggtgagggcgttgcaagatacacagaaaagaaatggttcagattaaaccatatatatagaaattattattagttaagtgtcaaaacatataactaccttgctatgtgtgcagttatgtggtatttacctgaatttagtaagtaaaagtgacttcacagcgcattacgcatacgccgcgtgtgctttagaaaatcaattaggaaagttcaaggcacgcctccgtagcccagttgcagcggtgatagcgatggctatggctcaattaggcaaattatattgccggcacaccccaggacattgatggttatgtcaggcgagcatgcaggccataagactcacgtcatgcccgccacattatgcaaatagatttggccggttcagcgctctgtgtgtgtttgatctgtttgagtaaccgcttagaccggcaagtttacggcttttggggcgcagctcaaaggggggctcgactgccggcaggatgtggaagttgtggctgcattgtgcattgtggtatcccagctctcggtttaatgacctgcaactgtggcaagccatcaaccacccacacgacggccgagtgcagcttttaattgttcttgatgcccgatgccttggcatcggctaggtgcaagtgtgtatctatcagatacacaatatacatacatatatttctagagagataccgatatggccgactgcgataaaagttatcagcaattcgagctcgtgcactcacaaaaggattatctctgcacttgcacatagcttataaaaagaaatccaacgttaaatcttttctaagactaatctgaaaatccttttaagtttaaaaaaatatgggtttgccaaaacatgaagtatattaagttacatttattttttctgagtgcactgctgctgtggttgctctgcatttgacctcgttttaaatcgagctgcgtgtaccttttcattcgtggtcgttcagtctgcagagttctcgagcatcagctggctaaactaaatattgaatttcctgttgaatagggtattccgcctgcgacgtggcaccaatgcgaactatcctctaaactaacagttgacttcattagggcagtgcgatgtgtgtgcagcgaaaagatacacccctgcctcgcgccgtgtgaatattaaatcaagtgtgttcgagtcaagagcaaaccggctctgctaaataaaaacaataacaatgctccgctgctgtagctttgtttagtgctaataataaaagtaaaaatatcgtcgttgattactatcagagatgtcatctacatgaagtcaccacagatctagattatacatacatatgtactcgtattgataagactttctttcaacctgattgatctgcacttactttcatattttataccaaaaataataattataatcgtgtgacgtaatgctgctcaattgaaaacaaacaaatgcatactgcactcagcgattttataaatagcccagaatcgctgcaatttctgtcacccatttcgcggtggcttttcaattatcacaaaacgctgccagtctcgtttctcatttgcagttgttggcgctgcaattgattttcct

SEQ ID NO: 29357 - DNA, 315 bp, DROSOPHILA
atggcggatgtcctggagaaaagctcactgctggatgctgtgccaccactaggcgacccccacccaccgctgccccaccagcagctgcaacaggaagcagcagcagcagcagcagcaaatgccgcaccaccagcaccaccgcagcagcaacaaccaccaccccatcagctgcagcagcagcagccgcaacaacagcaactgcaacagaagccagcaaatgcgagggctaatcaggatcaaaaagctctcggtttaatgacctgcaactgtggcaagccatcaaccacccacacgacggccgagtgcagcttttaa

SEQ ID NO: 29358 - protein, 104 aa, DROSOPHILA
MADVLEKSSLLDAVPPLGDPHPPLPHQQLQQEAAAAAAANAAPPAPPQQQQPPPHQLQQQQPQQQQLQQKPANARANQDQKALGLMTCNCGKPSTTHTTAECSF

SEQ ID NO: 29359 - DNA, 2138 bp, DROSOPHILA
taaatgcgatcagatcaattcgatagaggtgcaagcacgcaatgagatgcagatactcgtacatctacacaaccaccccacatagaagcggtatttggtatacaatcgaaagtatatttgactagttgagcaatgcactctttatcatcagatagcagacatgaattatatatctcaatgtattaccagaacttcatatatacatacaaatctatatatatatatatatacatatataaataaaagtatctaaatatttaagcaaattatacaagaaacgtacgaataaagtgtatgcttagttgaaaatgttaccacttgacgtctaaatgttaaacgactaagataatgcaaccatttagatacttttgcgaccagtgaaaaccaaaaaccaaacccaactgaacagatacgaaacaaaaaacaaaacgaaccgaaccgaacagaagagataataacacgtataagcatatttttactattaatttgtatcttattagtcaagcgcatcattctcacgatttatttacaccctgttacaaaatgtaagaacaatggcaaaatttaagcaaataaacaaacaaaaaaaacgtttttttcatttaccaaatctcggcgttgttgcacttagtatttgaactccaacagagccaccttatcgtatcggtattgagatagacaatcaaatcaagtattggagatacccacaagtatcttatttggcaaagccacgcccacgccgccgcaagcgtttcaacaaagccacgcacgagcacacatcctctactgccccattggatgcattggtaatcgaaacataaataaatttgatcaagcaaattgtaagtcgccatctcctcaatcgagctatgacaactattttgcatcactcctgctcctccagcgagtccgagccgattgtctctaaacacctctctttcgattcccgcagtattggaaggcaccgcgcatccagcgggccaccacactcacctcgtccatgtccctgccggcggagtgcctggttctctccgtatccatgccctcgctcaactcggagcccaagcgtcccaagagcgcgggacccaagaagaagcccggccaggccgtccactcgaagccattccgcctatattgagcctgtcgaggaaggagctgctccacaagtcgcacgtgacgtcacccaatcgaagcactcagagatttgtgcacaagttgatatcgaggcacgcacttctaaaacatgcatatgcagaatacattttatcaaaccgttgattgtttagaaccgaaatggaaacgaaacttggcatttacaacataacaataaacgactaaatgagaggcaaagttaagcacaaaatacagctgtggtttgtttgtttgtttctttatataattacagtatatattttcgtaagtattaaatctgtttcacggctactacatcgctggagccaaacggccttcgtttacatttcatttacataagacttgcgtttgattttctatatataattagtacaaaaattgtcctgggatttcgttacgtctcattgcgtctttatcatcgtgctcattgtgtgtttggaaaactgtgtgcttttcttggtttctttaggttttgtattcgtttttgattcttgttcctttcgattattcgagtcgcgtcacatttaaatgcatttagttgcctttttccatttacatcatccttttgctctacttaagccataaaagttgtttatacaattcgtttttaaagttagggtaataaataggtcattataaaataataaacaacagttgttacattttcaaaagacatcgtcaaatgagcttcaagtgattatgattatgattcgagggtcgagttagaattaaaaaaatgcgcatgcttgaatatcataaaaagtggcttctctaagagctcgtcgtcaagtgaattggcctggtttcagatttggttagctgcggattggctgccttagctcatggctatatataactataatacatttaatgggaaactaggaaatgcatagatgctcgtgatatgcgaaaccaatgtttgctgcggttgttataattttctctttctgccagatactattcgtacaatacattcgattcaattg

SEQ ID NO: 29360 - DNA, 138 bp, DROSOPHILA
atgtccctgccggcggagtgcctggttctctccgtatccatgccctcgctcaactcggagcccaagcgtcccaagagcgcgggacccaagaagaagcccggccaggccgtccactcgaagccattccgcctatattga

SEQ ID NO: 29361 - protein, 45 aa, DROSOPHILA
MSLPAECLVLSVSMPSLNSEPKRPKSAGPKKKPGQAVHSKPFRLY

SEQ ID NO: 29362 - DNA, 2544 bp, DROSOPHILA
gggcatcaacgatgaaatcgagctcgtcttcaagccccatcccacggagatgtcggcggacaaccagctcatacgggcactcaaggagaactgtgtgcgctacatcaagaccacggcaaatgccaccgtcgatcatctcagcaagtatctggccatgcggctcacgctcgacctgggcgccgatttgccagaggcttgtcgcgtgctcaacttttgcatctacgtcgctccacagccacagcagttggttatcctgaatggcaaccagacgttgcaccaggtcaacgacaaattctggaaggtgggtttgcgctggcacattctaatgttcaccattctaatgtctgtatgcttttaggtaaacaaacctatggaaatgtattactcgtggaagaaaacctaagctgtacgaagcgttttagtattaggccgtttatttctgaaatggaaatatgtctagctgtagagcttaacacacgtatataaagcattcatgtaccacaaaatatatttaattgtaagtaaaaggtttcgttattgagttttcggaatccctcgctataagtccacagatctatattccttcgtcaacaatattttaggaatactcaatatatatgtgtatcggttgcattccgcatcagatttattatacttcctagtgcgtacaacattacaaggcatataaacaactatatttttaagttaagtaaagagtggctcttctgtgggtttagtagaatgtgaatgtttggtgagcttaggctctagcacgactcggaagccacaatgagataggaggacggtttccgtttcttcgttgtatgactatgactaaactgcggtcttctatacacttggacgattgtagaagcctccaaggcactgggaaaggtaaagataggagctgggtcaagtgcgatgctccaaaggtaaccatgtgactttggtaggcgttgaacagtgcacacaaaaaaaacatcgatttgcaccgactatatcattttggcacccgacgcatcttatcagcgatggcgtccctgaagtctcgaaaatcgctgctgccctcgatttcgttgcgacatttgctctggatgcgatagagcccgctgctgatgtccgtgcgatcggcgctgagcatgcgcctggagagatcctgctccaggtcgtagggcaggcccagatcgaccagttcgtccacctcgtcctgggtgaaggtgcgctggtgctcagcgagaaactcggcgcacttctcgtagatgtccaagtactgctcggcctcgtccttgtcgccggaccgcctcgtctccatgaacttgcgcagcagtctggtggcctccgcatccagcagcgtctcgtgcacactgttcgacagaacatagatcctccgcacctcggcgacagtcatgttactgcatccgcagaagcaccttatcagctgtagggtcttgttctagcgatagcgcacaaaagtccgatgagtaattgacttccttgcccacctcttccttgtttctactcaccttgctcgaactgctggccatttcgaatgtttggtgtatcagcctcttaaattgggtgtatctctttatagattatgttcacttgacgacaggtggacccacaccttgtttactcttacttcctattgtattgctttttacttgtgaccggcacgatttttaacccacgaattttattggtcaacaaatagggcagtgtgattgcgcagaggtgtgccgaaaatacaacgattcccttggatgaactagatctggtcagtctgaatgaatttgaattgcgaatagcccgcgctattccaaaatattaatttattttaatttaattcattaaacaatgaattattcccacattaacaacgcactatgacaactataactactactcgatcatcgattaattgctggcttttggaatttctaaggaatctcatactttattaggaaaatacatacatacataaactgaaacgcttgtaaacaatagaaaactcagccactcaatcgcaccctacagcttggacttgagcgccttcattagcttctccagcttgagagccttctggaaatcgccgctgatcttcagcttgccggtcatgtaggcgggagccgccttcagtttacccgagaacatgtcgaagaagttcttcgagttcatggtgagcgtggcgtcgggagcggcagttggcgttccggcaccgcaggatccggagccgttcttcaggtccaggaaccaggtgccctgctcggcgccgctgatgttgaactggaagacagcctgcgtcttcgagacgatctcgggcgagaggagagattcgattttccggaacagctgcggaatcttgacgtctcctccacttgcgggagcagcagcatcttctgccgcagcttcattctctaccggagctcccttctcctccacgaagaagtccaccatcagcttgtcggcgttctcgcggaagcaggcgtattcggtgagatcagtgatgcccgccgattccagcacctcgtcgtccacaaagaa

SEQ ID NO: 29363 - DNA, 474 bp, DROSOPHILA
atggccagcagttcgagcaagaacaagaccctacagctgataaggtgcttctgcggatgcagtaacatgactgtcgccgaggtgcggaggatctatgttctgtcgaacagtgtgcacgagacgctgctggatgcggaggccaccagactgctgcgcaagttcatggagacgaggcggtccggcgacaaggacgaggccgagcagtacttggacatctacgagaagtgcgccgagtttctcgctgagcaccagcgcaccttcacccaggacgaggtggacgaactggtcgatctgggcctgccctacgacctggagcaggatctctccaggcgcatgctcagcgccgatcgcacggacatcagcagcgggctctatcgcatccagagcaaatgtcgcaacgaaatcgagggcagcagcgattttcgagacttcagggacgccatcgctgataagatgcgtcgggtgccaaaatga

SEQ ID NO: 29364 - protein, 157 aa, DROSOPHILA
MASSSSKNKTLQLIRCFCGCSNMTVAEVRRIYVLSNSVHETLLDAEATRLLRKFMETRRSGDKDEAEQYLDIYEKCAEFLAEHQRTFTQDEVDELVDLGLPYDLEQDLSRRMLSADRTDISSGLYRIQSKCRNEIEGSSDFRDFRDAIADKMRRVPK

SEQ ID NO: 29365 - DNA, 6807 bp, DROSOPHILA
gatgagaaggttgtgcagcgcactcattgactgtgcaaagtgaagtgaagtagtttaaaattaaaaaggacacttaatcccgtcaatgtcttgccgccgcgctagcaaccccttatccagatccgaatcctcgtgtgtgcatgtggatcctgggaacctggggatccagggaaattccagcacgggattagcaggcggttggggattgaacaagagggtgttttcgtttgatttggtttgtgcaggagcatcagcttgctagctggtggtggcgccgatggtgacgttggatgtttgcccactttggctcacaagaagtgcaattatgtgcacaaaatggaaaatgaagcaagaaagtggagcaattgaaagcgacagatggagagatgtgaatgtggaatggatgcacatgcaatcgttgagagacaatgctgatgactggccaaagacaaaaacaatttaacccacatttgcatggtatggaatggtgtatggtgcatggtgcatggtgcatagtggatggtgcatggtatatggcaattaccagcgttatgacgtggaaattggccaggcaacgagagatagaaatcgtcctggccaactggcaaccgaacgccatccgtaaagtagcccatcttatctacgtatgtacctaattagtgaaatgtgcttgcctcggtatattgaataattaggtaagtgagtagtacgcagtgatgggtaaggtacacacacattaagttgaactcgtctgggaaacaaggtattttgtgggtgttcatattggaaattatagtcattttcccattagttattgctggacgaggtattttcgataattcatattgcaaattttacaatttccccattttgcacaatttaacatgaacttaatgatagtttgaacactgttgggtacccacaggtacagcgcatccatgacgtggtcgtggtttaaccgccagcttggtcagtagttagttttcagaactcacccaaaatggtggcccagaagagccgtctcctggccagagcctttccatatctcgacatcttttccgtgtttgctctcacaccaccgccccaaagttttggccacactccacatagacgtcttagatggtacttgatgactggctatgtgttctatgccaccgcgatccttgcgacggtcttcattgtgtcctactttaacattatagccattgacgaagaggtcttggagtacaatgtgtctgattttaccagagtgatgggtaatattcaaaagagcctgtattcgattatggccatcgccaaccatctcaatatgctcatcaattatcgccggcttggcggaatctacaaggacattgccgatttggagatggacatggacgaggcatcgcagtgctttggtggccaaagacaacgctttagtttccgctttcgcatggccctctgtgtgggcgtgtggatgattctgatggtgggttcaatgccccgattaaccatgacggccatgggtccttttgtcagcacgctattgaagatcttaaccgagttcgtcatgataatgcagcagctgaagagtctggagtattgcgtctttgtactcatcatttatgagttggtcctgcggttgcgccgcacacttagtcagctgcaggaggagttccaggactgcgagcagcaggacatgcttcaagctctatgtgtggctctgaaacgcaatcaattgctattgggacggatttggaggctggagggcgatgtgggcagctacttcaccccgacaatgttgctgctgttcctctacaatggtctgaccatccttcacatggtcaactgggcgtacatcaacaagttcctctacgattcgtgttgtcagtatggtgggtgggaaagtagtctcataacctaggaaagctcccaatccctatataatatatacttttcagaacggttcttagtttgctccacgctgcttgtaaaccttctattgccttgccttctaagtcagcgttgcataaatgcggtaagcttgcgataatagagagtatatatataaattttcttaaaaaaatctatatagtacaactgctttccacgaatcctgcataagattcgctgcacatccgcggatcccaattttgccatgttgaccagaggattgcgggagtactccctgcaaatggaacacctgaagttgcgtttcacatgcggcgggttatttgacatcaatttgaaatactttggcggggtaaataccactttatttatcaattataataactcgctgactagaacttgtttgcagttgcttgtcaccatttttggatatatcataatcctcatacaattcaaagtgcaggcgattgctgcgaatagatacaaaaaagtggttaattaattaatttagatggtattttcttctcttaatcaaaagaaaataaaggtgcattttagcttttctccaagttaagtgttttgtacttacaaatgcacactgatcattcagtatattcagtataaagtcagaataaaaacgcatatgtcgattgccgttccattcgacacctcgcaggacatggacctattttatttcctatctagcacaatttttctggcgcgtttttatagtgaattctgcattcgagaggtaggattgactactgaactaggacatttatgaaatgtagttcttaaatcacaaagatattctagtatgatggcatattcttgggatgcccgcagcagaggactttcaaatgcttaaaatgggtctaagggaaaactctctacaaatgcaacatttgcggctctttattatctaaattccagggtctacaaagttattattaaatgcttaatagaaatgctaggtgattatcttgtccaactaattaacagaagtgtttacccaggaatgacaggaccattagaccagtgactttttacaattcgatggagatggaagccaaacggagtcgcctgctgaccacagctcgtccttatcttcaagtcctatccctatttggtcttacacctcctgccgaattctttaccaggacccttcgcaagcgacgcaggttctgttggatggcaggatacagtctatatttaattgcaattcttctgatggttttctatgaattccatgcgaatattgtgtccctgcatctagaaatttataaatttcacgtcgaagatttcagcaaagtaatgggaaggacacaaaagtttcttatagtagctatagcaacttgcaatcaattgaatatactactaaactatggacgccttggattaatctacgacgaaattgcgaatctagatctaggaatagataagtcctcaaagaatttttgtggcaagagtcattggtggagcttccgactccgactgacgctttccattggtctgtggatggtgatcattataggtgttataccacgtttaactcttggacgcgctggacccttttttcactgggtgaatcaagtattaacccaaatcattcttataatgcttcaactcaaaggccccgagtattgcctattcgtcctactggtttatgaactgattctaagaacgcgccatgtccttgagcagctaaaggatgatctcgaagacttcgactgcggagccaggattcaggagctgtgcgtgactttaaagcagaaccaattgctcattggacgaatatggagattggtggatgagattggagcatatttcagatggtccatgactctgctgtttctctacaatggacttaccattctgcacgttgtcaactgggctatcattagatccatcgatccaaacgattgctgtcaactcagtgaggaatcttaattaaatcataaaggagtttcattttatctatgcttcttttagatcgtttggggtctattacttttctgtcgttcaatcttctgctgacctgcttttttagtgagtgttgcgtaaaaactgtaagtaagtcttaccaaaaaaaaaagagtcttctactttagatccgtgaacattttcagtacaatagcatatcatacatccttcatcaaattggatgcttgcctacagctgaagaattccaaatgctcaaaatggggctcaaggaatatatcctgcaaatgcagcacttaaagctcctgttcacatgtggaggcttattcgacatcaatatcaagttatttggaggggtataatgtgccatattttaacttgccttacactttcctcttcattttcagatgctggttactttatgtggttatgtaattattatagtgcaatttaaaattcaggattttgctctaatcggctacagacaaaataccagcgatacatcctaataatgataattatgtttgaatattaatttacaaggactatcctataatagcattttatattggtatgcaagtatatcatgcactaattatttcaccaccaaccatttgatcaaaaactttgatcatcttatcaacttaattaaaatgaaagtgcacagctatttagcaacttagacttactagttttcccagtgtcttttcacttctcgctgaacatggaagccaatcggagtcgtctgctggccgcagcgcgtccttacattcagatttattccattttcggactcacgccgccaattcagttttttaccaggaccttacataagcgacgtagaggaattgtgatattgggctacgcctgctatttaattagcatttccctgatggtcatctatgagtgctacgcgaacattgtggctctgcaaaaggatatacataagtttcacgccgaggactctagcaaagttatggggaatacgcagaaggtcctggtggtagccatgttcgtttggaatcaattgaacattctgcttaactttcggcgccttgctaggatttatgatgatattgcggatctggaaatagatttgaataacgcctctagcggttttgttggccaacggcactggtggcgcttccgtttccggttggccctctctgtgggcctgtggatagtgttgctggtgggtctcacgccacgattcaccctcgtggcactcggaccctacctccactggacaaataaagtgctcaccgaaatcattctgataatgctacaacttaagtgtacagagtattgtgtgtttgtgctcctgatctatgaactgatcctccgagggcgccacatccttcagcagatcagtgtggagctcgagggtaaccagtcaagggacagtgttcaggagctgtgtgtggccttgaaacgcaatcagttgctggctggacgcatttggggcttggtgaatgaggtcagcttgtattttaccctatccttgacgcttttgtttctctacaatgaactgaccattctgcaaattgtcaattgggctctcattaaatccgtcaatccaaacgaatgctgtcaatatagtaagttagttttcaagttcaaaagaaactttacctataaacaagttattttcataatagggcgcgttggtacttgcctcttgctgtcaatcaatatttttctatcctgtttatacagcgagttctgcattcaaacagtaagtatacctctataattctttaaaatgtttttaataattttatttttataagtataatagcatttcacgagttcttcaccaaatgtattgcctttctgcagccgaagattatctaatattaaaaatgggcctgagggaatactcgctgcaaatggagcatttaaagctgattttcacatgcggtggcctctttgacatcaatcttaagttcttcggaggggtaaaacttaaattataaattaaaaatcaagcttatgtacactttcctttcttctagatggtagtcaccttattcggttatatcattattctcgtgcaatttaaaattcaattttttgctcaatcaaattttatgcaaaatattaacagcaccgaactgaaagcatataccgcgtaaattaatcgaactaatttaaatatatacatcttacatttcttctacacattgcaacagcgacacctggcgacgaaaaaaatatatagtatttaaatgcaattttaaacgataattgaaaataataataattatgttttaacaccatagagaaatgtcttttacaatatgatgtacagtgtccaaaaattagcacatgtaatgtagaggtaaagtagaaatacagtatgtatatatacatttgatacagtggtggcctttacattagttcacgtccaattaattcattcaccataataaaaagcaacaaaaattatgtatatattacgtatttatttttttacgatagcagccgctctgtggaattggcctgtccctgagggacttccatttgagtggccggaaccatcaggttttactacatctaggctattattgtttcacttattgccatcgatccgccgatcgatcaatttcaccattcaatatcaactagcatattgctataagtaaacttagtctatgctttttacattgaacatttcatgttgttacatcttcgggaattgtactcataattagtgtagtttaattgcgacgcatcgacttagttctagaacttagtagctagtgaacctaatacctactgctaaacatctgcccacctagacccttcagtgttcgatttgtacaagtagcttacgcctaggattggattactattactcgctcgtgaaatgttcagttacgctcatttgtttggattctgattctgatctataacttcagttggcaatcacagactaaataactggaataactttttggaagtcgtacacctatg

SEQ ID NO: 29366 - DNA, 2211 bp, DROSOPHILA
atggtggcccagaagagccgtctcctggccagagcctttccatatctcgacatcttttccgtgtttgctctcacaccaccgccccaaagttttggccacactccacatagacgtcttagatggtacttgatgactggctatgtgttctatgccaccgcgatccttgcgacggtcttcattgtgtcctactttaacattatagccattgacgaagaggtcttggagtacaatgtgtctgattttaccagagtgatgggtaatattcaaaagagcctgtattcgattatggccatcgccaaccatctcaatatgctcatcaattatcgccggcttggcggaatctacaaggacattgccgatttggagatggacatggacgaggcatcgcagtgctttggtggccaaagacaacgctttagtttccgctttcgcatggccctctgtgtgggcgtgtggatgattctgatggtgggttcaatgccccgattaaccatgacggccatgggtccttttgtcagcacgctattgaagatcttaaccgagttcgtcatgataatgcagcagctgaagagtctggagtattgcgtctttgtactcatcatttatgagttggtcctgcggttgcgccgcacacttagtcagctgcaggaggagttccaggactgcgagcagcaggacatgcttcaagctctatgtgtggctctgaaacgcaatcaattgctattgggacggatttggaggctggagggcgatgtgggcagctacttcaccccgacaatgttgctgctgttcctctacaatggtctgaccatccttcacatggtcaactgggcgtacatcaacaagttcctctacgattcgtgttgtcagtatggccccgagtattgcctattcgtcctactggtttatgaactgattctaagaacgcgccatgtccttgagcagctaaaggatgatctcgaagacttcgactgcggagccaggattcaggagctgtgcgtgactttaaagcagaaccaattgctcattggacgaatatggagattggtggatgagattggagcatatttcagatggtccatgactctgctgtttctctacaatggacttaccattctgcacgttgtcaactgggctatcattagatccatcgatccaaacgattgctgtcaactcatgtcttttcacttctcgctgaacatggaagccaatcggagtcgtctgctggccgcagcgcgtccttacattcagatttattccattttcggactcacgccgccaattcagttttttaccaggaccttacataagcgacgtagaggaattgtgatattgggctacgcctgctatttaattagcatttccctgatggtcatctatgagtgctacgcgaacattgtggctctgcaaaaggatatacataagtttcacgccgaggactctagcaaagttatggggaatacgcagaaggtcctggtggtagccatgttcgtttggaatcaattgaacattctgcttaactttcggcgccttgctaggatttatgatgatattgcggatctggaaatagatttgaataacgcctctagcggttttgttggccaacggcactggtggcgcttccgtttccggttggccctctctgtgggcctgtggatagtgttgctggtgggtctcacgccacgattcaccctcgtggcactcggaccctacctccactggacaaataaagtgctcaccgaaatcattctgataatgctacaacttaagtgtacagagtattgtgtgtttgtgctcctgatctatgaactgatcctccgagggcgccacatccttcagcagatcagtgtggagctcgagggtaaccagtcaagggacagtgttcaggagctgtgtgtggccttgaaacgcaatcagttgctggctggacgcatttggggcttggtgaatgaggtcagcttgtattttaccctatccttgacgcttttgtttctctacaatgaactgaccattctgcaaattgtcaattgggctctcattaaatccgtcaatccaaacgaatgctgtcaatataccgaagattatctaatattaaaaatgggcctgagggaatactcgctgcaaatggagcatttaaagctgattttcacatgcggtggcctctttgacatcaatcttaagttcttcggaggggtaaaacttaaattataa

SEQ ID NO: 29367 - protein, 736 aa, DROSOPHILA
MVAQKSRLLARAFPYLDIFSVFALTPPPQSFGHTPHRRLRWYLMTGYVFYATAILATVFIVSYFNIIAIDEEVLEYNVSDFTRVMGNIQKSLYSIMAIANHLNMLINYRRLGGIYKDIADLEMDMDEASQCFGGQRQRFSFRFRMALCVGVWMILMVGSMPRLTMTAMGPFVSTLLKILTEFVMIMQQLKSLEYCVFVLIIYELVLRLRRTLSQLQEEFQDCEQQDMLQALCVALKRNQLLLGRIWRLEGDVGSYFTPTMLLLFLYNGLTILHMVNWAYINKFLYDSCCQYGPEYCLFVLLVYELILRTRHVLEQLKDDLEDFDCGARIQELCVTLKQNQLLIGRIWRLVDEIGAYFRWSMTLLFLYNGLTILHVVNWAIIRSIDPNDCCQLMSFHFSLNMEANRSRLLAAARPYIQIYSIFGLTPPIQFFTRTLHKRRRGIVILGYACYLISISLMVIYECYANIVALQKDIHKFHAEDSSKVMGNTQKVLVVAMFVWNQLNILLNFRRLARIYDDIADLEIDLNNASSGFVGQRHWWRFRFRLALSVGLWIVLLVGLTPRFTLVALGPYLHWTNKVLTEIILIMLQLKCTEYCVFVLLIYELILRGRHILQQISVELEGNQSRDSVQELCVALKRNQLLAGRIWGLVNEVSLYFTLSLTLLFLYNELTILQIVNWALIKSVNPNECCQYTEDYLILKMGLREYSLQMEHLKLIFTCGGLFDINLKFFGGVKLKL

SEQ ID NO: 29368 - DNA, 4677 bp, DROSOPHILA
ctcagctttgctggccctttggcagaatggttcacacatgaacacgaaatatatttaaagacttacaattttgggctccgttcatatcttatgtaaatgaatccgagagcgataaattatatttaggattttgttatctaaggcgacatgggtgcattgctcaaaaacatgtaatttaagtgcacactacatgagtcagtcacttgagatcgttccccgcctcctaaaatagtcccttagtgggagaccacagataaggtcctcgccgctcaagataggcagatgtgcccgagcgtgggacctcgataaggcggggactatttacttaggcctctgcgtaggccatttactttaagatgcgattctcatgtcacctatttaaaccgaagatatttccaaataaaatcagtttcttacaaaaactcaacgagtaaagtcttcttatttgggattttacaatgttattattgaatttaataacacagatgtttttattaaaggcgtaacaagtaaatgtaatttaattaaatgaatcataaaacgaaggtaataattaataaacttcaaatgtgaaggatacattacagtaaagaaaaaggttaaaactttcaatatgaattcgagtttaaatatttatgaagactcagagccaaaaactacttaactctaacgttagttaaaatacaaagagaatattgtatcattgtatcatagctgaaaatcattaaatgtttagagtggaaaatttgaaatgtcctttggcacaaaagccatggccattgattttcccgagcttttcgtgtgcatgtgcagcagcttacaaatgatattcatgtcctttgacttgactttcttctccacatcctttttctttcgtgcagcgaggataatcgccagcagctggagcacaagttggataaaatcttgcagaagcgcactgagctgtaagtagctttttaattccccccccatcttgcccaaaaaaaaaaggtaaacggatatgtgtttgcactccagcgacaagtcggtgcgccacaagagccgccaaaagtaccaggagttcctggaggagcaggccaagcgcaacgagcgcaacaagaagctggtccacatgctggagcggatcgatgagcaaacggctgccatgtcgcagcggagcgagcggcttaaaatgatgaaggtaagtccgctggccagccgggggaaatgtaaagacaatcacacttgggaaatccggaaaatgtaccaaaaagaaaatccaagatatcagacaaacagaatcatcttgtatatattcgtataaaatgatcgcccaacatttttccaagtgcatcacgtggagcctctatcttcatctttctttttcccgctttgaacagctgcaataccaaatgtactttgcgaaattggtgcagaatcaaacattgcgatgcatccagcagacgacgacatcgacatcggctccatccgccggcggagtgataccagtgctggtgcaaccgcagccgcaggtgacggtgaccaatccgcagtcgacgccacagaactggacgtttgccatggccacgcccacgcaggcgggcatgcttttgacgccccagtttgccgcagcatctcctgcaggtccgcccatgcagccgccaaccatgccggctggccatcctgtttactatccagagctctttgccggaactacagctcccctcggcacctcgaacctattcgatttgcgcgccaccctgcgcgcctttgataatgagaatgccgatttaccggagcgcatgcagccccacttgacaggtgattatcaggcggagctgggtggcaggagccaaccttcagcaagcgcagcagcaggtccagctgctgcgacacccacatcgactttgtccagccaggagaagggtgcgcagcaactgagcagcacttcctccacgctggccacatcctcgctgacatttgataaattgccaaagacatcgtcgccttcgctgacgttaactgagctgccgactgcaggagtagcaactcctggccatgatgtgggcgggcaaccgcaaagggatgccgccgacctggatggctggacaaattcacgcgtgactaaagtcgagtatgaaaaatcaccaactgtcgttggccataatgagccgggccaggaaaagcagacactacgcgagcagcagcatcatgagccgcagcaacagcatcagcagccatcccacgactttgaagcatacttcggtgagctgaaaatcgatgagtcctcctggcagagtggccaacccacacccactcccgcacccagcggccacgaagacaaacgcccattgaacgtgcgttccagcgagtcgggatctggagtgggagcgggatcagcggttagtggcaatgttggcatcagcaacgatttgctggacgaagtcaaagccagtcgggcggcactcgaaagagcagcggctgcggttgatgagcagctggcaaggggtaatcaattgtcgccgccaagcagccaggaccccaaaaccggtgtgtcgattgagaatattgaaaatgccatttacggcgaacggttgacaggagcagcaggagcaggagcaggactaccagcggcagcagtagcaggagtagcctcgcctgaggctatggcagccgcaccaacgaagggattttttgataatttggcagccaacccatcgccagaggaacatcaggaggtggagcaacaacagcagcagcagcagtcgacgcagcaggtggagccggagctgtccgggtacgggcaatacgatgccagcagttatggcgatgccagtgagcccatctatgccagcatcgattccgccaaccagcagccaatgcaaagcgcaaaagtggagccgctttacagcgaaatcggaaatccagcagactatcagcatcagtcgtacgcaacggatgcgggtgccgttgctgcagatgtgccggcagcagtggcagtcgatggtgcagcaacaacgctggatgccagcggtgctggcgaggtcctgccgcaggagtactccaatattgattacggcaactacgaggccgatcaatatgcggccggctatgatcccaatgcctatccgggctatatatacgatgaggcgacaggccagtatatagccgatcccaatgccacccagtatgcaacggatggcagctacgctggacaggactatgatgccagtgcggtgcagaactatgactacagtgcctacgaacagcaaccggatcaacagcagcagcaagagcaacaggagatgccagtacaggaacaactgatgcagcaggagcagcagcagcagcaggaagcctatcccgaaacagaagccacaccggaagtggaggagagtccagccgctgcggcggagccaccggcaccactggccaccagtaagcccctcaaacccacatcgatactctcgacgacagacaaacaagcggcgcctaatgatgcgcagcagcagcagctcaagaagaagaagcgcgttaatttcgttgacagcagcgaaacggatgatagctcaagcgcgaaaccgacccaggccgcaaatccaggaccctccgccgcccccagtccagccacgcccccagccgcgggcggcagcgagagtgatttcgatttttcaaccggcagcgaggcaaagaattagaacaacgctgaaaacatttcgagctctaatttgttgccatttgggttaaccaaaccgcccagagccgccgagccacccaattcaatgtgaacgaccgtctcgatttattgccaattcattgggcgaaagaaaattcgagaaaatccaggaaacgcagagtgaaaaatggaaaataaaagagaagcgacaaattcgtgaaaagtagtagttttctggtggcaaaaatggcgaacctcaagccgcacaaaaaagtttctgcttacttaggcgacgacaagctaacaatgctcgttcaattcaatagttttagttgcatgtcaaataaagcaaataaactctaaaatacaacatgaaaattaattaattacttatttgggttaacttttatttgggttaacaaagtcatttatattatgactattttttattcacagccagttttgcttgttgtttaaaagccaagtattacttctttgcactacatgcacaacaatagagtatttactgcactttaatgcattttttgtcacttctgtttaccacgcacgttcagccttgacacaattcagctgttaactgtgcgtatacgcaatatttcgcattaatacttggcgctgacacacacaaacgcacacactcgtttcgccgccgcgaatggcctgggaaatatttcattaacgacatcggtaataagatcagcagctgttgccgccaggccgcaatttatcaaaagtgcaattgtctttgccgcgggcctcggaattaccacaacccattcgctggcccacaatgctggccaggatcgctggcaatgacactaattatgtgcggccaggcggttaaagccacgtccagcaaatatgctgattcccgatatgaggagcagatctggcggaggctgcttacttggccaacaattgccaacttaattgaaattatgccaaccgaagtaaatacaatgctgcctcatatagatgcatacatatatacgttattgcat

SEQ ID NO: 29369 - DNA, 2478 bp, DROSOPHILA
atgtgtttgcactccagcgacaagtcggtgcgccacaagagccgccaaaagtaccaggagttcctggaggagcaggccaagcgcaacgagcgcaacaagaagctggtccacatgctggagcggatcgatgagcaaacggctgccatgtcgcagcggagcgagcggcttaaaatgatgaagctgcaataccaaatgtactttgcgaaattggtgcagaatcaaacattgcgatgcatccagcagacgacgacatcgacatcggctccatccgccggcggagtgataccagtgctggtgcaaccgcagccgcaggtgacggtgaccaatccgcagtcgacgccacagaactggacgtttgccatggccacgcccacgcaggcgggcatgcttttgacgccccagtttgccgcagcatctcctgcaggtccgcccatgcagccgccaaccatgccggctggccatcctgtttactatccagagctctttgccggaactacagctcccctcggcacctcgaacctattcgatttgcgcgccaccctgcgcgcctttgataatgagaatgccgatttaccggagcgcatgcagccccacttgacaggtgattatcaggcggagctgggtggcaggagccaaccttcagcaagcgcagcagcaggtccagctgctgcgacacccacatcgactttgtccagccaggagaagggtgcgcagcaactgagcagcacttcctccacgctggccacatcctcgctgacatttgataaattgccaaagacatcgtcgccttcgctgacgttaactgagctgccgactgcaggagtagcaactcctggccatgatgtgggcgggcaaccgcaaagggatgccgccgacctggatggctggacaaattcacgcgtgactaaagtcgagtatgaaaaatcaccaactgtcgttggccataatgagccgggccaggaaaagcagacactacgcgagcagcagcatcatgagccgcagcaacagcatcagcagccatcccacgactttgaagcatacttcggtgagctgaaaatcgatgagtcctcctggcagagtggccaacccacacccactcccgcacccagcggccacgaagacaaacgcccattgaacgtgcgttccagcgagtcgggatctggagtgggagcgggatcagcggttagtggcaatgttggcatcagcaacgatttgctggacgaagtcaaagccagtcgggcggcactcgaaagagcagcggctgcggttgatgagcagctggcaaggggtaatcaattgtcgccgccaagcagccaggaccccaaaaccggtgtgtcgattgagaatattgaaaatgccatttacggcgaacggttgacaggagcagcaggagcaggagcaggactaccagcggcagcagtagcaggagtagcctcgcctgaggctatggcagccgcaccaacgaagggattttttgataatttggcagccaacccatcgccagaggaacatcaggaggtggagcaacaacagcagcagcagcagtcgacgcagcaggtggagccggagctgtccgggtacgggcaatacgatgccagcagttatggcgatgccagtgagcccatctatgccagcatcgattccgccaaccagcagccaatgcaaagcgcaaaagtggagccgctttacagcgaaatcggaaatccagcagactatcagcatcagtcgtacgcaacggatgcgggtgccgttgctgcagatgtgccggcagcagtggcagtcgatggtgcagcaacaacgctggatgccagcggtgctggcgaggtcctgccgcaggagtactccaatattgattacggcaactacgaggccgatcaatatgcggccggctatgatcccaatgcctatccgggctatatatacgatgaggcgacaggccagtatatagccgatcccaatgccacccagtatgcaacggatggcagctacgctggacaggactatgatgccagtgcggtgcagaactatgactacagtgcctacgaacagcaaccggatcaacagcagcagcaagagcaacaggagatgccagtacaggaacaactgatgcagcaggagcagcagcagcagcaggaagcctatcccgaaacagaagccacaccggaagtggaggagagtccagccgctgcggcggagccaccggcaccactggccaccagtaagcccctcaaacccacatcgatactctcgacgacagacaaacaagcggcgcctaatgatgcgcagcagcagcagctcaagaagaagaagcgcgttaatttcgttgacagcagcgaaacggatgatagctcaagcgcgaaaccgacccaggccgcaaatccaggaccctccgccgcccccagtccagccacgcccccagccgcgggcggcagcgagagtgatttcgatttttcaaccggcagcgaggcaaagaattag

SEQ ID NO: 29370 - protein, 825 aa, DROSOPHILA
MCLHSSDKSVRHKSRQKYQEFLEEQAKRNERNKKLVHMLERIDEQTAAMSQRSERLKMMKLQYQMYFAKLVQNQTLRCIQQTTTSTSAPSAGGVIPVLVQPQPQVTVTNPQSTPQNWTFAMATPTQAGMLLTPQFAAASPAGPPMQPPTMPAGHPVYYPELFAGTTAPLGTSNLFDLRATLRAFDNENADLPERMQPHLTGDYQAELGGRSQPSASAAAGPAAATPTSTLSSQEKGAQQLSSTSSTLATSSLTFDKLPKTSSPSLTLTELPTAGVATPGHDVGGQPQRDAADLDGWTNSRVTKVEYEKSPTVVGHNEPGQEKQTLREQQHHEPQQQHQQPSHDFEAYFGELKIDESSWQSGQPTPTPAPSGHEDKRPLNVRSSESGSGVGAGSAVSGNVGISNDLLDEVKASRAALERAAAAVDEQLARGNQLSPPSSQDPKTGVSIENIENAIYGERLTGAAGAGAGLPAAAVAGVASPEAMAAAPTKGFFDNLAANPSPEEHQEVEQQQQQQQSTQQVEPELSGYGQYDASSYGDASEPIYASIDSANQQPMQSAKVEPLYSEIGNPADYQHQSYATDAGAVAADVPAAVAVDGAATTLDASGAGEVLPQEYSNIDYGNYEADQYAAGYDPNAYPGYIYDEATGQYIADPNATQYATDGSYAGQDYDASAVQNYDYSAYEQQPDQQQQQEQQEMPVQEQLMQQEQQQQQEAYPETEATPEVEESPAAAAEPPAPLATSKPLKPTSILSTTDKQAAPNDAQQQQLKKKKRVNFVDSSETDDSSSAKPTQAANPGPSAAPSPATPPAAGGSESDFDFSTGSEAKN

SEQ ID NO: 29371 - DNA, 8003 bp, DROSOPHILA
tggctaaccatagtgatgtaacagcgataagaacaggtgtggagagcccatcttcagatctcaagttgcttacctaaaccgcatgccgataaagtgccatctgcgcagaggtcagagtccacttgccgaattttaaagcctaatctttatgatatgaactctgatattaccaaatcgcgccgtctgcaatctcgaatatgagttatttatgttttgtttttttttttatagcacagcgaaagatatatgggataagcaccaaatacaatcttattttatcatgccctttagacttgaaaggaatcttatcaacttacagctgtgtatgtagatttaaaatactaagtgaaatctaagtgaattgttacccctgtttattgtcattatgtattgagcgaggcaaactagaatgctaagtatattatagtatatgtgttcataggctctccaccttagttttgacaagaaatataaacgactttacataattgtaatatatatctttcgaatcttgataagccgactgataggcgacctagattcttagaaatttgtctagccacgtcgaaaaagttgaattttaaaaaacgcattatcgaggctaactgcgcatacccctcaaacgatgagtacacccatcttatatacacacttgtaggtgtttattggacccaatcacatatccatttcgccacaagataaggcccaatcgatctgaagagagcgaattcccggaatatcgccggtcaatacactccacacgggcacacaccccccaccacacactccacttttcgacgagcctctcgactggtgacgcatccataccaataccatactataccatactatatcatacaataccaaactctaccatacaatgtaccataccaaaagcacaatcgactgtgggctatactcgtagtatctccgtctcggcgctccgctccgagtgcttttaagaccctagcgaacccgttgtgctcacagtcgattcagtcaacgctcggcgtccaaccgatcaagtcgctttataagaagggggatccgaagcatccccagtgggaatttctcgtgtgtgcatctggcctaggatttcgcaattgtcatctacctattccctctccctacaacgtttataaataccacgctcacacattgcggtgcaattaacacaacccggaaacagtttacaccgaattgctttaattcgactagaaggtttgttttcgtgtcttttattcatctcctaccacaacaagctgaaggtcggaaaagcgtaaacaatgcgcaatcgaaagcaacgggtttataatccgcaatggttgcatttttgcggcttacgtggaccgctttttgcgatctttcccctcgtatttatctcgctcccacttatgtgacccaaattcgggcacatgtttttgatagttgggataatctatttaaaaaaccttatcagcgggggggaactatcagtggttacataaaacccggcattggacccgcctccctcgcaagtaaatacatatgtatgtatgtatgtaggagcacaaggtcgagcccactcgatctagaaaatagtaacaatttaaattttgtgcaatataattaacgctgtagatgtggaccgcgtataggaaaagatcgcacgaccgcgcagactgtgaaaaaaaaaatatctcgtggactttggcccctcgtgcccagcgaaaagaaaaaaaaaacaagatcttataaaaagacaacaaatcgcgcatacattatttctgtgtgctttttaattttgccatgttgaggtggcttttgtagtggttattgttgcttctctcgccgatacgcaaacaaataaatgccggtagtggtcggtgctcaaaattattaagcatacgccgcatagtcgtcgccacaaagtgggtcatatgaaaatgaattcgtatcgtatcttgttgtggctatttcgagttggagctggtggtctttctggtttattgatatgtttggacaatagatatccgattggatgcactgaccttcaccaaggtttctatatcgatacaaggtttttcttaggctagagtctatcaaaacgaagtgtattttcgggcatgctgggagttcatgaggaacttttattcattttataaatagatatatataaataaacatacatatatgtgcatatatgcactgcacgtcgagttccaaacgttgaatagccactcgaacgaaacacaatcagcaatcaaatagttgtgcaatttatttgcgaatccaaacccggtgaaggtgtagaactgcagctgcctggcgaagcttacaaattatttatcgaagcaattatctttcgagtgaggagaggtgtactttgtctttgttccatccttgccagtcgaggccgttctagaattgaatgccatccattcgatggactgctgcccagagccacaatcacagacagactctatcgttagtctcgggcgatgataacccaagccccagctgaataaagctgcgctcagtgacgtcaatcatcaattgcatgtaaagtgttatgacatcgaaagctgtatattaattaatttatatatgtttgtataacgaatctgtagcgtgcaataattgaactttggactcgtacggctccaaacaaaacacttatgaaaacagagatacacaaatgtgaagtatctacaatctaaaacgcatttaaactcaacagcgagtgacaaaatggccaagatgtttttttgtttatgaatcacacggcgtgtttgtatgtctggcgatttccattccaccttatcagataatgtttactacgacccatctagaccacagagaaacaagttatcggtagtcaaaattgtggttttgatgggcgttcaccttggcgaaagatgagtttttcgattagcgcgtctgctgcatctgacttctatttgaattgcgctagatttcccttgactttagcttaaactttctatccgttgcttatgtacatatacctattatctgtctctcgcagcacttttcttgtacgtgggatatcattagcaacctacaggtatggccgaagcccatgccgccgtggcattctcgtttgccatcacccatgagggcttcgacatcaactatgaccacgaggtgctcaatttggtgtggaactcaggagttcgttcctggaaaaagcgattggctcgcgcaagggtaagttcaaatcgcagtttcaaatggattgcaacttatatgtaacttcttttcagaacggcgtacgcaatggcgtctatccggctcacatccagagcctctggttgatctcagcaatagcgctgggtctacactttgcgggctaccaggctccattcaatctgaccaaccgtatactggtgcacctgccttccaacacgataaactggcaggttaccgcctgctttttggccgctctggtggtctggctatcgatctgtttcaccatgagatacactctcaagctgctgctcatgtacaagggctggatgtacgagtccagagctcccggtagtcgtgtctctctgcccaccatgttgtgggtggcagtggtgcgggttctatctagttggaacaaaccgggtctgtacagcttccagggttctctgcccaggctgccactgccctccgttaaagacacgatgaccaggtacttgcgcagtgttcgaccgctgcttgatgatgagaactacacgcgcatggagcgcctggccaaagaattcgaacagaccatcggcaagaagctgcagtggtacctcatcctcaagagctggtggtccaccaactacgtgtcggattggtgggaggagtacgtctaccttcgtggtcgcagtcccctctgcgtgaacagcaacttctacggcacggatgcgatcttcatgaacctcaccgacaaacaggcggcgcgtgcggccaatgtgatttccctgcttctcaacttccgtcgacttatcgagcaccaggaactgcagcctgtaagtaatagcatttttaaaaatatttgtgtagatacagttttatgtgtgttaacgccgacacttgatctcgctaaatatttaaaatactttactgcacaattaactacgtcataaagccctcattagtcatatccgtttgctttgttggaatgtgtacatacatatgtacatatttgtatatgtaattaggacatatacttgataattgttgaaaaagaacgtatgtcttactttaaatctgtttaattatttttagatcatggttcagggcatgattcctctgtgctcctggcagtatgaacgtaccttcaacacagcacgcgtgccaggcctggaaaccgatcgtatcatccactacagggactccaatcacattgtggttctccacaagggctgctactacaagatgctcatctactacaagggtcgcatcctgcgcccatgcgaattgcaagtgtaagcgacttgtggccaaaaactttaagggacagtgattaattggtattattttgcaggcaaattgaggaaatcctgaagggcaaagcaactcccgtggaaggtgaggagcacttggctgccctgaccgcctggaatcgctccaagtgggcggaagctcgcaacacattcttctcgtggggagtcaatcaaacctctctgcgcaccatcgagtcggccgcttttgtgctctccctggatgatgagcccttcgagttcgatttggcgcgaccggaattgctggacaactttggcaagaagctgctgcacggcaatggctacaaccgctggtttgacaagtgtttcactgtctgtgtgggcaccaatggtcgcgttggcttcaatgccgaacacacctggtaagtggattccaatcgctgcagccaatatcttcctctcagcatccataaaatttctacgatttgccatacttaactatctgaaccgatttgtaaaattacaatccaaaaggtccgacgctgccatcgcgtcacacatgtgggagaacctgatcgtcgatgatcttgtatcggacgggtaatgattttcgattcctataccgcctgcaatttttcggtttcggttggctgcgtttagttatcatcacctatcacccattgtcccaatcaaaaattattattatttttattaactccggttgtggcctaacaatttatttacaccatctacactttttttatagggccgatgcaccggttttgggacacctgtgggagtatatatttggtgatgatatttatgggtaaacacttaactacaatgcacacaagcacaaagcaaagttattcaagtcatttttgggttgagtacgagagatcactaggcgctaaaagctttaatgatctcgccatacagtaaatactagcataacgaacttgaaacatacaaaatctagtatgcgaatgccagacacgttttaagggattattaatttattacatgaggaatagtttgatcagtacgcagcatattttatataagcttatgttggccatttcagttgtttttccttactttccttactgtctttatttactgtatttacaaattgtaatcaacccaaaagtaaacatttagtttattttgttttcgtgactaacaacaattacacaaaattaacaatactttgatttacgttgcttgccataaatttgcccacaaaccgtctccccacaatgctaacctattcccttggtaaccctgtagatatgacgaaacgggtaatacaaagggcaccccggcgttccagccacccacgcccactaggctcacttgggatcttaaaccatgcctggcgcagatcgaagaggccaccatcgatgtgacgaagcttatcaacgaggtcaatctgcgcatcctggtgcaccaggattacggcaagggctttatgaagaagtgccgcatctcaccagatgcctacatacaaatggccctgcagttggcctactaccgagatgccggtcgcttctcgttgacatatgaggcttcaatgacccgtctgttccgcgaaggaagaactgagacagtgcgtccgtgcaccattgagtcatccgcctgggtcaaggccatgcagaacccaaatacaaccgtaagattttacaattttatgtaattagatcaaaggctaatccatatatccatgctgtacagaacgatgagcgtgtgaagatgatgcaggctgcctgcgatcgtcaccagttgggctaccaggatgccatgtgcggtcgtggcatcgacaggcatctgttctgcctgtatgtggtctccaagtacctggaggtggattcacccttcctcaacgaggtgctcagcgaaccctggcgcctctctactagtcagactccgcacggccagacgcccaagatggacctgaagaagcatccgaactgcatcagcgctggaggcggctttgggcccgtggccgatgatggttacggtgtgtcgtacattattgccggagagaacctgatattcttccatatctcagcgaagactacgtgccagcaaacggtaatgaggagccctgattcatggcatggagcacagctaatcgaattgttttctttacaggatgtgcaccgcttcgctcagaacatatcgcaggctctgtcagacattcgcagcatgttcgagcagcacatgaaggaccatccgaagcccgccaaatcactcacaaacggcaaatccacataatcccgtttagtccatgtagtcgagattcttgttagcatttgtttttacccccctagttggtcgttttaaacacatctgatacatccgtctagttcgaaatgaagtgcaaaagtcgtcgtgagagttatacataaacaatgcaattttttataaacaattgtgacttggctggttttaagatttagtctttagatacttttgcacaatatttgatgtttctcaatcaattagtctgtaatcgaagaaatcgcgtaaccttaagtgctataaatatatttcattttaagcgtacgattggcctttgtctctatctctatcacgtcgccaaaggattggcatgtatagttactccattgatcttcttgtccacatggggacgatagttcttgggattgacgggcagtttctccagttcatccagggcatcgaatccatcgatcacacggccaaagagcgtgtacttcaagtcaagatttggctgggcggcataggtaatgaagaactggctggcattggcgttcggtccgttgttggccatggaaaccattcctcgatcagtgtgctgaagaattaagtggtcaagaattaaaggatttcttcttgtatcttgggaatcttttagactgaaaaacgaacccaaccacatgacatattaaaatgtaaaatgatatggatgtcaacatacattttgagattcatgtgctggttacattctaagattagatacaatataccctttaaagccggaatgctgggtattaaagccagctgtcatggcgcaactgaatgagggtttttctggtaaaacctaggtagccggctcaccttaatggtctccttgaattcgtcgtcgaacttctggccccaaatggactgtccattctttccggtgttcgtaggatctccagtttggacaataaatcccttgatgtttcggatgaagacgcagccgctgtaatagtcgctcgcacacagggcgaggaaattttcgcaggccttggggcaggcatcgcagaagagctctattttgaggtcacccacgtcggtgtgcagcgttacagactgcaaacaacacaacaaaatcggttaaaactgtaagaaatcagatattccaacttttgtttaccattttaaaagtgattgtgcagccctcgtttcgatatgcaatcggtccattaacgataacagaaatcgaaaacagcactatttggtattcccgtgaccgaaggtcacacttttaggcgcgaattctgccgcataaagtgatttttctcttcgcacttcaactaa

SEQ ID NO: 29372 - DNA, 2895 bp, DROSOPHILA
caacgctcggcgtccaaccgatcaagtcgctttataagaagggggatccgaagcatccccagtgggaatttctcgtgtgtgcatctggcctaggatttcgcaattgtcatctacctattccctctccctacaacgtttataaataccacgctcacacattgcggtgcaattaacacaacccggaaacagtttacaccgaattgctttaattcgactagaagcacttttcttgtacgtgggatatcattagcaacctacaggtatggccgaagcccatgccgccgtggcattctcgtttgccatcacccatgagggcttcgacatcaactatgaccacgaggtgctcaatttggtgtggaactcaggagttcgttcctggaaaaagcgattggctcgcgcaaggaacggcgtacgcaatggcgtctatccggctcacatccagagcctctggttgatctcagcaatagcgctgggtctacactttgcgggctaccaggctccattcaatctgaccaaccgtatactggtgcacctgccttccaacacgataaactggcaggttaccgcctgctttttggccgctctggtggtctggctatcgatctgtttcaccatgagatacactctcaagctgctgctcatgtacaagggctggatgtacgagtccagagctcccggtagtcgtgtctctctgcccaccatgttgtgggtggcagtggtgcgggttctatctagttggaacaaaccgggtctgtacagcttccagggttctctgcccaggctgccactgccctccgttaaagacacgatgaccaggtacttgcgcagtgttcgaccgctgcttgatgatgagaactacacgcgcatggagcgcctggccaaagaattcgaacagaccatcggcaagaagctgcagtggtacctcatcctcaagagctggtggtccaccaactacgtgtcggattggtgggaggagtacgtctaccttcgtggtcgcagtcccctctgcgtgaacagcaacttctacggcacggatgcgatcttcatgaacctcaccgacaaacaggcggcgcgtgcggccaatgtgatttccctgcttctcaacttccgtcgacttatcgagcaccaggaactgcagcctatcatggttcagggcatgattcctctgtgctcctggcagtatgaacgtaccttcaacacagcacgcgtgccaggcctggaaaccgatcgtatcatccactacagggactccaatcacattgtggttctccacaagggctgctactacaagatgctcatctactacaagggtcgcatcctgcgcccatgcgaattgcaagtgcaaattgaggaaatcctgaagggcaaagcaactcccgtggaaggtgaggagcacttggctgccctgaccgcctggaatcgctccaagtgggcggaagctcgcaacacattcttctcgtggggagtcaatcaaacctctctgcgcaccatcgagtcggccgcttttgtgctctccctggatgatgagcccttcgagttcgatttggcgcgaccggaattgctggacaactttggcaagaagctgctgcacggcaatggctacaaccgctggtttgacaagtgtttcactgtctgtgtgggcaccaatggtcgcgttggcttcaatgccgaacacacctgggccgatgcaccggttttgggacacctgtgggagtatatatttggtgatgatatttatggatatgacgaaacgggtaatacaaagggcaccccggcgttccagccacccacgcccactaggctcacttgggatcttaaaccatgcctggcgcagatcgaagaggccaccatcgatgtgacgaagcttatcaacgaggtcaatctgcgcatcctggtgcaccaggattacggcaagggctttatgaagaagtgccgcatctcaccagatgcctacatacaaatggccctgcagttggcctactaccgagatgccggtcgcttctcgttgacatatgaggcttcaatgacccgtctgttccgcgaaggaagaactgagacagtgcgtccgtgcaccattgagtcatccgcctgggtcaaggccatgcagaacccaaatacaaccaacgatgagcgtgtgaagatgatgcaggctgcctgcgatcgtcaccagttgggctaccaggatgccatgtgcggtcgtggcatcgacaggcatctgttctgcctgtatgtggtctccaagtacctggaggtggattcacccttcctcaacgaggtgctcagcgaaccctggcgcctctctactagtcagactccgcacggccagacgcccaagatggacctgaagaagcatccgaactgcatcagcgctggaggcggctttgggcccgtggccgatgatggttacggtgtgtcgtacattattgccggagagaacctgatattcttccatatctcagcgaagactacgtgccagcaaacggatgtgcaccgcttcgctcagaacatatcgcaggctctgtcagacattcgcagcatgttcgagcagcacatgaaggaccatccgaagcccgccaaatcactcacaaacggcaaatccacataatcccgtttagtccatgtagtcgagattcttgttagcatttgtttttacccccctagttggtcgttttaaacacatctgatacatccgtctagttcgaaatgaagtgcaaaagtcgtcgtgagagttatacataaacaatgcaattttttataaacaattgtgacttggctggttttaagatttagtctttagatacttttgcacaatatttgatgtttctcaatcaattagtctgtaatcgaagaaatcgcgtaaccttaagtgctataaatatatttcattttaagcgt

SEQ ID NO: 29373 - protein, 780 aa, DROSOPHILA
MAEAHAAVAFSFAITHEGFDINYDHEVLNLVWNSGVRSWKKRLARARNGVRNGVYPAHIQSLWLISAIALGLHFAGYQAPFNLTNRILVHLPSNTINWQVTACFLAALVVWLSICFTMRYTLKLLLMYKGWMYESRAPGSRVSLPTMLWVAVVRVLSSWNKPGLYSFQGSLPRLPLPSVKDTMTRYLRSVRPLLDDENYTRMERLAKEFEQTIGKKLQWYLILKSWWSTNYVSDWWEEYVYLRGRSPLCVNSNFYGTDAIFMNLTDKQAARAANVISLLLNFRRLIEHQELQPIMVQGMIPLCSWQYERTFNTARVPGLETDRIIHYRDSNHIVVLHKGCYYKMLIYYKGRILRPCELQVQIEEILKGKATPVEGEEHLAALTAWNRSKWAEARNTFFSWGVNQTSLRTIESAAFVLSLDDEPFEFDLARPELLDNFGKKLLHGNGYNRWFDKCFTVCVGTNGRVGFNAEHTWADAPVLGHLWEYIFGDDIYGYDETGNTKGTPAFQPPTPTRLTWDLKPCLAQIEEATIDVTKLINEVNLRILVHQDYGKGFMKKCRISPDAYIQMALQLAYYRDAGRFSLTYEASMTRLFREGRTETVRPCTIESSAWVKAMQNPNTTNDERVKMMQAACDRHQLGYQDAMCGRGIDRHLFCLYVVSKYLEVDSPFLNEVLSEPWRLSTSQTPHGQTPKMDLKKHPNCISAGGGFGPVADDGYGVSYIIAGENLIFFHISAKTTCQQTDVHRFAQNISQALSDIRSMFEQHMKDHPKPAKSLTNGKST

SEQ ID NO: 29374 - DNA, 4347 bp, DROSOPHILA
tatttcattttaagcgtacgattggcctttgtctctatctctatcacgtcgccaaaggattggcatgtatagttactccattgatcttcttgtccacatggggacgatagttcttgggattgacgggcagtttctccagttcatccagggcatcgaatccatcgatcacacggccaaagagcgtgtacttcaagtcaagatttggctgggcggcataggtaatgaagaactggctggcattggcgttcggtccgttgttggccatggaaaccattcctcgatcagtgtgctgaagaattaagtggtcaagaattaaaggatttcttcttgtatcttgggaatcttttagactgaaaaacgaacccaaccacatgacatattaaaatgtaaaatgatatggatgtcaacatacattttgagattcatgtgctggttacattctaagattagatacaatataccctttaaagccggaatgctgggtattaaagccagctgtcatggcgcaactgaatgagggtttttctggtaaaacctaggtagccggctcaccttaatggtctccttgaattcgtcgtcgaacttctggccccaaatggactgtccattctttccggtgttcgtaggatctccagtttggacaataaatcccttgatgtttcggatgaagacgcagccgctgtaatagtcgctcgcacacagggcgaggaaattttcgcaggccttggggcaggcatcgcagaagagctctattttgaggtcacccacgtcggtgtgcagcgttacagactgcaaacaacacaacaaaatcggttaaaactgtaagaaatcagatattccaacttttgtttaccattttaaaagtgattgtgcagccctcgtttcgatatgcaatcggtccattaacgataacagaaatcgaaaacagcactatttggtattcccgtgaccgaaggtcacacttttaggcgcgaattctgccgcataaagtgatttttctcttcgcacttcaactaatcaacagcggcacattaagtaaacaggatgaagtgcaagatacccgagatttcgtggcacaaccgcgatcctgtcctgagtgtggatatacagcaaaatggcctggggctgcgttctccgacgatatgccgcctagcctctggtggttcggatgcccatgtcctcatttggtatgttaaccgaagtgatgacgccgagggcgtggatgtggagctggccgccgacctgtcccggcatcagcgtgccgtcaacgctgtccgctggtcaccgaacggagaactgctggcatccggcgatgacgagagtgttgtctttatatggaaacagaaggccgaccacgaagttgtcaacattgtggacgccgatggctgcagtgaacaggacaaggaggtctggttgactctcaaggtactgcgcggccatcgcgaggatatctacgatctcagctgggcgccgaactcacagtttctggtcagcggatccgtggataacacagcgatgctctgggatgtgcacagtggcaaatcactggctattctagatgaccacaagggctatgtacagggcgtggcatgggatccctgcaatcaatacatcgccaccatgagcaccgataggtaagcagtacagtccaaaatgttcgaactttaatcgaatggagttaaatttcttttagacaaatgcggatatttgatgccaataccaagcgagttctgcaccgagtcagcaaatgtgtactcccagtaaaagaggaccacgagatgcacggcaagagcatgcgattgtaccaagatggaaccttgcagaccttctttcgccgcttatgcttcacacccgatggtaagctgctgttaacgccgtcaggaattaccgactacgatggtgttgtgaaacccataaacaccagctatgggtttagtcgccatgatttgtccaaacccgcctttgtgctgccctttcccaaggaatatgcggtggctgttcgctgctctccggtactgtaccgtctgcgaccgtacaatgcggagaagaatcctccgattatttcgctgccgtaccgcatgatctatgctgtggccacaaagaacgctgtgtttttctacgacacccagcagccggtgccgtttgccattgtgtccaacattcactatagcaggcttacggatttggcctggtcgagcgacggcaccgtcctgatcgtgtccagcaccgatggctactgctcactgattaccttcgagccaaccgagctgggcgactgctatgaagatatggaaacagtgctgagcgttgttctaaaatcttcagagaatgcaacggtgttgaaaaagaagaggcaaaagctgcgcaaggtatcgttggatgaaccacggaaaccactgcaggaaaaatcgaaaccaaatacaattagaagggcgtccgaagcaggtatcacagaggtaggggaacccgagttggatgctgaaaacgattcatcaacgcacagtgtcagttcgaataaaacgaacagtcccaaaacaaaagctagcgaagaggagaaacccactcccatcgccatcaggcgttcgccccgtaaaaattcgactgcacccatgccgattgctatacgcagagctccgcgtaagcccgaggataaggggaatagcgaatcgagcaagcccaaagacgaaatggaagttactcacacaaaaacgactcaagtgcagaaaacagtggcatcacctgtcaagcgcaaggtgagcacagaggcagtgcctccagcagagacatcacagccggcacttgcagtgattccggtgttcgagaaggagatcatcagttctgatgataagttcgaatcgcctgagaagaagtcccgacccgcaacaccaattcaagtgcgtcgccagccacgaactcctggcagctccagccaatttaatctaacgccgaaaagccaacccgccaagcaagctactcccattgcagtgaggagaactccacgcgtactcatcgaaatgccggtgaactcgcctgtggtcccaatggaggaggccatggatgcctggcccctcgacgagagcatcacacccctgccagcgacaaagaaggattctcgaaaacccttgccggagactgtaaagaccgaaacgaaaccagcggtaatagaggccagcgaggccacctgcgagcgaactgaggacattcgtctggtctacgaggatacgcaagaggaaacgccaaaaaatccgactgaatcggggccatccacgccgaataacaagacgccacgtcgcgtgtccttgcgaaccatatccacgcccaaatcaaaaaagaaacttttagagtagacaatgcaatagattagacttaacagatttatgttcataagattaagatttttgggatctttggggataccccatacaaaattgtaaaaaatagccaaaattcttcctaatatattccacaataaaacgcaacacaaggtttagaggtaattgtattgctttggcttcgggatctttaaaacgaaaattgcagtcaaaatgcagtagtaatttgcagtttgtacagtttcagtagttcctatatcaacatacacgattcttctacctgtgacaaaagtcatctgataagttatgtgactgtactggtcaactgtaccacgaaatcctcaaattaaaaatgcttcaagagggttgttctacctggtcccaagttaagtttccatgaatttgcacggggacgtattttttggaaggactttgtgaaaagacatttattaccagacagctaaatattttcaagcaaaattgcgacgaaaacagattttttacttttccgtgactaataagtggcaccaaattttttaattttcccctttactttttcaccacttttcctcctgattcttaaaattgtttgaaagtcgtgccatgcaatctgtcctagcgcgcttcgtcactacgtggactgccgtcgccagtgatgtattttcggacccagtagatgggtctatcttttcattcagaaacaacaaacttgcttggttttatttatatttatttaaattgtagatgatctctaacgttttgagtttcttttacatacaaacattttggtttacttcagttttttatatcattatttttatgttttatatattattttaaatttttaattcaacgattcaaattcattcatcatgttcgagcttagttagcttccgtggctcgcctcaaactcattttaaaaattttccatgggccattagctacacttcatccatgtggtcattagagagaggaaaggagctcaagaattgaggagaattatatttccacatac

SEQ ID NO: 29375 - DNA, 2288 bp, DROSOPHILA
cttcgcacttcaactaatcaacagcggcacattaagtaaacaggatgaagtgcaagatacccgagatttcgtggcacaaccgcgatcctgtcctgagtgtggatatacagcaaaatggcctggggctgcgttctccgacgatatgccgcctagcctctggtggttcggatgcccatgtcctcatttggtatgttaaccgaagtgatgacgccgagggcgtggatgtggagctggccgccgacctgtcccggcatcagcgtgccgtcaacgctgtccgctggtcaccgaacggagaactgctggcatccggcgatgacgagagtgttgtctttatatggaaacagaaggccgaccacgaagttgtcaacattgtggacgccgatggctgcagtgaacaggacaaggaggtctggttgactctcaaggtactgcgcggccatcgcgaggatatctacgatctcagctgggcgccgaactcacagtttctggtcagcggatccgtggataacacagcgatgctctgggatgtgcacagtggcaaatcactggctattctagatgaccacaagggctatgtacagggcgtggcatgggatccctgcaatcaatacatcgccaccatgagcaccgatagacaaatgcggatatttgatgccaataccaagcgagttctgcaccgagtcagcaaatgtgtactcccagtaaaagaggaccacgagatgcacggcaagagcatgcgattgtaccaagatggaaccttgcagaccttctttcgccgcttatgcttcacacccgatggtaagctgctgttaacgccgtcaggaattaccgactacgatggtgttgtgaaacccataaacaccagctatgggtttagtcgccatgatttgtccaaacccgcctttgtgctgccctttcccaaggaatatgcggtggctgttcgctgctctccggtactgtaccgtctgcgaccgtacaatgcggagaagaatcctccgattatttcgctgccgtaccgcatgatctatgctgtggccacaaagaacgctgtgtttttctacgacacccagcagccggtgccgtttgccattgtgtccaacattcactatagcaggcttacggatttggcctggtcgagcgacggcaccgtcctgatcgtgtccagcaccgatggctactgctcactgattaccttcgagccaaccgagctgggcgactgctatgaagatatggaaacagtgctgagcgttgttctaaaatcttcagagaatgcaacggtgttgaaaaagaagaggcaaaagctgcgcaaggtatcgttggatgaaccacggaaaccactgcaggaaaaatcgaaaccaaatacaattagaagggcgtccgaagcaggtatcacagaggtaggggaacccgagttggatgctgaaaacgattcatcaacgcacagtgtcagttcgaataaaacgaacagtcccaaaacaaaagctagcgaagaggagaaacccactcccatcgccatcaggcgttcgccccgtaaaaattcgactgcacccatgccgattgctatacgcagagctccgcgtaagcccgaggataaggggaatagcgaatcgagcaagcccaaagacgaaatggaagttactcacacaaaaacgactcaagtgcagaaaacagtggcatcacctgtcaagcgcaaggtgagcacagaggcagtgcctccagcagagacatcacagccggcacttgcagtgattccggtgttcgagaaggagatcatcagttctgatgataagttcgaatcgcctgagaagaagtcccgacccgcaacaccaattcaagtgcgtcgccagccacgaactcctggcagctccagccaatttaatctaacgccgaaaagccaacccgccaagcaagctactcccattgcagtgaggagaactccacgcgtactcatcgaaatgccggtgaactcgcctgtggtcccaatggaggaggccatggatgcctggcccctcgacgagagcatcacacccctgccagcgacaaagaaggattctcgaaaacccttgccggagactgtaaagaccgaaacgaaaccagcggtaatagaggccagcgaggccacctgcgagcgaactgaggacattcgtctggtctacgaggatacgcaagaggaaacgccaaaaaatccgactgaatcggggccatccacgccgaataacaagacgccacgtcgcgtgtccttgcgaaccatatccacgcccaaatcaaaaaagaaacttttagagtag

SEQ ID NO: 29376 - protein, 747 aa, DROSOPHILA
MKCKIPEISWHNRDPVLSVDIQQNGLGLRSPTICRLASGGSDAHVLIWYVNRSDDAEGVDVELAADLSRHQRAVNAVRWSPNGELLASGDDESVVFIWKQKADHEVVNIVDADGCSEQDKEVWLTLKVLRGHREDIYDLSWAPNSQFLVSGSVDNTAMLWDVHSGKSLAILDDHKGYVQGVAWDPCNQYIATMSTDRQMRIFDANTKRVLHRVSKCVLPVKEDHEMHGKSMRLYQDGTLQTFFRRLCFTPDGKLLLTPSGITDYDGVVKPINTSYGFSRHDLSKPAFVLPFPKEYAVAVRCSPVLYRLRPYNAEKNPPIISLPYRMIYAVATKNAVFFYDTQQPVPFAIVSNIHYSRLTDLAWSSDGTVLIVSSTDGYCSLITFEPTELGDCYEDMETVLSVVLKSSENATVLKKKRQKLRKVSLDEPRKPLQEKSKPNTIRRASEAGITEVGEPELDAENDSSTHSVSSNKTNSPKTKASEEEKPTPIAIRRSPRKNSTAPMPIAIRRAPRKPEDKGNSESSKPKDEMEVTHTKTTQVQKTVASPVKRKVSTEAVPPAETSQPALAVIPVFEKEIISSDDKFESPEKKSRPATPIQVRRQPRTPGSSSQFNLTPKSQPAKQATPIAVRRTPRVLIEMPVNSPVVPMEEAMDAWPLDESITPLPATKKDSRKPLPETVKTETKPAVIEASEATCERTEDIRLVYEDTQEETPKNPTESGPSTPNNKTPRRVSLRTISTPKSKKKLLE

SEQ ID NO: 29377 - DNA, 4722 bp, DROSOPHILA
ttagcattttaaaaacttaaatagcaaattcaactcatagagagccagactatttttaaacgattgcgttcttctcaattgactgctaaaatcgaaatttgcataattcgcggggaatattactagttctatagacatttcagggttgcgttctctcgacgtttcgaaaacatacatatttacacttaaatctcgcatttaattgagcatttcgttgcctggggcaacaccattgtcagttcgaatgaagtaacaacagtcaagtcaaaggcggcaaattgttggctaaattgtggggcagggtgctgcataaaacaaaagccaataaaaacgcttcttctatttgcccagtgacatgcgagtgtaggcaaatataatgcaagttcgaggtgggtatatgtacatatgtacatatgcatgtatatacatatatatatatatacatatatatctgaggtcctgaaagctagtagatggagttgaatcgcttcattttgtgtttgatgttgtcgtcgccggtctgtctgcacgcaagggcaagcgacctcaaagggggcgtttgggtggccaaaaatggggtggggttttagccacaccatacccaggcatgctcacacttttacagacagaaaaaagtgaccaaattgttaatgaaatcgcgccactttaggtcttcagactgaagtttgttaatgcaattttggatgatataagtatctctcttttcggacatttaaataaacacacctttgtctaattaaagatacaaatatggttaaaaaagacttatattcaacaatctaattattgtagtatatcattaagagcttcgtcttattggactataattgaataagtttgtatggataatcagctagaatgcttgcacattaagttatagcacatttagtttcatagattttactcccacataataattttattgagaatgtgctaatagttttcgctctgtgtactttccggcttgtccctttgtgtgcactcactttttattcgccatggaactcagaccgtcgatgccctcactgcgccactacaagggcgacctgcgacgcgatttctttggcgatgtggccggcctaattggcgtgtaagtaatgtgcttatataacggatattgtggcaggctccaaccaccgtacttactatttttgcacattatttttttttgtacctcattcaggcatggccccaagtgggaggccttcagacaggaggtgcagcacatcctgctgcagccgcagaccgccaagaagtacattccgccgctaaatgacattgccagcgagtttatgggccggtaagtcggagcctaagcatccagccaagctgtgatgcaatcaacatatacttgggtatacctacatatactctatatccatctgcagtatcgagctgatgcgcgacgaaaaggacgagctgccagccaatttcctgcacgagctctacaaatgggccttggaatgtaagttgttgccaatttcgtttcacttatgcgattatgacactttgctggccaatcgcattgaaatattgaagacgcaattaggctatacttttcgaatccaaggactattgcagtgcccccttgacagttataaactaatttcgggaagattttcaagtgttttagttatttttattttgttaagactgtaaagaaaacttttttagagcatcaacaaatttaactaacgctgtgcatccttctagttaaactatttatttaaagttttcagtacaatttgttagctcgaacaacaagtaaacttcatcaactcttctattagcatattagaaaacttttaattgcctgttttagctacaacatggtattagtttttcttggaaagcgtaaagtgtactgtacagtgtattggtcttcctagaagagaaacgatagtgcttataaaatttatgagctgccttgacgtaactttgttaattaatttattgaaacgaactctagctgtcggtcgcgtttccctggacacgagattgggctgtttgtcccccgagggcagcgaagaggcccaacagatcatagaggctatcaacacatttttctgggccgttccggaattggagctgcgaatgccgctatggcgaatatatcccaccaaggcatacaggagcttcgtcaaggctttggatcagttcacagcgtgagcatagcataaaaaacgcgaataattgagcaaataataacatcaagaaatcactttgcatcccagaatttgcatgaagaacattggcaagaccatggacaaggccgatgccgatgaggctagaggattgtccaaatccgaggcggatatatccattgtggagcggatagtgcgaaagacgggcaatcgcaaactggctgccattttggcactggatttgtttttggttggagtcgatactgtaagctaatatactatctaatcgataaatttagtaatatttaatgcataaatctatcttgcagacctctgtggcagcctcctccacaatctatcagctggccaaaaacccagataaacagaaaaaactcttcgatgaactgcagaaggtgtttccccatcgagaggcggacatcaaccagaatgtcctggagcaaatgccctacctgcgagcctgtgtaaaggaaactctacggtatgacagttttccattcaattgagttaattgagtgacttctttaacaagtaaaattccctttaacattttagaatgcgacccgtggtgattgccaatggacggagtcttcagtcggatgctgtcatcaatggttaccacgtgcccaaaggcgtaagtttccgggaaatggtgaccatttggaatgccagctcactgccatctctgtttcctttcagacacacgttatctttccccatttggttgtttcaaacgatcccgcatatttcccagaacccaagcgttttctgcccgagcgctggctgaaacagtccacggatgcaggtgagttggataccacagaacgctttcgttgagcaccataaaatgccgagcacttggctcttaaaaaacagtgaatgttttggtgacagactaaaatatatagagaagagcagaaaaaaggcttaaaaagtacagtttaaataaaaatgggtatataatcaaacttttgatcgcaccagaaataaaattatcaagtatctagtagttattatatatgtatgcatattttatgtgtatctgcagatttgttaacgtacaatgcttaattgtttattgcgctttcgatacacaaaaatttaagtgctttcgtgcgcagatataatttattttctttcacgacaggttacacggtatttttttggtccaaggtcgcattttttttttcgcagtgttttaaccagagtggcgtttcttttcagctggctgcccccatgccaaccaaaaaattcacccattcgtgagtttgccctttggctttgggcgtcgcatgtgcgtgggtcgtcggttcgccgaaatcgagttgcacacgctgctggccaaggtgggttttaatcatgttttgcacctggctttgccagagttacccccttttaatttgccatatttgattcccggcacagatcttccgcaaatacaaggtctcgtacaattccggagagtttgtgtaccgtgtgaactccacgtacattccgcagtcgcctctgaatttcaaactaacgctgagggacgagtgagctgtctgcaccaaagggaaccggaggcccatcatggagctcaaagctgcagttacacacggcggatgtgtgatatttatagtcaaagctcagctgctgttgctatgcttcattttaattaagcaaatgtacatggagcacagttccgacaaattcagtacatcccatcgccacgagcgcagttttgtgggtgcgtgtgcgagtaactaaactcaataatcgttgtgtatttatgctgatacatgtgtatataggacccattatatccgccccatgctttagtagtagttttcttctcgaagaataattgtaaccaataaagcgtcgaaaagtatgcaataagctgtctgtttctgtttgtttttcttgccatgcattatcattaatcaaaagcctagtgagcttaacttgggacaaagtgtgatggctaaggtcaagcaaacgccaatctagactcatgattaattactttttagtaagtgtatcattagctctgttgcttgaatatgctttgctgactttaaggggcatttgaagactttttcctaaagccacaaagctgcacaatttaatttatttttagaaaattatacaacgcataaaacgcaaaaatattcggttacaagagtaattaaattggcgaaaatcacgtattccaaagtcattgggatgtggcttaaaatagacctgaagacagggccaataattatatatttggccttggaaagctgaagagtattgaatttcaggtggcagaaatataaaagagcgtagtcctcaattaattttaaggtgcagtcttgctcttttaatctgctaaacaattagctttaaactttaacaattagctacaatttacttttgctagactctattgtacagactattaaatcactaccaaatataccatttaaaataatattcaactattcaatcagcctgcgtgtttgccaactaattgaaataattcgaaccaccatttgtccgcatcacttggcac

SEQ ID NO: 29378 - DNA, 1267 bp, DROSOPHILA
cactcactttttattcgccatggaactcagaccgtcgatgccctcactgcgccactacaagggcgacctgcgacgcgatttctttggcgatgtggccggcctaattggcgtgcatggccccaagtgggaggccttcagacaggaggtgcagcacatcctgctgcagccgcagaccgccaagaagtacattccgccgctaaatgacattgccagcgagtttatgggccgtatcgagctgatgcgcgacgaaaaggacgagctgccagccaatttcctgcacgagctctacaaatgggccttggaatctgtcggtcgcgtttccctggacacgagattgggctgtttgtcccccgagggcagcgaagaggcccaacagatcatagaggctatcaacacatttttctgggccgttccggaattggagctgcgaatgccgctatggcgaatatatcccaccaaggcatacaggagcttcgtcaaggctttggatcagttcacagcaatttgcatgaagaacattggcaagaccatggacaaggccgatgccgatgaggctagaggattgtccaaatccgaggcggatatatccattgtggagcggatagtgcgaaagacgggcaatcgcaaactggctgccattttggcactggatttgtttttggttggagtcgatactacctctgtggcagcctcctccacaatctatcagctggccaaaaacccagataaacagaaaaaactcttcgatgaactgcagaaggtgtttccccatcgagaggcggacatcaaccagaatgtcctggagcaaatgccctacctgcgagcctgtgtaaaggaaactctacgaatgcgacccgtggtgattgccaatggacggagtcttcagtcggatgctgtcatcaatggttaccacgtgcccaaaggcacacacgttatctttccccatttggttgtttcaaacgatcccgcatatttcccagaacccaagcgttttctgcccgagcgctggctgaaacagtccacggatgcagctggctgcccccatgccaaccaaaaaattcacccattcgtgagtttgccctttggctttgggcgtcgcatgtgcgtgggtcgtcggttcgccgaaatcgagttgcacacgctgctggccaagatcttccgcaaatacaaggtctcgtacaattccggagagtttgtgtaccgtgtgaactccacgtacattccgcagtcgcctctgaatttcaaactaacgctgagggacgagtga

SEQ ID NO: 29379 - protein, 409 aa, DROSOPHILA
MPSLRHYKGDLRRDFFGDVAGLIGVHGPKWEAFRQEVQHILLQPQTAKKYIPPLNDIASEFMGRIELMRDEKDELPANFLHELYKWALESVGRVSLDTRLGCLSPEGSEEAQQIIEAINTFFWAVPELELRMPLWRIYPTKAYRSFVKALDQFTAICMKNIGKTMDKADADEARGLSKSEADISIVERIVRKTGNRKLAAILALDLFLVGVDTTSVAASSTIYQLAKNPDKQKKLFDELQKVFPHREADINQNVLEQMPYLRACVKETLRMRPVVIANGRSLQSDAVINGYHVPKGTHVIFPHLVVSNDPAYFPEPKRFLPERWLKQSTDAAGCPHANQKIHPFVSLPFGFGRRMCVGRRFAEIELHTLLAKIFRKYKVSYNSGEFVYRVNSTYIPQSPLNFKLTLRDE

SEQ ID NO: 29380 - DNA, 2482 bp, DROSOPHILA
cctgctgtgtgcgtgtgtgtgcaggaggctctcttttgcgtttggctgttcttattggttccgttcgctttgcgcttctttttcgcgactcgctgtatttattgcaccgatcgtgatagtttaccgttgcacttgccgagcacttgcacttgtatttttggccgcagtgatattggtaaattgcacttttctggtgtgcgaaaatttagctgctctctctcgcttcgttcgctctttccaactgcagagcgaggcgttcgaacagctgttggcggcgtcggtgcgcagcactggacgcggcgggggtggctgttgaccagcactggccgcaacaacagctgctgcaaaacaagcttatatttaaaaatttaaatttgttaaaatcttccgctatttatatacatataatttaataaaatgttttatataaatatgaaagaacatgctcactttagtttcaataaatattttgcatcactttgtatgtacagacatttatttttttattatgttttgaaacttatctggattttaaatagcaggccactcaaaaggatctcatgaatacaatatttgagctttaagtgatacaaatagagatatattttttatttatattattgcaaataattattaaaaattcgcatacctttcataacaattgcagtgcatattctcccaaatatattcatatttaaaataaaacaactattttaatttaaattcgcctgaggtttgaacggttaaataaaataaatgattaattcaacaaagtgtgcactttccagcactatttatagcaacagccgattattatagcaggaatctatcgattatacttaactttcttagccaacactgtcgttatatcattgttttggtcgtttcctaaaatgttgcggcaatttatagtaagtttatggccccaaatgtagtaaaatataattgattgcttaattggacacaggtatctacggtaggccgtcgcctgcaactacctatgatggcccaaagtcgcctcgccagcaatttggacaaaactgagtacacaacacccggggaaattgtggactacgatgatccgccgcatttgccagttccggaatatcctgtccgtcccgatgagccgctggaaactcgcaagcagcggtatacgcttaaaatgaaaatatcccaaactcctacttatgatcattcattatcttgtgcagccttttgtatcaaagcaggaaacgcggaatgctggaaaacgatctcttgctgagcacttttgtggccaagcatttgaaggacttcaatgccgagcagaccgccgagtacgatcagttgatcaatggtgtcagcaacgactgggatatattctactgggccaccgataccaagccaacacctcctcaattcgataccgaaataatgcgtctgctaaaggagcacgtcaaaaatcatgaaaaagtgcaaaggataaggcagccggatttgtgaacattataaactatattatatatataagcatacaaaacaatgtattaaatgaatgtgttattctactcctgatccttaaaagaccaatgacttgaacttgcattttacctggtatttaaaaacgatcatttatacggaataataaataatacggttgcaagtgatttggtaatttgaatgtgctttcatttttatttttatttgttgaaaacttcagcttaatcaacaaatcatgacatttgaaaagatacaattttaatatataaaactgaacacattgtcagaatggcatatatttaatccaatttgaaccccctttaaaacacagttctcgctttcctgaaatacacatccatacaatatatttaaacgattatccagttaaattctattcatgtttgccgaatgtgtgtatgaccaatcttgtatatatagattaaattttaatacgcttaaacactatagcgaaacattacacttaaaatgttcatttgcttttgcttagtcttgccacaagacacgggatggcgcggagtccatcgaaaatcgctgaaaacacggagaattaaaacgcgaatgtctaccagttaactatggattcggttctatattaacatgctaaggagatgattgaacagcttttgctccaggctagtcccttcactatcaattctagattatattttggtgtgtgattgttgtgtttcgggcggtggaagcgaaaaacaaagggctaattcaatttcaagggtcgtgtcgcagcacatttcgcaaatttaattatacatcataatattacacactttatgcttagagaggctatataaaatatatgttaaaagttattaaaaatcacgccaaatcaaaggccgccaaacgcatagcatctttagcataatcgaacaattaaaagaacggcgattagttttaaataggcgcactgaagccggttgcgcaggtaaaaaagaaagagaacggaagtaacaacaaaatttaacct

SEQ ID NO: 29381 - DNA, 420 bp, DROSOPHILA
atgatggcccaaagtcgcctcgccagcaatttggacaaaactgagtacacaacacccggggaaattgtggactacgatgatccgccgcatttgccagttccggaatatcctgtccgtcccgatgagccgctggaaactcgcaagcagcgccttttgtatcaaagcaggaaacgcggaatgctggaaaacgatctcttgctgagcacttttgtggccaagcatttgaaggacttcaatgccgagcagaccgccgagtacgatcagttgatcaatggtgtcagcaacgactgggatatattctactgggccaccgataccaagccaacacctcctcaattcgataccgaaataatgcgtctgctaaaggagcacgtcaaaaatcatgaaaaagtgcaaaggataaggcagccggatttgtga

SEQ ID NO: 29382 - protein, 139 aa, DROSOPHILA
MMAQSRLASNLDKTEYTTPGEIVDYDDPPHLPVPEYPVRPDEPLETRKQRLLYQSRKRGMLENDLLLSTFVAKHLKDFNAEQTAEYDQLINGVSNDWDIFYWATDTKPTPPQFDTEIMRLLKEHVKNHEKVQRIRQPDL

SEQ ID NO: 29383 - DNA, 2926 bp, DROSOPHILA
tagcacaaaaactgtacttgtaacttatgaaacacgatcgagctactgggagggaactcttctaattaaacttatcaattgttgcatttttggtatccattatgactagatattgaattttaaccatatgattcctatttgggctgctttcatgcgtactgtcttttgccttctgaatgagcgatctgcccatccgacttcccaaatccattccatctttatgtgtgacttactgagagaaaacctatgctggtgtgctaattttcgatagacccacgcacacagtctcacgatttcactcgctcttcactttcaattagaggctcgttttctgtacgtgaacgggagagccgtgcgatctatggaagtgtgcgatttttgcaggcactcacaaataccatcacgttgctcgccgctctctcgctctcaatatccgcctatcggcgtggctgtatgtttgcaggtgttggtgcttcgcctctgtttaccaacaccatttaacatttaaatgcgctctcgctctctgtttatgtttggagccggcaaaaccgtcaactgcatcaaatcagctgttttgatactagatcctgaaggaattggttctggactgattgatttattcgaacaagtttaaattaaaagaaatatgcgaaactgtacttcattttgcgttacatctaaaatgtgttcgtcacagagtccatttttgtgtgacgccccaaacaggtttttttaaggcccctcttgaggttcacacaaatatggagaccccgtacgaggcctcatctttcccctcacaatgtccccaattatcactgagttgtttgttagtctacccgcagcaccacgtactatacatacaaacatacatatgtacatatatgatacgataagccagctcccgttctctgtctctatcggtcccctttcatcaaattgatccagtcgggtataaaagacagcgagctctcccagtcagtattcagtaagcaacaagtgtgcgagctaataacagctaccagctgagcaactaacaagtttttttccaagtgaaactaaaaatcaaacagcaagatgcgtttgggacagaccgtacctaacttcgaggccgacacaaccaaggggcccattaaattccacgagtggcagggcaactcgtaagtgccatcaaaccctttttctctgatcgaatcttaccaattctccttcggatcgccagctgggtggtgctcttctctcaccccgccgacttcactcccgtctgcaccactgagctgggcaggattgcggtgcaccagcccggagtttgccaagcggaacaccaagtgcctggcgcattccgttgacgcattgaactcgcacgtggactgggtgaacgacatcaagagctattgcctggacattcccggggacttcccctacccgatcatcgccgaccctactcgcgacctggccgtcaccctgggcatgctcgacgaggagcagaagaaggatcccgaggtgggtaagaccatccgcgccctgttcatcatcagtccggaccataaggtgcgcctctccatgttttaccccatgtccactggtcgcaacgttgagtaagtacctctttctggctacaactattgttaatctcaactgacgatcctgtaatcttacagcgagattctgaggaccattgactccctgcagctgactgatcgcctcaaggtggtggccactcccgccaactggaccgtaagtttttctacccacttaatgcgaactgttccgaactaattaattctgtttcataaacagcctggcactaaggtcatgatcctgcccagtgtcaccgatgacgaggctcataaactcttccccaagggatttgataaagtatccatgccatctggagtaaactacgttcgcaccactgagaactattaaagacctacatacctgcatgtatttttcttcctgttgtgccataaaaagttaattactgcaaaataaaaattttatattctgaaactattaattaaaaactttcttattttaataaaaattattttgtcagcttcgctttcacaaaatattacaaaactgcgaatgaatatttttacaaaatataataaaatgaaaaaattgtctcgcaatatcgaaagaaagtcgcatagcagcgttcattcgcacagacataaaccgccaaatcgactcgtctagcaatcgtgatcgagaatatatatactatatagggtagaaaacgcttccttctttctacttgttacatatgtaaattgctctactggtaatataatgcaatgcatttttagtcttgaaataatgctatagtcgaacaccccgactatcagataccgaacgcgaaatttcatcatttttctgagatatcgatattggggcataacatgagaataaattttaaaattgtttaatagtgtgggtgtgaccggtttggtggctttagggcgttagagtgggctgggcaattagttttttgcaaatcgacagaaacttacaagactaatataaatatatactaaatttcaacacatttttcaaaagtatataagtgtgggcgtggcaggtttgtgcaagccactggcactctaagtgcacccgctaaaatatggatgtctaggcaccagggtgttttttaaaataaaataaataaaaaatatccgagagttttgccaccctggtgttttgtggtacgagcaaaaaagggtctcattcgagtgatcaatttggaaatataacaaacaatatcctgaatcgcacttctgacagcggaacctaaatttttacaaaaatagatttttctatgagttattttcggtctaatcgatagaaatttacaagactaataaaataatgaaaagaaatcaaatcatttttaaaaggtgtgtaggccggacggacaaacatg

SEQ ID NO: 29384 - DNA, 738 bp, DROSOPHILA
gcgagctaataacagctaccagctgagcaactaacaagtttttttccaagtgaaactaaaaatcaaacagcaagatgcgtttgggacagaccgtacctaacttcgaggccgacacaaccaaggggcccattaaattccacgagtggcagggcaactcctgggtggtgctcttctctcaccccgccgacttcactcccgtctgcaccactgagctgggcaggattgcggtgcaccagcccggagtttgccaagcggaacaccaagtgcctggcgcattccgttgacgcattgaactcgcacgtggactgggtgaacgacatcaagagctattgcctggacattcccggggacttcccctacccgatcatcgccgaccctactcgcgacctggccgtcaccctgggcatgctcgacgaggagcagaagaaggatcccgaggtgggtaagaccatccgcgccctgttcatcatcagtccggaccataaggtgcgcctctccatgttttaccccatgtccactggtcgcaacgttgacgagattctgaggaccattgactccctgcagctgactgatcgcctcaaggtggtggccactcccgccaactggacccctggcactaaggtcatgatcctgcccagtgtcaccgatgacgaggctcataaactcttccccaagggatttgataaagtatccatgccatctggagtaaactacgttcgcaccactgagaactattaa

SEQ ID NO: 29385 - protein, 69 aa, DROSOPHILA
MRLGQTVPNFEADTTKGPIKFHEWQGNSWVVLFSHPADFTPVCTTELGRIAVHQPGVCQAEHQVPGAFR

SEQ ID NO: 29386 - DNA, 2661 bp, DROSOPHILA
aatttgccagcaagcagctgaattgttggggaaattcccactgccagcgacagatgctgtatacaaatttgttaatttcgccagcgctaatttgatgtaactaattaaaaaacactttaagtgaaatatttgccagtcgcataaatatgccaaattgtgaggagcacaccgacatagatccatgttggagaaaatctaattaatgtgcgaaacaaacgggcgggaaatttatttagcgcattcggtgaaggcaaaggacacctggccacctgccctccctcggccccccactactgctacttcattttcgtcctggcggcaataattgcgtacatttttcagaaacagacaacaacaagtggagcactccaagtgccttcaagtgccggcaatctgtgtcctgtgcttgttttgactgtctgagtctgacgatttgattcgcctgccggatttctgaagcatcagcatctatatatatatatatattctactataccatatactatggctatgggccagcttcgtacctttctcactcatatgtctaactgtctgtttggttatctgtttgtttgcttgtttgtttgtttgtttgtttgttggtccttggcgcgtttgcgcgtgttgtttgaattgaatttgttgccctttgacgtgaattggattgctgacagactggattaatgggccaagccgaaaagatttcaaaaatgccagatcgatgcggtcatttctaaaatgtctagtggaaaaggttgattttttaagtaataatttatacgattttccagctcgtcttgaagtagcactgaaaattcttaagtgtaatgtatagaaccttacaaaaacgtgtattaaacagcaaatacatcgtcgtgatgatcaatctcaaatctagccaatacacatgcaatattcaagtagagtaaaataaatgctgggtactttctttattgatttcctttacttccgttttttttttgtgcatattttcagaaccatgtccgattcgggatcgatacacctgcacgcacctgtcgcgagcccgttgtaatgctaataaattctcgggtgccattggtttaattaaagaaccgtcagagccggactccgcggagggcacttgaccagcctgcagaggaggtggacgggctgaaggtaaggggcattgttcgaccagaaggacactcgccaatctgtggacgcgcctacgctcgccgcggcccaatcgggccactggcggctatctgctgacgggcacaagtgcgccgcgtgacgatgagttcgtcgcaggacggaggcatcttctggatcagggcaaggataaggataaggagcagcagcagctggggcggcgggcatacgcacctgccgatgagtgcttaattaatgtgacggactttagtgatatacaaataagtgaggggactggcgaggcagtggccaagaccatcaccgagctgagagtgcccaccataacgaccacaaacaacagcaccaccatccacagcaacagcaacagcaacagcaacagcaacagcaacagcagcaacatcaacagcaacaacaatagcaacatgtcgcgccttatacaaccgcgatatcgttttcgggatctattactgggcgatttctcatttaacgacgacggcgaaaggtgagtggaaatgtacaatacattattatattcgcattgcgcatacgccccattggcggtgcagcagttggcggcgtatcaccatttgcttactacatccgaaaatagattcttaattacactcaccaactgcaattggcaaaatgattttcttctactactgcaactagcgatcgattaatcgatttttacttaaggcggatataacgtcaatgtcctgtcttctgaattattcaagcgaatgtttaaaggtcgttacgtcattcaaagtccaagataaaatgaactagatatcgaaagggttgagaaattagttgggagtaccatgtgtggtgtggtcttaactgtgaaactaaaactgtagtctttaactattgtaatttaatcaacttcttgattacgaagtgccaaaaaatggtgttcagtagaagatacattaatccgcttctaagaactgcagaaaaaattcgtttgattgaatatataaagcaaacacacgcagcgtagcgatttggtcaccttttcccattcccccaatgcaattgtttttaaaaatcgaacatttcgcatgaaaacctgtctaaaaaggagaaccccgaaaccaatcaatatctgcagctcttgccattctgtttgagtgccaattcagtgccacgaaattacaaaaacccaaagtggattcacagcaaagaaggggtcgagaataatttgatttagctattggggagcgcacaaccataaaaactgaaaaccatatcgctattctacacattcagcgctataacgaaatgactgcgataatcgttatgggtttttaatatatatatacatattttttttttggtcgaacagctttcagtgaatgttcagttaatttagttataatccaatgattgaccacagcatatctatcatattgtttgtgagtctttgcgtgattacaatgggatcgaaagcgaaagtaagtttattattgaatatttaatgtattgtgcagtattatt

SEQ ID NO: 29387 - DNA, 531 bp, DROSOPHILA
atgtccgattcgggatcgatacacctgcacgcacctgtcgcgagcccgttaaggacactcgccaatctgtggacgcgcctacgctcgccgcggcccaatcgggccactggcggctatctgctgacgggcacaagtgcgccgcgtgacgatgagttcgtcgcaggacggaggcatcttctggatcagggcaaggataaggataaggagcagcagcagctggggcggcgggcatacgcacctgccgatgagtgcttaattaatgtgacggactttagtgatatacaaataagtgaggggactggcgaggcagtggccaagaccatcaccgagctgagagtgcccaccataacgaccacaaacaacagcaccaccatccacagcaacagcaacagcaacagcaacagcaacagcaacagcagcaacatcaacagcaacaacaatagcaacatgtcgcgccttatacaaccgcgatatcgttttcgggatctattactgggcgatttctcatttaacgacgacggcgaaaggtga

SEQ ID NO: 29388 - protein, 176 aa, DROSOPHILA
MSDSGSIHLHAPVASPLRTLANLWTRLRSPRPNRATGGYLLTGTSAPRDDEFVAGRRHLLDQGKDKDKEQQQLGRRAYAPADECLINVTDFSDIQISEGTGEAVAKTITELRVPTITTTNNSTTIHSNSNSNSNSNSNSSNINSNNNSNMSRLIQPRYRFRDLLLGDFSFNDDGER

SEQ ID NO: 29389 - DNA, 2471 bp, DROSOPHILA
tgattatggagaaacttactaatgtgtcggataagttgcagtcagctcttcgtagttgtctatactatcattcactacttcaagaaacttctgattgacaatcggtaaaggagtattgaaattttggtgtggagttttgccaatttgacgccttaaaatacgtatttttatttaactatcacaaataaaaagctatcgttaaatctctcttaaaacgccacatgcgtaattggtattaagtaaaatttattaagtaattttccaactgaacgattgcattgtggccaattaatataccatcaatcgaattgaggtggaaaaaatataaacatttattcagttgcaattccatgccgttgctgttctctctttccgttctggttgcaaaaaaacgaggtaattccgactaccaaataatttatacatatctcgatatacttaaatttcattgaaacgggcaatacggactttcctttgaagtcggtagaacgtattgtgatcaagattatgttgagtacttttgtatggtcccatcgcgagtcttctgttgtttggaatataaaaacgaaaatatatgcagtgctctataaaaaggtgttaaagtgaccaatagttttcatatttatatttcataattacacatatatatactgctcaaggataacaatccgactttatgttgtcatgttagcttttagaattttataatgtatctttgccttaataataaacaaatgtgggtggcaatttttatgttaattggtttatcaagtttatctttaatcattaattggttttgtgggcaattaagtgttcatcagtcgaactgaggtcagaatataaaagcatttggtcagttggtatatgatggctttcactggatgttttattctttttttccgcttgcttttcatacactcagtattagcaatgaatgaggtatgagcacttcaaaagcatattttaaactcaaattaaatgtgttaaattacattagcgaatggtcttccaaaaaggcaacatcgagttcattctggagtctctggagacgaactgtgaccacgattacgttgagtatttccgcaaagttccaaacacgaaactgctttatacctttcgagtggttaaactggcacctgctttcaccatcgatataacagtgaaagtagttaaaacccaaaggattttctataagatggagaacataaagggctgtgactttctgaacaatccgctgctgttcaaaatgtttggtgaggtctacaatcacctcgtggtcaatggcagttactttaagtgccccatcaagccaaaggtttactacctgaaaaatgagggtacggtgtcaataattcccagcatccatccacctggacggttccagttgtcgatgcgtgtgagaatggcggaaagtcgagcgccattcgttatggaaatgttgtggaagtataaaattgtgcgtatcaaataaaaaacatttgtaattcgtgtggtgtgctgtgcaaattgcttgagttgctcatatgccgtgtagttagcagtcatttcttcataagttccgtacactagaacgactagacgcctcgcaagttgctcatacgccgcgtagtgcgcactcgttgctcatacgcaacgttgtttccactcactcccagaggtgccgttatgtgtggcacggccgtgtgcgttttggcactcgcaaaatcataattcgacggcaatgccttctttgcatttaatgtagcgtaaacattttaattttttataagcccggccgccccagccattgccaatttcgcacggctcttctctgctcagctgactgcgacgtgcgcaagtggccgtggctgttgcctttataatgccacgtagtcccaaccacttggcccggcccatagcacatggcccatggcccagggcccagaaactcgtgacgggcctgttcactgtgtcacggatgcctgcacgtcctggctgggcaggattccctacctgaaatcggttataaacggcttagtaagctccggcgcttgttgaatggtgccccaatgccaccgaaacgacgcgatcctgtgccccacgagccttgggttcggtgccactaaacccacagaagggctcgcatatgtggaaatttatttactcgctctacccacgtctcgatgacggattcaatttcgcattttattaacttttgataacctaaccgggatttgtaaaatggatatataactcaagtgcttattacatttagacattcagtgtaatttctagaaagtttcgattattaaagaaaatctgggattaattcaaaagtaattgttatattgtttctttaataataaactggaaaatcgaatataaccgagactgtggttagagcatttcatatccttaactctttgaggaatttccgttttgacttaaaggctttgtgacacagtgtaaaccttttcggcaaaaccctttta

SEQ ID NO: 29390 - DNA, 471 bp, DROSOPHILA
atggtcttccaaaaaggcaacatcgagttcattctggagtctctggagacgaactgtgaccacgattacgttgagtatttccgcaaagttccaaacacgaaactgctttatacctttcgagtggttaaactggcacctgctttcaccatcgatataacagtgaaagtagttaaaacccaaaggattttctataagatggagaacataaagggctgtgactttctgaacaatccgctgctgttcaaaatgtttggtgaggtctacaatcacctcgtggtcaatggcagttactttaagtgccccatcaagccaaaggtttactacctgaaaaatgagggtacggtgtcaataattcccagcatccatccacctggacggttccagttgtcgatgcgtgtgagaatggcggaaagtcgagcgccattcgttatggaaatgttgtggaagtataaaattgtgcgtatcaaataa

SEQ ID NO: 29391 - protein, 156 aa, DROSOPHILA
MVFQKGNIEFILESLETNCDHDYVEYFRKVPNTKLLYTFRVVKLAPAFTIDITVKVVKTQRIFYKMENIKGCDFLNNPLLFKMFGEVYNHLVVNGSYFKCPIKPKVYYLKNEGTVSIIPSIHPPGRFQLSMRVRMAESRAPFVMEMLWKYKIVRIK

SEQ ID NO: 29392 - DNA, 2285 bp, DROSOPHILA
tttttgttttggggtgtgcgtgggtgtgtctccttttgaaatttatttttcattatgctgatgagaagcgctgctcgccacgccccgggctcatttcagtttgaaaagggtctgttaactaacttattttaggagaacataacttgattaattaataaaatgaaacatggaaactttttgctaaaaacaaggcggcattccctttctttagtaccacaagattatttaaataaagtaaatcatttagaccaaattatttttggtgtataaagaattcactttccttcttggttattaaaacgttacattttatagaatatgtttaaaaaacagtttacagcattacatcaattattatgagagtaaagtacgcatatgcataaaattgggagggctttatcgtattcattaagatcattttcgactaaaaatatgatattttaaatttttggtaaccataattttgtataagcttgttgtagggattttcgaaagtgacttagagattgtcatggcttttgattgattgaatagctgcctgattgatcgtagtggtgtttgaaccctaaactttgcaaatttttgcgtgctgcaagtcggctgcactcaattagccagccgacgagtgtgagacagtggagaggtcacagggggtcatccatttatcaatgtcacttagttgcagaatatagcgatgtggctaaagacgagagcgggatcgaacgacggagagagacagccaattgtttgggctgattgtgcttaatgaagtgtcggatatgtcatgagcccagacaataaacaagccttcgcagtccgcagaccgtgctcggtgcagatgcatctgtgagatacaaaacatgaccgggaaatgtgaaaagtaagcagtgacaacgagccgcgagtgtgagaacacagctaaattatgtagacctggtcagaaccggtgacctggtcagaatcgtacacatatcccgaatcgcctcccgtgccgaaggacatgagccaaaacctccaagtgagctacaccgctttggccatgtcggacgataatcaaacctgcagctactcgatgccctcggtggcgtcgcccagcctcaatcaccgcctgcagcgcaatgtcaacttcaacgaggacctcaacgacctggccggctaccccccgcagcagctgcccaccgccccggcggtccgccgcttctccaagtccattttccagcgaccgcgttccatgtccgtttggagtgacatcagtcgcagcagtatgcgtctggatgaaaggtgagtgacggctccgaattgggcttggttttagggtttgtgggtcacggatcggggttccgtggttgtcgcatttcgtacactggggaaaaattatcaattaaaagaggtatacatgcggttgtacccatcaattaaaacattataaacgaagaaaatgtagaaaaacagaaagaattgccgatgttaaaaatatatcgttcgtgatttagttataagatatttttcttcactacaatagtattgcattttggaaagatctttttaccagtgtagcacctagtctaattaacgccaggacatcgaagacaatagactttttatgaatttatacagattccataagcatagtttctagaaatccaagtggtgtttattatgcgaatgttttctctgtgtgaacagacagttccaaggcgatttgtaccatgtggcttggtattcagttggttggccttccttcaggcgaatttatgtgttttttgtattcttaggctgattgcgtgtgttgaaatatacataaatatttgcttttatccgtataaaggcctgacaaaggtgaatatcccctaagcgatttattttcttttttttttgtgggtacgtgacacacaagaaagtgttataagccccatctgattacagctaatctatcaaggacgaaaaatccattcaaagttggcattgattttatgagacaatataccgatttggtcaccttaactttatgctgtaaaaagtttgcatataagcaaataatggaaattaaaatttaaaaataacagaaatatgcatatttaaaggaaattcctgcgctcaaaaactgacataattaaaatcataactataatttttttttataaatcaagcatgttcctctattcgaattgcttgtgtaaatggtcatttcatttacgcataatcaggattctacttccactgcttgacattaggcgacaaatgagttttttattatcacggatttaagcaccataaatcgttct

SEQ ID NO: 29393 - DNA, 285 bp, DROSOPHILA
atgagccaaaacctccaagtgagctacaccgctttggccatgtcggacgataatcaaacctgcagctactcgatgccctcggtggcgtcgcccagcctcaatcaccgcctgcagcgcaatgtcaacttcaacgaggacctcaacgacctggccggctaccccccgcagcagctgcccaccgccccggcggtccgccgcttctccaagtccattttccagcgaccgcgttccatgtccgtttggagtgacatcagtcgcagcagtatgcgtctggatgaaaggtga

SEQ ID NO: 29394 - protein, 94 aa, DROSOPHILA
MSQNLQVSYTALAMSDDNQTCSYSMPSVASPSLNHRLQRNVNFNEDLNDLAGYPPQQLPTAPAVRRFSKSIFQRPRSMSVWSDISRSSMRLDER

SEQ ID NO: 29395 - DNA, 3782 bp, DROSOPHILA
tacaacaatatttccattccctttgatacagccataggcgaattaaatagtagcagtaaaatcaaagacgtcgatattaatagcatctatggcttctgcaactgatctattccgtccacattgttaaatttagaatccttttgtccaaaaattttctaatagggacaaaacgtaggcaattagcttaaaagttataatgagataaaagaaagtccactgcttgagcttgtttaaaaatatggtgtgtgtgtgcccttttggcaggagaaagtccctaaccctttgaatttctgctctttctcctccatttgcggttttgtactgaggtttgttgtttccgttgctttgttgcatttgacattatgcgcattaaatgcgcttggaatgctctgcttcctccggctgccaggactcctccttccttccacaaacacaaactgtcactgacaatgataagcgggcgaggaggagagccggaagtgtcggtaaggaggcaggagagccgggagctaagaaccaggagccagaagagacaggagccgggagctgggagtcgggagactgcagacagaggtagacagctgccaaagcgctttgtaaattatgtcgttgaggggcttcagctcgagtgggttttatggggaaagtaaccaaaaccggaataaaagcactaccgtatggcaggacataaacatgtgtgttcgaaagtttccgagcttggggcacaatggctgctctgcctttaattaaatatgtacaaacctggaggttgccgcggtgtgaaagtaatttgagtttaatattcatgctaatttaaatatgaaaacgcagttcgcggattacagtgcttatacgtaatgcttagcttgattgctggttttcagagcactttagatgggggtttgatataaattacattagtggtatgcggatatgtacgttttaaaacgaaaggcagtttcgtctgtgacatcagttcagtttcaaaaggccataaaaaatgaggcaaataaaactcttagtctggttactggtcgtcggagtggtttcctcaacggaacaacttcaattcctaaagaatttcctagaagcggtgcacaaagagagatctatttcaactattcttcttattcaaaggaaagttcataaaaatgattttctgcacggactttaccccatattctggccaataatttgcttggacgaaactaaaagagttgaactagtaaacaattttaacaaggacttcctggcacttgtttatatggaatctgaggcggatacattgctactgtcggcattggctgccgatttaaatcatattagagacgcaaggattatgatctggttacagatgagcccttcggaaaattttcttgatcgtattgtttttcaggcatctaagcagaagttccttaatctcgtggtaatagaaaatacattaaaaactcgacgattttatccatttccccagccaaaagttcaagttatcgacaaacctttcgaggaaaaagaaatatatcccgctctttggcgcaacttcatgggcaaaaatgcaatagctgtgcccgacttggtgccaccacggagttttaattcttttgatccaaaaaccggtcatagaagggaaagtggatctatctacaatgtcttcaaagcctttacgcagagatacaatattaccatgctcctgaaatggccgctcatcagaaatactacccaagaggaaattatcggaaaaagtgttcgtggagagatagacttaccaataaccggacagttgattagctttagacacccaaacggaagtaggtctcagcctcttttaggaatgacagccctatccattgctgtgccttgcggccccgagttgccaatgtttgatcggttctttttgttctacggactggctacacccatcaccataactggatactatgtcctgctaaacaccatagagatcatacttggaactctgagcgatcgaatcaaacgccatccaagacgtaagaagatcctgaatctggtgcttaatctacgggtatttagttgcattctgtccctgcccactccacaagggaatcgacttagatccgtcaagggtcagctgaccatggtgatgagtatcacaggcctaattctctcctgcattgtggcagcacaaacgagtactattctcaccatgaagccccaataccggcatatcaagaactttcaggaactgagcgacagtaacataaccgtggtatgtaaccaccttaactacttgaccatcaagcagcaaatggaccccaagtttatggccaagttcatgcagaacatctggatagtgaacagcattgagcagatgaagatgatctttgatttgaatacgagctatgcctaccagacattctcctacaaaaaggacccatttacactgcttcaaatgcacactacccgtaaggcgttttgcaggaccccgggcttagatttggtcagtggactcgcttatactgcggttctcgaaaagaattcgatctacgcactggccttgcaggactacaccctaaaggcttttagtgccggtcttgtctattactgggcggaagagtctattcgggatcttatctccaccgtggggcgtacacaatttgaaaagctacccattgtgatcggctatcaatctctgaagctgcaggattataatgtctgttggaagattttactaatcggtggggcactagccttttgtgtattcatcgtggaagttgtcgtgggcttgattaatcgtcgaatatgaaagacgatggataggaaaatatattataaaatgttaaatattataaaccataatcaaattgcaattttaatttatttgcttgcaatgctttcttaacgttaataaaaattttaattgtgtgtcctaatcaaaaaagcaccgtgtattccattctgaaatataaagtataaagggggttgcccaaaagcgtatacctttcctatctattttcactgtgataaaagaacaaatgttgtattaatagtaattccaatttagtgggaatatgtaactcttaatttgattacgggctggcagagctttttacatgggtgtccgatttgaaatgcattattgcaaagatgcacggatatgactttaaaatggaaatgcacatttccaagtgattttagttcactagaattaatccagaagtcatgagggaagctcagataattattttcttgttgacaagtgctgcagcagtgaccctgaaacaatatgaattcctttaaagtttcctgaaagcaggggagcaggaacaaacgattactactcttctgatgatgcaaaagcacgttcacacaaagaatcttcttcaaggactatatccataaccctggcccataatccatttcgttgaaactcaaagaattaagttcattgctctgctctatatgagttctgaaaaggatatatttctctcatcattggctgccaatttaaagttcgaaagacttgataagccctttggaaagtcgaatattttccctgttctatggcgtaattatatgggatagatcgctttgacattagaccacttggtggaaccacgaagtttctactggacggatcccagaacgaatataaaacgtcgcactggatatatttacatgctgattacaaattttgccgagcagcacaatattactttgcaattgtaaagtcctccaaacgaagatatgtcgcaaatggtaatcatcgaaaggacccataaaggacccagatctacccataactg

SEQ ID NO: 29396 - DNA, 1782 bp, DROSOPHILA
atgaggcaaataaaactcttagtctggttactggtcgtcggagtggtttcctcaacggaacaacttcaattcctaaagaatttcctagaagcggtgcacaaagagagatctatttcaactattcttcttattcaaaggaaagttcataaaaatgattttctgcacggactttaccccatattctggccaataatttgcttggacgaaactaaaagagttgaactagtaaacaattttaacaaggacttcctggcacttgtttatatggaatctgaggcggatacattgctactgtcggcattggctgccgatttaaatcatattagagacgcaaggattatgatctggttacagatgagcccttcggaaaattttcttgatcgtattgtttttcaggcatctaagcagaagttccttaatctcgtggtaatagaaaatacattaaaaactcgacgattttatccatttccccagccaaaagttcaagttatcgacaaacctttcgaggaaaaagaaatatatcccgctctttggcgcaacttcatgggcaaaaatgcaatagctgtgcccgacttggtgccaccacggagttttaattcttttgatccaaaaaccggtcatagaagggaaagtggatctatctacaatgtcttcaaagcctttacgcagagatacaatattaccatgctcctgaaatggccgctcatcagaaatactacccaagaggaaattatcggaaaaagtgttcgtggagagatagacttaccaataaccggacagttgattagctttagacacccaaacggaagtaggtctcagcctcttttaggaatgacagccctatccattgctgtgccttgcggccccgagttgccaatgtttgatcggttctttttgttctacggactggctacacccatcaccataactggatactatgtcctgctaaacaccatagagatcatacttggaactctgagcgatcgaatcaaacgccatccaagacgtaagaagatcctgaatctggtgcttaatctacgggtatttagttgcattctgtccctgcccactccacaagggaatcgacttagatccgtcaagggtcagctgaccatggtgatgagtatcacaggcctaattctctcctgcattgtggcagcacaaacgagtactattctcaccatgaagccccaataccggcatatcaagaactttcaggaactgagcgacagtaacataaccgtggtatgtaaccaccttaactacttgaccatcaagcagcaaatggaccccaagtttatggccaagttcatgcagaacatctggatagtgaacagcattgagcagatgaagatgatctttgatttgaatacgagctatgcctaccagacattctcctacaaaaaggacccatttacactgcttcaaatgcacactacccgtaaggcgttttgcaggaccccgggcttagatttggtcagtggactcgcttatactgcggttctcgaaaagaattcgatctacgcactggccttgcaggactacaccctaaaggcttttagtgccggtcttgtctattactgggcggaagagtctattcgggatcttatctccaccgtggggcgtacacaatttgaaaagctacccattgtgatcggctatcaatctctgaagctgcaggattataatgtctgttggaagattttactaatcggtggggcactagccttttgtgtattcatcgtggaagttgtcgtgggcttgattaatcgtcgaatatga

SEQ ID NO: 29397 - protein, 593 aa, DROSOPHILA
MRQIKLLVWLLVVGVVSSTEQLQFLKNFLEAVHKERSISTILLIQRKVHKNDFLHGLYPIFWPIICLDETKRVELVNNFNKDFLALVYMESEADTLLLSALAADLNHIRDARIMIWLQMSPSENFLDRIVFQASKQKFLNLVVIENTLKTRRFYPFPQPKVQVIDKPFEEKEIYPALWRNFMGKNAIAVPDLVPPRSFNSFDPKTGHRRESGSIYNVFKAFTQRYNITMLLKWPLIRNTTQEEIIGKSVRGEIDLPITGQLISFRHPNGSRSQPLLGMTALSIAVPCGPELPMFDRFFLFYGLATPITITGYYVLLNTIEIILGTLSDRIKRHPRRKKILNLVLNLRVFSCILSLPTPQGNRLRSVKGQLTMVMSITGLILSCIVAAQTSTILTMKPQYRHIKNFQELSDSNITVVCNHLNYLTIKQQMDPKFMAKFMQNIWIVNSIEQMKMIFDLNTSYAYQTFSYKKDPFTLLQMHTTRKAFCRTPGLDLVSGLAYTAVLEKNSIYALALQDYTLKAFSAGLVYYWAEESIRDLISTVGRTQFEKLPIVIGYQSLKLQDYNVCWKILLIGGALAFCVFIVEVVVGLINRRI

SEQ ID NO: 29398 - DNA, 3262 bp, DROSOPHILA
aatcgggacttacccaaagaacttccgccatttcctgcctttcccaaggacattgggcggcattttggggaagggacgtggacatgtcgcccagaatgcggttcatatttcaatttccggaatggaaggagcatttcagctttcaagccatggtcctccgtttgcggacagttgccactttgttgctgccttcagtcagttgggaagtttttcacatttcacattttttgttcaaaattctatttcactttaaatttgattgatactgcggaagttggtttgcgccctcgagcgtatggctctctatttgatttagctttgccattagtttgcttttgtaatctcgggcttgctgggattaaatgtgctgctatttcttaagctgtttgagtgccgagtgaatcattattattaatttctttgccttggctgttgaaccatcctaagctaaatatggttttcatatatatgtggtttatgtactgtggcactcttttctgctttcgaaatcaccaagagcttattggttttttattctagctattatttttaatgccttgttaataatttataatttctgtaaatactattttgtatgaagtgcagaaagctcccaaacataaacacacaccacagaacacttttataaaatcaattcatatattgtatctgtaaattcgctgtgcttttccatacgcttcataataactcatgctttcgatgccaataaaaactgaaatcgacctgcaaacaatgcgaaataccttacaaaattaataaaactatttgtgaaaaaaatgaaaacaattaaaactccctcaacaaaaataatcgaaacattgtgcacaatgactcggcgaaattcaacggaaaatcaacccaaaaacaaataacgaaccattgaaccaaccaattgaaattatttctgcaatcaactcgtcataacatccgccacccacccacaaaacaaaaccaacccaccaccacccgcagaatgtcaatgttcttctttcgattgcataacctgcagcgcgccgaggagaacaagcgcaagaagcgcgtggagcagcagcgccagcagcaacgccagcggaggggggccaaggtgttcaagtgtgtcagtgattccaccggccacctgaccttggccccctcgcgcctcttcgagcgcacgccgatgagcccctcggacagtctggacgagatcgctctccagatccccaggtgagtggagtcgaaggcgtggcttcgatggttgggttctccgatctgcgggtgccatcgagttatgctcaacttgataaacacatttaagtaaaatgacaatacaaatgataatttataaataatttatcttaaagaagtagagtatggtgcctatactctgaattatcgattgtcattaggaatgacttaataatatgttccctgagtcctgcgcaactatttattttaaagggctgtttataaaagaaagaaatattgagtgaagaacaaattatgtaatatttatcaacgttttttgcctttagatagaagcatttattcaaagcatgtaaagtgttggacttgactgcaccaagtggtggtaaactacttttttcacaagtggggcaataaaggatttcatggcttacctcacccattcggttttatctgctgctgagtgacagcgaactagcttcagaaacttgggcactctatggcttgtgtggtttggtgcggctctggtgtaaataaataaaccaaatgggatttttcaagtcactttgaaaaaaatgtggttatgtcaagaaagctttacaacgaacatatgttacatatgaaatagctgaaaattcattttactctggatattattctacagattatttcttggttattaagttgccgaatttagaaaggcttttggccgtcaggcaggctttgctattccatccattctatttcagccttatcacatatcaaaattttaaaaattttaggtttccaaaatttgtaaattttataccccgattagctagatttttattccctaagatgcggatgctttgcgacagactctccgccctgacggctggtgccatggtcggcgtttggtacgcccagaacttcccctgcgaaaatcctacggatggaggcgacaaagataaggccaaggacaaggccaaaagcacggataagggaaaagagaaggagaaggataaggggaaggggaaggatggtggccaggacaagggcaaggagaaaggcaaggaatagggataagaaaatagctaaaaaggggtggaaaaatcacaccatttagacgatacaatacgatacgtatgtgcaagtcctcttaaacgaatttctcctctagttagtccaaaacgtactagtagacatgagcaaaactccaacgtcgacgatgcaattggcttgaaaaggaaaagtttgaagtaaatggccgctgataacgcttccgaaagagctatgtttatatggttttattatcacatgctctgaagcagatgttaacgattttgcatttaaataattatacgagaatgcgtattgtatcatcttaaacatcgtatctttaatttttggggataaatgtcaaatgacaatggcttaaagctcgctgcgtaaattcgtatttacttattttggttgtgcccccaactgatttgaatttcgcacagtgctgcatgcgacaaaagtacgcagcgatttcaataaaagttgctcaccgaggtggtgtaatggtactctaatttcgcattttcacagcccagggacacacgtaatcccacctaattaaattgtcctttgaaatcgttcggttaattaagtgcgcgccaaccccaataatttatattgtgtagaaagtgcttcaaagcaggctgtgagatttgggttaatgggctttgaaacttcgtgccgacacttttcagttatccgttttggccacagcagcaaacttccatgaatctggaaaaattcaaaattgttgaaatttaaaaaatcatttgttgttctgaggacaccgacgtcttcctttggttatcatctagcaacaccatgcatttgatgtgcgagcgattgtctgcggtttttgcgggcgtcctagtgggtttgtggtacggtaagaccttttccgaggacgaaaagcccaaggagaagggcaaggacaagaagaagtagaccgaccgatcactcgcaagactggcagaaatcaatacgatcttcttaggtgcgtatctattgtgcgaaaatg

SEQ ID NO: 29399 - DNA, 426 bp, DROSOPHILA
atgttcttctttcgattgcataacctgcagcgcgccgaggagaacaagcgcaagaagcgcgtggagcagcagcgccagcagcaacgccagcggaggggggccaaggtgttcaagtgtgtcagtgattccaccggccacctgaccttggccccctcgcgcctcttcgagcgcacgccgatgagcccctcggacagtctggacgagatcgctctccagatccccagactctccgccctgacggctggtgccatggtcggcgtttggtacgcccagaacttcccctgcgaaaatcctacggatggaggcgacaaagataaggccaaggacaaggccaaaagcacggataagggaaaagagaaggagaaggataaggggaaggggaaggatggtggccaggacaagggcaaggagaaaggcaaggaatag

SEQ ID NO: 29400 - protein, 141 aa, DROSOPHILA
MFFFRLHNLQRAEENKRKKRVEQQRQQQRQRRGAKVFKCVSDSTGHLTLAPSRLFERTPMSPSDSLDEIALQIPRLSALTAGAMVGVWYAQNFPCENPTDGGDKDKAKDKAKSTDKGKEKEKDKGKGKDGGQDKGKEKGKE

SEQ ID NO: 29401 - DNA, 2762 bp, DROSOPHILA; identical to SEQ ID NO: 28708

SEQ ID NO: 29402 - DNA, 701 bp, DROSOPHILA
gcagcaaacttccatgaatctggaaaaattcaaaattgttgaaatttaaaaaatcatttgttgttctgaggacaccgacgtcttcctttggttatcatctagcaacaccatgcatttgatgtgcgagcgattgtctgcggtttttgcgggcgtcctagtgggtttgtggtacggtaagaccttttccgaggacgaaaagcccaaggagaagggcaaggacaagaagaagtagaccgaccgatcactcgcaagactggcagaaatcaatacgatcttcttagtcgagtcggcaaacttcgagccacttcaacgtcctgtcaacgcggcagctctgacatagctcagtgtttatttggctttacaatcagtatatcagactttcgacgtacacaaaatttataacgtgtttggttttaatttaacatccatcagacagcgattccagttttggtctaaattgtggcaaatcctgtcgagcttttgcagccatgccctgttgtaagcgtaccgaggtccgcagggtgtgccggccgatgccgtcgctccttgccaggctcaactgtacgccgtgcaaccgcgtcctgttcttcgtcatcggggtgggactgggcgtgctcttcgtgcgcaacaaggacgacaagtcgggcggcaaaaagaaggacgaaggcaaggccaagaagtaggactgaccgatctgccat

SEQ ID NO: 29403 - protein, 64 aa, DROSOPHILA; identical to SEQ ID NO: 28710

SEQ ID NO: 29404 - DNA, 17736 bp, DROSOPHILA
tgtctaatgcgagttctgtactgttcaagaattatatctagatctattttcatgaattcttttttatatctataaattgttccaagtgtaaagtaataaggtatcggaaagtgtgcagccagctgcgtcgcctaatgtgataagtaagcgcatcaattgtcaagtgcagcgagtggcgccacagagatgggggaattcgattggcggggataagggcgtgatggcgaacaagggtccttgcaaaggctttgttctacaattcaatttagaagctcaatcatcagtgcgctgcattctgctcgtttctttgcagagttcgggtggagtactatgtgaacgaaaacacattcaaagaaagactgcaactctatttcattaagaatcagcgttcaagtaagtaatcaccagccaagtattgcctatgaattaaccaaaacattcgacttaattacaacaatcaacaaggtagtatttaattgaatttgattagtggcgggctggacgggaaacggatgtacggtgtatcctgccaggatacaatcgccagcacactgacaaccgcacaaacccacccacagacacacaaacacacagccacacaagacagacggacagacggacagacggacggactaacgaatgacattacaaaagcggattcgataatcttaagtaaatattgatttggagagaaaataattgaacaggtaaacaggtctcgattgaggggggacttgtttgtttgggcccgcagggagcaacccactcaacgaactttcgtagacggtataattcactcaactgacccaaattctaacgcatttgctattccactttcctaaaaaataaggcctgcgcatacgaatcgccgacttattccttaagttactgtcgtgtgttctctacataatacgtgtgatattggataaaaatccaacatttataacatggtaagtcctgtgagggagatgcaagtgaccggtggttaaaatatatccaaatgccaacccatagctatggctgcgaagtgggcaataagacggagttcatcatctcggccaaactgacggaggaggagttccaggagaatccaatcattaactgggacgcaatactctgggtgaatcggccaacagtgctctgggtcctgcagctgcttctagccatggtgtcgctaacgcaatccttggttctcacatatctaggctataaggtataccaccacgtcataaacgtgatatcacaaactcgttgaaactaatcaaaccatttcagggcaacatctggcagcagatactctcctttcactttatactagaattagtaacgacaataccctttgcacttacggtaggttcgagtttgaatccttagtacaggctgtttagcggtgttgatcctttcagattgtccatcccccgctaagaaatttattcattcccattttcctcaattgctggctggccaagcgatcgctggagaacatgtttgtaagtggaaatttcgtccatatcctaatgtgaaatttatctaatgtcctataaccaatagaatgacctccatcgcgccatgcaaaagtcccagtcagccctctcccagcagttgaccattctatcagccacactgctgtgtttggtcttcacgaggtaataggataccaactttccctgaaatcatccctcaatataatcattttttatttatccccagcgtttgtggtatccagcactttcagcgcgctggccatcgacatttgaatctctttcagagcacatactatgtggttgtgaccttctccacagtgggatacggcgactttgtgccggacatttggccctcgcagctttatatggtcatcatgatttgtgtcgccctcattgtgttgcccacgcaggtgagtccaatcttgggcattacccaagccaaataggagtagttccgtttaaaagccatcttactgccgggcaaaaaagccacatcaaatatttatgctccataagcctggacgaaccttatccccattcatcatctgcatctttgtgggggtgggcgactttggtcatcaatcgatattaataaatagggggatgctgtcgatggaaattgctcaccattcgcccgtctgccttcctatcagtgatcccatcccgatggcggactgtctttccgaaggccacactgactgactgccatgttcaacaatttgcaaacaattgttttatcaacaaaaacaaacgccaaacaggcaaggagcagtaggagtacagattccaccgagaaatgtgagatgggatagactccaaaaattgcgagtactgtaatccaacaccctttaggtcattttaagatggatgacaaagtaaataaaatataatttactaatttccaaaagaaagggaacataaaaatggaaatgtggatctgtgtttaaatgaatgatcttaaaacaaaaccaaaaagtatagtatcaagggatgaacaatttgagaaatcaatgtatatttattttggatttttaatatatacaatatataacatctgaatggcagatcccaagtaaatatatatatagtctcatatagcatcgacataagtcaattgaaagtgtatacaaacacaccattggccattggtcttttggccgaacggcaaacaacaagagcatccatcaaaacagtttttctaccttttttctgaaacagttttggttgtggaatggggttttattcagccagcactaaaagttcgaagtgcatgtcaatatgttgcagaatttatgactttctgggacccgcccaataataaaaacaacaagtttcgaacgtttttggtcaaaatgttgcaaaagtccaggaaaggtgctggcactcaaatttaattgaacttattcaatcccagtaacgaaattatccctaaagaggctttcaataaacaatgcagggtaggagaccagtttcatttctataaatattctgaagaaaaatattatttcaaatttatcccttcctcttatcattgccaccaagtagcgaggtcgcaataacctttgcgaaactgcacatcaaaatatttttataagtgcttcccttttgaaactacggttttttttaatggcactgcctgtaaaccgacgagttttatatgaggtaaaaggattaagcggtatcaactataaactttgcccatttatgaagtaagtgataagtcgtttctagtacatgttggtgttgaagtggacataaagacgtgttacagggccattaatttagtgcaagcccgaaagagagaaagcgtaaacttaaagagcttaatgtcaacgtcaaacgtttaaaagatgatattttctcgatgggattgatgatgtatttggctaataaattactcctatccacacagtttgagcagctcgccttcacgtggatggagcgccaaaagctgggcggcagttacagttcacatcgcgcccaaagcgaaaagcacgtggtggtgtgctccaccaccctgcatgcggacaccataatggacttcctcaacgagttctatgcccatcccctgctgcaggacttctatgtggtgctgctcagtcccatggagctggacacgacgatgcggatgatcctgcaggtgcccatttgggcgcagcgcgtcatctacattcaggtacatgtcctccataatccggattaggcttacactactaactggccgatgaacacccacgcctttgcagggatcatgtctaaaggatggcgacttggcgcgcgccaggatgaacgaggcagaggcgtgctttatcctggcggccagaaattatgcggacaaaacggccgccgacgagcataccattctacgttcctgggccgtcaaggacttcgcaccgaatgtaccgcagtatgtgcagatattcaggtgagttagcaatgcaggagatggcccgttccgttcccgattaattcgaattttcttttgacatttgcaaatgccaaatgcggcgcaaccaatcgcacatcctgcggaatttccatttcgcatttccgcttcacgcagacctgagcacaagctgcatgtgaagttcgcggagcacgtggtctgcgaggacgagttcaagtacgccctactggccaacaactgcacctgtcccggcgccagcacactggtcaccctgctgctccacacatcccgcggacagtacgtatacgcatggttgtccagctggcaggacatgcaaaaaattctctatacgccgtgcgtcatcggctcgcttggatgcgtcacgtcaccggcggagtcggtggccaggtcacagtcgcttgattgctcattcagacgtttttcctcaggcccttatgtacatatttagtatatatatatttttttgtgtgccagctaatttagtctacccgcggtttggggggttaagtgcataagctggttggttaggccatgattccgagcttattttttgcttattgaaagttttccttgtaaatccaagaaaaactaaatagggaaatgatggaatgaaattaataatatacaagttgcccattaaaatatatttttaatgataatcctttaagtagaagagtacgagttatgcatattaaaaacttgtatatctcttaaatataaataagttatatagagagtatcaagagttcgctattcttacttagccagcagacatgttaattaagctttacagatcaacgttgaatagctggaaaatacatttaaaaaatacattttatcttccgcacttacatgacacaaaattcaatttaaaattccagttttaattaaaagcgctttgtgacacgccaaagaaaaaccaaaaaccttactcgccatcggcaagtgtgaaaattagcagagcgcaggtggcgagttgaggtgaaggcggtttgcgggacctccaattaaatgcggctttcagttttagtttccgtgagctgtggtcgcgtggcatgaaacggcgggttaatcagatgtcagcaaatgctaattggggcaccaactgagccatgactcatgcgtttcacataagcctacaccaagatacatccctacaagtgtacatatgtgtttcgaacaatccgcagggagggccagcagagtccggaggaatggcaccgtctgtacggcaagtgttccggaaacgagatctaccacatcgtcctgggcgacagtcgattctttggcgagtacgagggcaagagcttcacctacgccagcttccattcgcatcgcaagtgagtactcggacgccatcggtttggggatccccgaaatccccattcacaggcggaattcatgttaaaccatgaaaattccatacaattccacttccgcagatatggagtggccctggtgggcgtgcgaccggcggagctgccggaattctacgaggaaaccattctattgaatcccggacccaggcacattatgaaaaaggatgacacgtgctattacatgagcatcaccaaggaagagaattccgcatttgtcgttaatcaaaatcaaacatcggaccccacggcagctgccaaggaggggagcgggacagggggcggaggcggtgcctcctcatccgcctcccaccaccacactgctgcaactggtgggtagaccctttctttagacccaattgtgtgagtgtgtgtgtgtgtgtgtgtgtttgagtctcaatcatttaaaattcaagcgagtgaatgaacaaactactatgtatatccatttacataaaaacataaatatcatatatataaattgtgagcttccttatttagcaaccagttcttgctctacctctctctttttcttccctcttcttatatttatccaataatccttatttctgaggctgagttaaaagttttcattgtcgttatcctcgacttttcagtttgtttggtttgtctgaatgaaaagaaaacgctttaagtgtgtgtttgtgagcgaggctgcctcacattaacgttaatcataatattcgccttgcccgaattcgttttctcttttttaagtttgtgaaactttccaccttaatcattttgtatgggttccattttgttaattaacttattcccacgaggaagttacttaagcgcttaattttcctttacgaaatatgtatgaaaaccaatgcaacttttcagaactgaaacagaacacgcttttaggtcctagaggcaatgtcctttacattaaacttagtttcatatacgacccaataggattttatatttttaggatagattgtgtcttaagaccaacacacacacactcaatcacaattctggattaacaataactcgccactcaaactgatataccattagaaaagagtttaggcccaatttccgtttccgttttcgatcaaatttaagatgattcaagaatcatcaatgtaagcttgatcgacttggaaaagcggaagaggggctgggggaaactagtgcagagtttccattatgtagaccacataaaccctagttttatccttttatgttatgtatgaatgtctaagtacaacaataacaataaactacatcatcgactatgacaacagccaacccaacaacaacaataacaacaacagtacaagcaacaacaacaacaattagcaccaccttcacatcatcaacattactatcagcatcaacaacaacagcaacaataaatgcaacctcaaccgccgcagccgcaccaccaccagtgccgtctgtttgtgtgcgtgtgccccacagtcccagttacgatagtggtggtggcaccaccggcaccacccacttgcaaccgtatccgtatccgcaatcgtatccgcaaccgcatccgccaatgcaaacacctgacagtggcgagtttgcatcactatttgtgcgtgagtgtgacaccagaactaccgaaatcccaaacgaaagtaaaaaagcccgcaagtcaagaaaaaacccgcatctttggaatccaaaagaaaagatactaccaaaaaaaatgaagcaaatcacaaatatttcgttcacgttttttgcctaactctatcactcaccgaaaaccgattcaacgtccccacatccaagctacatatatctttcgcagtttttctcttgctgtctcgattttggagcttgagctgcctttaaaccccatcccatgttacattctccgctacccatgtcaaagcacacatccggcgccatccaagcccatttctgcattccttcctcccacaaacaccagtcaaataaaaaacccatacatgaacactagggtggaccattaaaaggtgccagatgcactgcaaaagaaatcgtgtttaacttatacttgagtatatatcgaatattcaagcttgactgtaatttacacgcggtatttgttaatattatttgttgagagaccgagagtcgtaatatagaattttaaataaaggtccaccctaatgaccacacccacgctggcctcgcactttttcctcttttctccttttgccactatgcaaaactatttctgttgtttgcttcattttttacatggcttcttcttcacgtttcgtagttgtctttgctcaaacatcactttttcaacttccgcccgtcattttcttcttccgcctgtctttgcacttcgttctgtttgccaatgttatttgtgtgtgtgagcatgagctttggatgtgtagaactggctgtaaataatatgtacacctcacgcaaacaattcgtgtaaattagctgcatagaaatagtctagcttattgtgcgttcaaattagacccgtcatcgtagctcacccctttcccacagccgcccctgtaattaagtaaccaaaaactgttggcagaaggggaaagacaacattttggccaagttgcaccttaatcactttgccgaaagtttcccggccagtgcaagcttgtcgaggacttttaacgagttgttttcccaggtttgtcttgtagaatctccccccgataaacccgctccatttgcctttttgcccttttctctgtcacatttttgtcgctcagctgaaattagtggacatttttatcctgtatagcaagcgccaaagtagttgtaattagaatggatactgatcgtcatgttgaccgggactaattgcactttccgctttgccccaatttagctagcgaaaatccgacggctgtgataatctcggactctaggcagaacctcaaggacacgacggtgacccagacggcggcaacgataaccacaacgactctgccgccaccgccccagacgatgggatcccccagcatggcgggcggatcgggtggatgtggtggaggcggcctcggcttgggcagtgcccacagcatgggcacctcgctcagtatcaccccagccacactgaccaccacgggcaatcacctggatgtgccctttgccaacaatcccaacctgctcagcccagatgtgctcaaccagcggaggggtaagtttaaagaggaagtccagtcttacaactacttggcataagatctatttgaattatcccttgtgtttgcaggcacggtaactattagtacgattcctttgttataacagcaagacattttaattgaaaagtcgaatttcttagttgctccagaaagaacccttaacgtcattgaaatataggtttttacgtatctatttcgaaaaactacatcactcccattttcaggtagtagacgtccctcgatcctacccgtgcccgacatgttcacctcctcctcattcagcatcgccggcaacgacgatggtgaagagggggacgagagtgatgatgagatcgacgacgagatgccctggcgttcgccatccgagaagattgcgtaagtatctcccctctaatcaaaccctctacacacccctttttgtcactattccgaggcaccgtatccacctttcccagtgtagtgtctctatcaatatagatctagacccccaaacatattgtactacgtatgtgtatcactaactatatttcttagctactctgttttccacgagaaactaacctctgacataaatctgtgtacatagaccatgctagtcagatctcagcaatccgaaacgatcgaagtatactttattgtacaaaagaagtggatcgttgcgagactgcgagatccgactgaatgtaaattgtatatgttgtatttaagcactagacacccgccctattccttaattgtaaccaccgttctttgaacacatcaaactaaacgacaatcgaaaacttcgcctcagctgcttgggcgggcactttccacaatcgcgcacctattcgctcatcatgagctcctcggaggattcgtatcagcgcggttgcagcttctgcagtgccactgcttccgcttccgctgctgctgttgctgttgctgttgctgctgctcctgctcctgctcctgctcctgcatatccaagtgattctgcaggcgagtccggaactaatgccgattccgctgccatgccatccgaggagtatctaccgcagttgcgcaggcgcgtcatgaaaaagagctacagctgcgatagtgagtgccgctcggtgcccggaatgggaatgggcatggccatgggtgtgggtctgggtggaggaactctggccagactggcggccagaaggcgtcagttgcagcgatgttcctcctgcagttgctccactgccacaacaacaaccacgccggcggtggcagcgacaacagcaatggcagcaggaagtggggcaacggcattcacgtcgagcagttccgtagagacacgtcgaccggtgcgtccggtttgggtctacgactactcctggtaagtctgactgatggcggggggatgggaggaaggacattctgcggacacacgccatttgttgaagagttcttgtctcgttgttgctgttcgttcgttgttgttgcttttgtttgcctgccgcaggacatcttttaatgacgacgccgtttaccttggaccaactaaggaggaacaactcgagattctgtgctgtttgtcgtggctctcggtgccgtggtgcatcagcatctaatcagcatttgcttctgcttgctccttggctttgttttatttttcgtctgcaattgtgtattcattccatagggcttcctgaaagctccaaagtttcgcctccatcggcagtgttcgtaggaggagcacaactgcagggtctcgggaatcacagttaaagtttaagtttcaccattctgttaattcgtagtgaatgctttggatctgctcgtagtttgcatttcccttacctacccgacacaatttcccaacttgtagctaaatcgtttgagtcccagcacaacctgctcgttttcccacccgcacatctcaccactcaccttaaaaacctgtcgcccatcgccttatccacggggagctcacgtctaacccagaatcgtctgccattccagcatcgtcaaggggtttccacctgtgtcacccttcattggcgttagtcccacgctctgctatttgctcaaagagaagaagccactctgctgtttgcagttggctcaggtgggtagctatgacagtccttgggccgtacaatttcatttggaggaaaaccaatctctttcgcaggtctgcgagcactgcagctatcgaaacgcaaaggagtaccagtggcagaacaagacgattatcctggctgcggattacgcctccaatggcatatacaacttcatcatcccgctgagagctcacttccgatcgaagacctcgctgaatcccatcatcctgcttctggagagaaggccagatgtggccttcctagatgcgttgtcttattttcctttggtaggctgttaaattctaaatttttggtgcattctgattcttcttggtcgcaggtctactggatgctgggatcgatcgactgcctggacgatctgctgagggctggcatcacattggcagaaagtgtggtggtggtcaacaaggagctctccaattcggccgaggaggactccctctcagactgcaacaccatagtggccgtgcagaatatgttcaagtaagtgatagttaacttaactaaaaaagcttggacaccattctgcgtctttgtagattctttcccagcatcaagagcattaccgagctgtcgcagagctccaacatgagattcatgcagttccgggcccacgacaagtatgccctccatctgagcaaaatggagaaggtcggtagcgctttggccccacgcccccctttcagttgacatttggttaatttgccgctcacttaattgcagcgcgagaaggagcgcgggtcgcatatctcctatatgttccgtctgccctttgccgcaggagccgtgttcagtgcctccatgttggacaccctgctgtaccaggccttcgtgaaggactatgtgattacctttgtgcggttgctgcttggcattgaccaggcgccgggcagtgggttcttgacctcggttagtgccaatctggtgatgaaaggcgatttgtcataactttatcatccgtagatgcgcatcaccaaggacgacatgtggatacgcacctatggtcggctgtaccagaagctgtgctccaccacctgcgaaatacccattggcatttaccgcacgcaggacacctcgaatgcggacacgtctcatgtgagtaactcgccggtcgagagatggggacctttctcggccttcagcaggcattgtgtgcgcttgcgtccatcggtgagtccaaggcaaaacaaacaatagcaaatctcaagatcagatcccaagatcaaacttctagaccgcgcatccgatcccaactaaagaaaacggggacggctctgctgtgacactcgagagacatttgtttctaacccaactaacacgctcactccactcactcaccagtccacacttagcctgactatatctctctctgtttctctatgtctaactctatcttcctagctctactctaactatagccttttacttgtctttgctcacttgttcgcatctcgagctgcgattaggtacacacaccgaaacacagcgaaaagcaaattaaatagaaaacgataactttttaacttcagttgcaaattaactaattgagttccccaggtgacgacgaggcctaatcgaagttcttttgattgtgttcggttcgattcggtttttagtttcactattactcagttgatttacttttgggtttgtgttataaatcacacgcttacgctttactactaactgcattgagtctcaagtctgttcatcataagaagtttgcatatttacctcgaataatgttaagtgcatacatatacctgtttccctctctcgctctcgttctctctctctctatataaatatatatatatccaaatatatataatcctttcaatttgtaatcgtaaacggccaagatggtaaagatatagatttatccttaaaatatatatattataagcttgattgacgctattagcaacgactcgctccctttaaagtaaactcctacataccaaagcatagcgtgctgatactgattctgattccgattacgactcccactcccattgcagtttccgtttagattgccctccttattttgttcacttttcccgtagctctgaccttgctgcaaatcaggccgtaaattattcgctcatacccaaatcgcccgtttcgtttttggattaagttttgccgtcacagcattcatcattcgataggaaaacagatcagacagacgaaccattagccagcattctgtgagcatattagatcaggtcaatgaaattactcatacaaattacacatacgccccgctgtaccaattgaacaattgatttgcgtttgtattggacctgacgcacacgcacgcagtgagttccccaaagcgaaaagcaaataaacaaaagcgaaaatgaaaatgaaaatgaaaacgaaaacaaacaaaataccaatgaaataccgaaacaccagccacacttcatacatcctcatatgcctgcccctttagtctggccaccaattcgttgtgtgtgtaactgtgtgtagtctagtcgtagttattgttcctgggagtgggtagtggtacctccaatcccatcctgttggtcatttttgcgtgacctattggctgctgcatgcttggcttttccggctttaatttgacttcagtttcagttttgttttccttccgattttgtttccgttgctgtgtgcatgccgccttttaattagctgattgcatttgcttattgtgccaggccttgcagttgtgactctttctaacccattttctggcattgaacgaacaactccccaattactcaaagtttttgaccctgcccagatgcgcacgctgattgctcattaaaaatgctcgcttgatttaaaaatcaataagagccaaccgcatgggggatgggcaaacaattttgggttaattggcaaggacgaaaaaaaacttaatttaattagacttgaaaaacctcccaatgtaggtgaaatgtcgtcccaatggtagaaactttgttttctctatttcccagttgagaaacaaccgccaatagcttgcccagcaccttttccatagagtttttattaattttgattgagaaactttttgctttctggctttttaaatcaataaatcgcgtgttttcagttcttaaaatttttgaattcaaccgttagcggaagggggaaacaaacttttgcgtgtttccttcccacggcatgcctaaacaacctaaatgttaaccattttgctaaggccacaactcagtcaccataccacacactgatactctctcacacacacacacatgcatactcgtacactgagagcagtgaaagcaatttgccatttcaattaaaaaccaattaaatatgtaaatcattttgtgtttaaccgaactcattgaactcgaatttgcatacaccaaactaatcatgggcatgcctcagtacgacgaggagaccggcacgcccgactcgacgaaggactcgacggaaatgctgcgcggggtcacctatcgtccgcctgggtcggcaacaggtggcgccagcagcttccggcctcagccgcaacgacagcggtcggtcaactgcctgggcggttgctcggagcgcaagggatcatccgtaagtagcgccctactcaacagcatactccattttcgatttcaatcaatcaactgtatcccgtcgggtaaagggtggggtgttaagggggtggcatttaagtttggtttcaggtaggtccgtcttgatttcattccggcttctgcagcatgatgttctttgtatggtagcatgattcactacaactaaaacaaactaaaccagcaagggacgatgctgcccatcggtctcgtctacattttcgcacaacaataacacacactcaggatcagctagcacattcgtaaacgggcctctttgggttttctcttaaagtcccatattggacatggtttggttcgtgtagtgtattacactttcgataaaattcaaatcacttattgcaagtgggaaccccaactggcctgtaacatcctgtaaatggtttaccttaagatagtttgcttagcaagtacttcaatcttttagtactccatcaatctggccgacgaggcgagggataaccacgctcagcagatcgagcgggcggagatcgcgaatctcgtgcgaagtcggatggagtctctgaatctacccacgatcgactacgacgatgtgagcgagaaacgcaaccacctgtcctatgtgataatcaacccgagctgtgatctcaaactggaggaaggcgatctcatgtgagttatagaatactttttttttgaaattagtttataccgttaactgttgataaggcgccatgagtataaaacttctagtcgtagaccccattgaaaatgctcttctaaatttgttttattttgtaaactttccattagatacttggtgaggccgtcgccgttctctgcccaaaagacattcgagcgacacaactcgcgccgcaagtcgaacatctcgttctgctcgaacatcaacctgggtgccacatgcggccctcagatgccgcagatgaacatgaacatggccaacaccgccgtcggggctggatcgcgtcgaggatccggcattgccggattgaaccccatgcaaatgcagagcgttcagaccttggccgggtatggatcatcctcgcagcgctgtagtcccccgatgcagcaaattaaatcgaattctctttctctacccgacagtccgacggtggttggcaatcagcgaggacggagtaactcattgcgggttggctattattcctattacacccacacacatcaaacacacaccaccgatttccttctctatgtttgttcgtttaattcgattcacgtttccacgtttgtttgttacattttaacatttatgtttagaaacaccaggaccacaaaattaaattacctttatgctgcgattattaatgatctatatatatatatatataagaccacattaatagtcctcgattgagtttatcccaaattttgaaattttctgatcgcagcataaactcaatactaaaatctctaaagtttcagtacactttagtaaaagcttgattttattgttgatttcttaaccaattggctatgacaaacgaatgtgttcactttgttgcttgtcccatttgtgggacagcatttgcactctcacacttagcatcaaaattatgggaacacaaaattaagccgcagatcacccctccaaacaagcacggcagcaactgcaactgcaacaatctacagcagcaaccgcaaaacaacttcaacaatcaactacaacagcaaaccgtagtcatagtccgcacccagagaataatcactaaaacaaggaaaactcatgaaatattagacacgtttcatttaagtgtccaagttaaaatcaaattagccccaccatcgagccgcattacgagttgaagttcatgtgttgtttcttctttatgtgttcgtttagttctttgagtgactgtaactgttactgcaacaattgccaatttgtatgtgtaaacgtaattgagtttcgttggtatcgaagtacatctatcttgggcttactaacaccactaacgatcgccaaacttggtggatattccccgtgcttgctcccattgcagatcgacaacgatatactgctgcgtcgatcctcgtccctgcgacagggccttcccagcgtgggcgtcagccacggccggagaaagtcgtcgctggaagagatcggcataagtcacttcactaccctcatgcaggcaacgaaccatagtaatcccattaagatatccctaaacggtagcatcggtatggaggtgggtgttatagtgatctgtattatcaaccataaggctaacatcttcttctctccatcagaaccagatctccttgcaggtgacgccgcccgaggagcccacacccatgttaggtgtgccatgtatgttaggcggtggcggtggaggtggcattaacccatctggagcgggttcctccaccggcggcatgctgggtggtggctcctcactggcaatcaataccgctgacctgggacccggaccaagtacctcatcgggcgccagtggatcactgcaagcacaggactcgctgggacagcagtcatctcaggtgtcatcgccacagcatttgcagggaacgatcgtatgatacaacctgatgtgggggcgccgactccgctcctccatgtcgaaaaacaagtggatatagaatacggccagcacacacagacacacccgtagagataagttctaggcagagcgaaagtattaggaacccaaccaaataaacccacccaccccaaaggctgtctgtggtgtgcgttcccggttaagtcacttcgagtcccattagattagtctcctacgtttaatagatcagtaggaagtggcgcgtgcttatcagtttatcgctaggaagtaggcttatattgtatattgcatgttttgcaaattagttgtaagctatgaacatgtcggctttgcacaaaggaagccgcggcaaattgtgttttgggaacaacaaatgtagttaaactattggataggggattggatatagaagatgattgagaaaactgtataactgtatatatcgaatgcctagttctaagccaggtgtagcaaactatcaaatagatcgggcttaaacgcaaaaaccatgtatataccttaggtatgaccacttagttgggcttcagctcggtttagcttccccttccttcgggaggatcttcctctgacccacgtataaccccatatagatacatatatgaaggtgctatcaatgtcttgtactatacacacattcagattcacattttgtaaaactactaggagtgttttacgtaattataggagaaaaggaggagaaaaacaaaccagaaagtgaaacggttttcataacataaattggaacgggctttggtatactctaatgctttacaaaaccaacagaaatatgtatacatatagtaaaataaatcaaagaatttgtatataaactatgtgagtaagaaccaaacatgcattaaaacttaaaaaaaaaaaggaaaaacaaactactagaactttatgaacaaaacttaattcgaaagacaacagaatttagatatagaatttagagttaactatttaaggctagttcgaac

SEQ ID NO: 29405 - DNA, 5097 bp, DROSOPHILA
atgccaacccatagctatggctgcgaagtgggcaataagacggagttcatcatctcggccaaactgacggaggaggagttccaggagaatccaatcattaactgggacgcaatactctgggtgaatcggccaacagtgctctgggtcctgcagctgcttctagccatggtgtcgctaacgcaatccttggttctcacatatctaggctataagaatgacctccatcgcgccatgcaaaagtcccagtcagccctctcccagcagttgaccattctatcagccacactgctgtgtttggtcttcacgagcgtttgtggtatccagcactttcagcgcgctggccatcgacatttgaatctctttcagagcacatactatgtggttgtgaccttctccacagtgggatacggcgactttgtgccggacatttggccctcgcagctttatatggtcatcatgatttgtgtcgccctcattgtgttgcccacgcagtttgagcagctcgccttcacgtggatggagcgccaaaagctgggcggcagttacagttcacatcgcgcccaaagcgaaaagcacgtggtggtgtgctccaccaccctgcatgcggacaccataatggacttcctcaacgagttctatgcccatcccctgctgcaggacttctatgtggtgctgctcagtcccatggagctggacacgacgatgcggatgatcctgcagggatcatgtctaaaggatggcgacttggcgcgcgccaggatgaacgaggcagaggcgtgctttatcctggcggccagaaattatgcggacaaaacggccgccgacgagcataccattctacgttcctgggccgtcaaggacttcgcaccgaatgtaccgcagtatgtgcagatattcagacctgagcacaagctgcatgtgaagttcgcggagcacgtggtctgcgaggacgagttcaagtacgccctactggccaacaactgcacctgtcccggcgccagcacactggtcaccctgctgctccacacatcccgcggacagtacgtatacgcatggttgtccagctggcaggacatgcaaaaaattctctatacgccgtgcgtcatcggctcgcttggatgcgtcacgtcaccggcggagtcggtggccagggagggccagcagagtccggaggaatggcaccgtctgtacggcaagtgttccggaaacgagatctaccacatcgtcctgggcgacagtcgattctttggcgagtacgagggcaagagcttcacctacgccagcttccattcgcatcgcaaatatggagtggccctggtgggcgtgcgaccggcggagctgccggaattctacgaggaaaccattctattgaatcccggacccaggcacattatgaaaaaggatgacacgtgctattacatgagcatcaccaaggaagagaattccgcatttgtcgttaatcaaaatcaaacatcggaccccacggcagctgccaaggaggggagcgggacagggggcggaggcggtgcctcctcatccgcctcccaccaccacactgctgcaactgccaacccaacaacaacaataacaacaacagtacaagcaacaacaacaacaattagcaccaccttcacatcatcaacattactatcagcatcaacaacaacagcaacaataaatgcaacctcaaccgccgcagccgcaccaccaccagtgccgtctgtttgtgtgcgtgtgccccacagtcccagttacgatagtggtggtggcaccaccggcaccacccacttgcaaccgtatccgtatccgcaatcgtatccgcaaccgcatccgccaatgcaaacacctgacagtggcgagtttgcatcactatttgtgcctagcgaaaatccgacggctgtgataatctcggactctaggcagaacctcaaggacacgacggtgacccagacggcggcaacgataaccacaacgactctgccgccaccgccccagacgatgggatcccccagcatggcgggcggatcgggtggatgtggtggaggcggcctcggcttgggcagtgcccacagcatgggcacctcgctcagtatcaccccagccacactgaccaccacgggcaatcacctggatgtgccctttgccaacaatcccaacctgctcagcccagatgtgctcaaccagcggaggggtagtagacgtccctcgatcctacccgtgcccgacatgttcacctcctcctcattcagcatcgccggcaacgacgatggtgaagagggggacgagagtgatgatgagatcgacgacgagatgccctggcgttcgccatccgagaagattgcctgcttgggcgggcactttccacaatcgcgcacctattcgctcatcatgagctcctcggaggattcgtatcagcgcggttgcagcttctgcagtgccactgcttccgcttccgctgctgctgttgctgttgctgttgctgctgctcctgctcctgctcctgctcctgcatatccaagtgattctgcaggcgagtccggaactaatgccgattccgctgccatgccatccgaggagtatctaccgcagttgcgcaggcgcgtcatgaaaaagagctacagctgcgatagtgagtgccgctcggtgcccggaatgggaatgggcatggccatgggtgtgggtctgggtggaggaactctggccagactggcggccagaaggcgtcagttgcagcgatgttcctcctgcagttgctccactgccacaacaacaaccacgccggcggtggcagcgacaacagcaatggcagcaggaagtggggcaacggcattcacgtcgagcagttccgtagagacacgtcgaccggtgcgtccggtttgggtctacgactactcctgcatcgtcaaggggtttccacctgtgtcacccttcattggcgttagtcccacgctctgctatttgctcaaagagaagaagccactctgctgtttgcagttggctcaggtgggtagctatgacagtccttgggccgtacaatttcatttggaggaaaaccaatctctttcgcaggtctgcgagcactgcagctatcgaaacgcaaaggagtaccagtggcagaacaagacgattatcctggctgcggattacgcctccaatggcatatacaacttcatcatcccgctgagagctcacttccgatcgaagacctcgctgaatcccatcatcctgcttctggagagaaggccagatgtggccttcctagatgcgttgtcttattttcctttggtctactggatgctgggatcgatcgactgcctggacgatctgctgagggctggcatcacattggcagaaagtgtggtggtggtcaacaaggagctctccaattcggccgaggaggactccctctcagactgcaacaccatagtggccgtgcagaatatgttcaaattctttcccagcatcaagagcattaccgagctgtcgcagagctccaacatgagattcatgcagttccgggcccacgacaagtatgccctccatctgagcaaaatggagaagcgcgagaaggagcgcgggtcgcatatctcctatatgttccgtctgccctttgccgcaggagccgtgttcagtgcctccatgttggacaccctgctgtaccaggccttcgtgaaggactatgtgattacctttgtgcggttgctgcttggcattgaccaggcgccgggcagtgggttcttgacctcgatgcgcatcaccaaggacgacatgtggatacgcacctatggtcggctgtaccagaagctgtgctccaccacctgcgaaatacccattggcatttaccgcacgcaggacacctcgaatgcggacacgtctcattacgacgaggagaccggcacgcccgactcgacgaaggactcgacggaaatgctgcgcggggtcacctatcgtccgcctgggtcggcaacaggtggcgccagcagcttccggcctcagccgcaacgacagcggtcggtcaactgcctgggcggttgctcggagcgcaagggatcatcctactccatcaatctggccgacgaggcgagggataaccacgctcagcagatcgagcgggcggagatcgcgaatctcgtgcgaagtcggatggagtctctgaatctacccacgatcgactacgacgatgtgagcgagaaacgcaaccacctgtcctatgtgataatcaacccgagctgtgatctcaaactggaggaaggcgatctcatatacttggtgaggccgtcgccgttctctgcccaaaagacattcgagcgacacaactcgcgccgcaagtcgaacatctcgttctgctcgaacatcaacctgggtgccacatgcggccctcagatgccgcagatgaacatgaacatggccaacaccgccgtcggggctggatcgcgtcgaggatccggcattgccggattgaaccccatgcaaatgcagagcgttcagaccttggccgggtatggatcatcctcgcagcgctgtagtcccccgatgcagcaaattaaatcgaattctctttctctacccgacagtccgacggtggttggcaatcagcgaggacggagtaactcattgcggatcgacaacgatatactgctgcgtcgatcctcgtccctgcgacagggccttcccagcgtgggcgtcagccacggccggagaaagtcgtcgctggaagagatcggcataagtcacttcactaccctcatgcaggcaacgaaccatagtaatcccattaagatatccctaaacggtagcatcggtatggagaaccagatctccttgcaggtgacgccgcccgaggagcccacacccatgttaggtgtgccatgtatgttaggcggtggcggtggaggtggcattaacccatctggagcgggttcctccaccggcggcatgctgggtggtggctcctcactggcaatcaataccgctgacctgggacccggaccaagtacctcatcgggcgccagtggatcactgcaagcacaggactcgctgggacagcagtcatctcaggtgtcatcgccacagcatttgcagggaacgatcgtatga

SEQ ID NO: 29406 - protein, 1698 aa, DROSOPHILA
MPTHSYGCEVGNKTEFIISAKLTEEEFQENPIINWDAILWVNRPTVLWVLQLLLAMVSLTQSLVLTYLGYKNDLHRAMQKSQSALSQQLTILSATLLCLVFTSVCGIQHFQRAGHRHLNLFQSTYYVVVTFSTVGYGDFVPDIWPSQLYMVIMICVALIVLPTQFEQLAFTWMERQKLGGSYSSHRAQSEKHVVVCSTTLHADTIMDFLNEFYAHPLLQDFYVVLLSPMELDTTMRMILQGSCLKDGDLARARMNEAEACFILAARNYADKTAADEHTILRSWAVKDFAPNVPQYVQIFRPEHKLHVKFAEHVVCEDEFKYALLANNCTCPGASTLVTLLLHTSRGQYVYAWLSSWQDMQKILYTPCVIGSLGCVTSPAESVAREGQQSPEEWHRLYGKCSGNEIYHIVLGDSRFFGEYEGKSFTYASFHSHRKYGVALVGVRPAELPEFYEETILLNPGPRHIMKKDDTCYYMSITKEENSAFVVNQNQTSDPTAAAKEGSGTGGGGGASSSASHHHTAATANPTTTITTTVQATTTTISTTFTSSTLLSASTTTATINATSTAAAAPPPVPSVCVRVPHSPSYDSGGGTTGTTHLQPYPYPQSYPQPHPPMQTPDSGEFASLFVPSENPTAVIISDSRQNLKDTTVTQTAATITTTTLPPPPQTMGSPSMAGGSGGCGGGGLGLGSAHSMGTSLSITPATLTTTGNHLDVPFANNPNLLSPDVLNQRRGSRRPSILPVPDMFTSSSFSIAGNDDGEEGDESDDEIDDEMPWRSPSEKIACLGGHFPQSRTYSLIMSSSEDSYQRGCSFCSATASASAAAVAVAVAAAPAPAPAPAYPSDSAGESGTNADSAAMPSEEYLPQLRRRVMKKSYSCDSECRSVPGMGMGMAMGVGLGGGTLARLAARRRQLQRCSSCSCSTATTTTTPAVAATTAMAAGSGATAFTSSSSVETRRPVRPVWVYDYSCIVKGFPPVSPFIGVSPTLCYLLKEKKPLCCLQLAQVGSYDSPWAVQFHLEENQSLSQVCEHCSYRNAKEYQWQNKTIILAADYASNGIYNFIIPLRAHFRSKTSLNPIILLLERRPDVAFLDALSYFPLVYWMLGSIDCLDDLLRAGITLAESVVVVNKELSNSAEEDSLSDCNTIVAVQNMFKFFPSIKSITELSQSSNMRFMQFRAHDKYALHLSKMEKREKERGSHISYMFRLPFAAGAVFSASMLDTLLYQAFVKDYVITFVRLLLGIDQAPGSGFLTSMRITKDDMWIRTYGRLYQKLCSTTCEIPIGIYRTQDTSNADTSHYDEETGTPDSTKDSTEMLRGVTYRPPGSATGGASSFRPQPQRQRSVNCLGGCSERKGSSYSINLADEARDNHAQQIERAEIANLVRSRMESLNLPTIDYDDVSEKRNHLSYVIINPSCDLKLEEGDLIYLVRPSPFSAQKTFERHNSRRKSNISFCSNINLGATCGPQMPQMNMNMANTAVGAGSRRGSGIAGLNPMQMQSVQTLAGYGSSSQRCSPPMQQIKSNSLSLPDSPTVVGNQRGRSNSLRIDNDILLRRSSSLRQGLPSVGVSHGRRKSSLEEIGISHFTTLMQATNHSNPIKISLNGSIGMENQISLQVTPPEEPTPMLGVPCMLGGGGGGGINPSGAGSSTGGMLGGGSSLAINTADLGPGPSTSSGASGSLQAQDSLGQQSSQVSSPQHLQGTIV

SEQ ID NO: 29407 - DNA, 2622 bp, DROSOPHILA
atattaagactcatttcatttttacattacattcattcggaatcaatattaaaatgttaacatttaaataaaaagctagttcttaagatctaacatcactaatccagagcactcccattccttggcggggtgtgtgtgcgagtcgaaaataaacaaatggtaaacttctgaggcagcgacgcaacgtctgctccctgactgatgaggatcgggtgcgggcgaggaggaggtggaggagtaggagcaggaggagctggaacccaagatacaactggaaccaatgacgggggatgggggtccgtcagttggactatttatgatgtatttctcggttaattagttgcagctgaatgcagcggaatgggtgtgggaatggaattgggatcgggaatgcttccgcatgcatttgctagacatcataccagtcatcttcgcccgaccagaagaccaatggaaagtgcgtggcccagggcccgggtaattttttgctatatttggatattgcgccgcttgatcggtgatggatgcctgcgccttttcatctgcagtgcgttccaggaactggagcgtaacgatgacgacgtcgacggtcacgatgacgctgcacccggccagactgttgggccattttcgggtggaataattaaaaacgtaaattaagccccaaattaaaagccatcaaatgttacgcaaaattacacccctaaagcgggcgctcagttataaaagccactgacttctaaatggatttacccctggcattgcggaaaatgtgctcccaactgttcgcatttctgctcctccttttgaccgcttttgtgacgggtagaagtactccaccggcgttggatgaagactgtgaactgaattctgtagatacaatggtgagttgtagacatggatggatttagagcagtatagaaacgaaagatgcgaaaatcagaataattatagcaaacaaatagaactcgagagccagacaatgaaatcgtcatataaaatgatgatcgggtacaactttttattgcagcatgatttctgctgcgacctgcacgacgagagtccccagtttagcgactgccagatggagtggcacgaaaagattccatacgagacggatgaagaggagcagacgtacatgtttgtgagttcggttgaggagcgtaaacaagtaccaaactaattgcttaatcagtgcaccgcagagtgcagtttcaacagtacgaacttcttgggcagggaccgccgttcactgaatctcaatgaggtaaaggagcacttggaaagcgacctggtcaacgatgcggacattaagcttctctatgacacctatgtcaagtgcgacaagcatggtgtgcaagctgcgcgagttgtttattaaatcatctctaaatgaactaccctttgcagcgctctcactgatgccgcacaaaggtgtgaagcagctatccaaacgtctttcgcgtcttggctgtcatccgtatcccggactggtcctcgagtgcgtggccaacgagatgatcctgcactgtcccaccaagcgcttccgtcaaacagcccagtgcgaagagacacgcaatcatttgaagcaatgtatgcagtatctaaagtacaagtcctagatgtgggattaatacatgggcaccacttccagcttacacgtttattgtccttttgttataattaaactatgactaaaggtgggatattcggctagctagcgatcttaactatttcaccctcgacttccaaggaatcggcgagcttaagttgcttatcaaagcgtttctgaaacttcttcgcctgtttttcgttcaaatcctcgacggacagatgcttggcatacttcttgagcagcttcttacgaagtttttccaggaaaatgccatctgcttgcttggtaacgatcttagttagctgggcggcccaatcaaagtcgctggtcacgccgttggaggtctcctcggcagcagcatcttctgtggtctccactttggccttcttcttgggtggcgcctcttcctcgacctctgccttctgcttctgctgtatttcagcaatcttttccgccttggctctggccagctccgcttgctttgcctccttcatcttgttcagctccttctcgagaatatcccacacctgggtggcctggttgcggggcatgcgcatgcagtttcccacgaagttttcgaacttagccttcttgcggggcacgttgtcgacgctctggagcttttggaaggcggatcgaacggctggagttaaattgtactcgctgctgtcgaggatcgaccgaatgatgtccatccaactctcttgcttttgagcgttcttgttgcggggctccttggcggcaaagccttggctttggctggcgtacttctgggcctctgagatgcacttaatgtgtgccacatactcctcgccatagaagtcctttaggcagtccatgcaggacacgttcttgtctttgccgcgacagcgcgtctggtagtgcttttccaccgccggtttctttaccgactcgccgcagatgttgcacgtgaagaagaccatggtgtagcagtcgctgatctcttgtttaccggggaatccttggaatttcaggtaatttggttg

SEQ ID NO: 29408 - DNA, 513 bp, DROSOPHILA
atgatgatcgggtacaactttttattgcagcatgatttctgctgcgacctgcacgacgagagtccccagtttagcgactgccagatggagtggcacgaaaagattccatacgagacggatgaagaggagcagacgtacatgttttgcaccgcagagtgcagtttcaacagtacgaacttcttgggcagggaccgccgttcactgaatctcaatgaggtaaaggagcacttggaaagcgacctggtcaacgatgcggacattaagcttctctatgacacctatgtcaagtgcgacaagcatgcgctctcactgatgccgcacaaaggtgtgaagcagctatccaaacgtctttcgcgtcttggctgtcatccgtatcccggactggtcctcgagtgcgtggccaacgagatgatcctgcactgtcccaccaagcgcttccgtcaaacagcccagtgcgaagagacacgcaatcatttgaagcaatgtatgcagtatctaaagtacaagtcctag

SEQ ID NO: 29409 - protein, 170 aa, DROSOPHILA
MMIGYNFLLQHDFCCDLHDESPQFSDCQMEWHEKIPYETDEEEQTYMFCTAECSFNSTNFLGRDRRSLNLNEVKEHLESDLVNDADIKLLYDTYVKCDKHALSLMPHKGVKQLSKRLSRLGCHPYPGLVLECVANEMILHCPTKRFRQTAQCEETRNHLKQCMQYLKYKS

SEQ ID NO: 29410 - DNA, 3280 bp, DROSOPHILA
tcctagcacgatatagccaacctggccatcctgcgagagtgcatctccttccgcaagatgagcagcagcaacttagagcaaatgcccagtggcagcagcaacgacaacagtgataacaataataaccacaactgcagccgtttaactagcattcgtaactacaagttacctaattggtttccacatgtaagttttatttatcctttgattttcccgctcctcagcatccattcggttttcgattctcacttttatttgctcgacaattttcacaccgcaccttccgttggctttcattcatggcaaatcaaattaaaatgctcactctttggcaacatatgcacaatgacatgaaagcagtacacggtcacaaagtaaggaaccgagtcctttgttgtcgcaggaggtcgggaaaaataccctgcaatgtgttactggcttcctactgaaacgcagactttgcccgaagcaggaagcagctttatacaaaatttatattttaattaaatatttgcacaacagtgcaaacagtcgaatgtgtgcttaccagatcctgtaacatacatacaccttcttttgaaattgaaagggcacacgatcttgctgattttaattgcattctaatatttactaaaaatgtaggaaaaatcaaacaaatttcagcttagcaataggtatttataattcgaatagctttttccattcctacttcttttataaaccattgtgcaacttagccaattcacctcatcatcatcgtcatcatcatcaaaccaatagtcatcgtgcacagttcctcaggctcgtggctttggatttggatgcattgtcgatgatttttccattatatatttgctgagaacatatgtgcatgtaaatgtttgtattgctttaagttgtgcatgttccttggttttttgctttgtgcccgcagtccagacaaactcgagtgcgtggtataataaactcttggatgcccaggatatgccttgaatggggtctacgccttgagtttgttgtagtcgttttgcagacagcatattgtgtacaacgtcgacttggccagaagcgttagagtcagctttcggtcaaaggtaaacacgttgagtaagacgacccgcttgggatggagggccaacttcaaggcgaacatggagagctgcaatcggagttcaaaggggaagtttagagagctctaatcaagaatgagcttagttgaaagcaagctttatcagattagattagcagattttaatttcagttgtacttgaaagtagtacaggactacgggtccttctcagcgaattgaaccaaatcctctggttggattagtttagaagacttgttactcaccaaacgatccaagcgactggtctccctcaaaattcgttgagagtccgctctaaaagtactgaacaactcggaaatgtctgttccaagaaataggttcatggcatcaaaaatgtaggtgaaaattacaaacactctcatggacatagttaaatcgattgactttggggcagccaccatctggaatatttcgtagccaaaggtgatctggcaccagcttttgcaagccaaaacccaaatcgcaacatgtccaagctgactattgaactggtcacatagcagtagaagcttggagtagagtctaaggcagtgctgcatctttttcagccgatttctctggcccgacctggccaaaatgagtgtcatttgatcatttatgagcttttgtatgcgacacatttcccagagcagaaagtaaaagcccagcacagctgccaaaagcatgttgtagagtagccaatacgctcccacatttagataaaactgcgatggtagcagtctcctcatgtagatcggttggatcaaatggatacgcagcagggttatcgaaccaaaagtaattttaatgtagtatcggcacttcaatagcagcccgctgggtctgccagcgaaatacttctgctccattgtgacaagtccgcgggccaagtttcgaatgccctgcgccttttcccagcacgacttcacacagcaggccatggttccaccaatcgtcagaacagtcacactcacacgcaaattactagcagtgctataggacatgtgtgccagtgccagcacacagagggcatgatggatagcgcagtatatcttgagcttcgaggagactcggaacgcattcgtctttgtatcgaaatagtaggtatttagtccattgagcgccgtaaacttggtaagcaaactgcataactgcgagctggtaaaggccattctgagaactgcaagctgtatttgtttcacggcctgttttataggcctttgggtcaggccaattaggccagtatttatagtttggttattcatcactaggggagcgataaaaggggtcattggagagttgtttgtcggcgttgaaaaattgctggcacattatcggtcatttggcaggacatgggtaatcatgggtaattacgtgacatcaaagtcatggtttatgctgaaaacgttgtccacttcaatcaaaagtgtgttgctttaaatacgcacttgtgtcgggtgacaaaacgacagtcgaattgaaaataccttttgtaatggtatacaaaagatgaaagggcaaaagacagatatggttttcaatatggataaatcaaatacagagtggcgcagcacgtgaaagcccaataacgccactgacaaagaccttttgtgtggcaaactataataaaagtatggatgtaaaaaggtccttgcgggcactcctcggatgctccgccttcacgacctcctgctgggcaatcaatactgctttttaatgaagaaataaaagcggaatgtccacttgtgttgttcggacagtgtcgtaaaaattgtctacatttttattacgtatctcagcgttggggcaagtcaggccgtgccaaagaccgtgaaaagattgtatcctgtctgccatcagtctgtgggtgcttccttggccgtttctcatatacaagtgcacctcccactcaccaggctaatggtgtccaggactaaaggcacgcaccagcgcctaaacgcgtgctgagctggaaaatattcgcttttgtggttggttgggagaacgtaagccacctaagccaccaccgttccaaatttcaccagcgacaagtgtttattttggcatttttcccctgcaaaagcctctgctcttccttttttccatcttttttagcctggtcagcgcttgacaacgcactcaacccgataggacagcctggccaacctcaat

SEQ ID NO: 29411 - DNA, 1086 bp, DROSOPHILA
atggcctttaccagctcgcagttatgcagtttgcttaccaagtttacggcgctcaatggactaaatacctactatttcgatacaaagacgaatgcgttccgagtctcctcgaagctcaagatatactgcgctatccatcatgccctctgtgtgctggcactggcacacatgtcctatagcactgctagtaatttgcgtgtgagtgtgactgttctgacgattggtggaaccatggcctgctgtgtgaagtcgtgctgggaaaaggcgcagggcattcgaaacttggcccgcggacttgtcacaatggagcagaagtatttcgctggcagacccagcgggctgctattgaagtgccgatactacattaaaattacttttggttcgataaccctgctgcgtatccatttgatccaaccgatctacatgaggagactgctaccatcgcagttttatctaaatgtgggagcgtattggctactctacaacatgcttttggcagctgtgctgggcttttactttctgctctgggaaatgtgtcgcatacaaaagctcataaatgatcaaatgacactcattttggccaggtcgggccagagaaatcggctgaaaaagatgcagcactgccttagactctactccaagcttctactgctatgtgaccagttcaatagtcagcttggacatgttgcgatttgggttttggcttgcaaaagctggtgccagatcacctttggctacgaaatattccagatggtggctgccccaaagtcaatcgatttaactatgtccatgagagtgtttgtaattttcacctacatttttgatgccatgaacctatttcttggaacagacatttccgagttgttcagtacttttagagcggactctcaacgaattttgagggagaccagtcgcttggatcgtttgctctccatgttcgccttgaagttggccctccatcccaagcgggtcgtcttactcaacgtgtttacctttgaccgaaagctgactctaacgcttctggccaagtcgacgttgtacacaatatgctgtctgcaaaacgactacaacaaactcaaggcgtag

SEQ ID NO: 29412 - protein, 361 aa, DROSOPHILA
MAFTSSQLCSLLTKFTALNGLNTYYFDTKTNAFRVSSKLKIYCAIHHALCVLALAHMSYSTASNLRVSVTVLTIGGTMACCVKSCWEKAQGIRNLARGLVTMEQKYFAGRPSGLLLKCRYYIKITFGSITLLRIHLIQPIYMRRLLPSQFYLNVGAYWLLYNMLLAAVLGFYFLLWEMCRIQKLINDQMTLILARSGQRNRLKKMQHCLRLYSKLLLLCDQFNSQLGHVAIWVLACKSWCQITFGYEIFQMVAAPKSIDLTMSMRVFVIFTYIFDAMNLFLGTDISELFSTFRADSQRILRETSRLDRLLSMFALKLALHPKRVVLLNVFTFDRKLTLTLLAKSTLYTICCLQNDYNKLKA

SEQ ID NO: 29413 - DNA, 2684 bp, DROSOPHILA
cgaaggcaaggccaagaagtaggactgaccgatctgccatgcccggcggtaatatcaatcatccaagcctggcactagctaattgaacctggactcatcatcacccatgaagttacccaaccgtttgcagcgttagccagggaagacaaaatgccattcgataagtttgtccgccgatgaatggaatggagaggaaatttctcagtcgataaatttatctaaagagcaatttgtcaatcgaacaattaactgccacatttaatacaggtttattcgattgatctattctctattatatattcctctgttgaaaatgctataaaattggtgctgtacaagacttactgtgtttttaatatgggctcattattcaaatctgtgggagcaattgttcgctaaatgtttgtaaatagtactttagtgacatgatttgattatttcattaatcgtcctgtaacaaaatttgcagagcacctgatcgacttccttattgatcttgatcaagaaacgcgttctaattctttttcttttaaacgaaactacgagtaacgagttatgaaaatgaacatcgaatttaccgataactaagtgcctattacaattaaaaattgcaatcttatgctttgtataataattaaagtctgattgaccaaccacaaatattctcaaatttttgttgaataactttagataaatttactaattttgggtccttgcagagggcaatacatttggtgtgtattcattgtacaatttttaatagaatatcaacgtattagaaagccttagcggtaagaacatagatcatgatcatatctcaaaatcatcacgaacccaaaatgtaaatttcaattttcgggtgatgtataattttaagcctgatatggttatccaaatttcgcaaaggcatttcctctctccagttaaatatcccatccgatcttgttacttgatctggaattataagggtggacactagatagtaaataaagaagccttccatcaacgcggcaatggactgaccaatagttatcgttaggtatgccatataatgcacttgaaaattttgaagtttagaaacgatatggattcgatgagaattttgggggaaaacatcctgctccttgacatgtccgtttgggggtctatagtcgttacttgccctccttgcccttctctttgcccttggcctccttctccttcttttccttctccttcttttccttctccttcttctccctctccttcttctccttctccgccttctccttttcggccttctctttttccttctgcttcttctcgcgctccttggcctccttctccttctccttgggcgatttcgcggcctcctcggccgccttctgggcctccttcttcatatggtcccagaataatccgatgcccgccccgatcatgaagaacacaaaacggttgcacggaacgcagttcaatttctgccacaaggtgggcggcgggcgacagggaggcggtggcggaggacagcatcgcggaggcggggggcaggcgggcttgtcgcacatcttcaaaggattatggattagatgtccgcgcaatcacagggtccctctaataacgtgttaattttacgccaaaaaaaaaatcagaaaaatgatgttagccgaatgggaaatttagaacagtggggcctgtgttgcctttggatgtgagttaagtatttgacgtttatttcgtaaactacttgataaaacctaacactcattatgcctaaggtttaagattacaccagtactttcttcgaccgcaatcctttcaaaatggatccttctttaagcatcctatcttcttctttataatgtctaggctaaagtcacaatccttttttctaatacatctgaaaaacaaagccaaaaacaaaacgttatgtaaaatgcatttttctaaaattaaaatcaaactccttagtctctatttcattgatagtattgtcgctttaaagtgcaaaattctaaattaacaattttttcaaaaagacctaacaaaaagtactgatactttagggctgaaaattatggataactcgtggttcatcacttttattgtaggctgtattgtggggtatttgataggcaagcataattagaaaaaggtaagagctcctttgcatttgtggtaggctttttcaaaccactcaattttagtttattttaggctttacaagttccaaacccactactttcgttttataaaatggatgtagattgggtaattacatttctagctggctgtttggtgggatacgtcgtggccaagaatacctgaggataggcaagaaatctttgggtaaagttcgcctgaaatcttatgccatcctgaaattcaaaatcccgactggactggattttgattgggaagataacatttggtatcaagcgcttgaaatcattttcttactttcgaaacctaagaaaaaatcaaaatgacgcacgttatatccttcgccttgggcgtgattatcggaatgatgagctgccgaaagtgctaagcctaagctcccaaaaagaaaattataacttaaatcaattatgaggaacattgcatatattaaaatgaacaataaataaaatttaaactttcgtattcattatatttttggagaattgcttgagaatggaagatttgcaagcagtacagctagtgat

SEQ ID NO: 29414 - DNA, 684 bp, DROSOPHILA
caaaggcaacacaggccccactgttctaaatttcccattcggctaacatcatttttctgattttttttttggcgtaaaattaacacgttattagagggaccctgtgattgcgcggacatctaatccataatcctttgaagatgtgcgacaagcccgcctgccccccgcctccgcgatgctgtcctccgccaccgcctccctgtcgcccgccgcccaccttgtggcagaaattgaactgcgttccgtgcaaccgttttgtgttcttcatgatcggggcgggcatcggattattctgggaccatatgaagaaggaggcccagaaggcggccgaggaggccgcgaaatcgcccaaggagaaggagaaggaggccaaggagcgcgagaagaagcagaaggaaaaagagaaggccgaaaaggagaaggcggagaaggagaagaaggagagggagaagaaggagaaggaaaagaaggagaaggaaaagaaggagaaggaggccaagggcaaagagaagggcaaggagggcaagtaacgactatagacccccaaacggacatgtcaaggagcaggatgttttcccccaaaattctcatcgaatccatatcgtttctaaacttcaaaattttcaagtgcattatatggcatacctaacgataactattggtcagtccattgccgcgttgatg

SEQ ID NO: 29415 - protein, 129 aa, DROSOPHILA
MCDKPACPPPPRCCPPPPPPCRPPPTLWQKLNCVPCNRFVFFMIGAGIGLFWDHMKKEAQKAAEEAAKSPKEKEKEAKEREKKQKEKEKAEKEKAEKEKKEREKKEKEKKEKEKKEKEAKGKEKGKEGK

SEQ ID NO: 29416 - DNA, 9983 bp, DROSOPHILA
taaaacttaaaaaaaaaaaggaaaaacaaactactagaactttatgaacaaaacttaattcgaaagacaacagaatttagatatagaatttagagttaactatttaaggctagttcgaaccaaggatcaagtatcggaaactgtaccaaattcaatgagctatgtgaaccagcgttcgcatctaacacaaccctgtagcaaagtgtaactcaattcggtcccagctataggctctttagaaattaattaaagcaaactatgtacctactcaaccacatgccacatgccacataccacacaaacattcacactcacaaaaatgttagttaaagcacttacgtcagttttataagtaaattttagtcaacgatgacgatgaaatgcattccagtgtctcgagggattacctagtttagcttatgcctagcaccccagaaacctatttatatagacatatatagttccgtatattactaaaatgaatctgtacatctgcaaccacataggccacatagatcaaatcgatgtctcaatgtacaaaagtagttaactgagccgcaattggcattggctgcggcattagagatacgattagtgcggactagggtataaacttgctgtaatatttatcggcgccttgctctttaaggcatgccgagcagaactcacaataaactcaaaatatagttggaaataaatatgagcctttttgattacggtgcttccaatttgttatacagttttaatcatcttaagattttaaatcgtgatatggggtcttcgaagaaataattttgttttttagttccatttatttgtcgacaaagctgaacttgtattcggtcttataaaaaattcgtaatttatgtaagattgtgcctttagctcagggaagtaaaggcggttatataatgattttcttgaattaactattgaattatttgttgaacattggatctaaaaaacgcttctcccaagcacttaaattctggctaaatttctagcttttttctctttattaattattcttctttgaaatggcacacaggcactcctagttagttaagttaatttagtttagtttacttcaatatccttccgcgctttggttaacttgcttttttgtatgattgtatacgtatcgaaaaataatttcagtttgcatttaaaatagacttagtagccaggcgccagcacggtgcatcctgtggaggcgctggtgcacttgcagctctttccggacggagcctgtcggttgaccaggcagagccgggagtccgtgcatccgccgttgctgatctggcagggactctggtattgcgggcagtgctgctccaccacggtcatgccgtacattttgtggctgccaaagaagggcggctgaatgggcgtctgccgtgcacccaagctgtcaacgatctctacttttttcctacataaaatattcctattagtatctatctatttctgaaccaaagaaatgcgaagaactcacgtggtccagtccgtccagtagaactgatcgtgcgtgaaggtaatgccgaagggataagacagttcgttggagatggtgcggatttggcggttttgcggttcgatgcactccaccttcttggttcccgcatccgcgtagcacacctctccggaattctcaagcaccaccagggagtttggcagagtgacatcatccttgcccagcagaagttctcgaccagttccgtccaggttagacatctcgatcttgggtgattcgcggtcccagtccgaccagaacagtttcctggtaaatcataccgttagaagacagtatgcaaatggtgttgaaaccaggacgacacttactccctgtagggatccacggcaatgccacggggattgacgagctgcttgttgatgatcactgcccgcaaggaagggtcgtccaggctggccacctcaatggtatcctttgctgagtcagcccagtaaaggcggcgcgagatgacatcaatggcaataccctcgggagattcaatatctgaggagaatattgggttaggcatttgctttcggccaacaattattgtatcctaccagtggtgataaagggtcgcagatcagtgccgtcatatttggtgctcacgatcttcttggtcgaaatatcgccccagtagacgcggccctccacgcaatccttgtccagaccaatggccatctgggccaccgaaatgggacggacattacgtccgtttagcggaacgcgagcgatcatcacaccctggctgacaatcaggaagtcagagtcctgatgctgacgctcctggcacaaggatccattgccaaagaagcctgaaattaaaaaaaagtgtattagttacaaaagtatatagggggatcatagtgctcctagctgcaaaagtcttttctactttcgttctctcttttccaaattttcagcttgctgatcaattaaacggtaagtttccttttctggcttatataaaccgaatcattatatatacaccaattaattttgttactctgtcaagggatgcgtcatacccagaaggtgctgacaaggctgtgccgtttatccgccggaggacttagacagaaatgccgatccttcaaccaacaaaactttaagcccagcatagccgacgaggctaacaagcgcccaacgcactttcagtccatgcgcgaattctttatgcatccgctgacctgggaccgcaataacggctatttcaatgtggttctggctttgtccattttcggattctgcttcttcaattcctgcgccccgtgtgaacagaagaggggtggccttgaggagcgaaccaaccgcccgcagtgaaaccggtgggctatcctcgaatcttctcaaactcaccctgattgcagacgcagacgagcccggaattggtcgaacggcactgagcattcatgtcgcacaaggtcgggttgttcagacagttctgctcctcgatgcacacgtatccatctcccttgaaaccagcgatgcactggcactcgtaattggccggatccctataaatatatcagcagaaatgtattaatatctcttcgttttattgggtcagcagattaatcaatggccaaatgataatttataacataatcctatcagatcataaaacactatcaaaaatcgatcttgcatattgcatatatattgcaaagatgtgttaatcataaaattattccattatgaggcacttactcggtgggttcgcaggtggcgtggatgccgcagttgttaaggacgtggcaggacagaggcttgctggtgcatcctgtaagagcgtctccctgatatccgtcgaggcagtcgcagtactggacgccctccgccgagtcccacttgcaaatggcatttgagccgcagaagacgctgccgcaacgtcccgccggaacacagcggtcactgacgtcacgctcgaagtccgcttggcagcggcagacgccgtcgtcgcagaaggcgttctcaccacaatgctctgcggactggcactcggcggccaactggcaattgaagccgttgcctgtgtagcccgcctggcactggcactccgacttgcccaaatgctcctcatagacgcagtcggcatgaacgtcacagatatcgggtctctgaaggggtttcaacgatgctgtcatgggtatatcatatatggggctataatcacttacaattgcacaggagtcgtcgctgattgggtcgcagttgtatccatcgcctctgaatcctggctggcaggtgcaaatgtggcgaagctcctggccataccaattgcaggtggcgttgatgtgacagttttcatccacatcgcagggaactacaaggtacaatgataggtaagtaatcccgacgccttccacctatcttgacagtatctcactcagatcggcattcctttctccatcgaattcttgcacgtaggtgcagcgctggctatcctcgctcagttcgtatccataggggcatcggcattcccctagagcatcgcaaagcggatccacatcatgcctctcgagcaacaggggctcgcaacgtccgttctcccaaacttcgccatgtccgcaaatattggtgcaggtgtagccatcgccgtcgaagccttcgtgacacgtgcaacggccctggtaacagtcagcgtccttcgagcagcgctgaatacgatatgataatacacataatgaaaagatgctcacttcacatttaccataaatgttgcatacttctaagcgctcatttcgatcttaaaaaccatagaatattgatttttggtatattattgtacaatatgataaaaattatagtttatttcattcgaagtcaaaatatgataatttagggattattcgtctctcttctctactttcaatattgggaaaaatatgaaatgcaatcaagctttcagtttactcacgtagcactcgtcggggtgttggggtatctgctcctcaggatatggatatggatttggttggggatactgatcatcttccctttcccgctcctggtcctgtccctgatcgggatacgggctgggattggggcttggttcggaggtgggttcagcttgtccctcgactgctggcgggtattcaatgttgtcagcggtgctgttggacagacaacggtagccgttgccctcgaatccctcggtacagtagcagttgaatccgccctccgtgttgtcgcaaacggcattctcgtcgcaaacgtgggagcccgtcgcgcactcgtctatgtccaggcagacctccactccacgctcgtccagctgggcagcgaaaccgtggtaacagtcgcaccggtaggtgtcctcgtaaggaacgcagacggagttctctacgcaatcggcggtaccatcgttgcaggcattcgattcgggggtcacgcccaccttgctcatggcgccaatgcgcagagcctggtcacgctccacatagtcgagtgccaccttggagatcttctgcagcaccttggtggcactgggatctgcctcgtcatcgcgcaggcagctgcgatacaaaatcctttgctccacctgcagaaaacatgaaattaacatttagatatcattttaacatattacttagttattatttattggacacaacaaatgaacgttgaaagtaaggacttggtcttacctgaagtcccaacacacgctgctcctcggtaatatttatattgagcacctggacagatttcagttctccaggtctttcgaaagtgtactcctccacgtagtcgggtaggattaggactgcatccgctgccaccgccggaacctcaccatagatctcgatcttcacggatagctggtcccagtagttgaggccctcgaaggtctgattcacatgaagattctccccagaatcgaattgcaatcgagatacatgggtgtagacaccgccggttagttggtatccattggcgacaccacccaccgacttggcgaacagccagggcacggtggtcagcagtgggaggaccagtcggagctgggcgcccagttcgggagtcaggggattgatggtggtataggtgcggccttcgctagtcaccacatacgactgcagcttggcttcctcgctgactggctgcttgtttagctctccggtcagtgttcctgtcactcggataggttgatcattagccaggcaggactttccattgccatagaatccagatccgcagacacagcaatatccttcggctttgtcgtggcactcggccttctcgtggcactgatgggcgtgggcctggcaactcagagccaaagcgggggactctgtgagggactcggcattgtcgggagacctcacgttctgctcgttctcaatgggagccacttcgaacagccagactccgggaacacccaggttggtgctttcgctcaggaaacgggcctacagagtggaaatggatacataaatacataggaaacatagtcacatagaatataattagtgctacctaattataatatatatactacacttacattctccgatccggaaccgttcaaggtgtagaagcgtccatcttcagccacgaaacccgcctgggcacgaatgtcggggagaccaagtccagctgtttcgccctgcaaccagttaagaccgccatccggatagatgaattgcacaaacgtgctctgctcgttggcaatcagtgccacctggaaggtgttcagacggtccgtcttggagtcaaagtagcccacattgcgccacgtggccacgatcacctgacgagcctcgaattcagactggctgctaaaggcgtaacgcaccaaactggaggccctgtcgagaatactttgttccttggactcgaacagggagatcgaggtgccctcatcactgaacgaggtgtccacgttcgagtagaaggccgctatcgaagcatattccagcggaaagggctggttcaggtactcgggaaactcggagttgaaggtgaggatgccattggtgttgatctagagaatacatgaaagaactataagtaacacaaataaggaatattcgggagttacatttaaaagatcaattgtcttcgtccaaaatggtatttataaatgtttcgaaggcgatactcaattggtgtactcaaggtgttattgaaaatgttttgcttatttcatttgaaagatatcaggatcattttgttaagtgtatgggaataaggaagttccacttgggatcgtttgaagtggaaatacttggcctccatatggcgtggcaatcagtgcgccccgtgaagtgctaacgggccacttaactcctaatggccattcgcctggcggaaacaaaacaacaacaagccattaaggaggcggcaaatgatctgacgaaaggatgtggcccgagatgcatattaagtgatctgctgcagtgcctcctaattgagtcctcggccgacatccgcctaacgatccgcctaaaattagctgcaactccatcgatgcaacaggcaatctgaataaacaacccggaatgggagcacaggtgtttccgaaatgcctttcttgtggttgccgacaggccgttgcataaatcatgtcactctggtggctccacggattccgttcatcgcgacggggaaacacggatgtctggaaattccggcagcttgcctggtgatttgtatggatgcccaactccacatggatatccaacatgccacaatgggtgctaaattgaggttgggtaagcaaacatcaaatacttcactcctgcttagcctctatttcacacctcaattgtgcaaagtattcaaaatgtttaaattgttgttaaaattgtttctattttgcttaaagtgggtgttgcatttgcaaacaaaacgacaagtccagattaggaaacaaatgatatcatgaaacataaacacgacgaaacataaaatagattattattcccctcaaatgtcatttgtaatgaaatgcaaattcatatcctcgaatgatcttttcaatatttttttatatcaacattattttgaattcttttcgcttaaaggaatctaggctggcattgttctcacgattttgccgactgactgacggactattgacgagtttatttataccctttcgtaatgacttcgacaccaatccgacccaagcgctttggagctggctggctacaagctactggctcctccgatcatttcaagcattccgccaaggaattttcaacgaaatttatggatttctatggccataaagctcgttttggccgttctgattctgtgccgcgtgctatttctctacgtcagacacataaatttagttaattaactaacaaaatgcagagcagataaaaaagcgcgttcaaaaataggcgacactcgcagtaggctctcaattcggagaactcataactttggctgccaagtgccgaaaccactcagacactcggatgcccggagctctggcatctggcacttggccaaggcggcaaagcgacatcaatgggtttggttttcggtttttggtcttggaccaccctcaagtgcctgcggattgtagctgcggatgtgtggcacttgaggattattgggacacggtgcgagtggggtgcgtgtgtggaaatcgatgtgcgacctgtcatgttttgccgaaaattaatgtcgcctataaatacgcgggcaccacaacaaagcaggctcccccagaaatagatgcatggtagtctagaaactattgaaccgcgttgtgtttgcatatagattgccccttatcaacgcgtgcttatcacctcgtcaccctgcacgctgcaaaaattcattcagtgcacaatatttgagatactttgtagtctcacataattctgcatctactgaggggggtatgcgtgctaggggtactcacatagagctgctcgtactgctccccgtagaagtgaatgggctgctccagttgcagcacgatcgtttcgctgtcgcccttgggcaagaggtgtatgctgcccagggagccatcctcgaactcgtacaattccgaggcgcgcaggctgtccagatagtgctcgaactgtccgctgaccaggatcaccgagctgagcagcaggcaggcgagcaacttactgccgaaggtcggcattgtggcgggatatggatgggtccttcctgacttgtgtatctctctacttctttgactttgacacgcggggatttcacaatttcgccactggcattttcacactagacacaaaaccgaattcctaaggcactcaagtttgatccaaaaatataggcgatttataaataaattgtggcactatctattcgtcgagtatatatagaggtttatggcgtgtgtatagtttgacagaattttggaactgtcgctccaagtggcggcccagctcctctgcttttgcttctgctttctgctttacttttggtttctgcttcctaagcacgcgagcaaggaaacccgaacgaactgcacggtttgccaacagattctcgactgattggccgtcgtctccgcggtggattctcctcgactcggtgctcatccgtccgttaccatcgagtatctgtgtgagctgctggccggagtgccgtttagtttgtgcacgtgtgtgtgggtgagtggcggaaagcgagagtttctctggaggccccagataccataccgaataggatccacacactggctgcactccaaaccagatgctgttcgattatgacaattctttattgatgtttaccatcaacagtcgtcgttggcatgggctctcgctttgaaggagtacgtaattatggccaaataaaataatcagttaacaacggaatattgtcagtatgggattgctcatttatttggtgatattcagaatcagcattttatcattttaatagactccatcatatgtaagagtaaaggtttaaaatataacgcccatagcataccaactattgaacgacttcatagatgttagtcttacttttgttaacttagtcttaccaaagaccctagaattctagtgtctttggtcttaccacgtatttcgtgttctaaaaaggtagtgtttagtgagatttacagattctccggacgatatattataaaacatataaccatatggtcaccgtggatatagaaattagttctcccaagggagacttctgggccgggcttccgtaacacattggtgctactagatagtttcgggagtcccaattccagggaactgaacttgaagcgggcacgtgccgcttgattgctcttgccccccaaaattcccgcagcgcatgccaccgtgaagcggcgcgtggaaagggcgaagcgtatggataccttctcaacagtcacaccgagtccacacgcatatccacacccaatcctcagagggtgatgcgcactccaagacatttgagcagtggcgccaaaacagctgagttagagttttttctttaaaatggttttaaactcagtgaaacctggcat

SEQ ID NO: 29417 - DNA, 4591 bp, DROSOPHILA
aaaccgtgcagttcgttcgggtttccttgctcgcgtgcttaggaagcagaaaccaaaagtaaagcagaaagcagaagcaaaagcagaggagctgggccgccacttggagcgacagttccaaaattctgtcaaactatacacacgccataaacctctatatatactcgacgaatagatagtgccacaatttatttataaatcgcctatatttttggatcaaacttgagtgccttaggaattcggttttgtgtctagtgtgaaaatgccagtggcgaaattgtgaaatccccgcgtgtcaaagtcaaagaagtagagagatacacaagtcaggaaggacccatccatatcccgccacaatgccgaccttcggcagtaagttgctcgcctgcctgctgctcagctcggtgatcctggtcagcggacagttcgagcactatctggacagcctgcgcgcctcggaattgtacgagttcgaggatggctccctgggcagcatacacctcttgcccaagggcgacagcgaaacgatcgtgctgcaactggagcagcccattcacttctacggggagcagtacgagcagctctatatcaacaccaatggcatcctcaccttcaactccgagtttcccgagtacctgaaccagccctttccgctggaatatgcttcgatagcggccttctactcgaacgtggacacctcgttcagtgatgagggcacctcgatctccctgttcgagtccaaggaacaaagtattctcgacagggcctccagtttggtgcgttacgcctttagcagccagtctgaattcgaggctcgtcaggtgatcgtggccacgtggcgcaatgtgggctactttgactccaagacggaccgtctgaacaccttccaggtggcactgattgccaacgagcagagcacgtttgtgcaattcatctatccggatggcggtcttaactggttgcagggcgaaacagctggacttggtctccccgacattcgtgcccaggcgggtttcgtggctgaagatggacgcttctacaccttgaacggttccggatcggagaatgcccgtttcctgagcgaaagcaccaacctgggtgttcccggagtctggctgttcgaagtggctcccattgagaacgagcagaacgtgaggtctcccgacaatgccgagtccctcacagagtcccccgctttggctctgagttgccaggcccacgcccatcagtgccacgagaaggccgagtgccacgacaaagccgaaggatattgctgtgtctgcggatctggattctatggcaatggaaagtcctgcctggctaatgatcaacctatccgagtgacaggaacactgaccggagagctaaacaagcagccagtcagcgaggaagccaagctgcagtcgtatgtggtgactagcgaaggccgcacctataccaccatcaatcccctgactcccgaactgggcgcccagctccgactggtcctcccactgctgaccaccgtgccctggctgttcgccaagtcggtgggtggtgtcgccaatggataccaactaaccggcggtgtctacacccatgtatctcgattgcaattcgattctggggagaatcttcatgtgaatcagaccttcgagggcctcaactactgggaccagctatccgtgaagatcgagatctatggtgaggttccggcggtggcagcggatgcagtcctaatcctacccgactacgtggaggagtacactttcgaaagacctggagaactgaaatctgtccaggtgctcaatataaatattaccgaggagcagcgtgtgttgggacttcaggtggagcaaaggattttgtatcgcagctgcctgcgcgatgacgaggcagatcccagtgccaccaaggtgctgcagaagatctccaaggtggcactcgactatgtggagcgtgaccaggctctgcgcattggcgccatgagcaaggtgggcgtgacccccgaatcgaatgcctgcaacgatggtaccgccgattgcgtagagaactccgtctgcgttccttacgaggacacctaccggtgcgactgttaccacggtttcgctgcccagctggacgagcgtggagtggaggtctgcctggacatagacgagtgcgcgacgggctcccacgtttgcgacgagaatgccgtttgcgacaacacggagggcggattcaactgctactgtaccgagggattcgagggcaacggctaccgttgtctgtccaacagcaccgctgacaacattgaatacccgccagcagtcgagggacaagctgaacccacctccgaaccaagccccaatcccagcccgtatcccgatcagggacaggaccaggagcgggaaagggaagatgatcagtatccccaaccaaatccatatccatatcctgaggagcagataccccaacaccccgacgagtgctaccgctgctcgaaggacgctgactgttaccagggccgttgcacgtgtcacgaaggcttcgacggcgatggctacacctgcaccaatatttgcggacatggcgaagtttgggagaacggacgttgcgagcccctgttgctcgagaggcatgatgtggatccgctttgcgatgctctaggggaatgccgatgcccctatggatacgaactgagcgaggatagccagcgctgcacctacgtgcaagaattcgatggagaaaggaatgccgatctgattccctgcgatgtggatgaaaactgtcacatcaacgccacctgcaattggtatggccaggagcttcgccacatttgcacctgccagccaggattcagaggcgatggatacaactgcgacccaatcagcgacgactcctgtgcaattagacccgatatctgtgacgttcatgccgactgcgtctatgaggagcatttgggcaagtcggagtgccagtgccaggcgggctacacaggcaacggcttcaattgccagttggccgccgagtgccagtccgcagagcattgtggtgagaacgccttctgcgacgacggcgtctgccgctgccaagcggacttcgagcgtgacgtcagtgaccgctgtgttccggcgggacgttgcggcagcgtcttctgcggctcaaatgccatttgcaagtgggactcggcggagggcgtccagtactgcgactgcctcgacggatatcagggagacgctcttacaggatgcaccagcaagcctctgtcctgccacgtccttaacaactgcggcatccacgccacctgcgaacccaccgaggatccggccaattacgagtgccagtgcatcgctggtttcaagggagatggatacgtgtgcatcgaggagcagaactgtctgaacaacccgaccttgtgcgacatgaatgctcagtgccgttcgaccaattccgggctcgtctgcgtctgcaatcagggcttctttggcaatggatccttgtgccaggagcgtcagcatcaggactctgacttcctgattgtcagccagggtgtgatgatcgctcgcgttccgctaaacggacgtaatgtccgtcccatttcggtggcccagatggccattggtctggacaaggattgcgtggagggccgcgtctactggggcgatatttcgaccaagaagatcgtgagcaccaaatatgacggcactgatctgcgaccctttatcaccactggtaggaatattgaatctcccgagggtattgccattgatgtcatctcgcgccgcctttactgggctgactcagcaaaggataccattgaggtggccagcctggacgacccttccttgcgggcagtgatcatcaacaagcagctcgtcaatccccgtggcattgccgtggatccctacagggagaaactgttctggtcggactgggaccgcgaatcacccaagatcgagatgtctaacctggacggaactggtcgagaacttctgctgggcaaggatgatgtcactctgccaaactccctggtggtgcttgagaattccggagaggtgtgctacgcggatgcgggaaccaagaaggtggagtgcatcgaaccgcaaaaccgccaaatccgcaccatctccaacgaactgtcttatcccttcggcattaccttcacgcacgatcagttctactggacggactggaccacgaaaaaagtagagatcgttgacagcttgggtgcacggcagacgcccattcagccgcccttctttggcagccacaaaatgtacggcatgaccgtggtggagcagcactgcccgcaataccagagtccctgccagatcagcaacggcggatgcacggactcccggctctgcctggtcaaccgacaggctccgtccggaaagagctgcaagtgcaccagcgcctccacaggatgcaccgtgctggcgcctggctactaagtctattttaaatgcaaactgaaattatttttcgatacgtatacaatcatacaaaaaagcaagttaaccaaagcgcggaaggatattgaagtaaactaaactaaattaacttaactaactaggagtgcctgtgtgccatttcaaagaagaataattaataaagagaaaaaagctag

SEQ ID NO: 29418 - protein, 1352 aa, DROSOPHILA
MPTFGSKLLACLLLSSVILVSGQFEHYLDSLRASELYEFEDGSLGSIHLLPKGDSETIVLQLEQPIHFYGEQYEQLYINTNGILTFNSEFPEYLNQPFPLEYASIAAFYSNVDTSFSDEGTSISLFESKEQSILDRASSLVRYAFSSQSEFEARQVIVATWRNVGYFDSKTDRLNTFQVALIANEQSTFVQFIYPDGGLNWLQGETAGLGLPDIRAQAGFVAEDGRFYTLNGSGSENARFLSESTNLGVPGVWLFEVAPIENEQNVRSPDNAESLTESPALALSCQAHAHQCHEKAECHDKAEGYCCVCGSGFYGNGKSCLANDQPIRVTGTLTGELNKQPVSEEAKLQSYVVTSEGRTYTTINPLTPELGAQLRLVLPLLTTVPWLFAKSVGGVANGYQLTGGVYTHVSRLQFDSGENLHVNQTFEGLNYWDQLSVKIEIYGEVPAVAADAVLILPDYVEEYTFERPGELKSVQVLNINITEEQRVLGLQVEQRILYRSCLRDDEADPSATKVLQKISKVALDYVERDQALRIGAMSKVGVTPESNACNDGTADCVENSVCVPYEDTYRCDCYHGFAAQLDERGVEVCLDIDECATGSHVCDENAVCDNTEGGFNCYCTEGFEGNGYRCLSNSTADNIEYPPAVEGQAEPTSEPSPNPSPYPDQGQDQEREREDDQYPQPNPYPYPEEQIPQHPDECYRCSKDADCYQGRCTCHEGFDGDGYTCTNICGHGEVWENGRCEPLLLERHDVDPLCDALGECRCPYGYELSEDSQRCTYVQEFDGERNADLIPCDVDENCHINATCNWYGQELRHICTCQPGFRGDGYNCDPISDDSCAIRPDICDVHADCVYEEHLGKSECQCQAGYTGNGFNCQLAAECQSAEHCGENAFCDDGVCRCQADFERDVSDRCVPAGRCGSVFCGSNAICKWDSAEGVQYCDCLDGYQGDALTGCTSKPLSCHVLNNCGIHATCEPTEDPANYECQCIAGFKGDGYVCIEEQNCLNNPTLCDMNAQCRSTNSGLVCVCNQGFFGNGSLCQERQHQDSDFLIVSQGVMIARVPLNGRNVRPISVAQMAIGLDKDCVEGRVYWGDISTKKIVSTKYDGTDLRPFITTGRNIESPEGIAIDVISRRLYWADSAKDTIEVASLDDPSLRAVIINKQLVNPRGIAVDPYREKLFWSDWDRESPKIEMSNLDGTGRELLLGKDDVTLPNSLVVLENSGEVCYADAGTKKVECIEPQNRQIRTISNELSYPFGITFTHDQFYWTDWTTKKVEIVDSLGARQTPIQPPFFGSHKMYGMTVVEQHCPQYQSPCQISNGGCTDSRLCLVNRQAPSGKSCKCTSASTGCTVLAPGY

SEQ ID NO: 29419 - DNA, 2938 bp, DROSOPHILA
cgctcagttataaaagccactgacttctaaatggatttacccctggcattgcggaaaatgtgctcccaactgttcgcatttctgctcctccttttgaccgcttttgtgacgggtagaagtactccaccggcgttggatgaagactgtgaactgaattctgtagatacaatggtgagttgtagacatggatggatttagagcagtatagaaacgaaagatgcgaaaatcagaataattatagcaaacaaatagaactcgagagccagacaatgaaatcgtcatataaaatgatgatcgggtacaactttttattgcagcatgatttctgctgcgacctgcacgacgagagtccccagtttagcgactgccagatggagtggcacgaaaagattccatacgagacggatgaagaggagcagacgtacatgtttgtgagttcggttgaggagcgtaaacaagtaccaaactaattgcttaatcagtgcaccgcagagtgcagtttcaacagtacgaacttcttgggcagggaccgccgttcactgaatctcaatgaggtaaaggagcacttggaaagcgacctggtcaacgatgcggacattaagcttctctatgacacctatgtcaagtgcgacaagcatggtgtgcaagctgcgcgagttgtttattaaatcatctctaaatgaactaccctttgcagcgctctcactgatgccgcacaaaggtgtgaagcagctatccaaacgtctttcgcgtcttggctgtcatccgtatcccggactggtcctcgagtgcgtggccaacgagatgatcctgcactgtcccaccaagcgcttccgtcaaacagcccagtgcgaagagacacgcaatcatttgaagcaatgtatgcagtatctaaagtacaagtcctagatgtgggattaatacatgggcaccacttccagcttacacgtttattgtccttttgttataattaaactatgactaaaggtgggatattcggctagctagcgatcttaactatttcaccctcgacttccaaggaatcggcgagcttaagttgcttatcaaagcgtttctgaaacttcttcgcctgtttttcgttcaaatcctcgacggacagatgcttggcatacttcttgagcagcttcttacgaagtttttccaggaaaatgccatctgcttgcttggtaacgatcttagttagctgggcggcccaatcaaagtcgctggtcacgccgttggaggtctcctcggcagcagcatcttctgtggtctccactttggccttcttcttgggtggcgcctcttcctcgacctctgccttctgcttctgctgtatttcagcaatcttttccgccttggctctggccagctccgcttgctttgcctccttcatcttgttcagctccttctcgagaatatcccacacctgggtggcctggttgcggggcatgcgcatgcagtttcccacgaagttttcgaacttagccttcttgcggggcacgttgtcgacgctctggagcttttggaaggcggatcgaacggctggagttaaattgtactcgctgctgtcgaggatcgaccgaatgatgtccatccaactctcttgcttttgagcgttcttgttgcggggctccttggcggcaaagccttggctttggctggcgtacttctgggcctctgagatgcacttaatgtgtgccacatactcctcgccatagaagtcctttaggcagtccatgcaggacacgttcttgtctttgccgcgacagcgcgtctggtagtgcttttccaccgccggtttctttaccgactcgccgcagatgttgcacgtgaagaagaccatggtgtagcagtcgctgatctcttgtttaccggggaatccttggaatttcaggtaatttggttgaatttaccgccggcggaggccaaacaaaacgcacgtgggcattagagtgaccaatcacgttcgaggcttaaatacctgaaattcagtgttgcctaagaccgatttcaagtacgcaaataggaatttacttaatctaacatattaatttttaattcaacattcattgatatggttaataataatataaagttggaataatttactgcccttatttattaaaacatatctagaaattccaaaactgtaaaatacaacagaaaaatataatcaattttctagacaagaatcattttaacttaaatttaattccttttagcacttttcttctattttttactatcgtcccatttcgatgtatcgcaaccatcagcgtgccatcactaatagcaacagctgttcgcagacacacgttgccggtgctgacgaaatttgtgcgaatgatttcagcgaattccccgctttttcagtttattagaagcccgcgactacagactctgacgaaatacgaatgtatttagtaaaatcagccaggtcgccgatctacagaaccttgcgaacgctcacaaccagtaatttgatggcggccacaattgcctcggccaaggatcctttaacaggacctcgctatgagcgggaacccaatgtgcttagaaaaaagctggcctccgtggtgccgggaacagtaaatcttcaggttctgggctctggcgccaatggagcgcctgccgctgtttatttgtttacggaccaggcacgctatctcttcaactgcggcgagggaacccagagactagctcacgagcacaaaacccgcctatcacgcctggaacaaattttccttacacaaaatacgtgggcttcctgcggagggttaccaggtttgacgctcaccatccaagatgccggagtgcgcgacattggactccatggaccgcctcatctcggctctatgctgcagtcaatgcgacgtttcgtggtgctaaagaatctccaggtgcggccaaacgattgttctgagggcgcctgttt

SEQ ID NO: 29420 - DNA, 938 bp, DROSOPHILA
ttttgtttggcctccgccggcggtaaattcaaccaaattacctgaaattccaaggattccccggtaaacaagagatcagcgactgctacaccatggtcttcttcacgtgcaacatctgcggcgagtcggtaaagaaaccggcggtggaaaagcactaccagacgcgctgtcgcggcaaagacaagaacgtgtcctgcatggactgcctaaaggacttctatggcgaggagtatgtggcacacattaagtgcatctcagaggcccagaagtacgccagccaaagccaaggctttgccgccaaggagccccgcaacaagaacgctcaaaagcaagagagttggatggacatcattcggtcgatcctcgacagcagcgagtacaatttaactccagccgttcgatccgccttccaaaagctccagagcgtcgacaacgtgccccgcaagaaggctaagttcgaaaacttcgtgggaaactgcatgcgcatgccccgcaaccaggccacccaggtgtgggatattctcgagaaggagctgaacaagatgaaggaggcaaagcaagcggagctggccagagccaaggcggaaaagattgctgaaatacagcagaagcagaaggcagaggtcgaggaagaggcgccacccaagaagaaggccaaagtggagaccacagaagatgctgctgccgaggagacctccaacggcgtgaccagcgactttgattgggccgcccagctaactaagatcgttaccaagcaagcagatggcattttcctggaaaaacttcgtaagaagctgctcaagaagtatgccaagcatctgtccgtcgaggatttgaacgaaaaacaggcgaagaagtttcagaaacgctttgataagcaacttaagctcgccgattccttggaagtcgagggtgaaatagttaagatcgctagctag

SEQ ID NO: 29421 - protein, 281 aa, DROSOPHILA
MVFFTCNICGESVKKPAVEKHYQTRCRGKDKNVSCMDCLKDFYGEEYVAHIKCISEAQKYASQSQGFAAKEPRNKNAQKQESWMDIIRSILDSSEYNLTPAVRSAFQKLQSVDNVPRKKAKFENFVGNCMRMPRNQATQVWDILEKELNKMKEAKQAELARAKAEKIAEIQQKQKAEVEEEAPPKKKAKVETTEDAAAEETSNGVTSDFDWAAQLTKIVTKQADGIFLEKLRKKLLKKYAKHLSVEDLNEKQAKKFQKRFDKQLKLADSLEVEGEIVKIAS

SEQ ID NO: 29422 - DNA, 4684 bp, DROSOPHILA
tgaccactcgttgcgcaccctcctgtaatgccgggtttgtcccacccccaatattcccatattcccgggaactatccccccgtttcagcccccctttccccgcctgtcatactccgccgtaaacacataatgccagcgtcattgtcatcgacgtgtcgctcgcgtcgtcgagctccagatggccagaggcgctgtcaggagggttgaaatgttggaggggggcgtggagtggggagcgttttagggggatttccttgaaagcggttcgctctgaaatggcccggcgtggactgttagttattatatttccaataccatttgcgagggactgaactattcagttctgctgctttccccactaaacagtttatgatcttgttttcgtttatgcagtagcatgttttatgaatagcagcaattgacttttcttttaggtaaagtaattagcaactattgtagccgtttaggcatttgcaactaaaatgtttcgattattcattttggaattacttgtaaaggcggtaaatatgattgtacaaaattttcacgtgcaaactagaaaatgtgaattattcaattacttttacattgtgcaatccttacaacttatgtctcgaaacaaaatgcattagaatgcttgtttctgatcaaatcataccgattaagattatctcaaaagaactccattgtgattcagtcccaaaaagggtgattcgtcactccccggggcgccctaaaaaatgtagaacctctattttggtcagagatttttaggctgcgataaaaatcccccagagaatacttgtcatgaaatggaatttgaatgtttgtcccgatttgtatggtatcagcaattaggggaggaagttctgtggcatggaagagtacgaagctatgcttttccgaaaccaattaagtcgcttatggctcaagcccataatatttacttgattccactaaagtatattacacggttttagtaagggcaagcaggatgcggttaactactggactcgttgtagtagcaagcacccaccacctgtagctcacctgttgttccgttttcgaccacctgacggttttcgtagggggttccgcacttccggcaagtttgcactgaatttttcgcactaaaaatgaaaaagggggagtttccaccgacacgaagaagaccttccgagctgctcacctgctcagggccaaaatcagaggtcctcgctcccgctgggcatggagcacttggagcagttgggcgtcattcagcgggacatccttcaggcgcagcgatgactaatgggtagggtaggggtgggtcgtggatgtggagaaatggaaaccaaacacttcggattacatcacaaatcacttaaagcacattttattacgggtataacacttatatgggaacggctaggacttattctaatttgtcgtacactcttggccactttgggagccacaatcgctggctccttgctccttcgcagcgagcagaacttcagcatgtcgacgttctgaggccacgaacacaactgacccgagagatctgtggtattttttagggggcgtctctcgaagatcgggctacaccagatcgcagatgccgcgatttagaaaaacctccaggcacgtgttgtccactcgatcgaagagcagtgagccaaatctccgggccgtatagtcaacgatcagcaccatcttgcaattgatgcacttgtcgcggtagtggaacagtaggcccaccgtgggatgtaccacatgatcggcgtatccgggtgcggcgcggtacacctgatggttgcccatctccacaatggccctggcattcaccaccaccttgcttcgtatgtaggcgggcagcacctccagcgttcgccgcaccttcgactgggtgtagagcagtctgttgagaacgtggctgggggcgttgaaggtgtcgttactgtctcgccggtggaagaatacgttgcggaagacgaagcccgcggtgcggccctcgtcgcactggcgcaggtagtccgccaaggtgttgtgcttcagcggcatcaccacctcgtccaggtccaccactgccgcgtatcgaaagttgtccaccacattggcacggtacacacagtcgttgaactgcgccacgattccggcgtagtggacatcctgcatatgcgcttggacattccattcgaagacatcggccaggccaatccgttggtagtgctccagcacgcgaagcacctcctcgctggcctctacgtagtagaagtagaagtgggttgcaccctgcaggcggtacatctccacgaactccaccagccgcagcacattcgagtagttctcgtggaggggacccacacacacggagatcgtgggtcgagatcggccaaacatgttggtcatgttgcggggataactgtggaaatgcattaagaacgaggttaaagagcgacttgcagtctaatattagataatatgattatttaagatcatcttggttgggtggatagatgactcacctgatctgaataaaggtaggactaaggtgactgagtcgattggacgcgtaggccaaggccactgcctggggaaggcgcaagggagagcggcgggaggcgtgcagcggacacatgatgctccacgccgcaaaggtgttgttgtgcacatcgtgcatggcgcccgcctcctcggccttgatctcctggctggagaagtccgagaagcgcacgatgcagtttatcgacgagtcgcgcagacgctccggcagaatggcgaaaatgcgcagcgaaccaattgtcatctgctcgtcatccatgcggacattacctgttggaatagaaaagaataataatttaaagttatttaaaattgattgatatgataattgttcttcagtcctaatgggaccgttatgaagtcatagctaaccaaatgaaatgtttacttatagcttttggaaagtgttgtatctacgaatctatatttaaagattttcatatttatgtcatttaaattggcagatcgtttttatagcagtataaaagtaatgcgtacaaaatatatataatcaaatataaaaggccaacatttctttgttgtttattatgtatttatactttgtgtagaatggaatggatgggcaggcgctcatgagcatatataaatttaatttgttctatgaagtataacagaactgaccaaaattacaggatttaagacttcaaaatgtaaatatattgaagaggtataacaatcctaggtgcagctctgtatatgttctatccttcggacaatctcacctacgatatccgtcctggcatcgaaatacgccgagtatatctcatgcctgagcgtgctgttccctatccggcgccaactgttgctgtagtcccagtgtggattcggcctctcgaagatcatctgtcgctgcgccttggccagatcctcgcgcagccgctcgttctgcaagaaaaagagttcagggcataagtcactggatcgttgcaaggacaaagggcattccgctgcactcacaaggctcgagcgcatggatatgtagaccaggacgagcatggcgctagccaccagggcggatagcgcgaagtacacatgctggaagcggttctccggggcggccagcatgtctcgagcgggaacaaactgtgcggcagggactccgctcctcaggaatcgccgacggcaactaaaactgtttatttatttgctagctgcgcggcgcgtggcttgtcgttaccgtcgactgagcagccgacgtcttgggtctcgggtcttctgattctcggacttggggccccggctttctgtctgcagtcaaccccaagcggctcctgttgcttatttgcttagcgctcttgatggccggccatcgattagcgatagcccgtgtgtggttgttgctgccactctgtgcggccgtccctccagtgtcatcaccatcgactgccgcccgtcctcggcgttctttggccaccaccacacccgcacgccaccttggcaccaaccactgaccgacccagccaacaagttcacttggcgccccacaatacgcagataattatggctcacacacactggcagaaagaagagcactcggcctggcagagcgataaattatatggtcttaatccccaaaagtccactttgaaatggttttcatataaaaagatatcttagtctgtatcacaactgatgtgccaaatggtcaaaggctattttaaaagaagaaagttgcaagttataggcagttataaagagctgattttagttatcaatattatagatttccaatggtgacatgaactaatgttgttatcacagttctaagccatttttctgccgagctatatagttcctatggattattttttgccgtgcactaacgatgtgggtggggaaagcgctctccgcttttccgcttttctccaggacgcgaatgcaacaagttaatcaacgcacgcctcgcatcaaactggcgcctcagtccacaaacgctgtcatcaaatggcggcacccgccggcagcgcagctgctgcgcagtagcagcgggacggcagagcttcgagggccttgtaaaagtactccagacccccaaaagtgggtggtgggtggtgctggtggttggttgctggtgggggacttaataaattgtacgcttgtctcacgattggagtgt

SEQ ID NO: 29423 - DNA, 1755 bp, DROSOPHILA
cgattcctgaggagcggagtccctgccgcacagtttgttcccgctcgagacatgctggccgccccggagaaccgcttccagcatgtgtacttcgcgctatccgccctggtggctagcgccatgctcgtcctggtctacatatccatgcgctcgagccttaacgagcggctgcgcgaggatctggccaaggcgcagcgacagatgatcttcgagaggccgaatccacactgggactacagcaacagttggcgccggatagggaacagcacgctcaggcatgagatatactcggcgtatttcgatgccaggacggatatcgtaggtaatgtccgcatggatgacgagcagatgacaattggttcgctgcgcattttcgccattctgccggagcgtctgcgcgactcgtcgataaactgcatcgtgcgcttctcggacttctccagccaggagatcaaggccgaggaggcgggcgccatgcacgatgtgcacaacaacacctttgcggcgtggagcatcatgtgtccgctgcacgcctcccgccgctctcccttgcgccttccccaggcagtggccttggcctacgcgtccaatcgactcagtcaccttagtcctacctttattcagatcagttatccccgcaacatgaccaacatgtttggccgatctcgacccacgatctccgtgtgtgtgggtcccctccacgagaactactcgaatgtgctgcggctggtggagttcgtggagatgtaccgcctgcagggtgcaacccacttctacttctactacgtagaggccagcgaggaggtgcttcgcgtgctggagcactaccaacggattggcctggccgatgtcttcgaatggaatgtccaagcgcatatgcaggatgtccactacgccggaatcgtggcgcagttcaacgactgtgtgtaccgtgccaatgtggtggacaactttcgatacgcggcagtggtggacctggacgaggtggtgatgccgctgaagcacaacaccttggcggactacctgcgccagtgcgacgagggccgcaccgcgggcttcgtcttccgcaacgtattcttccaccggcgagacagtaacgacaccttcaacgcccccagccacgttctcaacagactgctctacacccagtcgaaggtgcggcgaacgctggaggtgctgcccgcctacatacgaagcaaggtggtggtgaatgccagggccattgtggagatgggcaaccatcaggtgtaccgcgccgcacccggatacgccgatcatgtggtacatcccacggtgggcctactgttccactaccgcgacaagtgcatcaattgcaagatggtgctgatcgttgactatacggcccggagatttggctcactgctcttcgatcgagtggacaacacgtgcctggaggtttttctaaatcgcggcatctgcgatctgaacgtcgacatgctgaagttctgctcgctgcgaaggagcaaggagccagcgattgtggctcccaaagtggccaagagttcatcgctgcgcctgaaggatgtcccgctgaatgacgcccaactgctccaagtgctccatgcccagcgggagcgaggacctctgattttggccctgagcagtgcgaaaaattcagtgcaaacttgccggaagtgcggaaccccctacgaaaaccgtcaggtggtcgaaaacggaacaacaggtgagctacaggtggtgggtgcttgctactacaacgagtccagtagttaa

SEQ ID NO: 29424 - protein, 567 aa, DROSOPHILA
MLAAPENRFQHVYFALSALVASAMLVLVYISMRSSLNERLREDLAKAQRQMIFERPNPHWDYSNSWRRIGNSTLRHEIYSAYFDARTDIVGNVRMDDEQMTIGSLRIFAILPERLRDSSINCIVRFSDFSSQEIKAEEAGAMHDVHNNTFAAWSIMCPLHASRRSPLRLPQAVALAYASNRLSHLSPTFIQISYPRNMTNMFGRSRPTISVCVGPLHENYSNVLRLVEFVEMYRLQGATHFYFYYVEASEEVLRVLEHYQRIGLADVFEWNVQAHMQDVHYAGIVAQFNDCVYRANVVDNFRYAAVVDLDEVVMPLKHNTLADYLRQCDEGRTAGFVFRNVFFHRRDSNDTFNAPSHVLNRLLYTQSKVRRTLEVLPAYIRSKVVVNARAIVEMGNHQVYRAAPGYADHVVHPTVGLLFHYRDKCINCKMVLIVDYTARRFGSLLFDRVDNTCLEVFLNRGICDLNVDMLKFCSLRRSKEPAIVAPKVAKSSSLRLKDVPLNDAQLLQVLHAQRERGPLILALSSAKNSVQTCRKCGTPYENRQVVENGTTGELQVVGACYYNESSS

SEQ ID NO: 29425 - DNA, 4377 bp, DROSOPHILA
cttctttttatctcaaatttttgatttttattattttaataatatatatttatagaatatatttaaatatttttcagtatttatcaatagtttcctataagttttgtaatgtttatttatttcttctaaaaagtttattttttgtgataattaggtatttttatctttaagctttctatatttttagttgttttttaataaaatgttatttttgttttattattattttttattactattactttattttaggtaggtatttatttagtaatacaaattttttgttctgattttgtttattatttaaaaacatatattgatttttgaatcctttttgtattttatattatgttattttatttatgtaaattaatatttttctttttttaagcttaagctttttcttttggttttatacttttgataaatgaattttcaaacgtttggcttatatttcaagtgattttatttttatttattttgagacatcaatttattaatttctgatttatctatcaaaatcatattttcctttggtttccttattaataaaagtctttaatcagattttttaaatttatcaatatcaatttttttgtttgtgttattcgtttgcccattttattcgtttctttttttttaaatcaagctctgggtctctcaaaaaaagttacttcaaaaaaagaaaaccgaatgtagtagctctatatgtatttcttaaaacttgaaaaataaaataaaatgtttccaattaatggctttatttttccttgcaaaaaatatatatgtttgaggatctttgaaaattgtttatttgagcaaagctgtgccacacataaatagtttctttggagacttagcttacgattaaacataaatacggtcggtaggttacacaaagatcagccacgcccaccgggcgggcgagcgtctctcccagccgctgcactgcgtctgtccctggatttggacctgtatatggttctgcgttcttgtccagttactgctcggttgcgccggaagttccctcgacggctgtctgggcagctgggatgggcatgctctggcccgtagcaccaccaccattacttccaccatttccggcggcactcgccgtgtttcctgggccatccgacggagtatccgcgtcccgttcaagcagatagctaacgcctagaggacgtggtcggccaccataggaagagctacaaggggtgacaagagggcaagcctatcttaatgccgtgaccgattccgaatccgattacgtgcgggaaacaactgtgggtgcactcagtaacaaataaataaccttacgggtacaaaaattcttctacttattagcaattattttgagaaaagtgacagaagttgtttaaatatttaagcaattttttaagtgctaacaaaatattaagtctgcggtttgattgaagttaaacagtattaattcataatgaaagagtttaagtgaaatgaatttatatatatatgaatttatgatatttatataaaaccatactgtttctcaggataattgattgttcagttcaattgaatttcctatccgcaaggccactttatttgtctgagtgcattgatgatgctgttgcaggggcagcacccactgcaacttacctctgtgcatcccgctccctgtcccgttcccgctccctctcccgactgccgccgctgccgcttgagctgctgctgctgctactgccgctgctgctgctgctgctaccaccgccgctgccactgctgcttccaccgaccttctcctgatcacccagataactccaactgccaggacctccatccgatcccaggacattggtatggcctcccactcgcgaactgtcgctgccaatggcgggtgaggtgaccttggagccaccggcatagggacaatttccggaaatgcgtccgcagggcgagctcattgaggaggagggacgagtgtaggagtagccatatcctcgattcctgtcgctttcatcctcgtcggtggcaaagtaatagcctcgtccggagttatcaaaaccggactggcccctggatccgttcgaagttgttgggcaagcggaaacggaagcggttgtcggttgggagtcaacggggcggatacgggattttcgagcgcgagttagtgagtgcatttgcagttgttggagtgcattttgagatttgtttttacgattggaattgccagccgtggaatatccgcagtgtccacagtgttgttgttgtagttgtgtggtgtattcatgttcatgttgtagttgtacatgatgttggtgtagttattgttgtttgcgtgttgttgagttgttgtatgaaagtagagagtaaaaacaaaaagagctcagagataggaagcgtataggtacacagatagctgacaacatggatgtataaacaaaagagagtgcgacgatacctgtaggtctcatcccaagggcgatagttgcgaaaatcatacctggagtagtagcgatcgtacggatcataacgatcatacccgcttgtcctcgagcgatcgtagtagcgatctaaaaaggatagtttgcgagatttttcgatttgtaacattcagaaaagaaatcttgaacatacctctggataacccctcgctgtagcgatcaccactgtagtaccgatcccggttgtcgtatccatatccgcgttcccgatcgtatgatcctccatacgcagatccccttctataatcatcatagccacgaccctcatagcggtcgtatgttctcggagtatagcgatcttcgtaataacgggagcgatcgtagtagcgatcgtagtcccgatccctgctgcgatcatcgtagccggagtagtaccaggcactacctcgcatatcgtcgcccgttcgactggagtatccgctgtagtacctatcacgatcccgatcctcgtagcatctcacgcaccgcgactggcggctctttcctcgaagcacggagtcgaggattccaacactcgctgtagccagctgctgatccttggcgtccacactggatcgagcttccggccctgtcaccgctgcctggacacagacgagcagcgtcaggcaggatatctaagacggacaaaataacaaagtttatattaggtttcaaaattatataattctttatattgcttttattttctataagtagtaatataggtcgtcgtaatttaggtgtagcagttttgttctgttttaaataaatatatacattattataaaaatgattcgtatcaattaaaagaatacttctcatgcacagctccttatatttaattgcattcagcgatgaatattaagctcttattgttcttgttccttagttaaccacattagaaatcaacagcataatccaatgcaacaataatcataagtgaaaatgctctcagcgaaataaagtgagttgatttgtgcagccccaattcgaatgattttaatgatgtggttctaaagccacagataagatcctttcaaagcactcaattaagtagatatgttctgtgcctggtagttaatttgccgtatggaaagtcaaaagagagcgcgatcgccattagctgattggctttaattgccgctgagtgcccggcctatcgcaatcggttaagccggggaatcagccagccaatgcatatctcacggttcagctgccaactgggccaaatgcgagtttgctccacggcagcctccgagcgtaattgaggagggcccagagccaggcgccctccgcccacagatgaacaccgctaaaacggacgacaacaccgtgtggccagtcggcgtgaaatatgatcagctcccccaccgattatgcaatggattttgggccaggccagaagtacgagtatgtggctcgtctcggcaccaagtacacggggttggccacatagcattgacatcatttctgagcccggctcatggctgcatgaatcagatttggactctgaattggaattggaatcggaatcataactccactggctgatgccgaaaaaaaaaatcgagaatggccagcgcgggccgagttaatcatggaaaatattttgctagctgaccgccacgctttgttagccaagcatcaggaacaacttccggccaggccgatggtgttggctttggcatgtggggaatggatcgccgtgacttgtcactgactctggccaacttcattagaataattatatttcgagcgagtaccgaaaggtgagtatatgaatgtggcaaattgtttcgctttccgccggtcgttgccatcgaaaacctatgaatgggctttttcgagactccactagatttggtttatttttttttgtctgcccaaattaacataacgtaatcgtaatatttcg

SEQ ID NO: 29426 - DNA, 1194 bp, DROSOPHILA
atgctgttgatttctaatgtgatatcctgcctgacgctgctcgtctgtgtccaggcagcggtgacagggccggaagctcgatccagtgtggacgccaaggatcagcagctggctacagcgagtgttggaatcctcgactccgtgcttcgaggaaagagccgccagtcgcggtgcgtgagatgctacgaggatcgggatcgtgataggtactacagcggatactccagtcgaacgggcgacgatatgcgaggtagtgcctggtactactccggctacgatgatcgcagcagggatcgggactacgatcgctactacgatcgctcccgttattacgaagatcgctatactccgagaacatacgaccgctatgagggtcgtggctatgatgattatagaaggggatctgcgtatggaggatcatacgatcgggaacgcggatatggatacgacaaccgggatcggtactacagtggtgatcgctacagcgaggggttatccagagatcgctactacgatcgctcgaggacaagcgggtatgatcgttatgatccgtacgatcgctactactccaggggccagtccggttttgataactccggacgaggctattactttgccaccgacgaggatgaaagcgacaggaatcgaggatatggctactcctacactcgtccctcctcctcaatgagctcgccctgcggacgcatttccggaaattgtccctatgccggtggctccaaggtcacctcacccgccattggcagcgacagttcgcgagtgggaggccataccaatgtcctgggatcggatggaggtcctggcagttggagttatctgggtgatcaggagaaggtcggtggaagcagcagtggcagcggcggtggtagcagcagcagcagcagcggcagtagcagcagcagcagctcaagcggcagcggcggcagtcgggagagggagcgggaacgggacagggagcgggatgcacagagctcttcctatggtggccgaccacgtcctctaggcgttagctatctgcttgaacgggacgcggatactccgtcggatggcccaggaaacacggcgagtgccgccggaaatggtggaagtaatggtggtggtgctacgggccagagcatgcccatcccagctgcccagacagccgtcgagggaacttccggcgcaaccgagcagtaa

SEQ ID NO: 29427 - protein, 397 aa, DROSOPHILA
MLLISNVISCLTLLVCVQAAVTGPEARSSVDAKDQQLATASVGILDSVLRGKSRQSRCVRCYEDRDRDRYYSGYSSRTGDDMRGSAWYYSGYDDRSRDRDYDRYYDRSRYYEDRYTPRTYDRYEGRGYDDYRRGSAYGGSYDRERGYGYDNRDRYYSGDRYSEGLSRDRYYDRSRTSGYDRYDPYDRYYSRGQSGFDNSGRGYYFATDEDESDRNRGYGYSYTRPSSSMSSPCGRISGNCPYAGGSKVTSPAIGSDSSRVGGHTNVLGSDGGPGSWSYLGDQEKVGGSSSGSGGGSSSSSSGSSSSSSSSGSGGSRERERERDRERDAQSSSYGGRPRPLGVSYLLERDADTPSDGPGNTASAAGNGGSNGGGATGQSMPIPAAQTAVEGTSGATEQ

SEQ ID NO: 29428 - DNA, 2339 bp, DROSOPHILA
aggggttaaccatgaattacatatcttatgcactatttaaatgcataacaaaagaaaatatttgtttaccaaatatgtttctttttaaacatgtatatataaaaatatatatcatagttgattttttattaactaattttatgaatttttacaaatattataaatggcagtttcagttgttagttgagtaaatgtcgaaagtcaagcccagaagactcattcaaaattttccgcccttggaatttccacctcgagcgtgcagaaatttcccatgacgctttatcaccacgacgggaattttcctggcccttagcccgcccccgcccccactgagagttttaggggtggaaaagctgcgcaacaaacgttcgttcgactgtgctcgttttccttcgtgttgtggcttccagtttttcctggctatgcacttggcattatgcctactaaccctattttcgcagcagttcgcagcgagtcccatttttcaacttgcatgcggatacacacgcacacacacactcggattttccttttcccagaaactgaggcgcaacccccacgaaacggaaagtttgtgcagcggcagaacgaactgtgtttgtggcactcgaatttgggacacattcctgtaaaggacgcagctccggtcagctgcttcgcaaaatcgacaaaaaggagtcacaaaaaaacgcgcgcggtgcatttagccacaaatctctgaaagtgaaaatacaaatattgaaacagtgaaatccacaaaccagccaaaagtgaaacaaaattgaacacagtgcttaattaatatcgaagctaaagggatagaaatccgattaggaaaagggaaagctgcagcgctgctcctgtttgccaaatattgattcgcaagtgtgccgctgaaaaatcgattattaaagccactttccacacagctggtggttgttgttgccgtgaggatggaggtggtgcttggggtggtggttgcatagggttgcgtgccgcgatgtgggaaatcaacagcaacattggcacatccacatccagatccagaggcacacttccaactgttttgacgtggtcgggttccaatggcgctgacactaccgaatgctgcagcgcagccttgcagccatccagcggcgacgcgttgcatgtgcagcagcaacagcaacagcagcagcaacatcagcagcagcagcagcagcaacagcaacagcagcaacaacagcagcagcagcaggatacgaaaacgaggatgacaacgaccacaggcaaacgcggaggacacagatacagaagcaggctcagtcaccgaagcacagcaacaattgctgcatattaggcagtaaagtaaagttaaacacaacccaaaaccgaaaagactagcccaaaatttactcaaaaaccaacacaagtggaaagcattaatcggaatgtcgaactctatgcatcgcacaaagttacgttaagtatacgacgcgtatttccagctgcaaaacgaaccaaaaacgaaccgaacgaaacgaaacgcacaggtgcatctgcagaccccactacgcccctaaaagcccactccccccccttttcgaaccctcagcccctcattaggccaccccctctggggtatctacaccaattgacaagcaatcgaggcaatgcagtatgaatgaacttgtttagtcgacaattttttaagtgcactttcgtaaggctgattttcaatttatttcgatgttgtgcttctacacccaaaaaaaaaaccaaatataacaagtaacaaatacaagcataaaagaacccaagaaattcaagcaatgaaccaagtgaaagtgtgagtgtttagtgttttaagcgaaggcgaaatccggacatttgagagcctttgtgagtaaacggccgccacaacggataggcccagagatctcctgctgatacagcaggccaagcccgccggcggcagcaaatcctccagcggtggtccaacgtatatcggcaccgatgccgccacagcagcggcggtggccaatctgcgcagcaaggtgccctccatctcaataatcccgctgcccgtctcgaccaccattgtggcacgcagtggtagcggtgcctctggcactggcggcagtggaggagcaccgccagcactgccccagctgatccagtcgtcgcggagtgtgtccaccaaatccacgggcacgtctccaccattggcctttataacggaaggttctggaacatcgggtgctcccgccctgacactgctgccacgaccccagcagcagcaccagtaccagcagaccgacaagtgcacggtcctcaaactggacgtactgaagcagcag

SEQ ID NO: 29429 - DNA, 339 bp, DROSOPHILA
atgtgggaaatcaacagcaacattggcacatccacatccagatccagaggcacacttccaactgttttgacgtggtcgggttccaatggcgctgacactaccgaatgctgcagcgcagccttgcagccatccagcggcgacgcgttgcatgtgcagcagcaacagcaacagcagcagcaacatcagcagcagcagcagcagcaacagcaacagcagcaacaacagcagcagcagcaggatacgaaaacgaggatgacaacgaccacaggcaaacgcggaggacacagatacagaagcaggctcagtcaccgaagcacagcaacaattgctgcatattag

SEQ ID NO: 29430 - protein, 112 aa, DROSOPHILA
MWEINSNIGTSTSRSRGTLPTVLTWSGSNGADTTECCSAALQPSSGDALHVQQQQQQQQQHQQQQQQQQQQQQQQQQQQDTKTRMTTTTGKRGGHRYRSRLSHRSTATIAAY

SEQ ID NO: 29431 - DNA, 7589 bp, DROSOPHILA
aatatacttcattacctttatttattttccgtgcacttaagcatatatgctgctattaaaatcacgtcaagtaataaggtcaaattgaaaaggtatttagatgttatttttagaacctttgattttaactggaggaccgttatatcaaatgaatttgctaaagaataatcttaagcatgacaaactaccttaccaaaaactttttgtggaaggggcacatccgaggtgtagcaggtggcgccacggatcaccttcttcgtctgcatgctcagtgaaccccaggcaaaggtcgttggcattgtccataaaaagcatagcccagcggcgaaaaagaaacaaaaaccaggcgacaagtttaattaaacgatttaatttagtttttacaaagcgcgcaacagtctggcagatttgctaggctcagtttgagatacagattcgatatggtactcgtaaatatatatatgtatatgtattttcttgggctttggagattgcatctagttcgcttcatggaagaacaatttgtgatgtgtatgtgtacagtgcgatttgacatcatcttcatctctgtgtggttgtggctcccttgagggcgcaataagatcaacaattaagctaattcaacgattctgctaaatacgagttattgtctcaagttgtacatactttatagcctacagtaagtacgtgagtttgcatgtgtgattgagtggcagtgctcctttccattaaaactgattttaataactgacataactgaagcataaaatagatatcacaatattgtatattctatctaaaacaatagatatcattgagaatactgatactgctagcgatagaaatgaaatcacaattcaattttataataaaacgaaatggaataaaagctataattgttagaaaaccctagacatttcaactatatcactgctctccattcacacacacttaagtagagaagccaagcgattggggatacatggggaatagtcgagtatcacgatgtcatctttgccgcattagccgcggctatatcatcccggaaagccaggaatcccagttgggcgtgcgaggcctcattcaaggccctcgatcgaatgcaggcccgatactgatcggctgtcagggaactggaacagatctgtgtaaaagagagaactcggtagtgcaaatgggctgaaattcgttgcatacaacagtaccttggtgtgccagcggtgaaagattcccgggtcggtggccctgattatcttgatttttgatcgaacatactttcggtatagcatcacatcctcgccgccccaaccgacaatctcctcctcgtcgaaaccgcgcacctttaggaagttcgagcggtactggcacgtcattccgtagccaaagtcccgccagaaaccggtgtccctcgatatcaccagttgctcctcttcgctgggcaagggcttgccctgcagtgagtacaccacatgcggattgtacaggctaaatacgacggggtagtagacctaagcgttgaaaatagatgttaatgtattagtaatttaaataatagcagatatatttaccttctttccaggcgctgcattccagcgacaacgctccaggaacttggtcgtgaacataatgtccacgtcgcacatgaagagcagcacgtcctcctcagcgggttgaatgtgctccgctcccagtcttaaagctttggctataagcaaaatggctattattaactaccaatattatttgtaatgcattataaacttgcatatgtattatgaacgaaacaaatgtaatattaataaacgaaacccgtgcttacccctactgaaagtctcattgagtgccaaaaactgagtcctttgggatcgtccagccaggctcctagcttgctccaatccactggttccaaagtacaccacaataagctccaggcgacgatcctctagcttggcgaacatctgcaggaagccgcgaaagctgtgcagacgtccagccagcggtagtatcacgtggattatgggcggactatgacttggaggggcaccactattatccacactggaagatagctccgatagctgcaccgtttgcagaggagcaaatggtcgcatgaccagggctctccgcactggactcgcctggtgcttgacactctggaagtacagctcgtactgggtgcctgtggtgggttcgttgcggtatatgccctcgataaagtcatccagggtgtatttgatcacatccgaggcgtaagccgctgcagaaccagctcccttggctcgtattctcgctgagtgattcctgttcaggctctccagcgccttgtttaccgcctcgatgaggtcacgtcgtcgataaccgatgggcttctccaccacgcgctttcccaggcccaagtcgatgggatatactcgcgtgaaggtgaagtgattgtagggtatcagctcgtactcgttgttcagcggcagtccatgcagaatttctgcggcgcccacctgcttgcgaatatagctgctgcagtcgtaatggtgacccagtggtgcagttggtggccccgcggtggtttcttgcaattgaagactgccatttgatggcttggcagtgctgcgattattctgtagaaagaggatttgagtgcggagagccaggacttcctgtttcagccgctcaatttccgcctctcgttcgcttaaggtgtaactgaatccgctggattcactcggattattggcttgagtttccctcgtcgtcagttcatcgaatccgcactttgtgagcaccacaatggaggcgccggtcaacaaggcgaagagcagcaaaagccgcagcagcaacttggtcaccagggagttatgcattttccatagtttcttacaaaattttcaacctattgaaaataataaaataattagttatctaagtgcaatagtaaaatgcaaacacacatttgagactgtaaaaaaaactagtaacgaattatcacaaattttatacattgctgtggaattctacatttttattacatattatacatgtacatggctcggtagaacagtttattggtttttgtctctgctatttaggcaacagtgcgttattaataattttcgctgatcttttgtaaaagtattaaagataaatcagttaagagcaaacaaaaatttcattttggcttgcggcactggtaatttaagtaataaaataagatacaataatataagacattgatttgaaatcaaacatcatctgcaaggaactaaagaaaaatggaatgcaagtgcttgttaacaataatttgtgcgccgatacacatactaaatataccaattcatgttttttataagctagataagtattatctttttatatttgcaaggggttttcaggaaacatcgatagtatcgataaggtatcgggcttggttccagctctaatagttcaacggtcacactgatcacaagctgatatttctataaaaaaaaatagtgctatttaaaaagcagccgcagttttccgtggaaaacccgaaatacacagcagtattctacaggcacattgtcaaggtgagtgctcgggggtggtgggtggttgggggtggcgttccacccatgtaaacagcgtttgttggcagtgcggcatgcaacaagttcttttttcgagcaaaggtgatggcattcctataaatcgagtgattcataggccgaatagataaggcgtgtgctgcgttttgttttcttttcttttcggccctgtaatctaaacaatttcgggtgtgtgtgtgtgatggaacatgcattctccccatttaaagaaccagacatccaataaaggcctttctctgcttcgctttctttccgcagcaaattcacaatggagaacaacgaagccccctccccctcgggatccaacaacaacgagtaagtggtggaaatccatcgaatcaacaggctcagcgcacaaaagcaaggaaaatcccatacagtgacgtcacctgagtcatatgggccacagcgaaccggaagtaaagtcttcggacttcactttcggacattggaataccgtaaacgtcatgctgctgcccaagcggtagcttcagttgtagtttgaaatcaattagggtcattaaaagcattcagttaagttgagatattgtaaagtcagttgctatcttagatggaatattaatgtgaaatggcaaattaactcgaataacaaaaaagtattaattatattcgattctaaattgtaaaacatttgcaagtagcttataatcagaaacagaatttgcttattaatcactttatcgcaaatggtaactgaacatacttaagtatgtttcatttaacatctatgaaaaacaaatgaatattactcattttatatttttttttgtcaatggaatttcaacagcacttgagattgtgaagttttattagtctatccgaatttaagaagaaagaaagtatttataggacacaagtcccattattaaaacgtgaaaggtgaattggcatagataacgatggcatgatataccaagactcgtgcttttgtgcgttgcagcttgatgatccatctgctgctcttaataagtgtaagcaacccccacaaacacacataatattgtacagttttcccatacttccgccaccgccgaacgcgaatgacaactacaatcaattcggtgaccatcaaatcaggaacaacaatgcagcccagaagaagctgcagcagacccaagccaaggtggacgaggtggtcgggattatgcgtgtgaacgtggagaaggtcctggagcgggaccagaagctatcggaactgggcgagcgtgcggatcagctggagcagggagcatcccagttcgagcagcaggccggcaagctgaagcgcaagcaatggtgggccaacatgaagatgatgatcattctgggcgtgatagccgttgtgctgctcatcatcgttctgggtaagctaaccgattttataccgcttcggctttttgcctcttgctggtgcttctttctggttgcggtttttctcgatcaggctaaagatcagtagtgtagctaggtggctggtttggtttggtattgttatatctataacgcaagtcgacgccctgcaaacgccctaatcttgctcaacctgtggtttcggtcctaacaacttgtccatgtggcttgcagctaactaatccaataacagatactcctactcgtactgatgacaaccccttgtgaatttctgtttacttgcagtgtcgcttttcaattgatacaattaaacacacactcacagaaaaacaaaagcaaagccaacaaaaatcatgtaattccgtttcccaatcagcaaagttaaggttcagattaatcgtttaacacgtttgtgtacgtgtactggctcctactatatactccttaaattgtttattatattttataaaagtcttaagctaagcaactctaaagctctaaaggtaattgttgttcttgtgcctgtcctaagtgttaattatcgttatatttgtttagtctgtagtgtgcgaagattagaacctccatgtcatacgtgtgtagactataaagttcatacatatgtatatagcttcagcaaagctattaagaagttaaaaatggttatatctacagtgcaatgttggggctagggctctgttctatggagaaatttcattttaaaaagtcatttcgattttattcaaattaaactcgcgtaaaaagtattaaataagaatgacaatacgaaatccgtgctgacatcgaaaggtatgtaagatagtaagcgggaagataaaatctgactttaaaagttgttaattaataaataactgaagaaatctttcgtcaacaaaacgctcagtacaatgtgctgggtggttagaacttttacttaaaaagaccgcgatttcatttaaatgcgagataggatatgaaatccttttcatatctcgttgaattgatataaacatagctctaatatctgcgtatttccctttttagtgtccgtttggccgtctagtagtgacagcggcagtggtggaggaaacaaggccatcacccaagcaccgccgcactaaaggcctcctagggagtgaggtaaacacatggatacgaaatggaaaaggaccaaacaaacacaactgggacggaaacctttctggtcttttcgcgcaatgagagaaggggagatgaagaaaatcaaaaggataacttactaaaattgcgtctagcatatatttaaccagaatgtaattattaaatcttaatgttaaacttaacatttttacgtgtcgtagccgagaccagaggtcccattaatgtgtattgcattatatacaattatatatacgtgtatatcatccaattgaaaatacatcatgccacctacactttaaccggacccatcaagtccaccgaagttttatggaaacgtttcgcggacagagccatttatttacattcagcgtttttgcttaagatgcgcgtgccatggaaacagttatcgattttccggcaaaccgaatcgaaacaagacgacagcagtcgcgggcacccagacaaacttgccccatcgacatcgaggcactgaccaattgccgcaggaactgaatcgtctcgcataaacattctgtcccagctgttccgatagtccacgcatgcgttccactcattcgatgttcttccgatagaacaggtacacgaatatatcatgaatgtccgcgcgccatcccatcaattctataaacgaggctgtcgtccacacatagcccatatatagggcaaaaaagttgaggtagtacagctggccgatcagtatgtagtccccggtcgactcctggcggtagaagttcggctttcgcatggaagcgccaaagactatgacaaactgtgggcaaaattggaggaatactgtgtcgttattttaaaaatgggaaagtaggtgtatcgtttcgtttccctgaggcttaccacgctcgagagaatggtgtatactagcagggttggaaactctatgataacacgcttcatctcggcacacacgatgatgccaaagcaggtgaggacaaatatgcgctcgctccacaggataaccttatgccgggtagtctgtggtaaaggaggtaagtgtcggcgggtcaacaagttcttcacttacgaaaaggcctttcttgtgtttgatggcactatttccgtatatcacactgatgatcatcataaggaatgttaggaagattgacaggatgaggcttatataaggggcacgtttggcgggcttcatgatcgacatggtgttcacctcgtactgcagatcaaaagaggtcattcgaaatggacaccatcagttgagatcattcatgtacttaccgtccagaggcccgccaataaccgcacccacataggctttttaacgattatgtggtagaaaaatccgtagagctggatggataggaagctgacgacaaattgcacgagactgaggtagtagcgatctgcgagaaattccttcaggggagtgctgaaaaagaggagcaattgaaaggtctgtcaaaagccgcagggcaagagcatgga

SEQ ID NO: 29432 - DNA, 1836 bp, DROSOPHILA
atggggcaagtttgtctgggtgcccgcgactgctgtcgtcttgtttcgattcggtttgccggaaaatcgataactgtttccatggcacgcgcatcttaagcaaaaacgctgaatgtaaataaatggctctgtccgcgaaacgtttccataaaacttcggtggacttgatgggtccggttaaagtgttgaaaattttgtaagaaactatggaaaatgcataactccctggtgaccaagttgctgctgcggcttttgctgctcttcgccttgttgaccggcgcctccattgtggtgctcacaaagtgcggattcgatgaactgacgacgagggaaactcaagccaataatccgagtgaatccagcggattcagttacaccttaagcgaacgagaggcggaaattgagcggctgaaacaggaagtcctggctctccgcactcaaatcctctttctacagaataatcgcagcactgccaagccatcaaatggcagtcttcaattgcaagaaaccaccgcggggccaccaactgcaccactgggtcaccattacgactgcagcagctatattcgcaagcaggtgggcgccgcagaaattctgcatggactgccgctgaacaacgagtacgagctgataccctacaatcacttcaccttcacgcgagtatatcccatcgacttgggcctgggaaagcgcgtggtggagaagcccatcggttatcgacgacgtgacctcatcgaggcggtaaacaaggcgctggagagcctgaacaggaatcactcagcgagaatacgagccaagggagctggttctgcagcggcttacgcctcggatgtgatcaaatacaccctggatgactttatcgagggcatataccgcaacgaacccaccacaggcacccagtacgagctgtacttccagagtgtcaagcaccaggcgagtccagtgcggagagccctggtcatgcgaccatttgctcctctgcaaacggtgcagctatcggagctatcttccagtgtggataatagtggtgcccctccaagtcatagtccgcccataatccacgtgatactaccgctggctggacgtctgcacagctttcgcggcttcctgcagatgttcgccaagctagaggatcgtcgcctggagcttattgtggtgtactttggaaccagtggattggagcaagctaggagcctggctggacgatcccaaaggactcagtttttggcactcaatgagactttcagtagggccaaagctttaagactgggagcggagcacattcaacccgctgaggaggacgtgctgctcttcatgtgcgacgtggacattatgttcacgaccaagttcctggagcgttgtcgctggaatgcagcgcctggaaagaaggtctactaccccgtcgtatttagcctgtacaatccgcatgtggtgtactcactgcagggcaagcccttgcccagcgaagaggagcaactggtgatatcgagggacaccggtttctggcgggactttggctacggaatgacgtgccagtaccgctcgaacttcctaaaggtgcgcggtttcgacgaggaggagattgtcggttggggcggcgaggatgtgatgctataccgaaagtatgttcgatcaaaaatcaagataatcagggccaccgacccgggaatctttcaccgctggcacaccaagatctgttccagttccctgacagccgatcagtatcgggcctgcattcgatcgagggccttgaatgaggcctcgcacgcccaactgggattcctggctttccgggatgatatagccgcggctaatgcggcaaagatgacatcgtga

SEQ ID NO: 29433 - protein, 540 aa, DROSOPHILA
MHNSLVTKLLLRLLLLFALLTGASIVVLTKCGFDELTTRETQANNPSESSGFSYTLSEREAEIERLKQEVLALRTQILFLQNNRSTAKPSNGSLQLQETTAGPPTAPLGHHYDCSSYIRKQVGAAEILHGLPLNNEYELIPYNHFTFTRVYPIDLGLGKRVVEKPIGYRRRDLIEAVNKALESLNRNHSARIRAKGAGSAAAYASDVIKYTLDDFIEGIYRNEPTTGTQYELYFQSVKHQASPVRRALVMRPFAPLQTVQLSELSSSVDNSGAPPSHSPPIIHVILPLAGRLHSFRGFLQMFAKLEDRRLELIVVYFGTSGLEQARSLAGRSQRTQFLALNETFSRAKALRLGAEHIQPAEEDVLLFMCDVDIMFTTKFLERCRWNAAPGKKVYYPVVFSLYNPHVVYSLQGKPLPSEEEQLVISRDTGFWRDFGYGMTCQYRSNFLKVRGFDEEEIVGWGGEDVMLYRKYVRSKIKIIRATDPGIFHRWHTKICSSSLTADQYRACIRSRALNEASHAQLGFLAFRDDIAAANAAKMTS

SEQ ID NO: 29434 - DNA, 3029 bp, DROSOPHILA
atttcattttaaaaagtcatttcgattttattcaaattaaactcgcgtaaaaagtattaaataagaatgacaatacgaaatccgtgctgacatcgaaaggtatgtaagatagtaagcgggaagataaaatctgactttaaaagttgttaattaataaataactgaagaaatctttcgtcaacaaaacgctcagtacaatgtgctgggtggttagaacttttacttaaaaagaccgcgatttcatttaaatgcgagataggatatgaaatccttttcatatctcgttgaattgatataaacatagctctaatatctgcgtatttccctttttagtgtccgtttggccgtctagtagtgacagcggcagtggtggaggaaacaaggccatcacccaagcaccgccgcactaaaggcctcctagggagtgaggtaaacacatggatacgaaatggaaaaggaccaaacaaacacaactgggacggaaacctttctggtcttttcgcgcaatgagagaaggggagatgaagaaaatcaaaaggataacttactaaaattgcgtctagcatatatttaaccagaatgtaattattaaatcttaatgttaaacttaacatttttacgtgtcgtagccgagaccagaggtcccattaatgtgtattgcattatatacaattatatatacgtgtatatcatccaattgaaaatacatcatgccacctacactttaaccggacccatcaagtccaccgaagttttatggaaacgtttcgcggacagagccatttatttacattcagcgtttttgcttaagatgcgcgtgccatggaaacagttatcgattttccggcaaaccgaatcgaaacaagacgacagcagtcgcgggcacccagacaaacttgccccatcgacatcgaggcactgaccaattgccgcaggaactgaatcgtctcgcataaacattctgtcccagctgttccgatagtccacgcatgcgttccactcattcgatgttcttccgatagaacaggtacacgaatatatcatgaatgtccgcgcgccatcccatcaattctataaacgaggctgtcgtccacacatagcccatatatagggcaaaaaagttgaggtagtacagctggccgatcagtatgtagtccccggtcgactcctggcggtagaagttcggctttcgcatggaagcgccaaagactatgacaaactgtgggcaaaattggaggaatactgtgtcgttattttaaaaatgggaaagtaggtgtatcgtttcgtttccctgaggcttaccacgctcgagagaatggtgtatactagcagggttggaaactctatgataacacgcttcatctcggcacacacgatgatgccaaagcaggtgaggacaaatatgcgctcgctccacaggataaccttatgccgggtagtctgtggtaaaggaggtaagtgtcggcgggtcaacaagttcttcacttacgaaaaggcctttcttgtgtttgatggcactatttccgtatatcacactgatgatcatcataaggaatgttaggaagattgacaggatgaggcttatataaggggcacgtttggcgggcttcatgatcgacatggtgttcacctcgtactgcagatcaaaagaggtcattcgaaatggacaccatcagttgagatcattcatgtacttaccgtccagaggcccgccaataaccgcacccacataggctttttaacgattatgtggtagaaaaatccgtagagctggatggataggaagctgacgacaaattgcacgagactgaggtagtagcgatctgcgagaaattccttcaggggagtgctgaaaaagaggagcaattgaaaggtctgtcaaaagccgcagggcaagagcatggatcactactcacatctccatcgccaccgagacctgaatctgtccgatgacgagcataattatggttactctgtacgtgggtcccacccaactcttttggcgcggtggggggttttcgcgcaacatatgtacagacgctctagttctgaaactgtatttggagtggcttgtttcgattcacatctaaatttatgagaaaaacatcaaactatcagaaaaataaatgccaactgttctgtccgccagcgggatcgcggtaggttggattggtccgttaatcgttaccttccggttggttttgaggtgtgaaaactcatttgcggcacgtaaatgaccagcaaagtacggccatacaaaaattttgcgaattctgtatgttgtgtaactgcctaactcccattttacattttgcaatgaatgattttatattcattgaaagtattcctacaaaaccctagatatctatgataaaacatacattttttgaactagtttttgaaatcaagtcactataatcattgaaaaaggtgagcatataggtgaccatagaattgcgtgcttgcttttaaaatgtaaaactgaaaataattgaatcgtatgctcgtattttcactatacatgcttctttcttctgagtgcgcagagtatatttagtgaactaatagagtttactaatagaattaaatatcttggtgtagtgggtatctttcatcgcagtggttgctggccacccagcttcacatatcagagtggcctggacttctccattaggtttgaaattagttatcgtttgttactgaattccatactccaacacgatacccgggccacgcccacaccgccatggaggaccgccgccagagaatgcgggcatatcggcgggcccgccgaaagtttgcctgcgtcgtctacatggtgaccatagcctggatggtcctggctatcttgcaatggctcctggtcagcctgatgtgagttgggcagctgagtttggggttctttaccgctgtaaccgctgttctttcagatcggacataagtatgaccttcacaaacttttactggattagcgtgatcttcttcgcgctggccatggtgatggtcacggtgttcatattcttcgagaa

SEQ ID NO: 29435 - DNA, 768 bp, DROSOPHILA
atgttgcgcgaaaaccccccaccgcgccaaaagagttgggtgggacccacgtacagagtaaccataattatgctcgtcatcggacagattcaggtctcggtggcgatggagatcactcccctgaaggaatttctcgcagatcgctactacctcagtctcgtgcaatttgtcgtcagcttcctatccatccagctctacggatttttctaccacataatcgttaaaaagcctatgtgggtgcggttattggcgggcctctggacgtacgaggtgaacaccatgtcgatcatgaagcccgccaaacgtgccccttatataagcctcatcctgtcaatcttcctaacattccttatgatgatcatcagtgtgatatacggaaatagtgccatcaaacacaagaaaggccttttcactacccggcataaggttatcctgtggagcgagcgcatatttgtcctcacctgctttggcatcatcgtgtgtgccgagatgaagcgtgttatcatagagtttccaaccctgctagtatacaccattctctcgagcgtgtttgtcatagtctttggcgcttccatgcgaaagccgaacttctaccgccaggagtcgaccggggactacatactgatcggccagctgtactacctcaacttttttgccctatatatgggctatgtgtggacgacagcctcgtttatagaattgatgggatggcgcgcggacattcatgatatattcgtgtacctgttctatcggaagaacatcgaatga

SEQ ID NO: 29436 - protein, 255 aa, DROSOPHILA
MLRENPPPRQKSWVGPTYRVTIIMLVIGQIQVSVAMEITPLKEFLADRYYLSLVQFVVSFLSIQLYGFFYHIIVKKPMWVRLLAGLWTYEVNTMSIMKPAKRAPYISLILSIFLTFLMMIISVIYGNSAIKHKKGLFTTRHKVILWSERIFVLTCFGIIVCAEMKRVIIEFPTLLVYTILSSVFVIVFGASMRKPNFYRQESTGDYILIGQLYYLNFFALYMGYVWTTASFIELMGWRADIHDIFVYLFYRKNIE

SEQ ID NO: 29437 - DNA, 2267 bp, DROSOPHILA
cggaaaattacaaaaatattagttcccccataaagtgataagcagattaaacaaaaggcctagttgaactttgtgccaaagataaagatttcatcatgggcataaaatgtgctttaagatctggttttcatttcgtgtttaaagagtgtaccaagtttctagaaaaatatacattacttcgttttgtaaaaatcatttaaattactgcttgcttattttaaataggtttttttttaaatgtctttctcccaaattgagccatcagtaggataaatttgacttaagggttttgagcttctaagataatgctgcccgagttagggacaatttaccacccagtgagtagcggccaaatgctcttctatgtatttccgtctggcccaaattggagttgaccgggccaaaagtgtgcttcctgtgcggctgacagcttctgttacgcccacatcagaatctatctgcagatgaaggcggtcccatcatcgttggctggcctgtcaataataataaccccaggacgatgaggtcctcggatgcgtgttattatgctaattgtattgttcggctgtttatgagctgttttggggacagaggggggggggcgataacctcttccttacgttggcatacgaatcgtaatctttatacttgtttcccttgcaggcattaagctttctgttcatcacttgcatgatgttcgcactggcaggcggccatccatcaagcgacaagctgaagtaagtccctgcccactgccacgcccccacctaacgagcacactgaaaatagtaaatgataacaaaatcgctagtaactataaaaaccacactttttgattacaaaagtattacttacttttccagtttgtttctatgcactaaaaacgtacatatacaatatatataaaatatagtttctgtaaatattaaccaaattttctaacaccgattgttctgcgtgcagttgatagagtgctcctttatttgtttgctgtgttaccatgttcatgggccattcgaccatttacaggatccgaatacacgtgccggtgaagcaccacacacatgtacacacgaagacggtcattaagaaggttccgctgcccattccggtgccggtcaaggagcaccaccacgagccgaagaagcaccacagcagccgcagccatcaccatcaccaccaccacgacgacgaccaggatgacgatttcgagggctacgagtaccccatcaaggccaagcggcgcacgcggcatccctttgtctgagttcgggcacagaccacccaaccacatacgccgcccactccgcccaactcagcggggaaaatgaaatcaaatgaaatacaatttacgcagattaagatggaaataaaccaaaatacgagccagcttggccagaaaaggccgaaaaaaaaacaacacagaacacaaagcaagaaaaacgcaatcctgggtctgatttgtcgtcactgtttttagtgcgtaagagtacaacgtaaaataaagagagaacccttagatctaagtaatcatttcagtgcaataaaatatacaaaaattacacttaagcacaatttaaagccggcatcgaaaactttttcattggtatttcagtcacgacaaagttcgagcacataaacatgtttttttttgggggctttccgtttgtaaacttatctgtgtgggtggttggaaataggaaaatcagctagctgaaatttaacaaggattcatttgactttctagaaataaatggtattttgtaaaattgtaagcaactagcacataattcctaattgaagaagtagctagagcttgcacaataaaatctcctctttgaggaaagaacattttttaaagcttattcaatgtattttattaaaataaaccaacttaattaaatgaagtgcgaaaatggaatccatttttgatttaaactgctattattgtatattcctggcataaatgtacgcaaacgaaataaaaaaaaacctccatgcacatcagtttgatattaacataacatattaacttaatttaaaatatcccttacactcgcacatatattaatatgtataagctgcattcccgctgtcatattatagtgctgaaatgagacagccaaatcgggaaaattcccattttctgggcactcagcggagagatttaaactgattgaattgaagatttccagctgttgctgttgctgtgaggttgctcctgctgttgctgctaccgttgatgttgctgctaccgttgatgttgc

SEQ ID NO: 29438 - DNA, 267 bp, DROSOPHILA
atgttcatgggccattcgaccatttacaggatccgaatacacgtgccggtgaagcaccacacacatgtacacacgaagacggtcattaagaaggttccgctgcccattccggtgccggtcaaggagcaccaccacgagccgaagaagcaccacagcagccgcagccatcaccatcaccaccaccacgacgacgaccaggatgacgatttcgagggctacgagtaccccatcaaggccaagcggcgcacgcggcatccctttgtctga

SEQ ID NO: 29439 - protein, 88 aa, DROSOPHILA
MFMGHSTIYRIRIHVPVKHHTHVHTKTVIKKVPLPIPVPVKEHHHEPKKHHSSRSHHHHHHHDDDQDDDFEGYEYPIKAKRRTRHPFV

SEQ ID NO: 29440 - DNA, 4718 bp, DROSOPHILA
ttattttttaacagttgaccatatggtttctaaaaaaaaagttcccgattccttaaaacaatgaacgcactaaacggcctaagcatgttttttttttcaactttattgttgagcaaataataatagataagaccaagttttcttttgctatttacacagacacaactttttgattcacaagataaattatatactaaagaaagggacaggaaagaaacagaaattggaaaacattttacttttctctttctaacgacttattttgttatgcatgcagcgttctgcaataaattccacttaggacaattgtcaataagccagtcattaatcaaacaaaaaacaaaactagccatttttgcatcaatgttaattgaaatgttgcagttatatattgtctttgcaagtccattagtaatgttttgggtaaggaaaatggattatgggtcaatttattagcatttaatcaatgctactaggcttaactacaaaaaaatatatgcatttattataaaatacagacctaaaatgctatatatttgatattagtatactgccattactcgtgaaaatccattaaaataaaaaatcataaacccaagaaaaactacgttaaatttaccaacaaacaatgtgaataacggtactaaaatccgaattgaaaaatttaaccactcaaaaggatttccttttcgttgttgttcttagaagttggatattttgatttctcactgtggcgcataacttttgatttcttctcgcaaccgtattaaatgttccaatattgtacgacccatataaagagtgtatcgtaccgtgtctctcgaatcgcagatatgaatatacaatatatatatatatatatatctatacaatatatattggcatccgattccagttacagttacagaacgctgctccgattcgcaatgagtggagtttcgattgtcgagtttaacgtttgatttgaaattttacagaggtagtacaaaacggcaaatccatgaatccaagtttcagcgaagattcagttgctgaaaccacttgcttaaaaaatataaaaaattcagacggtaagtctacaaggtcctcttccccaggtcctacaatacgaatattcaaaaaaaaaaaacaatgataaaatcgattattatatcatactatattgtatttgagtgttgtggttgtgtcaatgttgtgaatccaatgcatcccagagataagattgattgaactttgaattgatgttgtttgttggttggttgcctaacacgactacccccctcccaatgggtcctataatccagaaatcttaacttaacttagccagccagcccgcgacgctggccaactgcaagctcagctcgagcgccggttccctggcccagtttcctgatcggaatcgggatcgggatcaggatcgtcgagggcatggcgaaggggaaggggatcaggctgaggagcaggcgaaagccggtggctcccggagaaatctaaccattccggttgtgctctatggctttctgcacggaaacttcttgggctcgacgctttcgctgcgcaatccacgtgtggctcccgccaacgatcgggatctggaagctggccgggatgaggatgaggtccacaaagacacttgccagcggagcaacaccttgccgctgcccgtcaagccagacagtcccagtggtagcccgggaagtggtcgtacgggtcggttttttgcggccgcatcgcactttctggagacaggattcagctcaccaaatccaatcatcgacgtggcaagtgcgtgctaaccaagagaatcgtatctccgaaagtatctccttcgcctgcgctagggttgcatgctgtccacccccccaaatagagtatccttagcccggtttgatttgtagttgatgtaggtatttggttacacctggcccacctgaatatccatattcccctccatcacacagcgacacctcacaccacaacgcttgcttcagtatctgggctggagaatcccacggcctcgcatttactaactaattaactaagctctctatccttatatatcgatgataatccatgtatacttactaattgttccatatgtgtgtgtaacggtacttttgtatgtgttgttgtatatttgcgttgacgttgacttgattaaccatatccaaaaaaaaaaaacaaaaaaccaataaccaacaagcgaagctagcaaccaaaacctaacgcacaagccaatctctctgattcacaaattgcccgcagatgaggaggacgagccgcgctgcacgcagctaaccaaccggcacaagaccgccatcaggttcatacgcaaggtgagaagggttcgcactacagagataccctgtactgtgggtttaatcttaaactcggctacctttctatccaacagctcaagtactttgtggcacggcggaaattcaaggaggccttgaagccctacgacgtcaaggacgtcatggagcagtacgcagccggtaagcggtaattaattaagatctagatacacgaacaaaaaaaatcgacttaacagtaacaaaattacatttacgccgttatgggcgtcttaaagaacttaagctcaggtttttcgattacgatactcttttttaaacttttcaatatattacaaacgggatagttaaaatacttataatatatataaacctttagtaccaccttctcttaatacgatttgtatattttaggtcacgtcgacttgttgggtcgcgttaaaatgctacacttgcggtaagaaatatacccgaattcccatttcttaacctatattaattaacacaaaacttgtgcgcagcttggatcaaatcctaggcaaacaagggtccaaggccaaggatgtatatgcatccaaaataagcctagcctcccgcgtggttaaagtcgagaggcaggtgagctacaatctaaaaagaaaaacattaaaacaatggtatagttaattaattttccccgacttatattaggttgctgatatcgaagagaagctagacattctgattaaagcttacatggaggatcgtgatagattcctggctcttccgctgccagccaagcccaaaatacattccattagtcctagccacaagcccctgcaccacgcccacaacctggcgatgatcgacgtgtggaaacggaccgcggcgctcagtgtccatccggagcaggtgaccaccacacccttgctgaatccctcggcgccggacagctccgagctgcgatccctgacagccacgcaaacgcctaccaccacaaccgatgcgatcgccacacaaacccccatgccgccgcatgtgcagcatacagcgaccaatacaaaggtattaccgcagtctaattaattccattggaagtatgtgatgcaaatttaaccactttgtacagtcttccgtgcttaactcatatcagttggggtctgagaagcagcagcacaatgatgtttttatgactgaattagagaatagaaccaaaaaacgtgttacgttaaggtgtgttctgaaataaacaaatatttacatttacatataaccagtataaacatccgaaaacctgcagccttcatagatcaacatcggagccgtatagcaagcaggagcaacggatcactatacccgatgagggagctgattccctggacagcagtgcaaagccaacgccgccagatagttcaagtaactaaaaattagatctattctatttatagtattattttcgtaaaagttttagactacttgcctagcgaatgggaacataaataaaacgttaaatcattatattggctttttttgtttctatatttttttaatttcctttttataactatgaattaaatgtatatcgacagattagagaattcttattttaaaaaatatgatacgtgttgtgaaagcatttaaaagttagattattctaaacacaaactatctcccatttagttatattaatcgatgagtacgaggacttcgaggaggaggatcttaactgtgagggtgaaatggatcatttccccacttgggagatcgacagtgatattggcgtagaagtcgatgtggacgcggatgccgatggcgactgtgatgagtccaccgaggacacggcgctgctgcagtgtgccacgcgcaccgccattgttataacaccaattagcccagtaagtcttggaagatttgtttcatttcgttaagaatctttttaaaacaagttaataacaatttcaggtaagctccgcacacaatcttcagcaattaaatgaccaaactacaacgcttaataaatcaaatttgcttccgccagactctggctagttaattgcaattgaaattagctaaagtagccattacattatcactagaattatatattatatactatggaatgcatattaatgtcattttgggacatcatttgtgttcaattaattggtagcaaacaaatgaaaatcaaactaaataaatctgttttagcagcaaatcttacattaccgaaatgtaccagccttaattctgtgtgtcctcatctggtatctcgtcaataaaatcgtccgcctcctcgtcatcatcttccatcactatgtcatccccatctgcttcctctataaactcattattttcatttaggcggcgctttttagatgtggatggcgcatcatcggtgatgtattcgtcctcctcaaccacatc

SEQ ID NO: 29441 - DNA, 1410 bp, DROSOPHILA
atgaatccaagtttcagcgaagattcagttgctgaaaccacttgcttaaaaaatataaaaaattcagacgccagccagcccgcgacgctggccaactgcaagctcagctcgagcgccggttccctggcccagtttcctgatcggaatcgggatcgggatcaggatcgtcgagggcatggcgaaggggaaggggatcaggctgaggagcaggcgaaagccggtggctcccggagaaatctaaccattccggttgtgctctatggctttctgcacggaaacttcttgggctcgacgctttcgctgcgcaatccacgtgtggctcccgccaacgatcgggatctggaagctggccgggatgaggatgaggtccacaaagacacttgccagcggagcaacaccttgccgctgcccgtcaagccagacagtcccagtggtagcccgggaagtggtcgtacgggtcggttttttgcggccgcatcgcactttctggagacaggattcagctcaccaaatccaatcatcgacgtggcaaatgaggaggacgagccgcgctgcacgcagctaaccaaccggcacaagaccgccatcaggttcatacgcaagctcaagtactttgtggcacggcggaaattcaaggaggccttgaagccctacgacgtcaaggacgtcatggagcagtacgcagccggtcacgtcgacttgttgggtcgcgttaaaatgctacacttgcgcttggatcaaatcctaggcaaacaagggtccaaggccaaggatgtatatgcatccaaaataagcctagcctcccgcgtggttaaagtcgagaggcaggttgctgatatcgaagagaagctagacattctgattaaagcttacatggaggatcgtgatagattcctggctcttccgctgccagccaagcccaaaatacattccattagtcctagccacaagcccctgcaccacgcccacaacctggcgatgatcgacgtgtggaaacggaccgcggcgctcagtgtccatccggagcaggtgaccaccacacccttgctgaatccctcggcgccggacagctccgagctgcgatccctgacagccacgcaaacgcctaccaccacaaccgatgcgatcgccacacaaacccccatgccgccgcatgtgcagcatacagcgaccaatacaaagtcttccgtgcttaactcatatcagttggggtctgagaagcagcagcacaatgatgtttttatgactgaattagagaatagaaccaaaaaacgtgttacgttaagccttcatagatcaacatcggagccgtatagcaagcaggagcaacggatcactatacccgatgagggagctgattccctggacagcagtgcaaagccaacgccgccagatagttcaagtaactaa

SEQ ID NO: 29442 - protein, 469 aa, DROSOPHILA
MNPSFSEDSVAETTCLKNIKNSDASQPATLANCKLSSSAGSLAQFPDRNRDRDQDRRGHGEGEGDQAEEQAKAGGSRRNLTIPVVLYGFLHGNFLGSTLSLRNPRVAPANDRDLEAGRDEDEVHKDTCQRSNTLPLPVKPDSPSGSPGSGRTGRFFAAASHFLETGFSSPNPIIDVANEEDEPRCTQLTNRHKTAIRFIRKLKYFVARRKFKEALKPYDVKDVMEQYAAGHVDLLGRVKMLHLRLDQILGKQGSKAKDVYASKISLASRVVKVERQVADIEEKLDILIKAYMEDRDRFLALPLPAKPKIHSISPSHKPLHHAHNLAMIDVWKRTAALSVHPEQVTTTPLLNPSAPDSSELRSLTATQTPTTTTDAIATQTPMPPHVQHTATNTKSSVLNSYQLGSEKQQHNDVFMTELENRTKKRVTLSLHRSTSEPYSKQEQRITIPDEGADSLDSSAKPTPPDSSSN

SEQ ID NO: 29443 - DNA, 3021 bp, DROSOPHILA
gaatcctatgttggtgatgcaggatacggacaaggccagacactgatagcagtagaggagccaataagcaggtgagccggtattctcgccaagcggattgtatgttttgagcggaaggtgggaccagtccaaggcgaactggggtatgagaatcatgctcaaggcggcaaacgaaagcgctccatagaagtcccgaagcttcctacttctttcacaggctgctgcaaagatcaactcttcgttggcgcctctaggacggaactcttcgttatccaatctcctaaagagctcctccatctgcacattgttcgcctttatggacagcagcttggtggtgtgccctgcactggtggccaggataaagatggctttcacaacctcggacatgtagctcaaattagccatcacatggagcaccaagaggagatcaaagagcagcacccaaaacacaattacgtggacatagttcacctggtggatgattctccaccggcgttctatctgaggccacaacgagaggatgttcaagaatgccttctggcccttgtaaaagatttctactcctttgctcatttcacgtccagatttttccagaacttaagattaattgattcgttcaagtgtttataaggcttctgaacggcatttaaaatgtcattagacgacctaatcgttggttaatcattaaattattaagacaaaaacataatatgactaataaaatcaagtaatgattttaaaataatacgattttttatttgaccgtctgatttgactctttctaattttcactccttataaagagatgtaaaatatatattcattgaaatttatatgatttttgtgcagtgtatgtcatttgttgatgcactttcgcaattttcagcttacatatgtgcgtatgttgagcaaaaatactgaattatttagccgacgattattacgtgggtttattttcgagcagtacctagataaaatatgcataaatgcttctccttctttaatatgggaaccgcttgggatcgcaacagaaggtgtagccatcgttcgggttattcgggaggtgaatgggacaattaactgggtaacaaatagccagacacgggggcttctccatttggaaggtactattgtaagtgaggaatacgtacagcccattgccggtggcatcccgtaccgctttgtaggtccactcgggaaccgggatcttggagccggcgaggaaagccgactgaaggaagcccctggtgtctggcaatgtcaagatgccaattccgccggacttgacccggaaataggacgacttcgggatctgactgcgcacccatctctcaattttctcccaattgccatcgttaattgacttgaattgcggcaccacattcagatagcggaaagtactgcccatctggtccgtgaacaggaagtccgcggaagccaccatatgtcctcgattaatcaccaagtagttggcattttgcaagtaggactggtcatcaccgtaaatgcatttgaacgcaaaatagatgttggacttcatgtaggcagcagcctcctgcggactgaacatctcatccgccacaaactccacaaatggccgcttcggaactataactccttacactatactaggggttcaaaaggccaaactttgtgatttactcacaaaacgttttgtagtagacatcgctctgcgagtacacgagtcttccctgcccgcaatcgaaacatgtgcgatacagctccagatccttgccatctatggtatatcccacggcatacaggttccccgcacaatccccatcgcgaatatgcttggtcaccggttgcattggacttaaacagcgcatgggcagtgggaccgagaactgtccattgtcctggcaaacagtttctttgaaaaccgagggactgcagtacacgagtagagtgacaccggatggaactgtttccaagcgctgcagctggatagatccgctcgcatcgcgataggtgaaaattccattggattgctctaccatatattgtaaaatttgacaatcgccgtgcacttcccaagctgtcgatcatgtgccaaatcatgtgccaaattcacaatcttaaaaaataatttttcaactcacccagaaagcatatgaaatatatgtaaataaataatgtgatataggagcaatccataggagcaattttcatatactatgaaaattttgaaaaaatgccaaataaagaagttaaatgtactaaattcctaaatcggaagcttctatcgatacattctagttagcagttagttcaacatactattttatagaagccatttcggaagcaaatttcggaacctattaaataagtaaccacattttttttgacagtccactcgtggataacactttattgcttctatcacatacaaaagttgttgtttggttgctagttgaactctgcttcgaaacaattgatcaattcttgtattcgtggtactgtacttcaagataataatcagtatttaaatttttttttgttttttgggttttttctttctacttcaaacaattgatattgatgtggttctacaaacaaatatataatagttctttatgtgataagcatacgccataacgataaaagaaattaaaagtaggaaaagaacgaatcgaaatccaatcgcatcggagaattaaatgtgcatatgtagtcgtatatcgtaggtggtataaaatacatataaaataaacaaaacttaaaatgagaactgaaaacgaaacttaaatattttgcactagttctttaacaaagattttagggaacagggttagaggctgcttgctttttacttgttcaaaattgctgcgcgaaatctcatacaaattaaaacctatatagaaaacggtttcgatgtgccatcttactgcgtgtaaatgctataaactatacttgattgctcgggtggtctctactgcagtgcatacgcgttgccagaacatcgcttagttgttgtcctgcttgttgatcagcttaagg

SEQ ID NO: 29444 - DNA, 963 bp, DROSOPHILA
atggtagagcaatccaatggaattttcacctatcgcgatgcgagcggatctatccagctgcagcgcttggaaacagttccatccggtgtcactctactcgtgtactgcagtccctcggttttcaaagaaactgtttgccaggacaatggacagttctcggtcccactgcccatgcgctgtttaagtccaatgcaaccggtgaccaagcatattcgcgatggggattgtgcggggaacctgtatgccgtgggatataccatagatggcaaggatctggagctgtatcgcacatgtttcgattgcgggcagggaagactcgtgtactcgcagagcgatgtctactacaaaacgttttttccgaagcggccatttgtggagtttgtggcggatgagatgttcagtccgcaggaggctgctgcctacatgaagtccaacatctattttgcgttcaaatgcatttacggtgatgaccagtcctacttgcaaaatgccaactacttggtgattaatcgaggacatatggtggcttccgcggacttcctgttcacggaccagatgggcagtactttccgctatctgaatgtggtgccgcaattcaagtcaattaacgatggcaattgggagaaaattgagagatgggtgcgcagtcagatcccgaagtcgtcctatttccgggtcaagtccggcggaattggcatcttgacattgccagacaccaggggcttccttcagtcggctttcctcgccggctccaagatcccggttcccgagtggacctacaaagcggtacgggatgccaccggcaatgggctgtacgtattcctcacttacaatagtaccttccaaatggagaagcccccgtgtctggctatttgttacccagttaattgtcccattcacctcccgaataacccgaacgatggctacaccttctgttgcgatcccaagcggttcccatattaa

SEQ ID NO: 29445 - protein, 320 aa, DROSOPHILA
MVEQSNGIFTYRDASGSIQLQRLETVPSGVTLLVYCSPSVFKETVCQDNGQFSVPLPMRCLSPMQPVTKHIRDGDCAGNLYAVGYTIDGKDLELYRTCFDCGQGRLVYSQSDVYYKTFFPKRPFVEFVADEMFSPQEAAAYMKSNIYFAFKCIYGDDQSYLQNANYLVINRGHMVASADFLFTDQMGSTFRYLNVVPQFKSINDGNWEKIERWVRSQIPKSSYFRVKSGGIGILTLPDTRGFLQSAFLAGSKIPVPEWTYKAVRDATGNGLYVFLTYNSTFQMEKPPCLAICYPVNCPIHLPNNPNDGYTFCCDPKRFPY

SEQ ID NO: 29446 - DNA, 3110 bp, DROSOPHILA
taaaggtttgtgccgttgcacttgattttaataaggagatatatatttttctatatatttttaaataaaatccacattaaatctatgtgttttctatttaagattgcggtgcttctcgaactcattcatagctgaataaattatcatcgatcgcttatctcgtagcccgcgaatgccactttccgtttggcagggtcaaaaaattgaacctacgctaaaaggtatagcaacaatttgcattgcatttccgtttcttttgcggcattgctctataaatacggcaagtccgacgactacaattcgttcttatcaattaaccgagcaaacaaacagacgccaagaaaaatgatcatcagtgcaagcgaacaaggggaatagggaagagaaacacgcgccgagagagaaacacgacacttaattaacgccaattataatggttaataagagtatgtagaaatcgaggaacgcggccgacttgtgggtttcttttaatttacaaacgctttgccggttaattacgcgaacccctcgtcctcacatctcgatccgaaaacagagcaaccactcgcgagcgattctccatttgcactgactcttcagttatcggctcactatatagtagcacatcggctaatgtacataagttttcgatctagagctaagagaatacgagaattgagatgcacatatgtatataatgcagctctcccccaaacttaaacatttcaacgtgcatcgtgctacgatcaagatttgaattaacgcgcgcacttgactatcgatattttttttgttcaaacgatttacaaatgttaaacgacatcattttatgtgaatcatcaaattaaatctcttaacgacaagtacacatatttcatttttagcttaaaataggtagagatggtcaccttaaaaatatttgatagccaaaactggcgttagctagaaaagttctatcgatagccgggtattatcaataaggtttctttaaaacgtttaccacaattcttgtgaacgctgacccagacccactgaccgcgtccctcgtcaccacatcttgggcataaattaagtagaattcttcacttatcgctgcagagcatcaagaaccacgtcgctcttaagtcgtcgtaaatacagcacacgtctttatcaacgccgcacttttaaacggaaggcgcttctgctgacgtggttaatgcaattagtttccacgcgttaaactattaaacaatcaattaaaaagatgctgacgaaggcgcttatcctgttcggcctgctggccttggcccaaggttacagcttcacctcccgcgaggtcaagtgtcacggtaaggagaatccacacataacagcgcgccagcaacaggcggcagtgcacttgttggctggccctgggagcccggataattgaggttccataaattacagtgtgcaaggccgtggttacggaactggaggaggccattgccaaggaggacccccacaagatggccgatgtcagtggattccggctggacgcacagggaaattcgatcagcaagaaagttcgcctagtgaaatctgaaatgttccttaccgaactgatggagaagatctgtaagtaattattaccatatggtacggaatagcatagaggcttgataaagaccagtctaatcttaaaacatttgacgttagtcaaaagttttaccttcgagcgtagctattgtttatcaatgaagatagttatatgtggtattctattaatgataacactttgcttatcattcctaatattttcccgttctaaggcgaaaaaatggacgactacttgaaggcaacctacaagagcaacgggaaattcacactcctcaagatgatcatcaatggtcagatgaacccagactcctcgttggttgactttgtgcaagatggtgatctcaacaaaagcctggggcacttctgcaacgaagtactggaggacaacgatgagatcttcgttaaagccttccaggccgaagagctcggaaacgatttagacatcaagatctgctcagaacaagcgagctactgcgacgaatcgccggtccaggaggagtatgactttgatggcaaagaggaactgtagtttgtcccagtgaaagcttagttaattaacgaatttccttgatcgccgccagtggaggtctttgtactgatatttcgaacgaaaattatgtttagctaatgtaaagaaaaccatgccaagtgttacaaattatgtacgacaataaattccatgtgcaatgtatttttattaatttattaacgagtgttctatgtcattttgggattactcatccttgctgtaaagcaaacattaataacgatacgattttattggattactcggattacttacggatcattggttacattacgaagcatctgatggcgaataactaggaacggagccccaaagcccacgactcccgcaattaggtaaaatagtgtgaaacgcattggactatccaagccaaagggtaagttctgtgagggaaattgtaagttcttagaatggttagctgcgtgttgaccttggattaactaccgccccaggagagccgcctggatatccactcccataacgcatcagcggcccgctaaacttgccaatgggtttacgaagtgtgggccacatgagtaaattttaatccgtttgttgagacgggaataagaaattatttgattgcttgcgagtgagaagttactcccagatttctagcgaacgaatgaaagttactggcttttcgaaaaatttcctgacatatatctttataggcaagcctacttaagggaacccttaaaacttcaccattactagaaatattccttccagttggcaactttgcgtgtacatcggtttctgacgtcgttctaccaagtccatgttatttgcgagcacagtttccatagtttagccacaagatattgatactaaaagctttaaaaataagcgtggatgcatttacaagtgccaataccaaacaaactgttgttccacataagccgtcttgccagcttttaaagaaaacatccaccaatcggttctacggtcacgggtaactttatttcgtttccacttttta

SEQ ID NO: 29447 - DNA, 816 bp, DROSOPHILA
cacaattcttgtgaacgctgacccagacccactgaccgcgtccctcgtcaccacatcttgggcataaattaagtagaattcttcacttatcgctgcagagcatcaagaaccacgtcgctcttaagtcgtcgtaaatacagcacacgtctttatcaacgccgcacttttaaacggaaggcgcttctgctgacgtggttaatgcaattagtttccacgcgttaaactattaaacaatcaattaaaaagatgctgacgaaggcgcttatcctgttcggcctgctggccttggcccaaggttacagcttcacctcccgcgaggtcaagtgtcacgtgtgcaaggccgtggttacggaactggaggaggccattgccaaggaggacccccacaagatggccgatgtcagtggattccggctggacgcacagggaaattcgatcagcaagaaagttcgcctagtgaaatctgaaatgttccttaccgaactgatggagaagatctgcgaaaaaatggacgactacttgaaggcaacctacaagagcaacgggaaattcacactcctcaagatgatcatcaatggtcagatgaacccagactcctcgttggttgactttgtgcaagatggtgatctcaacaaaagcctggggcacttctgcaacgaagtactggaggacaacgatgagatcttcgttaaagccttccaggccgaagagctcggaaacgatttagacatcaagatctgctcagaacaagcgagctactgcgacgaatcgccggtccaggaggagtatgactttgatggcaaagaggaactgtag

SEQ ID NO: 29448 - protein, 189 aa, DROSOPHILA
MLTKALILFGLLALAQGYSFTSREVKCHVCKAVVTELEEAIAKEDPHKMADVSGFRLDAQGNSISKKVRLVKSEMFLTELMEKICEKMDDYLKATYKSNGKFTLLKMIINGQMNPDSSLVDFVQDGDLNKSLGHFCNEVLEDNDEIFVKAFQAEELGNDLDIKICSEQASYCDESPVQEEYDFDGKEEL

SEQ ID NO: 29449 - DNA, 3324 bp, DROSOPHILA
ctttggctgaagatgggaaaacaaaaataagtattcaaaatgtatatatcattttgtcattttcaggtattttaagcttgtctttaaatttacgacatgaacaggtcgtgtgacgtgtagtcaaaaatgaattgttgtatccattctcattaatccttgctaattgttgtcaaggagtatacactagaaaacaccaggtacaactaattgattatttgatcaatcaagcttagcatgaaaatgccacctcaacattttcttgtacatgacgtctgcaagactgatttggtcgtcttaccgatgactgtactttggcccctccttcgtgtccaattgtccgaattctcggaacatgtgggtaaaaagatttgaagttcggacttccttactctcctgtggtttccatgactatgacgatggcgatgcagatgttgcccgggacagacgctcgagctgcaatacaactcccggtccggatattatccagttgcaaagcaatttccctgccctttgaccaaattccattcaaaatttttaataaagaccatagtaagctggaattgcacaaataaagctgagggatatctttgaatggctcttcatttgagatttgaattgaaagcatttgaagcattttgaatcgaattatactaagaacgaatattcattatttagaagattataatattttcaattgcaactggtagcaattgattcaattgatgtttcttaaacacgcttacacaagcgggtaatagctacatatatttttattcactttttagagtcgaacgagtatatacaaaataaatatgattttcctccgtcttctgactaatgcagtatgcacgattccgattgagattaggtttggagtgactaagactaggtactacgaactaatggattcacgctggcgatgaatcgcattcacgagcagtcgcggggacaaaagcttaaactggtattccatcttctgaccggggataatctctccaatttacaccttgaagatgccaaagtagcttcggttgtttccctcccgcagaactgcattgcgatcgttgtgaatgtccttcagatggatcctctcgtttcgttccaggtggatcagaccactcgtgtggcaggtgtgcaccttatgtggcatgttggtgggcaccgtgttcaagcactgcaggaatggagtgtctccttgaaagacgataaatccgttctggtcgtgcgagttgttgtagcatatctgggcgtatacgtaatataggcctgtattggtcaccgtcaagacgccatcgcgcgtttgaaagtgtccctgataagagtttctctcgttatcatttcctatgtacatatctccatggtagcctgagaaattcaagaagtgacttcattaggttgcctgtagtacttgtatgtacacgcttgacgcggaagcatctccttacccatacttccttggtgacgccgcctgctgctcaagtggaaatgggctgctggcctcgagtcctcggatctggctgaaagaagagattcacctgcaaattaacagaggtgcgaatagagatttggtattcgatttttgccaattgtttcgcttttctacactacacacctttgcggactaggaggtggcgatggcgggaatgcattctgcgacggtggtgaagtggtgcagggcttcaagtaaaaagaaaatgtatacatatgtgtttcagttacgcagttaactatctatctttaacccatagcatataacttcattaatggtttttcttgcctgttttcaacggaacgttctacttacctctctttggaagttgcctcattggatgacttttcctgaagctctgtgtgatttccttgaatattctgctcctcattgcgtacatcggcaatcgagcgagattttctgtgaagaggaaaagcagaggcttaatacgataaatccctgaaaatttcatccgtgctcacctctcctgcttctttttgtgggcattgtagctggtaaagtcatcgaacacattgtcatcatttgaggctgaggatgcactgtccgtctcgccctcgccctcagcagtggtctcagatgtgggcgtggtgccggtatgtgcattgttgagtttatttaacatatcggtgtagtcctcgtagtctgcgccaacatcatccacagagctatagctaacgtcgtcgtcctcgtcgtccgcaatggaatccagaccatcgccatcgtcgtcgtcctcctcatccgtgaggccatccaccttttttggatagtcgatgagggcattctcgtactgcaacgaagggatgggcatcagcattttgggtcagaagacttggccaagtacgtgactgcagctggcacagtcctggcacatatctcacatccatttgggacgttcatttttagacacacgcccgcagcacaggctgtttcgtcatcatcctaattgatggcgcctcgctcaaaaacatgatactcgtatacatatacttgtgtacatcatacatatatttaaaagcgaaggaaactctcaagagaattggcaccacagatgcccagccatcaaaatataaataaatcttaaaatcttaaaaccatctctggccattaggccatttgatgagattcgatcaatcgtcacatacagccaaaagcgatcgctcgccttgaacgactatatctactgatagagcctagtatttttgttgaattattggggcttttaccttttgtcacttggggatttgtatctcataaattacgtgaactggctggcgcctcatatttgaaatgagtgtttccttgcggaaagagacattataattcaaataatctatcacaattttctatgtgcctttggccaagcagctaacaaaaaaaaatgaaacaaataacagatgaaacagcgtcgaaattatattttagcacataattctataaatatttttgtatgtcccacacaataaccacatattacgtctggtcatttttttgaggcattctttttcaaaaacaggcgcatggcttaccgactgtgagataccctagccagagtttgccatcataaaatgcaaattaccctttaggcaaaaagaaaactaaacataatagatactcaataacaaaagttcgatataccctcattaaaaactcaagtaccagcctcaaggaataacaatcatttccgactttgtaaacaattcgaggtatctgtatttgcccggggcaaatgttacagcccctgccccatcgccgagtacaaatattgatgctcgaaagtgatttacgcaattgctcacctccttttggaactcgtc

SEQ ID NO: 29450 - DNA, 978 bp, DROSOPHILA
atgctgatgcccatcccttcgttgcagtacgagaatgccctcatcgactatccaaaaaaggtggatggcctcacggatgaggaggacgacgacgatggcgatggtctggattccattgcggacgacgaggacgacgacgttagctatagctctgtggatgatgttggcgcagactacgaggactacaccgatatgttaaataaactcaacaatgcacataccggcaccacgcccacatctgagaccactgctgagggcgagggcgagacggacagtgcatcctcagcctcaaatgatgacaatgtgttcgatgactttaccagctacaatgcccacaaaaagaagcaggagagaaaatctcgctcgattgccgatgtacgcaatgaggagcagaatattcaaggaaatcacacagagcttcaggaaaagtcatccaatgaggcaacttccaaagagagccctgcaccacttcaccaccgtcgcagaatgcattcccgccatcgccacctcctagtccgcaaaggtgaatctcttctttcagccagatccgaggactcgaggccagcagcccatttccacttgagcagcaggcggcgtcaccaaggaagtatgggctaccatggagatatgtacataggaaatgataacgagagaaactcttatcagggacactttcaaacgcgcgatggcgtcttgacggtgaccaatacaggcctatattacgtatacgcccagatatgctacaacaactcgcacgaccagaacggatttatcgtctttcaaggagacactccattcctgcagtgcttgaacacggtgcccaccaacatgccacataaggtgcacacctgccacacgagtggtctgatccacctggaacgaaacgagaggatccatctgaaggacattcacaacgatcgcaatgcagttctgcgggagggaaacaaccgaagctactttggcatcttcaaggtgtaa

SEQ ID NO: 29451 - protein, 325 aa, DROSOPHILA
MLMPIPSLQYENALIDYPKKVDGLTDEEDDDDGDGLDSIADDEDDDVSYSSVDDVGADYEDYTDMLNKLNNAHTGTTPTSETTAEGEGETDSASSASNDDNVFDDFTSYNAHKKKQERKSRSIADVRNEEQNIQGNHTELQEKSSNEATSKESPAPLHHRRRMHSRHRHLLVRKGESLLSARSEDSRPAAHFHLSSRRRHQGSMGYHGDMYIGNDNERNSYQGHFQTRDGVLTVTNTGLYYVYAQICYNNSHDQNGFIVFQGDTPFLQCLNTVPTNMPHKVHTCHTSGLIHLERNERIHLKDIHNDRNAVLREGNNRSYFGIFKV

SEQ ID NO: 29452 - DNA, 3774 bp, DROSOPHILA
gaggcgaatggacagtatcgcatccgaggtttgcaacctggctgtagttactccgttcgcgtcgttcccgacaaggaaatcgtagagcgatctattcctgcccagcacacggttaaggtggccaacgaggatgtgcgtgacataaatctggtggctattagccccttgaagattgtagacatcactgctagggtgacggccacactcaatgaacactacaagacgctgcgcattgtgatgtaccgcaaaggaaactcggattctcctgtgttctcgcaacgtgtgggcaccccggtgaatcctaaagcaagactgaaccctggtatcaccgtcttcttccctcgcattcctctggacggcaagagctacgtggtagaactgcagtccaccctctccgataaaacatatacctacaagctgccatcgactacgtttgtggctgacaggggttccgtgttcgttgagttggagttcaagccggaggtgcgcgccgccgaagcggatctcaaccagaattcgatttcggctctggtgctcatcgccttggtggccattgccttctttaagcaggatctggccaccagtttcctcagcttcgtgtggagcaagcttaacgatgtcgccgccgatctcgcccagcgacagaaaagcaagacacaggtgcgcaagaacgagccaatcaaccagcgcgagattgaacagatggccgaccagataaatgccatcaagaagaaaaagaccaagaagatttagttccgactgatagtcgcattagttgttcaatttagtcacatttcgaggtattcgcggtaggtattcatttggtttttgtttctgtgagattttgtttaaccctttttaatttgaattgcatttaagaaaacgttgtaatttttcactttccatacatagattgaggcaagtttatttgtgttcgttatccactcttatagctaaaataaataaatacaattaaatagattaattagacaaggctgttctactgcatcaggatgtgctcggcaatggagctgagcttgcgattcttgtgcttggctcgtcgcctttcggcttggaggttgatctcattctgggaatcctcagcggcagattcctcggtgactgcctgctcctcctgttgctgatcagcctcctggtgtgcctccgactccggattttcctcgccgttgtcgttctccacgaaaatgcactcgggattgacggcagcacactcgccaaagctggtggccctggccataggatttctggcattggtgtacttctcaaagaaaccgcgacccacaatgcggaaagccatgctggtcaagggattcaacttggatctaaactccatttcgcagacaaatcggcgtcggcacgcctttgagtccaggcccaaaaaggcgaacataaaatcggcaatcctaaagatgaattttgaaaatgttaccttatatagtgaataagaaacgttctgtacttactgctcttcggcgggcatttggcgagccacgctctctgaaatttcctcatccacaatctccacatgctcttcctcctgctcatcttggatcaaatgggcgttatctgcagcgctacggcgtccgcgacggcgcgtgtctacgggaccagatgggccacttggtccagagggagattcgctatggtagtcgccatgcacatcagagacaatgtccgatccagcatagctgctgtatccggaatagggctcgaaactggcgccggagtcaaaagatgaaggagcatcatagtgctccgagtgatcgtggtccagagagtagggaatgtgatcgtgatgagagaaagacgaaggactaaaaaagaaatggaattattaataaaccagtaagggacgcagttttgagagcttcttacggatgatcaaggatgatctcctggttgcacctggcatggggccagaaatagcgcagacccaagtagatggcactgcccacaaagaaggatacgatcaccactttcaccttgatccagtaagcaatggcaatgggccataggtgacgatctgtaaagataataacaatgatatcgacacgattaaataattttccattgcatcagatttggaaaactttcactgttcgacttctacttctacttttgaagaaggtttcacgacaatttattaaccaatatctttgcccaagattgaaagtgaaaagtgttaattgagagcaattcgtgatcgtccagtttggatgaggtgcgtctggcttgggatttgaactgtgcggaaactttcgaaagaaagtgggatggttaacgcccaagagatgtgattatgttgattccgaacgatcagaataattgtaatacttgctcgctaattgttatataaattaggctttttgataacatcttttagtatctatgtactgcaaagtgtcgtggtgattattgttaggtaacttttataggatgtttctgtttaatctaagaattgcagagatagggtgagatgtttacacattttgggagtttaagatagctaactaaaattatagttgttttctttaaattaatgtccgatattacttacaccagaacatgtggtgacgatggcgtcgagtacgtccctcaaactccattagctcccggccgagattttcccatgtgtcctccacttggttatccaattgcgccggagcctcctcgttcttcgtctcctcgcaaaacaccagcgtgaagtagacgacaaggagcacagctccgtaccaaatggtgttcttgtgcatgattgtttagcgttgtagcggtgtaaagagcaaaagctggtatccctgtggctttggttggtcactgcagaaccgaatgatgcagctcgaagccgggtagccggcttatataccaccggctatcggtgatccgctccaagttcagagtgataattgaagcgtcgttgttgtggctttgcgcgcagattttcacacatgcgtattgcccgcgatgacgagtttaatgcccaagacatgcatttgaaatttctttaaactagtgcaatttcactttcataagtcgtgcccgcgtttctagccacttttgtctttggttcaattagtatccattacgaaatatgagcctacatgtaaggtaattgacaattggcgattttcccagaaccgttttcaaaagttatgtaaaaccccgccaaatcgaaccggttaaaaaagttcttgcgggctatcggacaagttgagcatatatcgatctagaacttccatctctaattaaatattgtaaacatttgttgacgttattggttttgtaaataaatgcatcttacttaaaggatgtccagcttaaagtcaaacgatgtggacaccaatcccgcgccggatccccaggcgcccattacccggaagggcttcctaatgtcgcttaacaccggaacacccatgccgattcccgagcagaatctggtaaattagtttccttgtagctaatcttcatcagaacatttgatttatgcgaatatctcagtttggccgctgtcgtcctgtctccgaattcgagaaactgaaccgcgttggcgagggcagctatggaattgtctgtaagtttggttccatatgcatttaacgcattcggttaacctgaaatcccctgcagatcgcgcacgtgacactcgtagcaatgagattgtggccttaaagaaggtccgcatggatcaggaaaaggatggtctgccaattagtggactccgcgagatcatgatcctaaagcagtgccatcatg

SEQ ID NO: 29453 - DNA, 1119 bp, DROSOPHILA
atgcacaagaacaccatttggtacggagctgtgctccttgtcgtctacttcacgctggtgttttgcgaggagacgaagaacgaggaggctccggcgcaattggataaccaagtggaggacacatgggaaaatctcggccgggagctaatggagtttgagggacgtactcgacgccatcgtcaccacatgttctggtatcgtcacctatggcccattgccattgcttactggatcaaggtgaaagtggtgatcgtatccttctttgtgggcagtgccatctacttgggtctgcgctatttctggccccatgccaggtgcaaccaggagatcatccttgatcatcctccttcgtctttctctcatcacgatcacattccctactctctggaccacgatcactcggagcactatgatgctccttcatcttttgactccggcgccagtttcgagccctattccggatacagcagctatgctggatcggacattgtctctgatgtgcatggcgactaccatagcgaatctccctctggaccaagtggcccatctggtcccgtagacacgcgccgtcgcggacgccgtagcgctgcagataacgcccatttgatccaagatgagcaggaggaagagcatgtggagattgtggatgaggaaatttcagagagcgtggctcgccaaatgcccgccgaagagcagattgccgattttatgttcgcctttttgggcctggactcaaaggcgtgccgacgccgatttgtctgcgaaatggagtttagatccaagttgaatcccttgaccagcatggctttccgcattgtgggtcgcggtttctttgagaagtacaccaatgccagaaatcctatggccagggccaccagctttggcgagtgtgctgccgtcaatcccgagtgcattttcgtggagaacgacaacggcgaggaaaatccggagtcggaggcacaccaggaggctgatcagcaacaggaggagcaggcagtcaccgaggaatctgccgctgaggattcccagaatgagatcaacctccaagccgaaaggcgacgagccaagcacaagaatcgcaagctcagctccattgccgagcacatcctgatgcagtag

SEQ ID NO: 29454 - protein, 372 aa, DROSOPHILA
MHKNTIWYGAVLLVVYFTLVFCEETKNEEAPAQLDNQVEDTWENLGRELMEFEGRTRRHRHHMFWYRHLWPIAIAYWIKVKVVIVSFFVGSAIYLGLRYFWPHARCNQEIILDHPPSSFSHHDHIPYSLDHDHSEHYDAPSSFDSGASFEPYSGYSSYAGSDIVSDVHGDYHSESPSGPSGPSGPVDTRRRGRRSAADNAHLIQDEQEEEHVEIVDEEISESVARQMPAEEQIADFMFAFLGLDSKACRRRFVCEMEFRSKLNPLTSMAFRIVGRGFFEKYTNARNPMARATSFGECAAVNPECIFVENDNGEENPESEAHQEADQQQEEQAVTEESAAEDSQNEINLQAERRRAKHKNRKLSSIAEHILMQ

SEQ ID NO: 29455 - DNA, 2375 bp, DROSOPHILA
gaatattgtccgcttgcgtgaggtggtggtgggcaaaagcttggacagcatcttcctggtaatggatttctgcgagcaggacctagcctccgtgctagacaacatgtcgcagcccttcaccgagtccgaggttaagtgcatcaccttgcaggtgcttaaagccttgaaatatctccattcgcgctttatgatccatagggatctaaaggtatccaatctgctgatgaccgacaagggctgcattaaagttggtaagaagataatctatatttaatcccgatatcggctaatatccattccccagctgattttggactggcccgcatgtttagcaatcccccgaaaccaatgactccacagatggttactttgtggtaccgggcacctgaacttcttttgggatgccgaacacacaccacggcggtggatatgtgggcttttggctgcattcttggtgagctgctgctcggaaaacctttgctgccgggtaattcggagatagcacagctggacatgatcatcgatctcttgggagctccatcggagtccatttggcctggctttgccgatctgcccgctgtacaaaattttaccttaagtcagcagccctacaataaccttacgccgaagtttcacatgattggccaatcaggcaggaatctcctgaacattttgtttatctataacccaaaaacgagagccacggccgaagagtgcctgaaaagcaagtactttgtcgatccgccgcagggtgagttggaatttctattgcgacaaagaaaattttcaagtgactaaaccattttccacttttagcttgtgacccgggcatgatgcccactttccctcagcacaggaacaatgctgcacctgctccagctgtccagcctcccgccgacattcccatctcggatttactcaatgtatttattaagcgtcaacgcatggagtaaatgagaacgaatttatttgaacattatgcaatgcactgggtggaaaactataggtacggccggtccatcggcgtttgcttggccttcctgtcgcgggcgcgtggaaaccagcggtgtttagtcgtgtgggtcagctgcatcagctcctggcgagccacttctggatgtttgcttttaaaggcacgcatcgccgtcttcagagccgattccttaaccaccgccgagctctgaatctcgctgatctctggcagcggcagggtgttctcgtagggaactggtgtgtccggatgccaggccacaatggtgcgaccatttttggtcactgccacggcctccaccaggctcttgccaccgacggcattgcgctgcacggcactcgaggaaaataaacgaaatcctccgtataaacgtgccgctgacattttcacaattagagatgaaccgataactgaacagctggaatgttatcgttctaattaatgggcagtgatgcaacattagctacttggataaaaatagctaatacgtcaaaaagaaaactgaaaccatttgtatgcttactctgtaatggttaggcaaaaaaggctaatatacagttacaaaatatacatttatcgatttctttccaataaaaacatcgatagcccaaaaaatcgatgtttcgtcacctctgttaagtactcgataccaggagcttatcacttgccgtcacagctgattttcatttaaaaataaacattcccgttgaaatgtggattgcttacgccctggtggtccacgtactgcttctaggctcaattttcgtgatctactttcgttcgccggtgatcacgggccttactccacagaagcatcttttatattacggcttggagccaccggcgaatcgtttagtgctgatcgtgaccgatggattccgtgccgactccttctttgaggagaactgccgctatgtgcccaacctgcgcaagatcttcttgcgggagggcgtcgtgggcgtgtcacgcactcgtgtgccaacggaaacccgtcccggacacatcaccctaattgccggactctacgaggatccatcggcagtgctgcgcggctggaaaagtaatcccatcgatttcgacaccgtattcaaccgaagctcacagacctacgcatggggcgcgaacgatgttctcaatgtgttttcccatgtgtccaacggtggcgaaataaatctccggttctacaaccacgatctggacttttcgccaggctacgatgcctacgaggaagacgagtgggttttcaaaagggtgaagttgttgctccagcagaagagagaagccctgcagcgggcacagaacgtcgtgttttttctgcacctccttggactggacaccgctggacatgtccacaagccaggcgcgccaaagtttcgacggacct

SEQ ID NO: 29456 - DNA, 375 bp, DROSOPHILA
atgtcagcggcacgtttatacggaggatttcgtttattttcctcgagtgccgtgcagcgcaatgccgtcggtggcaagagcctggtggaggccgtggcagtgaccaaaaatggtcgcaccattgtggcctggcatccggacacaccagttccctacgagaacaccctgccgctgccagagatcagcgagattcagagctcggcggtggttaaggaatcggctctgaagacggcgatgcgtgcctttaaaagcaaacatccagaagtggctcgccaggagctgatgcagctgacccacacgactaaacaccgctggtttccacgcgcccgcgacaggaaggccaagcaaacgccgatggaccggccgtacctatag

SEQ ID NO: 29457 - protein, 124 aa, DROSOPHILA
MSAARLYGGFRLFSSSAVQRNAVGGKSLVEAVAVTKNGRTIVAWHPDTPVPYENTLPLPEISEIQSSAVVKESALKTAMRAFKSKHPEVARQELMQLTHTTKHRWFPRARDRKAKQTPMDRPYL

SEQ ID NO: 29458 - DNA, 10757 bp, DROSOPHILA
tctaacctattttcaaataataataacgttaaggcaatgcaaaacaagaatttttcgcatggtgccaattgatcaaaaataatatagattgaaagtctaagaacttctgaggtgaagggcatattttgtcaaatttacaatgcatgagcatacgtgtgcacacatacagttgtctgctatcactttgtgcgttgaaaagagctgttcgctgtagcgctcttcgctctctcgctctctaacaaaaattcgagagagcctggagccacctctagagccacggccaaaaaatcgtgtgccaaaaaatcgtatggcgttacgcatcttgttattctagggtctttgctgaaacccaaatggattcacacttttcgggtgtcccattgcacttgcagtgaatcaaatgagtgccgagcatcgctttcagtacttttccatgtatttccactcgaatcagttgtgcatgaaactatgtttctgatatctcttggcgaaagcggataagtgtgtgcatattaattaaataaataagattcaaggtgattacatggatggatttactctttgtagcaaaactataaagagtctataaagaaaggtgacaggttaatcattacatgtcgcagtttttagcttatttaaactgtgttaaattaacaaattgacaagaacaagatgtttatgcatacaccaaatggctgagctactgaccattaagtcatatttatttcgcagtatatttagaaaatcgaatacgatctgcctactttatgctgttctttcaaaatgtgaatcaatctaatacttacacattcatatacgaatatattcacattcaattaagcacaatcctcttgcacttcctttttgcagcacaaatatgtcgagcgattcgagtcgaaggatccaggtgcccgaggagctgaaggaggtgctgctgcagttctcgatctcctttctggtggaacaaccgccggatgtgatcgattacgctgtggagtacttcaccaaactgcagtcggaacgcccgagcgtctctcacacggatcaaagcaccgatgaccagctgagcgtcaactcacaggatgccgatggtaagtggagtgttctactttattcgagcagcttctttaagctgccggaatccgttgtgctcctcttctttttttttctattttcgtttacaaagcaattcgattgcgtgtcctgtcaactttttcttggcttaactgccagcccaaagtcctctacattttgcattttctgctgctgcgtgttggaaaattcctgccggggatagttaaaaagtgcaactacatacacatacacatacttttttcagagctcttttcacccagtccgtgctccatttccggccaagcgattttccatgaactactgcgtagtggatgcaaatctctgtcaattcggttcgacatatagacaatctgctggtgtaattcccccgacaattctggccaatttttttggccatgaataggtcgggggaaatcaagatttatttggctggccgaaattgaaaagttttttccgtgcctcagatgattttaccatcctttcgagctttttcctgcggcacgtgttcagataattagcctgggccacgcatatggccataaatcgttgggctcccaccacgagcatacaaaataagaaattaaataatgatgctgatgaagctttggccgcgttcaatttgctcctgatcctgctccagattctgctcccgtttctgccccactgggtgggcctcctctgtctgcgggcttttgttcacagcttccttttgcgtgtttatcttccggttaatcaaacacgcagccctcgagggaggaggcggacgacgccatgtcaagtgggtggactgccggccgggcggacttggggtggcagataaaatggggcacactgctgctgtcattaaaaatctattaattgtgcacacagcagaccgaagagctgagccaacttgcagctgccaatccttttgctacttgaatactagatccactcacagtcagactttcaaaacgccaactagcttgtgtcagttgaaggggctttaactaggttgaaggattatattataaagattatacatctatatcttgcttaaaaagtaactgaatgataaacttgtacttactctactcataagttacaacacaaaagatcaaactttaaaaggtattaaaggagatgctttctcatatatacaaaatatattttagatagcttgctggaaacatatagttaattaatggatacatttaaattgtggaaaactttccatttgtaatccatttcgataactagtgcctgctagaaccaccaaacttccagcatattcattccggattcaaaagcattatagttttagacctttgtctcactattaacgtctggctgccatggccaacttcatccgctttggatgcccagtgaagccagcgaaattgcttccagcttctgccagcaactgaagcgaaaatggcacgcaaatagctactggccacgcccagtcccagcccaaccgcccacttaccaggcttttccgccctcttggatttcccatcgatcggaatctgtatttttgtgctttgatgtctattcgtggccggaaaccttgcagaacagtttctgtttaactttgggctttaaacttgctgagacattaatatcgcgcatacgccgcgtaggcctttgtggctcaataaggtgtgtgtgtgtgtgtgtgtgtgtgtgttttggcaggtggtcaaaggtatgcgcttggcatggtacattttattaacactcccgttggccacagcatcaaaccgaggtaaaaagcaggagcaacgggcggatggatgagcgtatggccaggctatgggcaggcagagggttatgttttgcaggacttgctggaccagtgaagcatactgatgaacagctcagcagccgcatacgcttcatcgggcacacagggcgcatgacacgccccgtgggaagggggcggtggtttatacttgaggggtgcgggggctgggcggttgtcgagtggagtgagttacatttcaacattattgacatgccagcagcgtttgtggcaggactccaggctggcactcggtggcccaacctgaacggaaatgccatctctttcctttcatccatcctatttgctctgcaacggagcgtcctcctgttgcgcttaataataatgtgtatatgaatgcttatatgaaaaagctgagggaatgctcatgttaatcaagacaaagcaaagtggtgctgctatttataacgcagcacggaaagaatttagatgggtgtcattgtttgtacggaatgataataatatgtacgatggatatgcttaaaatgtattaaactaaagctttgaaacgtctttttagcagctgttttcctgtaaataagtgttatttccagtacaatagatcgttttgtttgcgaaaccaagtgttgtccaactggggggtcttttctctcagtgcttagccaacaaagcgacagacagctggcacacacccacccacacacacacacacacacacacacacacacagggagctgtataaatagacggccgactaacactggaccgcttgagtggcgtgttgggctgcctacttacaggcactatttccgccttggtttgacgtttgcctgtcatcagcgactccagcggacgtggatggcgatgtggttggtgatgctgcgatgcggcgatgctgtgcctcttgtggcaccattggcactttcagtcgctcgcaggacgtcacaaggatagcacgcacatccaaaaccgtccttcagtcggtttgtcactcagtttttgagcccgtttgcctgttggccaggcattcatttattcactcattcatccattcattcattccggctcacgtcatcagcgtcggaagttgtcgtcctatataaaaatatatatacatatatatctcgatctctcgttgccgtcactcgcagtcgttctcgttgctattgtttcactccgctaatgaaattaatgtagacaactttttatttgccatccttaattgaattccccagcttatttgcctgagtgcatgtgtgtttgtgaagcaagaaacttacttaattgaaatactttcggtgcatcaattaccaaatgatattcaaagttttgccagcgtactgagttgacatctaaaatctttcaaatctaaatatttcccgtaagcaaaacactttgcctcaattagttttcgtttttgaccaaagcaaggatttagcttagtatacaatctgatttcaatttgaataccaaagaagaagttgcactttattttagagtgttaattacttttcagttgcaaagaaagatctaaatctaaagatgataaagttcaatcttgtgatggtctcaaaacaacatcgaataaatattttgaaaaatattgtgcgcagttttgactagatagttccatgttgaaaaatcaaatatcccataaataaggaaacgtaagtttatgtgattgatagacgtttgcaaatcttcttctaattaccagactgtaaatcagaaatctcaacataccttgcacattcggctgcaatacaaaccagaacagatcacggaggcaattgccatccaagatttcgaacgtgggcgtctctactgctccacacacaatgcaaacagacagactagacggacgagatgggtgtatatacatacagggcttggataaatacttatctggaggggaaatggacgtgcacttgtcccgtctaggtttacaatttttgtggcctttggcgtttaggtaaacttgagggaaatccagaatgcgtgcctgggaaactgttgcgtaattgcatcattaggttgacactctaactggcaacttgacacgactgtgagtgcaaaactgcgggctgcagtgtaaacattttgtgccaatccaaatacaaaaccaaatctgaatccgaatcagaaaccgaatcagcaacagaactatgtgattttgatgtggtggaacacacagaacacacatatatacaaacattttcgactgacttgctgaaggctttgccaaacattcgagtgcataaatatttattacgcatacgcagcgtgtgacgggaaagccaagcgctcggtgcttgcgctggatttgtatggtttttttcactctttttttttgcgtctacatacatcattcaccttgggttacatacacacccaacacatttttatttctacttatttttaaacgtgttcatgcctaactggtttttattttcgcgctcgttgcaaacgatttgaaatcgtaactaaattcggaaacacgcacagaaagcagcactagtgcaattgaaaatgtccactcaggtgtctggtaatttattggctggtgagtagtggctttgctttgctttgcttggccaaagcaaaaaccgaatttcgttgaccaaaaatacatacagtgtgtagacaaaaacatgagcacttaaggtgttgttgtgctcggtttgaatgtataattacagcaatcggttttgcggtcatgtgaacctgggcaaacatttaaatatctgtagcaggcagggaagtgaaacgatcagccttgattgcctcgcatgttttaacaaatattctgtcagctggacaatgcctcatatttgtgctgtttctgaaaggcattctgcgaactatagtacatatctgggattgtcacacgcaaaaaaaggtcaaagagttcgccaacccattctaattttagcagtgactctgatgttttaaagtgtggaacacaatggaaaacagattcaaattgttttttgtttggaaaaacaaacaaataaatatgttataattctataaaggtacatcaaagctgtatcgaattcaatttcacttaatagccgggtaataactttctttaaaaatatcttaatatctgataatatcttaatatctggaaatgaatcttttccggtgtaaaagcctgaagctgagtgaaaaatttgtgcagatgctttctgggttttccgtacatggctctaaattccattggattatgctgcctgtcgttgatatgcgagctcctctgcagtttcatttgaattgcaattgtggcgcagcatgagatgtgccagaccagcagattccaggctgatgccagtgcccagatagctgggcattttgtcgttcattaaatgaagatgttgcccttccatgggaaacactttgagaggcactcaataaacaatatataccatatgtctgatttatgatttcgtttcgtttcattgtgattcagcggaaccaccagtgatggccagctcgcgtcgcaaatcagttttcgccgaggcctacgatccggaggcggatgacgacgatgatggcgccaccgccgtgttccccaagacagatgagcagcgcgcccggctggtcgagtcggtgaagaacgtcctcctcttccgatccctcgagaaggagcaggttcgcatctatacactacataaatcataagtctctcgggggatggaaaagaagcaggcatacacgcatcagtgtttaacccgaataagtgtctgcctgcggttttcctttttgcgggggattatcccccatcaagctggcttcccttcccgcgctccaccaaaaacacacccacaccatgccccttgtaactgatttgttttcgcagatgaaccaagtcctggatgccatgttcgagcgaaaggttcagccgggtgactttatcatccgccagggtgacgacggcgataacttttatgttattgaatcgtaagtaaaacaaaacaaatttcaatcaaactccatgaattatgcacactttctgtttgccaaaagttaacgtgaagttgtggtaacttcctgattttgtttgggctatcttaagcttggcatcgatatggaagtactctctttaaaattattgcaaacctgtttagaaaaatgataagctttactatggtactaatactatggtattttgtggcatttcactttgaataaaacaaatatttgtttaaattcatcaatgctgcagatataagcgcaacttcgtgctacagcaaagaacaacataaaccgcaatcgagcaaattttccatatatattgtatatatggatgcgaattaaccattttagaatggactcaaagaactttaaccgcaaaattactcacgctggcaagagaaagctcattcatttgcgagcggcttaattaattcgtgtttgaatgcgaattagtatttgatatggcaattaatgagtacttgcatattgatgagcacacatacacgcagcgcatcaattataaattgcattcaattaatgtggatttttcgtgctttcccgataacctcgtaacccccgcatttttcacttatcccttttctcacagtggcgtctacaaagtctatattaatgacaagcacattaacacctacaatcacactggactcttcggtgaattagcgctgctctacaatatgcccaggtatgtgcgactctcgtatttgatcgattcatttagtcaaattttccgcgctgtctgagccacaattacaatgtgctaatggctgtatacataagtatatatatatgcatagacatgtctctaatgttgaacttaaatatctagagcggccaccgtgcaggcggaaacgagtggtctactttgggccatggatcgccagaccttccgccgcatcctcttgaagtcggccttcaggaagcggaaaatgtacgaggagctgttgaacagcgtgcccatgctgaaggccttgcaggtgagtcccttcggtcccattgctcccccaatcgatatcatatatcacccatctctcttgtgctccagaactacgaacgcatgaatctggcggatgccttggtttcgaagagctacgacaatggcgaacgcatcatcaaacagggtaagtgaatggcaaagttcggggaccaactccctgaggtgaatcaacgtgcaatctttgctatttttctgtggattgtgtaattcaattttgcgaggaatagaaattaaaccgatggaatggtaaagaaaaccaaaaacctcaagggaaaccttttaaattgttataattatttattaataatcttgggatttaatggaattaattcgcaatttattgtgatttccataaaatgtttatttcatacccgcaaaaatataactacttaaatatatcatcactttaagctgcaaagattggttgaactttagaaaaaaaaagagtttcctctctaccttttggagccctcctaatgtcagcgattttttgaccgattcccaggtgacgccgccgacggcatgtacttcattgaggagggaacggtgtccgtgcgcatggaccaggacgacgccgaggtggagatctcccagctgggcaagggacagtacttcggcgagctggcgctggtgacacatcgaccccgggcagcatccgtctacgccacgggcggcgtcgtcaagctagcatgtgagtgtcctggccggcggaatggctacacggaaagcgtttcagtcgatcccccgcttgacctaatccctaatgcttttgttctttgtttgttctttgtcccgtccacgtcccatgccccattcctcgtatgttttgtgcactgtgtgtagtcctggatgttatttgcttcgaacgcttaatgggaaagtgtagtgggggcattcagcgtagcattagtggatatcgctatctggaacaggatctgcgcgaatatttcggcaacttgccgcttaattagctttgtagttgtagaagtagtagtagtaatagttggaatcccattttcatggccctaattgattgatcaaaattgatttaagtctcaaagatggatttaaagtttttcgcaagttgctaagacatgcggtcatgaaaatgggtcctttaattaaaaaaaaatatacattaaatttatataatttaactcaaaaatccgtccagtcctagacacagaggcctttgagcgcatcatgggcttcctgaccgatgtactcaagcgcaatatcgtgatctatgagcaaatgttcaccgacatggcccgccgtaatacgaatttgtgaagaaatcagtttgaagcgttcttatttgtatagtttattttattccaaatttgcaattgtaccatataccatcattcaaatcaaaccagagctatacaaaatttaagaaagtaaataaagccagtttcgttccgacacacacgcacaagatgttacatgttatgggaacatccacatcattcctgaaattaaacccacagcactatgaaaatttcaatgtctgaagctgacacaggcactaaaggttgatggatcggtaagagatcgaaatgcagatgatatagtggggcctgtggtgatcaagaacttatacttataattggatttggtgtgtggtgtggctaatacatatgttgtttaataagtaccactaaacagctagttcccaagaaatcccaacatcctcagcatgcactaagtgtttcagatgcgttttattaagttgatcttaactaatgattataccactttttcatctagtcctcgatgtcaaggcctttgagcgtttgctgggtccctgcatggatattatgaagcgcaacattgacgactacgagtcgcagttggtgaagatattcggcagcaaaaacaatatcaccgatacacgataaaaagtctgaacaatcaaccaaccaacaaaacaaccaaccaagcaaccaagcaaccaacaacaaccaccaccatcaacagctagaacacacggcaactgaaagtgaaaggtcacttgcaggcttcttaggattttaatttgtaaccatgtttctttctaattgagcaactctacggacagcagataagagcagatcacaagccacagcaatgcacaaataccaaacaaaacacaaggacacaaaatcatttaaacttaatcatgaataattgataattgaaattaatctataatactacgataataatgattatgatgatgatgagatagtgttgatcatgttgggaagaagcttcgccatgtttcttatccaaaacagaaaagcaagcaagctggcgagttaagcaagaattgtattgtatgtatttagcaattgtaatttgtaatgtatttaattcggcaaaactgaattcaaatgcaatcagcaaagagaagcaacaacaaacgattggctcaacggaaatgttaaaaatactaatttaagttttgtttattcataactttttgttatccattgatttattcataatttagaaaataacgcaatcacttgtttcattggctgctagttactgataagcgaaaagtaagcaaaatatatcaaataagagcaaatagaacacacaaacacacgcgcacacacacacacatcagctaagttcccacatcaatcgggagatacttaccccagaatcgaaaagtattcgcttggggaaccccaaaaccaacaaccaattaatgtttgtatgtaactagtctatgtactaagaagcatcggagagtgggaaagatatcagatttgcaggtccccgagatgatgaaggctttccacttcctaaagcgatctcacaataggcacacgaggatgttattttgttattcagttctcgaagcggaacgaaatgaaaacaaatatgtaatgctaaaggcacaatcaatac

SEQ ID NO: 29459 - DNA, 1134 bp, DROSOPHILA
atgtcgagcgattcgagtcgaaggatccaggtgcccgaggagctgaaggaggtgctgctgcagttctcgatctcctttctggtggaacaaccgccggatgtgatcgattacgctgtggagtacttcaccaaactgcagtcggaacgcccgagcgtctctcacacggatcaaagcaccgatgaccagctgagcgtcaactcacaggatgccgatgcggaaccaccagtgatggccagctcgcgtcgcaaatcagttttcgccgaggcctacgatccggaggcggatgacgacgatgatggcgccaccgccgtgttccccaagacagatgagcagcgcgcccggctggtcgagtcggtgaagaacgtcctcctcttccgatccctcgagaaggagcagatgaaccaagtcctggatgccatgttcgagcgaaaggttcagccgggtgactttatcatccgccagggtgacgacggcgataacttttatgttattgaatctggcgtctacaaagtctatattaatgacaagcacattaacacctacaatcacactggactcttcggtgaattagcgctgctctacaatatgcccagagcggccaccgtgcaggcggaaacgagtggtctactttgggccatggatcgccagaccttccgccgcatcctcttgaagtcggccttcaggaagcggaaaatgtacgaggagctgttgaacagcgtgcccatgctgaaggccttgcagaactacgaacgcatgaatctggcggatgccttggtttcgaagagctacgacaatggcgaacgcatcatcaaacagggtgacgccgccgacggcatgtacttcattgaggagggaacggtgtccgtgcgcatggaccaggacgacgccgaggtggagatctcccagctgggcaagggacagtacttcggcgagctggcgctggtgacacatcgaccccgggcagcatccgtctacgccacgggcggcgtcgtcaagctagcattcctcgatgtcaaggcctttgagcgtttgctgggtccctgcatggatattatgaagcgcaacattgacgactacgagtcgcagttggtgaagatattcggcagcaaaaacaatatcaccgatacacgataa

SEQ ID NO: 29460 - protein, 377 aa, DROSOPHILA
MSSDSSRRIQVPEELKEVLLQFSISFLVEQPPDVIDYAVEYFTKLQSERPSVSHTDQSTDDQLSVNSQDADAEPPVMASSRRKSVFAEAYDPEADDDDDGATAVFPKTDEQRARLVESVKNVLLFRSLEKEQMNQVLDAMFERKVQPGDFIIRQGDDGDNFYVIESGVYKVYINDKHINTYNHTGLFGELALLYNMPRAATVQAETSGLLWAMDRQTFRRILLKSAFRKRKMYEELLNSVPMLKALQNYERMNLADALVSKSYDNGERIIKQGDAADGMYFIEEGTVSVRMDQDDAEVEISQLGKGQYFGELALVTHRPRAASVYATGGVVKLAFLDVKAFERLLGPCMDIMKRNIDDYESQLVKIFGSKNNITDTR

SEQ ID NO: 29461 - DNA, 2451 bp, DROSOPHILA
gacgttggggacagtttgcttcggaggctgtggccagttgagctgcgtggctcccgatcctgctccggatcccttgagtatctggtgcaggcgttcgttgttgttgctattgctgtccacattatgcagataacgctgtggactttgagtctgaaatgggggattgagattaagattaagcctctaggtgaagcaaaataattgccacggagcacggcgcccacgcacacatgcgaagtacacactactgcaaaatcaatatgctaaacatatgtgcgcgcactgcaaacatatgtttccttgggtcaagcagcgacttgggacttgtaaactcctcaacctggaaatgctttgtttatcgctcgggatttacctgcgacactgctggtctaatgcagagtaggaggtggaggagcaggcaacagattgccaaggacttgctgcccaggcacttggcgctgtcggtggatttcattgctttggtgtcccttcgaatgtatatatatagctgcccgaatgctggcggagatccagtccggcgtagttgtgctcgtaaacaaacgtctcgtctcgttttggaactacaaatcaacttatgacgcggccatctttgcttgcgattgagatgttatttgttcagcggcgcaggtagaatgtgtgtttacaggggctcaatgttatgcagttatgctgtgctataatgtaaccatatttggttacaagcgctctattgatattttgaatgaatgaattatcaatacgtcaaaactgattaaattgaaatgcaagcggtggtttcttacaataggaagaatattaacaggttaacagttaaatgtttcctcatacagttagcatgtaaaatgaatccctcttctatgatgcgcccctgatcgaacagctgtttaagaggcgttagtacgttttcgggtctcacttcttcacttttgtttacttccgtgtttttagcaaatctgtttgaagaaatatcatttgcaaaatgtcgcaaacagatctgaacaaaagtattgagataataaccaagaccgaggagttggccgacaaaattctggtcaacaagcaggaactgacggtaatggataaacgccgccaagaaacccggcaggcaatgcggctgatggagaagtcggaggacaagaaagtttggatcactattggcagtatgctagtcaaaatggagcgggaaaaggcattggaactgctcaaaaaaggtgggtaactgctcgtccactacatgctattattaactataatttctgacagatcaacagaaaatagaacagcaaatcaatctgatatactcagatcagaaagttctggtgaacaaacatcgcgatttggagttcaaatcgcccttctcgggtacacatcttaagcccttagaaaagaaggagttcgacgctctgaaagcaaatctcccattactgtgaaaatcttcatttaagtaaattttagtgacctaaaccttgaatgcaacatgacccaaaaaaagatccgcattagcgaggtatataaagtaaacaattttgtattaataaccttacatatgttgtttatttgctactaaattcattgcagtccaatacatatggtatacaaattggcagttaaatggctttagattccgcttagttgcctataaaaactagtgcatttgcctggaaattttttaaattaaagattttaattttttaagctggcgccaggaaagtatcgcataggaaccacaatcgatatatctccaaactgccatcgccaggtgtgaccatgctgctggctgagtgtgacccatccgctcaaagctcccgcagcacatttgttgtagcgctccgccgttgttgacttgtttcgtcgtaggctccgattggaccgatctgatcagactttgaatcgatcgcattgatttcgaaacgcagactcttaatcgcgaactagccgaatgcacaagatcaggtcgaaaacacgctgacaaattaattatatacactaaaaacctgcgaaaacgtgcgctcttacgtcggccgtgtgagtgcgtgtgtgtggtgcgctcttctctcaaccgccccccacccccttcgcccacgtttcgctcagcgcgcaaaagtaaattttagtgcaaataaattgctttgcttatctcgaagcgcgcgctcgcatgatgaacgcagctgtgtgcgtgagtgtgtttgtggggagtgagtgtgcgagtgttgttaattaatttacaaaagtcactcctgtttggcgaacaacagagaacaacaataacaccacaagaggcagcgagaagtgcgaaaacgaaagaaaaacaacaacagacctgctaacggcagttgcatgtgggccacttcgcccacccaaccccccaccccatccctcgctggtggaaaacgaaagttcttttacatgtaacacagcaagactctcaga

SEQ ID NO: 29462 - DNA, 399 bp, DROSOPHILA
atgtcgcaaacagatctgaacaaaagtattgagataataaccaagaccgaggagttggccgacaaaattctggtcaacaagcaggaactgacggtaatggataaacgccgccaagaaacccggcaggcaatgcggctgatggagaagtcggaggacaagaaagtttggatcactattggcagtatgctagtcaaaatggagcgggaaaaggcattggaactgctcaaaaaagatcaacagaaaatagaacagcaaatcaatctgatatactcagatcagaaagttctggtgaacaaacatcgcgatttggagttcaaatcgcccttctcgggtacacatcttaagcccttagaaaagaaggagttcgacgctctgaaagcaaatctcccattactgtga

SEQ ID NO: 29463 - protein, 132 aa, DROSOPHILA
MSQTDLNKSIEIITKTEELADKILVNKQELTVMDKRRQETRQAMRLMEKSEDKKVWITIGSMLVKMEREKALELLKKDQQKIEQQINLIYSDQKVLVNKHRDLEFKSPFSGTHLKPLEKKEFDALKANLPLL

SEQ ID NO: 29464 - DNA, 2409 bp, DROSOPHILA
ataacgctgctttgaggagaggatgcggcaaggcgcttcgaagtacaagcgctgccagaaacaggatgatcttctttatttaccttgccatcgttgacatcgttagaatctagtagaccttgaagctcggagcattccaacagtgtattgccgacagcgaattcttgcgatggagtgatgttgacttgatgatggggaggactttccgtgggtttggtctttgcagtctgactcgttctgatattttgagagtcgggaaggataagcgctttactttggaccactttcacacccattggcaacggctgaaactcgtgtcttagttgcggaaccttatcgttcatcagtttcattcgttttgaattcaaacgtgggctggctgcctgtctttttttaggaatcacagaaacctggcaggctggcatagaccgaacgctcaacgtgtttacgttggttcccagttgtgcaggatctgtggacttcggcacttctgttttcttaacgtaatcatgattctctgcgtgcacagaatcctccagaataaagtgtatttggtcctcggaattctgattttgtatggcaaagcaggacagacttggtccatcactttcggtagagtccaagtctattgtttgctcctcgggattaatgtgttcccattggcatttttcggagtcgcaaaatgcgcgttggttattaagaaaactgatgggttcctgcttgacagatgccatttgcaatgacgctggtgcatcatattgagtttctggcacctgtgatgtttcctcaatttggttggatactagaggatcgactaccatttgtggtacttgcgaagctaattcaacacccgtcacgtccacaaaatttaaactgttgagctgtgagggctgctgactaagtttatcttcagcaggttgggtcgatattctactacaaacagtacttggacttgagggaattgatactatttcagttggtttattctcatccccatcttttacgccacaaattttctctgtaaataaatacattattaaaatctattgttcaggtgttatctcaacaaatagcgctcactcaataaaatcctttctataaccggctccacctctccgagttcagcattaagtgtctcattagcgatctgtggagctcgtggtaaccactggttgtgagcccaacagcaggcgtatagtttctctctctcttgacacaattttaccacatcctcaatttcctcgccagtgcgatggatgtactcctgtgcaacaatttgatcgaaatccgaataggtacccaattcccaagggctaaaaattttcggagatattttggacagatttaacctatccagctgcactcccttactgtggagtaggtgctttaaacgtggcaataagacgcatagatttacaggccaattgccatggtccacgacgtgcctaaagcaaaggtgtaagttgtcttcgcttttgtacaagtcctcgccatcgtgaatacttgtgtaataggagaattcttgaagatctaattggtagagtatgcgccaaatggttctcatcaacccttcacttgtgcagatcaaatacttaagattgtgatcctatttgaaatgagatttgggtcattcaagctttgcattccttacttatatttaattgcttaccttgcttccttctgcaaaaaatatttccttcgctctttcgagaagaaattgattttcttttttctctactgaactgttttcattttcggaatttccttcggtcgtaacccttgctccatcttccagaatttttgtcgatccagcttcaatttcagtgtttggtctgttcgtagagtttcttgaattattagatgattcagcatggatcattttaatcttagccggactttccaggttattatttaaattaactgaactgctttctttcgttggctctgaactctgatccaacgctttcggaattgtatgcatttcagttgcttgtgtgtcagttgctgttgtttgagctgtgcagacactttctatgtcaaccgaattcgaagacaattgtggctcattttcttcagcagcaatggtattggcaacaatatgcccggtagatacggaataccttttatattgttcttctagaaatgcttgtgttactgggcagttgattcctttaaataatttatcgagaaagttatgggccgtataattccacccgatcttcagtttgctaaatataatcgtgttgtataaatgtgcttgctaatcctttaaacattattttttttacctcgataattcataaagcctctcagcatttagttgaatataatcttttatgggttccgtaacttctagttcatgctgcaattccagtggctgtgtgccttggttggtagtgacgtcttctg

SEQ ID NO: 29465 - DNA, 144 bp, DROSOPHILA
atgcgtcttattgccacgtttaaagcacctactccacacccttgggaattgggtacctattcggatttcgatcaaattgttgcacaggagtacatccatcgcactggcgaggaaattgaggatgtgagaaaatttgtggcgtaa

SEQ ID NO: 29466 - protein, 47 aa, DROSOPHILA
MRLIATFKAPTPHPWELGTYSDFDQIVAQEYIHRTGEEIEDVRKFVA

SEQ ID NO: 29467 - DNA, 3079 bp, DROSOPHILA
aatacattaatttatagcaggcgtaatagccctttgacagtatgagctgcgatttaatgaactttcctaattccgactgcatttctgttacagtcgaaggataagatgataaagggcgtgaggcgcggttgtgttcgtttaaaggatgcgctaatcggaatcgacgaccaggaggacaacacattcacaatcactgtggaccataagaccttccactttcaggtaagtgtctccttagtaaatggaaataaagattgtctaaggaaagcttgatcaatgttttgcagtttcactaatagttcataattcaccgtaatagtttaagtacgacgttgtttgttttatgaactgaagaaccaactcattttaaattccacacttgcattgattttttatgacgtctagtggtatacgtaagcaaaaactatgtagatcaagagggcagcacgtttctttttgcaattcgcgttttcgtcccaaaagatataaagcaagcatgatggcctatccgctttgcttgccaagagttttcgtcctcttaccggaaaagggtatccgggcatcgacccagaaaccactgtctggtcctcacgttccaccttttgtttgactttgttgccttgatgtaacgataaaactttttccaatacccatacacaagcaaaggagcccactaaacttgccaactttccaaacgcttgcaggcgcgacacaacgaggagcgggagcagtgggtgcgccgcctggaggacaccattcgacgccacgcgaaccggtcgcgtctgtgggacagccaaagcgctttctacatcgccggtggctacacgaaggaagggggcgggagcggaacaggcggcagaagacccaaccacctggagttggtggcgcgccgtgtttccgaggcagatgcctacctccagctgatgattgagcaaacgaacgtgagtattgtgccacgtaatgcaggcattatgcaatttattgtcattttttcttgttctctgtcctgcccagttactggacaaacgcatcgcggagctgaccgatccggcggagcagtctaagtgcaaggcactccaggacaacgcaaatgtaagtaagcagaggttacacgtttccctcggactcagtaactacaacctccaggtggagttcgtcacgaaagttgtttgagagtttctccacttcggcgtacgtcagacgccagtaactttcgtcgactgccatgtaatagtccgcgtcccggttattattaacctttcgaacacctaaaacacagctggttcttagtgcaacatctcttccatagagactgagcgtaacgttcaactgcagtccgtcgctgggtgtaaccagccagaggacgaactcactgtttctgtggctatctggtgaacgcctattccgcagagccgtattgggcaatgtctgggaaattagcaccaccaacgggatgtgactatccaggtgcgagtgttggttcagcgggaagctgttatagggctcacattgccgctgggatatcaataactgttgtgcattgtaagccaggagtcccaacacctgattatcaggattcttacagctcgtcggcttaaaagaaagcacagcccgttcatgtttcactacgggaagaaagcgctgaaaggaagcttccttgttctcatgatcacataggtagtgcagcaaaagcaactggctgtctattcgcctttggcagccctcaaagagacatttttttacctcggactttatcaagagcttgttgggtatggtatcttcgtccttcaaagggacttgtccttcatctggaggagcagcctcaatggtaccgaacatcgactgagacattagctttccctgatgcagctgaaccttctgctggtcatccagctgttgcattccaatgcgaagtgtttccatattttcgttgagctccttgatatccgctttcaaattgaacatggtgttcaccttgttcttcagctccaagtgcgcttcctcacgcttctttttatactcttcgaattggtcgcacaacttgtcggcgctgtggatctttgggtccagaaactccattgcggattagctctaattgtagcctttaaaccttaaatgtaattcgatttccttgaaatgctgggaatttagagaattcggatacgggattgtgtgtttttgttttcccagtgaagtttttggttggaatcgtatatccaggcccactgggccacccactcatatcgatttccaatgcaagttcagggttaagaggcggccagatgcaaaagcctgagagaatgtcaatcgaccggcagctgtccacccatggcagctgctcacttcgtctgcaaactttggcaaagccaaaccacttttttcaccactcccgttggctaatacgtagttctcatttcaggccatgctggatcacattaagcactcgattgtcagcctgcagattgccaaaaacatggcccacccaataaatggaatctacaacggtccaccggccacggcctccactagttcctcaaccagtggagttgccatgggcagttgtaacaacgtccaggcaggtggccttaaggtgccgctagaaggtcaagtaataggcaagggtgagctggtggacgacgaggaagactcggccactgagaacggtgagtgctcttggccaagcaactggtcatcgagccagggtcaagcggttcgaaatcaatgcgaaagctcaatttgcattacccccgataatctggcattaatcttggcagccaccaccgctcctttgggtttaattgtgccagcgacctcatactcgagcagcgagggcgaggaggacttctacgatgcctacgacgatcccttcaccagcattggcagctccccgattggctggtaagtagaccacttgtgcaggtcttacaagtagcaactaagacatgcccttgaccaagtgcgccgactggccatcaatcagatgcgatgcggcagccggcaagcgtgctatgttatgtgtgatgtgtgctgcgtgctaatattacgcattcattgcccacagtccggaaccccccgcttc

SEQ ID NO: 29468 - DNA, 1079 bp, DROSOPHILA
atggagtttctggacccaaagatccacagcgccgacaagttgtgcgaccaattcgaagagtataaaaagaagcgtgaggaagcgcacttggagctgaagaacaaggtgaacaccatgttcaatttgaaagcggatatcaaggagctcaacgaaaatatggaaacacttcgcattggaatgcaacagctggatgaccagcagaaggttcagctgcatcagggaaagctaatgtctcagtcgatgttcggtaccattgaggctgctcctccagatgaaggacaagtccctttgaaggacgaagataccatacccaacaagctcttgataaagtccgaggtaaaaaaatgtctctttgagggctgccaaaggcgaatagacagccagttgcttttgctgcactacctatgtgatcatgagaacaaggaagcttcctttcagcgctttcttcccgtagtgaaacatgaacgggctgtgctttcttttaagccgacgagctgtaagaatcctgataatcaggtgttgggactcctggcttacaatgcacaacagttattgatatcccagcggcaatgtgagccctataacagcttcccgctgaaccaacactcgcacctggatagtcacatcccgttggtggtgctaatttcccagacattgcccaatacggctctgcggaataggcgttcaccagatagccacagaaacagtgagttcgtcctctggctggttacacccagcgacggactgcagttgaacgttacgctcagtctctatggaagagatgttgcactaagaaccagctgtgttttaggtgttcgaaaggttaataataaccgggacgcggactattacatggcagtcgacgaaagttactggcgtctgacgtacgccgaagtggagaaactctcaaacaactttcgtgacgaactccacctggaggttgtagttactgagtccgagggaaacgtgtaacctctgcttacttacatttgcgttgtcctggagtgccttgcacttagactgctccgccggatcggtcagctccgcgatgcgtttgtccagtaactgggcaggacaga

SEQ ID NO: 29469 - protein, 323 aa, DROSOPHILA
MEFLDPKIHSADKLCDQFEEYKKKREEAHLELKNKVNTMFNLKADIKELNENMETLRIGMQQLDDQQKVQLHQGKLMSQSMFGTIEAAPPDEGQVPLKDEDTIPNKLLIKSEVKKCLFEGCQRRIDSQLLLLHYLCDHENKEASFQRFLPVVKHERAVLSFKPTSCKNPDNQVLGLLAYNAQQLLISQRQCEPYNSFPLNQHSHLDSHIPLVVLISQTLPNTALRNRRSPDSHRNSEFVLWLVTPSDGLQLNVTLSLYGRDVALRTSCVLGVRKVNNNRDADYYMAVDESYWRLTYAEVEKLSNNFRDELHLEVVVTESEGNV

SEQ ID NO: 29470 - DNA, 2771 bp, DROSOPHILA
cttcaggatggcctgggagaaccacgtgttgatccgatctccgcagggcatcacgtctatggaaacgccccaaacggaagttttcacatccttgccaggaccgtccagcttctcgaagtccagctccaggtctggcatgtcctgggcgctgaacacaagcttgctgggcgacaccttcttcgacttgatctgggtcataagcggatacacccgagccgtgatcatttcgttcttttcattgaccaccatcaaggtgcgatcccttattccctcaaaggacatgctcagtacatcgcagtcgtactccactccgggcttcgagatgtccataggggcacaggacttgaccggaaaaaagtgtatcctctccacggtgcccacgcgtcgccacttttggggaaccacatcgcgggtcagatggcggtacagtaggaagctagccccgcccaccgccaccaggcccacgcccacggccgccagggtcttgggactgaggtcaaaggtcgagttatttccgccggctgcaggataatccacgttacttaaggatctcccagctaatcccggtttttcactcacttgccatctcctttgcgctgtaacacttgttgctttctctgagtcaaaagctccactgattaggtttattggacaaaaagctctcctttgatgaagatctcttaccaaggctggacaacacatgcatctatgtatatcagcggtcattttgacagtagcaactgatgataaggaatgtaacctggttcttagtgctatttttcagtgatagggtagacttaatacatttatttttaaattaccatccccgctccctccaggttaatcgataactgttatcgggcatgcagccggcgaattcgtgctcctttgtttacataacaattgcaagaagcctgttgccttttaagcggaaaaagaaaaaaatttaaggttctttgttctatcagacttctatcggcagacttcgggaatcagtgtcatggaatcgagggaccggaaaacttcgaatgaggacgactcgtcggaaatctccgaattggatgtgggcagtgataggtttaatcctctgcgagcgttatacgaacccaattttagggtgaccgatgctgttccaaaggtcatctaccagaatctggctgccttcgagagtgcacttaaaaaattcggcatctggcagctgaacaagcgccaaaagccgggatccgcagaaggaggagatcaggggacatcgaaaaaggcttccacttccgaggctgtagatattctacctcctgagcgacgttttgagccgcaccagatgcctaccactagtagcagaaagaagcatcatcgaaatattttcacctacatggaggcagctgtcggtccattggaactcctaacgaagtgtatatcccctgctagccacaatgaatccaacgaaaggagaagagttcgggtggtgattcgcaaacacggatcggtgggcggcagtgtcgagggtgaactgttggcctttgacaagcagtggaacctcctactgaggaatgttaccgaaacctggaagcgacgaaagtacaattacggagagcaaaacatatgcgacacacctgttgattgcacaggccgcctcaaggagttgggtatcactcttcccaggactgtagtcaaaaatctaaaccgaaaaaacgtggagattcggcgagagctcccacagattttaatacgcggcgagaatgtggttctagttagtttaataccaacaaaatagtgtatagcttattaaaagtcacctcagataaaaatcgcgtagggttctacttaaaaaactacagcagtctctattaaagtagctaagaatatatgtaaattattgatatatataattaagttacgctacaatgtatacaaattaagttatatgatatatttccatttaaggtttgaaatcgttttacttttaaagaaatttaaactactattttatatttttcgaaacgtacttaactaacgaatctgttcaattcctctggatcatcgtcctcatatgattccatttcttcgctttggaggtgaaccagtttatgaagcttcagcaactccagcgtcttgaatctccgccagcaaaagtcgcaggagacctgccgcgcactgttaccgtcgtgaattttccggatgtgactcttcaaggtgctattctctcgaaattgccggctgcagtgcggacaacatagtttcggttggtcgtgagttcgccgatgaacggccagggcggagctggtcttcgagctgtgcccgcacagctcgcagatatagttcctttgccccgcgtgcatggcctggtgctgttggaagtcccacttggaaggtgcattgtaatcgcatctgctgcattgccactccggccgcttaaagtggtaccgtgcctggtgttgttctagcttggaggcgagtggaaagctctggtggcacacatgacaaacattcggattgggtcccccatggacgcggaatttgtgcagccgtagcaggcgctcgttaagaaaccgtcggtcgcactcctcgcaaatggtcactgatatgtggttcgtgggcatgaatttcagcaaactgtggtagtactttggatagcgacagcggaagtcggagctgctcaactgcattacatactgtcgctcaaaccagacttgcaggaaacgggcactggcattgaccacctttgggtccaactggaagtgaaatcgatggaacagggcctctgccactttttg

SEQ ID NO: 29471 - DNA, 771 bp, DROSOPHILA
atggaatcgagggaccggaaaacttcgaatgaggacgactcgtcggaaatctccgaattggatgtgggcagtgataggtttaatcctctgcgagcgttatacgaacccaattttagggtgaccgatgctgttccaaaggtcatctaccagaatctggctgccttcgagagtgcacttaaaaaattcggcatctggcagctgaacaagcgccaaaagccgggatccgcagaaggaggagatcaggggacatcgaaaaaggcttccacttccgaggctgtagatattctacctcctgagcgacgttttgagccgcaccagatgcctaccactagtagcagaaagaagcatcatcgaaatattttcacctacatggaggcagctgtcggtccattggaactcctaacgaagtgtatatcccctgctagccacaatgaatccaacgaaaggagaagagttcgggtggtgattcgcaaacacggatcggtgggcggcagtgtcgagggtgaactgttggcctttgacaagcagtggaacctcctactgaggaatgttaccgaaacctggaagcgacgaaagtacaattacggagagcaaaacatatgcgacacacctgttgattgcacaggccgcctcaaggagttgggtatcactcttcccaggactgtagtcaaaaatctaaaccgaaaaaacgtggagattcggcgagagctcccacagattttaatacgcggcgagaatgtggttctagttagtttaataccaacaaaatag

SEQ ID NO: 29472 - protein, 256 aa, DROSOPHILA
MESRDRKTSNEDDSSEISELDVGSDRFNPLRALYEPNFRVTDAVPKVIYQNLAAFESALKKFGIWQLNKRQKPGSAEGGDQGTSKKASTSEAVDILPPERRFEPHQMPTTSSRKKHHRNIFTYMEAAVGPLELLTKCISPASHNESNERRRVRVVIRKHGSVGGSVEGELLAFDKQWNLLLRNVTETWKRRKYNYGEQNICDTPVDCTGRLKELGITLPRTVVKNLNRKNVEIRRELPQILIRGENVVLVSLIPTK

SEQ ID NO: 29473 - DNA, 3920 bp, DROSOPHILA
caaaaaactatacccttacattttggttagtttttagttcaatttaaacaagatacttaagctgcaaaatatcattttctacacgattttacccaaaacagaactatataaataaagaaatatataatgcaaaattccgtcatttatcactggttttacgttattacttcgtttgttactagcttgtctgtcatgtaggtgacataaaaaataacttttctacggattgtagggtttgtaaaaaaaaactcgaaacgtacatacgcttgtagactgggaaaccgacccaatataacggccctgatgggcacaaaaatttgatatagccatgatgacggagctaaaaacccaaaatgggagctcactccgatacaatattatcgtatacgtataatcgtatcactgaaataaacaaatgcatcattagcgataatatcgttatctccaagtatagacaagactgaggtatatctgaaaagttagttatgacggttgccatctgaaaatatttaccgctctgcaggatcagcaatatgtatgtacatatatggtgtatttataaagcatgttcgcttgaatggagtcttcctgtcggctcatctttgagtgccaccgctatctgaagcactatagatccgcggcgatcataatggtattgtaatgataactccgctgttaatggcctccgatgaccttatcttatcgcccggaattagctgccgtttgacacaaggtgttaatttagtgtaacagtcaccagctgttcgggtcgggtaatggcaaccacatgcgagatctatcgttgggttctaccggcgtatgaatatatcgctcccgctgctccgacgactgtcatttggctatgcgtcacctcgcctcgcagccgtgacgtccacacagttccacagtcccaccgttcgccatgtagtcccgtagtacccagaaacatacccaaagttggcgattccacggcgactcggtgacagttgcgcgcccacagtcaagcccagcggtacagcactcaattttggcgaggaggcggcacttatcaagtatactatatctattatatacattcatatatgcatatatgcatataggccagctcgtattaaattaaagacaattggtgagtagaggtcgcgacaaagcgaagatagacccgaacgtttgcttttgatcccggtgcaagacaacctgatatttgggtttacgggcacttggtgagcactgattagtgatccctaccgataacgggtatcttttgttgcccagcgggcggtgtgtttttgatttcggatagggcgtgagcgcccatactaattaccatgtaatttatacggcagtaaaaaatacggactattgtgttcttatcctagtttgcttgtttgtttcaacacttatggcttagattagccgagtattacacaaatattttgattgtgcttaaacagttaatacattaattagacaggccaagcagtcgatattgttattttgccttattattattgacttagcatcgctattaatgctcatggcatgtacttatggttttaagactgtgacacactgcaaattccacagagatttagatctctacttaagtagcagctattttaatctaatcgaaaacatagccaagactatgtcgaacttcagtgacgaagaaatggtggccatatggcatggctactatctaatcatcgctcaagagacaccagttactgtcataactaggcggaaatcggggccaaaagcaaccggttgactaatcgcacctggaaaaatttcaataaatcaaacctatgctttgcatcgaacaggtggtgataaggcaaacccagcgaaaagtagcaatgtcggaggcctattcgaattccatacgcagcctgagtccagagctggccaaaaaggcgcacgacgagctgggagagatacccgacagaatcgatgaggatatcgaaacgttgcgcacttggatctccaagcaacctcatctcaaggctcgccaggatgcccagttcctggtcgccttcctgcgtggctgcaaatacagcttggagaaaaccaaactcaagttggacaacttctatgcgatgaggggagccgtgcccgagctctacaagaatcgcattgtgggtgagaagcagctcagcattctggacacagggtgagatctacttgaggttgtaaaaagaatgtttcctcataatttattcaaattgcagttgcctcctccgattgccgcagccactgcaggctgatggtcctcgcatccacatctcccgctacggtcaatacgactcgaagaagtactccattgccgaggttgtccaggtaaacacgatgctcggcgagattcagataagggaagacgacaatgctatgatatccggctttgtggagatcatcgacatgaagggcgttggggcaggtcacctattccagttcgacgcggtgctggtcaagaaactggccgttttgggcgacaaagcgtatccctacaggcccaagggttttcactttgtaaatgcgccctccagtgcagagaagttcatgtccattgccaagagcctgatgagcgaaaagattcggaaacgggtgagtttatcaaacatgtcacaaaagtgtaaccactatggaacattttctacccgtctagtttcatatacactccaaactggacagtctctacaagtatgtgcccaaggaatgcttgccagctgagtatgggggcagcaatggaaccatccaggacgtcgtcagtacatggaggaccaagctcctggcctacaagccattctttgaggaggaggcttcttatggcacgaatgaaaagctacggcgaggacagcccgttagcgccgaatcactttttggaatcgaaggatccttcagaaaactagacatcgactagtctagtgcgtaacatataaaacgtagtgatttttaatctttgtacgaacacaaacaaatcaaaactaaacaacataaaactatacgaatttggttaaatagtaagtggtaagtacttgagtccttacaactttgccgccgtcgattgcttagattttcggtcaataaaagtcagtccctcgtcatggtagggatttgcggatacccttacgcgttccaaccatttgaccacctttgggaactttttctcgtccactctgtattggcagagcccttaaatacaataaaaataattagtttcgttaagttatctccacactagtttaacacactcagctggttgatttcggaagagccaaggatatcagccattgtcaggtttttcccaaccaaaaaatcattttccagccacaggcgctccagtaaacccagattgttttccactccctcaatcagtgcttgaatctgctctggcttgggcttgggcgctatcccgttcatgggaaacagccaggcatctcgaaagtacatggaacatgcaagacgaatgttcaggtgttgccactcaaggaactcatccactcgggcacggttctccagcgtctttgggtagagcttctcatcgaactgacctttgtctgcgagatatctgcaagggggcaatgtacgatccaaatgtgagattgctttccaatgatggccttcccataccttataatcgctatggtctcagacaaatggaagtccccacccacaatggcgggcaccttctggaatcgattgatcttcttgtactcgtcggtcaattgctcaactaataaaacataaatgagtcggggcagtttagatgattactttgactcacattttcgcagggcaatcgggcaatactcaacgggtgagttgctgaattttaaaccaatccatagaccacgggcgatcggggacaacaaatcgtaatagaatctaattggcttggacatggtggtcaattgctcccg

SEQ ID NO: 29474 - DNA, 1104 bp, DROSOPHILA
tcaagcccagcggtacagcactcaattttggcgaggaggcggcacttatcaagtatactatatctattatatacattcatatatgcatatatgcatataggccagctcgtattaaattaaagacaattggtggtgataaggcaaacccagcgaaaagtagcaatgtcggaggcctattcgaattccatacgcagcctgagtccagagctggccaaaaaggcgcacgacgagctgggagagatacccgacagaatcgatgaggatatcgaaacgttgcgcacttggatctccaagcaacctcatctcaaggctcgccaggatgcccagttcctggtcgccttcctgcgtggctgcaaatacagcttggagaaaaccaaactcaagttggacaacttctatgcgatgaggggagccgtgcccgagctctacaagaatcgcattgtgggtgagaagcagctcagcattctggacacaggttgcctcctccgattgccgcagccactgcaggctgatggtcctcgcatccacatctcccgctacggtcaatacgactcgaagaagtactccattgccgaggttgtccaggtaaacacgatgctcggcgagattcagataagggaagacgacaatgctatgatatccggctttgtggagatcatcgacatgaagggcgttggggcaggtcacctattccagttcgacgcggtgctggtcaagaaactggccgttttgggcgacaaagcgtatccctacaggcccaagggttttcactttgtaaatgcgccctccagtgcagagaagttcatgtccattgccaagagcctgatgagcgaaaagattcggaaacggtttcatatacactccaaactggacagtctctacaagtatgtgcccaaggaatgcttgccagctgagtatgggggcagcaatggaaccatccaggacgtcgtcagtacatggaggaccaagctcctggcctacaagccattctttgaggaggaggcttcttatggcacgaatgaaaagctacggcgaggacagcccgttagcgccgaatcactttttggaatcgaaggatccttcagaaaactagacatcgactag

SEQ ID NO: 29475 - protein, 313 aa, DROSOPHILA
MSEAYSNSIRSLSPELAKKAHDELGEIPDRIDEDIETLRTWISKQPHLKARQDAQFLVAFLRGCKYSLEKTKLKLDNFYAMRGAVPELYKNRIVGEKQLSILDTGCLLRLPQPLQADGPRIHISRYGQYDSKKYSIAEVVQVNTMLGEIQIREDDNAMISGFVEIIDMKGVGAGHLFQFDAVLVKKLAVLGDKAYPYRPKGFHFVNAPSSAEKFMSIAKSLMSEKIRKRFHIHSKLDSLYKYVPKECLPAEYGGSNGTIQDVVSTWRTKLLAYKPFFEEEASYGTNEKLRRGQPVSAESLFGIEGSFRKLDID

SEQ ID NO: 29476 - DNA, 2633 bp, DROSOPHILA
tatgttgtttacaagaacacctttccccatagggacccatcaacgggcaccaagtggatcatataactcacaactacttcagccggacgcgtagcaatctgctgaaaactcccctgagcttccagcatgacgtcacgttcgcacagcctccagttgccaaatacgtaaaactacgacgtggcagcagcggcgttttaatggagggcaccagtaggtaagtgaaattgaccaaatgatcaaggggcagggggcaatgaacaggggtaaagttggtatcacgtttcactttcgcaattgtttacgcgctaacagttttagagtcactgcatccgcagaagtcagctgtgcattccgtttggcaggtgaaatttctgtacacgtttgtacgtagcgcggggcgggggttgcacttaattcgaacactcgcaggtgtgcttaattaccttgtcaattggtcgctgattgggtttggttaaatgcactttttacggtcgggcagtttcggcagagcagaggtttgtgatttgaaacaacaaaaacgtcttcgctagaatcccaaacgcctggcagctggggatggcagaagcatcggtatatcgatgttttcacaactattatcgatctctacaataatcgttgaatttaaatataaatcgaatttatagaacttgggattaaaagattaattataaatcattttcggatcataaatataagtactactctataaaacattttttaaatttatacatggctttactctcgcctggaattttgtgaggaataccatgctaccaaatggttaatactatattaaaataaatctttttcatttcttagcaacttctccctagattttgatgattttgtaactcactcgttgaaaacagccggctctcacgctataagtggatattggaaactgcctgaggcctttatttcgggaaatctaaacgatatttacataaataatttaaaccttgctaatgatgtcgttagaatgcctcttcaaaatgacagtatcaatcttcccttgatagtcgaagcattgaaaactgtccagggcggcactataaatcgtctccatacaacccctgaaagccaggtggcggatgtgcctgtggccaagtggatccatggagcagcctacctttacgggaaccacagtatttctggcattactcatctgaataatgtcaatctctacaacgatcttaccgtgaacgggtctgtaaatggtgtcccctggcaggcggacaagctcattttgatggacaatgagcaggatataccgggctccctgctggtggcgaatagtcttcccgaacagaagcgagttatgagcaataatgtgaagaatctctgggtggatttcgtcaacgatctgcccgttaacgagttactggtcagcaaggcagaaaaccgtcccaatcttcacgtggaaagccaactgatcttcacccagcccctcactgtgggtcactacgaagcgggcaacggaaatgggctgctggataaatattacaagaaaaagcggggtgtcgaatcgaatgacattcatgattggcagcagctgcaggaaaatgtggcagctattaaaaacagattggccagtatgttaaaaacacattaatacaaattctcctttagtcatgtgcattaaattcaaccaacagagccgcctaaagtgctggaaggctttgctgtgctgcagaaattacctcataaggcctcgcacatgaagatcatctccgtggacaacgaggacgtactggccatctgggagcagatgcccagcgaagtagggactacttacacatggcaaccggatatacatctttttgggcgaagttcaagtaagttatgtagatttatttgcatataaacgtattttaaaatcaagtagcatattcaaccttaaatagggacaaattcgaaatctcaaatattagaaatacattttaaatttagctttaaaattcatgcgtaaatgctatgaacactcataccagaactgtgagtaaatacattttacaagtgggcggcacagaacgcagacgtttgaacacggaaaaaataatacgataaatacgagaaatggttcagacaggcctactacataactacctttttagtttgtctaataagtaagctgagtaatcatttaaattgcgagtatcagtcggtctactgctccagttcgtcgctctgcacatcgaggatggcgcgcaagatggacagctccagcttggcggaggcacgcgaagagagtctgttcatcacattggccacgtacagcccgagagactcgtgtcgcgacgagttgcatagattcttgaaaaaggttggcggcagcgagttgtcaaagttgcccaggttgataatctcgggtgtattggaggaggcggcgttgatcttcggcccgaagataatgtcattcttaaagtccagctcgtcgatgtgtggcgaaaagccgtttgtggaagccaccgaggtggaagcaatggtggcggctgtcgatgagttcgctcccccaccaccaccgtttatctgttgtgccgatggaatggtgatgatgttgatacccggcggtggtgtctggttgtcctcacgctccttcttaacctgcatca

SEQ ID NO: 29477 - DNA, 633 bp, DROSOPHILA
atgcctcttcaaaatgacagtatcaatcttcccttgatagtcgaagcattgaaaactgtccagggcggcactataaatcgtctccatacaacccctgaaagccaggtggcggatgtgcctgtggccaagtggatccatggagcagcctacctttacgggaaccacagtatttctggcattactcatctgaataatgtcaatctctacaacgatcttaccgtgaacgggtctgtaaatggtgtcccctggcaggcggacaagctcattttgatggacaatgagcaggatataccgggctccctgctggtggcgaatagtcttcccgaacagaagcgagttatgagcaataatgtgaagaatctctgggtggatttcgtcaacgatctgcccgttaacgagttactggtcagcaaggcagaaaaccgtcccaatcttcacgtggaaagccaactgatcttcacccagcccctcactgtgggtcactacgaagcgggcaacggaaatgggctgctggataaatattacaagaaaaagcggggtgtcgaatcgaatgacattcatgattggcagcagctgcaggaaaatgtggcagctattaaaaacagattggccagtatgttaaaaacacattaa

SEQ ID NO: 29478 - protein, 210 aa, DROSOPHILA
MPLQNDSINLPLIVEALKTVQGGTINRLHTTPESQVADVPVAKWIHGAAYLYGNHSISGITHLNNVNLYNDLTVNGSVNGVPWQADKLILMDNEQDIPGSLLVANSLPEQKRVMSNNVKNLWVDFVNDLPVNELLVSKAENRPNLHVESQLIFTQPLTVGHYEAGNGNGLLDKYYKKKRGVESNDIHDWQQLQENVAAIKNRLASMLKTH

SEQ ID NO: 29479 - DNA, 3206 bp, DROSOPHILA
aatccttgtggtgcttgagaatgcggcgaaggccctcttgagctgcctcagccggaggttttcccgcccgcatggtctccaccgctagcagggagggcaggaagcgcatcatcacatctccatctccggttgccacggctgcacccacctcgttgtctgcataagcgccagcacccggaatgggggagtcgccgacccgtccgggaatcttgtgccgcgccccgttggtggaggtgccggcgtggatgttgctttccacgtcgatggcgatcatgccgatggtatcgtggttcttgcgtccgatctcatactcattgcgggcacggtcctccttccagcgggtcagcggagtcggccgcggcttatacgggccgcaagagaccttgggatccgggtgaacgttcttccagaagtttggctggcagttctcagccgtccactgtaaccacatgtccttcgactccggcgtgaccagcgactctgattcgaatcccatagcattggcgaaagctgacgccgcatcacccaccagcatggtgtgctgcgtgtgttccagaacatgccgggctaccttaatggcatccttaatgcgtcgcagaccagccactgcccccacatccatggtggccccgtccatgaccatggcatccagtgtggtttcgcccaactcgtccggcgatccgccatagcccaccgttcggtcacactggagtttctcacacttcgagcagccctccactaccgcattccgcgtctgccggagtccacccttgctttgcttcaggattcgccaggcgagcacattggcagccgtgaagttccaagtgttaatgaccatgggcagcagctcacccgtcgtcttattcgccttcacggcagtggtgccagcttttccactgcaaaggggcggatcttagcgaacaaagaatacgctgtatgcgctgctcacctaaacgccgaagtcagcgttggtttgggcgaagtatttactgccgcaaggatggaaaacgccatggtggccaaacaaaggatccaaagacttgcccgcaagtgccttctcatggttaatcgtaatggtctctacgagaagtcttggtgtatcacaatctgtccctgttctgccggaaaatggtcgagttctgcttttaaatgctagcagtctaacctcactgttttgctttcttatctgttgttttgatataccctctaaaagagtcgtacacattttcaaattggtttaagcaatattttaaaacttgaaaatgtttcaacatagattaagatataggcaaaaaaccacctattaatatcgataaagtcctatccgtatagcctatatttggagtggaattataggaagagtattccacggacacatctataaaacactgctttcctttttgtaggcacagcactgacacaactaaacaagacaaacttgaatccaatcaatgaggaggcacagaacccgcagaaactgcaattcagatcatatggatttcagtgccgggcacttcaagaggagaaccagatagtaatccgatgcctagatgagcagaacaacagcagggaagcaatcttgcccaggcgggccgtaaaacagttgttgccggtcgctgattcagatgatatgaccattctacttcgtactcccagagcggtggagctttggaagtggagtaatggcaattactctctatcaagcaggctgatagatgggcaggtggagcaaatggctcttagtcaaggaggtgctggcatagagagcggatatgtggcgctgatggcttcatcgccagcagcagagattcggatttacaggtagatattcataagcacttcacgcatagggcatttacaaggatttcactcgttttgcagcttcggcagcccagacacgagcagcttccaactggaccaagtcctggagctcgaggactcccaacagtcgcgggtaatgcgctttatgcacctgcccgagtccgacgatctactgctctgtgtgtccaacgtactgccgcagcaaccgcttcgcatctaccagcaccgcggagcagcgggattccagcaaatcctcggcgacagcgccttgccaaaggctcatgccctggaggtgctctatctgcccagccataagctgcgactgctgtccatggccacggaggagtcggtctacttgctgcagccacagtttactacactttaagtcacttgttttgtttgttttttctaaataaaaattactttttattaaccgtgttttcttggccgtcaattacgttgcttagtcgtcgctggactcgacattctcggtctgcaagttcttgaacgtggacaccggcacataggtcacgtaagtgtacagcttgttgggggagtcctcatcgtcgttgcggcgacgcgccaggcgcacgcgaatgcggaatggagtggacctggaagggtggatggattagcggcggattagaaaggatgctaaatcggaggaaattaaggactacgcacctgatacccttggaccagatgtgcttgttcagacgggtgtcgatcctcacatcggtggtgcccatctcccgctcggcgaacttgcggatctccttgatggcgcggggtgcgcgcttcttgaagccgatgttgtggacacgcttggccaagtgaatggtgcactcgcgcgtcacgacttcgttgatcgcggatttgttgattttctcacccttggtcttggtcattgtgctgtttagcccgaaacggtgctactcaatatcctgcaagtgcgtaacaacaaattttagttaatgccacacaacataaacaaaacttcagtggaatattccatttgcaaagaaattgttgcacagcgaaaatgaacatacgccgtgatcggtttttcgactgggaacattgtccacacagttttgttgcatttacttcgtggaaatatgcgatgttttccgattaatatacaaaatcgcaaattacgaacctcttccggaaacgcagcgaaaagaaaaggatagaagaagagatgctagaggtgagcagaaaacagtgtggctgcattgtgcgaccggcatcgtgaatatcgttatgcctgaaaaagtaaatttagggtattccgcaaagcgcaatattaggggaattacaaattgaatttctaaatccatggtttgtttgaataataataaaaaataaaaacttaactctaa

SEQ ID NO: 29480 - DNA, 837 bp, DROSOPHILA
atggaaaacgccatggtggccaaacaaaggatccaaagacttgcccgcaagtgccttctcatggttaatcgtaatggtctctacgagaagtcttggtgcacagcactgacacaactaaacaagacaaacttgaatccaatcaatgaggaggcacagaacccgcagaaactgcaattcagatcatatggatttcagtgccgggcacttcaagaggagaaccagatagtaatccgatgcctagatgagcagaacaacagcagggaagcaatcttgcccaggcgggccgtaaaacagttgttgccggtcgctgattcagatgatatgaccattctacttcgtactcccagagcggtggagctttggaagtggagtaatggcaattactctctatcaagcaggctgatagatgggcaggtggagcaaatggctcttagtcaaggaggtgctggcatagagagcggatatgtggcgctgatggcttcatcgccagcagcagagattcggatttacagcttcggcagcccagacacgagcagcttccaactggaccaagtcctggagctcgaggactcccaacagtcgcgggtaatgcgctttatgcacctgcccgagtccgacgatctactgctctgtgtgtccaacgtactgccgcagcaaccgcttcgcatctaccagcaccgcggagcagcgggattccagcaaatcctcggcgacagcgccttgccaaaggctcatgccctggaggtgctctatctgcccagccataagctgcgactgctgtccatggccacggaggagtcggtctacttgctgcagccacagtttactacactttaa

SEQ ID NO: 29481 - protein, 278 aa, DROSOPHILA
MENAMVAKQRIQRLARKCLLMVNRNGLYEKSWCTALTQLNKTNLNPINEEAQNPQKLQFRSYGFQCRALQEENQIVIRCLDEQNNSREAILPRRAVKQLLPVADSDDMTILLRTPRAVELWKWSNGNYSLSSRLIDGQVEQMALSQGGAGIESGYVALMASSPAAEIRIYSFGSPDTSSFQLDQVLELEDSQQSRVMRFMHLPESDDLLLCVSNVLPQQPLRIYQHRGAAGFQQILGDSALPKAHALEVLYLPSHKLRLLSMATEESVYLLQPQFTTL

SEQ ID NO: 29482 - DNA, 2541 bp, DROSOPHILA
gatcctcacatcggtggtgcccatctcccgctcggcgaacttgcggatctccttgatggcgcggggtgcgcgcttcttgaagccgatgttgtggacacgcttggccaagtgaatggtgcactcgcgcgtcacgacttcgttgatcgcggatttgttgattttctcacccttggtcttggtcattgtgctgtttagcccgaaacggtgctactcaatatcctgcaagtgcgtaacaacaaattttagttaatgccacacaacataaacaaaacttcagtggaatattccatttgcaaagaaattgttgcacagcgaaaatgaacatacgccgtgatcggtttttcgactgggaacattgtccacacagttttgttgcatttacttcgtggaaatatgcgatgttttccgattaatatacaaaatcgcaaattacgaacctcttccggaaacgcagcgaaaagaaaaggatagaagaagagatgctagaggtgagcagaaaacagtgtggctgcattgtgcgaccggcatcgtgaatatcgttatgcctgaaaaagtaaatttagggtattccgcaaagcgcaatattaggggaattacaaattgaatttctaaatccatggtttgtttgaataataataaaaaataaaaacttaactctaaacaaaaaatcaaattagtttttcaaatgtactttaaaagaaagaaaccaaatactttataaaaactattttaattaaaatttactaaacagtgctaaatttaaatccagtattggagattaagtttaatgttttcgaatgaaaattaataaaaatcttaataaaatggttgcacatatttcgattcatagttttttattattattattattattcatagtaaaattattattgcattgttgtgtggctattaatggaatgccccaaattgttgctccaaaatgtagtttccaagttgatgaagtacaacgaaacagctgatcggatgtaaacaaaatagaatgctggatatcgctggtaagtaagtgagccaaaatattatcgagcttggcattcaaaactcatttccagcacaactccttgccgtgggcctcttgtggggcgttaccaatccgtttattcgcctcggcagccagggaatcgagtcggttggtgatacgggctcaaagtggcgtaactttgtccaggaggcacgcacaatcggctcccggtggcgctattggatacccttcggtctcaaccagtgcgggagtgctctgtacgtttggacgctccagagggccagtattacagtggcggtgccagtggccaattccctgagcttcgcatttacggcaatcaccggatatgcgctgggggaaaaactgccgggaagaagtaagctaaatgtctaagtaacaaccttgtccactttgtttaccaactgctcccgcagaagtcattctgggcaccctgctcgtctgctgtggcagtatcctgatgatatacgataagattttgcaggaacaggcccagcaccagctaaatataacattccactgaggttaccctaaacccaaggccaattgtctttattgcattcgataaaagcatcataaaattaaaggttagtgaaaggcacaccttacagagccttgtgcaccgcctccaccagcacttccatgctcgtgatcggagtctgaggcgtgattccatgtcccagattggcgatgtagcgcgacttgccgaacttgtgcaccatttctgtggtcaggttgcgcagctcatcaggatcgcggtacatgtcctgaggatccaagttgccttgcaacgtaatgttcggtccgaccaaattgcgtgcctccagcggatccacagtccaatccaagccaataacgtcgtagcccagttcgctctgctccttcagcgagtgcccagcacccttagcgaacagcgtctacatggaaattccatttagtaagcatcttatcaatgttttagtccatgggaacttaccatgggaaccacggggatggccttctttgtgagacggtccaccagctcgtcgcgtattctcttcaggtagggtacacaccactgcaggaactgctccttggagagatgctcggcggacgattcgaatacctgcagcatttgagcgccagctttcacctgcatctccaggtagtccacaattgcgtcggtcagcaggttcaggaacagcttagagtcctcaggatgttcgttgagccaagctttagctttcgacatggtcttgctcccaccgccctcgatcatatatcccattagtgtccacggcgctcctgtaaagccgattagcggcactcgaccttcgagcttgtgccgcatcatggtgattgcgtcgcccacgtagctgaggcgggacaaggctccgtccggcgtcaggcgcttgaggtcctccggcaccacgatgggctgtggcagaacgggaccaacgcccgcgtgcatctccacggtgaggccgagtgcttgcggaatgacaaggatgtccgaaaatattatggaggcgtccaggtcgaag

SEQ ID NO: 29483 - DNA, 429 bp, DROSOPHILA
atgctggatatcgctgcacaactccttgccgtgggcctcttgtggggcgttaccaatccgtttattcgcctcggcagccagggaatcgagtcggttggtgatacgggctcaaagtggcgtaactttgtccaggaggcacgcacaatcggctcccggtggcgctattggatacccttcggtctcaaccagtgcgggagtgctctgtacgtttggacgctccagagggccagtattacagtggcggtgccagtggccaattccctgagcttcgcatttacggcaatcaccggatatgcgctgggggaaaaactgccgggaagaaaagtcattctgggcaccctgctcgtctgctgtggcagtatcctgatgatatacgataagattttgcaggaacaggcccagcaccagctaaatataacattccactga

SEQ ID NO: 29484 - protein, 142 aa, DROSOPHILA
MLDIAAQLLAVGLLWGVTNPFIRLGSQGIESVGDTGSKWRNFVQEARTIGSRWRYWIPFGLNQCGSALYVWTLQRASITVAVPVANSLSFAFTAITGYALGEKLPGRKVILGTLLVCCGSILMIYDKILQEQAQHQLNITFH

SEQ ID NO: 29485 - DNA, 3945 bp, DROSOPHILA
cctccgattgccgcagccactgcaggctgatggtcctcgcatccacatctcccgctacggtcaatacgactcgaagaagtactccattgccgaggttgtccaggtaaacacgatgctcggcgagattcagataagggaagacgacaatgctatgatatccggctttgtggagatcatcgacatgaagggcgttggggcaggtcacctattccagttcgacgcggtgctggtcaagaaactggccgttttgggcgacaaagcgtatccctacaggcccaagggttttcactttgtaaatgcgccctccagtgcagagaagttcatgtccattgccaagagcctgatgagcgaaaagattcggaaacgggtgagtttatcaaacatgtcacaaaagtgtaaccactatggaacattttctacccgtctagtttcatatacactccaaactggacagtctctacaagtatgtgcccaaggaatgcttgccagctgagtatgggggcagcaatggaaccatccaggacgtcgtcagtacatggaggaccaagctcctggcctacaagccattctttgaggaggaggcttcttatggcacgaatgaaaagctacggcgaggacagcccgttagcgccgaatcactttttggaatcgaaggatccttcagaaaactagacatcgactagtctagtgcgtaacatataaaacgtagtgatttttaatctttgtacgaacacaaacaaatcaaaactaaacaacataaaactatacgaatttggttaaatagtaagtggtaagtacttgagtccttacaactttgccgccgtcgattgcttagattttcggtcaataaaagtcagtccctcgtcatggtagggatttgcggatacccttacgcgttccaaccatttgaccacctttgggaactttttctcgtccactctgtattggcagagcccttaaatacaataaaaataattagtttcgttaagttatctccacactagtttaacacactcagctggttgatttcggaagagccaaggatatcagccattgtcaggtttttcccaaccaaaaaatcattttccagccacaggcgctccagtaaacccagattgttttccactccctcaatcagtgcttgaatctgctctggcttgggcttgggcgctatcccgttcatgggaaacagccaggcatctcgaaagtacatggaacatgcaagacgaatgttcaggtgttgccactcaaggaactcatccactcgggcacggttctccagcgtctttgggtagagcttctcatcgaactgacctttgtctgcgagatatctgcaagggggcaatgtacgatccaaatgtgagattgctttccaatgatggccttcccataccttataatcgctatggtctcagacaaatggaagtccccacccacaatggcgggcaccttctggaatcgattgatcttcttgtactcgtcggtcaattgctcaactaataaaacataaatgagtcggggcagtttagatgattactttgactcacattttcgcagggcaatcgggcaatactcaacgggtgagttgctgaattttaaaccaatccatagaccacgggcgatcggggacaacaaatcgtaatagaatctaattggcttggacatggtggtcaattgctcccgttcctcagccccaacttccaaacagccggcaaaaacgaatatcttcagctggaaaatgagaaattgagcaaagctccagtcaaaagatcttgagtgtcaccttgcaacactggttttatgctattatagttgtcccgctttaggaggcaaattcaaaagtggctcccaacttcaaagatagttatattatataaagcgaacatatgaaactattattgatccgatatcaccccttttcatagtctctaattattttaacatttaggagttttgcagcgcagaactgaacacaataaacatcagataaggcacaaaaatgttttaaaatcctaataaatgcaatgaacaaagaaatcagtcaaaatcgaaaagaaatcagtttttggccttgactgcctgctgagaggtcttgtagacgaagctgtgggcctcatcgtagtagggattggtagcatcacgaacgcgttccatccacttggccaccttggggaattgcttctcatttacgttgtactggcagagctctaaattacaaatcgttattattagaatttattttagatacagcagtgggctcagtcttactcatctgattaatttctgaagacccgaagatgtctgccacggtaagtttgtcgccgactaagaagtccttttccagccagaggcgttccagtagacccaaattactctccacatccttgattagcttcttgacagactctggcttgggagccggcgccagtccctttgccggaagaagccacacctgacggaagaacagggagcagaccaagcggacattgaaatgctgccactcgaggaactcgtccacccgcgcgcgttcctccaaggttttggggtacagctgttcactgaagactcccttgtccgcgagatatctgaaatgtgtcatttatctatagtattaacctggcaatccgagctctggatacttgaacttaccgcactatggagacactctcgcccaactgaaatttaccatccacgatggccggcaccttttggaaccgatttatactgcgatattcgtcggtcaattgctcctctggaatataaccatcccaaatgttagaagatctttataccttatatacatgtgtaacttgttatttattcttacgttttcgcagggcaaccgggcagtcttcaaatggggtcttgcccaatttcatagcaatccagagggcgcgggatggctgcgataggaaatcgtaataatacttaatagccttcgacatcttggcaattaattaatcagttagcttcaggaagcccggtaaacacgaaaacaaaatatatttgttgtcgctgatgaaatgtcaaaaagctcaaagcaaaaagctttattccggtccaaagttcaaactggtcgcttttcaacactgtacccaaaatgatattgccatcccatcccattctatggggaatccgagaagggcgggcaaatatataagttcaaaataatcaggtggtggtaagaagtcagataaaatataccaatgatcaataaaattaaatgctgtagccttgcttttgtcataaccgaaagcttatcgatttcacttatcggaatctcagttcaaacagcgatatgtcaaccagtcatcaagaaccacaaagcgtttatctcgaccagataaacacattacccttaccccatttatgaagaaggcaaccccaagtaataccatttatgttttagttataccgacatttaaacaaattcgctttaatttattaacgcactcaacatggggtctacagtacattgtcacatttaaatatagtcatttaactatgtatgtattatccataaatatagagatgcatgtatatgtatgtgtaaactagtatcaaaaattagtaaaaacgacacttaaccaactgaaaaattatccaaaatatatatgtatgctcatgtaccgtatttataaaagtatgcgataaaatcaaagccaacaacaacttagcacgcaagtagaagacgttgaagatttcatcatgaaaatgcattatgggatcatggtagaatgaatcgttcgaccggacgttagaatgtgtataagtatgtgcgtggataaggacagcaataaattaaaatcgacaaacttgtgaggtttttgtgccatttgatggcgatccatttgcttcttatttcgttttagtgtgcacttgtcgtctataatattgttcaatttgcttttagtttcgatgttcctcccttatggtttcatttat

SEQ ID NO: 29486 - DNA, 1182 bp, DROSOPHILA
atgtcgaaggctattaagtattattacgatttcctatcgcagccatcccgcgccctctggattgctatgaaattgggcaagaccccatttgaagactgcccggttgccctgcgaaaacaggagcaattgaccgacgaatatcgcagtataaatcggttccaaaaggtgccggccatcgtggatggtaaatttcagttgggcgagagtgtctccatagtgcgatatctcgcggacaagggagtcttcagtgaacagctgtaccccaaaaccttggaggaacgcgcgcgggtggacgagttcctcgagtggcagcatttcaatgtccgcttggtctgctccctgttcttccgtcaggtgtggcttcttccggcaaagggactggcgccggctcccaagccagagtctgtcaagaagctaatcaaggatgtggagaagctctgccagtacaacgtaaatgagaagcaattccccaaggtggccaagtggatggaacgcgttcgtgatgctaccaatccctactacgatgaggcccacagcttcgtctacaagacctctcagcaggcactgaagatattcgtttttgccggctgtttggaagttggggctgaggaacgggagcaattgaccaccatgtccaagccaattagattctattacgatttgttgtccccgatcgcccgtggtctatggattggtttaaaattcagcaactcacccgttgagtattgcccgattgccctgcgaaaatttgagcaattgaccgacgagtacaagaagatcaatcgattccagaaggtgcccgccattgtgggtggggacttccatttgtctgagaccatagcgattataagatatctcgcagacaaaggtcagttcgatgagaagctctacccaaagacgctggagaaccgtgcccgagtggatgagttccttgagtggcaacacctgaacattcgtcttgcatgttccatgtactttcgagatgcctggctgtttcccatgaacgggatagcgcccaagcccaagccagagcagattcaagcactgattgagggagtggaaaacaatctgggtttactggagcgcctgtggctggaaaatgattttttggttgggaaaaacctgacaatggctgatatccttggctcttccgaaatcaaccagctgagtgtgttaaactag

SEQ ID NO: 29487 - protein, 393 aa, DROSOPHILA
MSKAIKYYYDFLSQPSRALWIAMKLGKTPFEDCPVALRKQEQLTDEYRSINRFQKVPAIVDGKFQLGESVSIVRYLADKGVFSEQLYPKTLEERARVDEFLEWQHFNVRLVCSLFFRQVWLLPAKGLAPAPKPESVKKLIKDVEKLCQYNVNEKQFPKVAKWMERVRDATNPYYDEAHSFVYKTSQQALKIFVFAGCLEVGAEEREQLTTMSKPIRFYYDLLSPIARGLWIGLKFSNSPVEYCPIALRKFEQLTDEYKKINRFQKVPAIVGGDFHLSETIAIIRYLADKGQFDEKLYPKTLENRARVDEFLEWQHLNIRLACSMYFRDAWLFPMNGIAPKPKPEQIQALIEGVENNLGLLERLWLENDFLVGKNLTMADILGSSEINQLSVLN

SEQ ID NO: 29488 - DNA, 3471 bp, DROSOPHILA
gtaaacttggaagataagaagttattttaaagaacttaatctcaaagtacctcgtcctgcacgctgaatctcaagtcagcgccagtcaaaataacacatcctttgggaggacaaacataaaatctgacatgtttttatactcgtagttatctaaatagttaagctgcttgtaaaataaattccctgaactggcgtacaaaacaaaataaattcaaatacctaaacattttcgaactattctaaataaaaacacttttgaggtatcgctgagttctaaaatccagcttcagagcaccttacctctttgtccgctggcacttccgctcaggcagacagctaagacgagcaacagaatgaatctcctggccattttcagctaatcccaggcgtggtgtggaggtcagaccttggttaaagactaaaccgactgaccgaccaaggaactgggcgctgcctcggagctatcgctcagtatcagagtaaatctaatcaaaggaaactaatctagacggttcaatcaaatcatcatttatggctggccaagtttaagttgacagaagtcgtagaacagaccgaaaccgatgccaaaacacactcacgtgcctttcttatggctttgattctctgtccattaaccgattgcgtatactacgacctacgtaatcaatctgaagccggggcaatcctgtttgcctcaacttttaaacattgctaacttattgcactcaaatttattgaatcatgccagtagctttgttaaacgatgaagaataaatggtttcactgctactagaaaactttatggttcaaactttacggcaagccctttaatcccacatttgaacccttgaccccggcaattaattgacttcgagtctgcacaattgtatatgtattgtgtaaattgcatacttttgggctaggctgcaaccacaaactaatacaaaatagtagctattaaatttaagtacttggttattttttaattcaacactctttttcacagtatcgtcttagccagtgccacaatcgaacctgtaaacttgatgacctaaaaaagggtttcattagtggattgcactaagtgccatacagattataacccaccgatgtgaagactggtaacgatggtgcaaaaaagggcaccctcaccgtaatgggtcgttgagcacgcaggataatgagaaagacccgcctgcgggtctctcgatcccaagtataccaggcactgctgtaggctgcttctcccaaggaaaggctctagaaatgaaagaggtcaaaggttaatcaagagactcgacctgtcccacctcagttgacatttctgtgcctccgtagcaatagaggaagatggccgaggaaaccgtgaaggtgtacaccacgtaacggatgatgttatagccggaatactatagaaactattggtttgagttagtgtgcttatcacttaaaaggacggctattaccaatagtatatcaatgacgctggtggctatcactaagctggctgatacgaagtgaacaaaagttggagcagccataattccagaaaattccttgactatcttctctatctcattgtggcgatccacgatgtccgccaatcgctgacagcagattttggattccctaagcgagggatctatttagaaagtatacacccgaatttaatgttagccatatgcataatggaccatccacctcttattggcttgagggcatcctggatatcgtatcttaaggcctgcagcaagaaggccatgtagagggtaaagccaaagaagaaaccatctgtaccagcaaaggcgtacacagtgacctggccactccatgtggagtagagatagaaaactggaaaccagggcatgcgatgcgcaaagtcgtggaacctgtggaacatctaatcagaacatctaatcctcactgacatgctacaacatcacacacagcatgcgaaagggcatatcgaatttgaactcctgatgacgacgcacccacatttcccaaagggaacgcagaacgaaggctccagtggtaatgctgcccagggtgaagaccagcataccgcacctggtgaccatgagatagtagctcctttgagccacctttctccgggagtcctccctcttctcctgctccccgatgagcaagcggatgcggtccattagatcagctacttcctggcgacgccaccacatccatcccagcttgaagagcgtggtgaaactgcaggccagaggacaaaaggcgtccatggcatccacgggactggtgcgcaagtgactccagccgaagacgaactccgcctggcagcagtgcgccaggttaacgaaattgaacaccagccacaagaggtgaagccacgattgctctttgccaaatctcaggcccagcaggccaaaggagtatctggtgacgaagaacaaatgcttggccagcggatagttacggctgaggaatcgcggatacatgattttaaccgcttacagaaccctttccttatatagcgccccattcatacctcctaatggtttaataattgttttgcagtccgaacaaacgacacctggtcgtgtttaatgacgggattacttgaaggacataattgagtgggcgacgatctctgacgttcaaaacatgttattatggtaatgagccagcccttataattaaaaaaggttcccttaatccgttgatatcgtttgatatttgtgattgctacaacagttgaagacagctgtcaagctcgtaagtcaaatctgaagatattctaaggtatttctaagatacatttgttacataagaatcctcttcaattgttttaaaatggaaataaatatcaatactttatatatatatatgatcaagtatgcgtactagttttcgttcttaaggttaataagaactattttagttttatgtaccaaatactatctatatatattttattaaattatcttaatgtcaaaatccattagcaaactaatgcgacttgagctatgacagttttataatttgtgtatatatttcggaattttttaaaacatttaacatttttaccatagccgcatatacttgttcttaagagaatcgttgattatataagctcgctgaaggaagaaggaattcgtcaagcattttaaagcacttcttggcctgcgaccagcgaaaccagcatccataaatatgagctccttgtgttgtgggtttcgagcataaatttgtgtttagcctttttgctgtgtgtttggcttgttgtgggaagtttgccggagtgccgatgaactcgcgacgacgaattcgaatttcaaatcagcaggagatgtgggtcaggcgaagggaaacattcttggatttgcatgggattcgccgcacacagatttatgttgatgcatgcaacgtttgctggctttggccctatgaagtgaatcacttttgattaggtcccatattctgtgctcggctcacgtt

SEQ ID NO: 29489 - DNA, 1191 bp, DROSOPHILA
atgtatccgcgattcctcagccgtaactatccgctggccaagcatttgttcttcgtcaccagatactcctttggcctgctgggcctgagatttggcaaagagcaatcgtggcttcacctcttgtggctggtgttcaatttcgttaacctggcgcactgctgccaggcggagttcgtcttcggctggagtcacttgcgcaccagtcccgtggatgccatggacgccttttgtcctctggcctgcagtttcaccacgctcttcaagctgggatggatgtggtggcgtcgccaggaagtagctgatctaatggaccgcatccgcttgctcatcggggagcaggagaagagggaggactcccggagaaaggtggctcaaaggagctactatctcatggtcaccaggtgcggtatgctggtcttcaccctgggcagcattaccactggagccttcgttctgcgttccctttgggaaatgtgggtgcgtcgtcatcaggagttcaaattcgatatgccctttcgcatgctgttccacgactttgcgcatcgcatgccctggtttccagttttctatctctactccacatggagtggccaggtcactgtgtacgcctttgctggtacagatggtttcttctttggctttaccctctacatggccttcttgctgcaggccttaagatacgatatccaggatgccctcaagccaataagagatccctcgcttagggaatccaaaatctgctgtcagcgattggcggacatcgtggatcgccacaatgagatagagaagatagtcaaggaattttctggaattatggctgctccaacttttgttcacttcgtatcagccagcttagtgatagccaccagcgtcattgatatactattgtattccggctataacatcatccgttacgtggtgtacaccttcacggtttcctcggccatcttcctctattgctacggaggcacagaaatgtcaactgagagcctttccttgggagaagcagcctacagcagtgcctggtatacttgggatcgagagacccgcaggcgggtctttctcattatcctgcgtgctcaacgacccattacggtgagggtgcccttttttgcaccatcgttaccagtcttcacatcggtcatcaagtttacaggttcgattgtggcactggctaagacgatactgtga

SEQ ID NO: 29490 - protein, 396 aa, DROSOPHILA
MYPRFLSRNYPLAKHLFFVTRYSFGLLGLRFGKEQSWLHLLWLVFNFVNLAHCCQAEFVFGWSHLRTSPVDAMDAFCPLACSFTTLFKLGWMWWRRQEVADLMDRIRLLIGEQEKREDSRRKVAQRSYYLMVTRCGMLVFTLGSITTGAFVLRSLWEMWVRRHQEFKFDMPFRMLFHDFAHRMPWFPVFYLYSTWSGQVTVYAFAGTDGFFFGFTLYMAFLLQALRYDIQDALKPIRDPSLRESKICCQRLADIVDRHNEIEKIVKEFSGIMAAPTFVHFVSASLVIATSVIDILLYSGYNIIRYVVYTFTVSSAIFLYCYGGTEMSTESLSLGEAAYSSAWYTWDRETRRRVFLIILRAQRPITVRVPFFAPSLPVFTSVIKFTGSIVALAKTIL

SEQ ID NO: 29491 - DNA, 3401 bp, DROSOPHILA
ataaagaggtccttgatggcgcggaaatactatgtccatgcaagggttcgttacttactcgcttaagcttagattagatagagtggtgtgtctgtgctgcactaacaattgactaaagttgtcgaatcatcatactaagtacgagttactctataggttttgatttaataaatttcaagcttcgtttttgttttacttcacgatttcgatttttgtttttttttttctgtcagctcgcaaaacttgctactttcacaggcgagacaagtttaaagtaaacgttatttcatttcgcatttctccttttgtgtatatatataaattgttgttacgtgtgagtaaatctcatttagttttatatacagtcttttacttttgagagtcaagagcaaggttctacaatttccaaaaaaaaaaaaaaagatccacaacaatacgaatattcgcagccgaactcggctttcggttttcttaatgccctgagtgctctatgcaaagaacgtaaatccaaatgtataactaatattcggaataacattggaatttggtagcttcatctttcgcttcactgtttctacattaaaatggcacatgaaacaatagttctcctgcaaacttcacattcacatcattatcgcgaactttcttagcttagcctagatcttctaagaatatccactttattatcatatatgttgtatattgtatatataatacttggtgtcttatcttctccctacgcgacaaactggttgatgcagaggaaagcgttaaatgcaaatcggccagccgtctatatctttatcggtatatagccgattatagatggttagcccttccaattgggttcgtttgctctctgattgttatatatatatatataggatgctgatgctgatgcggattaatgaggctgattgatgatcgatttcgatatttcgatgttggggtcgtcagatttcgaggaatgggggttttcattctttttttttcggtttctttaggagtctagggatagcgtgtctacgtcaaatttaaaacttacttgtcgcttatgctcttgcggcagtttcgggtaatctaagtctagtttcgagtatggcagatggtggtgatggtgggcttgatgcggctgctgctgctgatggtgcgaatgcgagtgcgggtatgccgtgtgatgcgaatgatgcgaggagtggtgcggatgcgaatgcggatgcgtgtgcgagtgggccgcatgatgcagtccatccacatagtccctggcactgctggccagcgtccctccgaacggaccgctcgtgttggccagcgccgccagcggatgcgtctgcaggtgattctgatgctggtgcacatggtactggtactgcggatgcatctgctgctgcaccgacgcctggatgtgcgagtgtcccagcggcggtccctgggatccgccgccgtagtgttgcgttcccgcgaactgctgctgcaggttgtaggccagggcggccgccgaggctcccgttccggttgcggctccctggttctggtagtactgcgaaatggcgggattggaggcgtgcagcgactggtgggccatcagctggcgctgctggaagggggccagtggattgccgtagcccagatcgctctggtacggattcccgtagcccccgtacttgcagccatagcccgccgcggtcgtcgtcgggtaactggacaccagattcgttacggaataggccggacgcagtcgggctgccgctgcggcggcactctgggccgccgtcagctgggtgggcagcacctgctgcacttgcgcctgcggctggaagtacatgttgggctgcgaggagaagctcgtggacatctgcatgaggttatcgttgaggtacggcggcgaggtgtctcccggatgcagggtagggtaactggacaccactcgacccaggcccatgccaactcctccgcctcccagtggcgtggtcaccagctgacccaattgacgggcctgattcgttagattcagtatctgcgagctgcgcgatatcgacttgtgtgcctcgttcaacaaattcacaatgttcgaggagctggtctgctggagcggaggtgccggatagccgtagacatcattgtacatggtggccgagggcaggccggcaatactatagcgccttctccggatgggcgaggtttgctggcacggtccgtagatctgcggatcatacagtccgtatccaccagctgccgtcgaggtcgatgggccgtacagatcgtacccgggcgggccgtaaccattgcccgaaccgtaggacagggggcccggacccagacttcccggcccgtagtactggccaataatgtccggcaatggaggactgcttccgctggcgcccgtgtagttattgtacatctgaaacgggcgatttcaaatggttggttgctgtaactgctgtgactgactgactgactggtagttgggttttggttggttggttggtttttctggtttctggtatctgttatctggtttctgattctgtggtgtcaatattagagagcactctcttttttgggtctgttgttgggtctggtgttatctgttatctgtttcgattttccggcttcgatgcggtatcgctcacacagcttctggcagcttttgctcttgatttcttgatcatgatcgtggcttaacaaacattagctatctatctatatacatacatatataaatttatgtattgagttggttttgcacatatatgtatagtagtagaattggcttacatttaacataacgaatgcgattttagcccgaaacacttacggactattctggccccaaatttgaaacgtgatttatttgcttagttcttgttatcattatttttgttgtttttctacaagttcatcagtttcgtttttattcgacttttttacacttttgcgcttaatttacaatagggttttgtaatagaatgagattggttgattatgagttatgatttttcggtactgtttggtttggtttggttctcttttcgtttttccattggttaactttcgtttggctttatatggttagttatatagttagttctgaggcgctttcaacggctcttgtaggcacccaaaaaaagttcaacaagggcggggggttgggcttaggtgtgagtgtgagtgtttgtttgtgtgtgtgtatgagcggtgtgatactgtgtgtctgcgaaaaagggggtgtggtttcggtttttggggggcggagaggaggcgcaacatgaaatgtgtgtcacttggttgacagccacgaggatgtcgctggtttttgtatctatttatgtgtggatgcctgtatctttgtaactgaacgtgtatgggtggtcctgtaagtgtgtctgtgtctgggtgaa

SEQ ID NO: 29492 - DNA, 1401 bp, DROSOPHILA
atgtacaataactacacgggcgccagcggaagcagtcctccattgccggacattattggccagtactacgggccgggaagtctgggtccgggccccctgtcctacggttcgggcaatggttacggcccgcccgggtacgatctgtacggcccatcgacctcgacggcagctggtggatacggactgtatgatccgcagatctacggaccgtgccagcaaacctcgcccatccggagaaggcgctatagtattgccggcctgccctcggccaccatgtacaatgatgtctacggctatccggcacctccgctccagcagaccagctcctcgaacattgtgaatttgttgaacgaggcacacaagtcgatatcgcgcagctcgcagatactgaatctaacgaatcaggcccgtcaattgggtcagctggtgaccacgccactgggaggcggaggagttggcatgggcctgggtcgagtggtgtccagttaccctaccctgcatccgggagacacctcgccgccgtacctcaacgataacctcatgcagatgtccacgagcttctcctcgcagcccaacatgtacttccagccgcaggcgcaagtgcagcaggtgctgcccacccagctgacggcggcccagagtgccgccgcagcggcagcccgactgcgtccggcctattccgtaacgaatctggtgtccagttacccgacgacgaccgcggcgggctatggctgcaagtacgggggctacgggaatccgtaccagagcgatctgggctacggcaatccactggcccccttccagcagcgccagctgatggcccaccagtcgctgcacgcctccaatcccgccatttcgcagtactaccagaaccagggagccgcaaccggaacgggagcctcggcggccgccctggcctacaacctgcagcagcagttcgcgggaacgcaacactacggcggcggatcccagggaccgccgctgggacactcgcacatccaggcgtcggtgcagcagcagatgcatccgcagtaccagtaccatgtgcaccagcatcagaatcacctgcagacgcatccgctggcggcgctggccaacacgagcggtccgttcggagggacgctggccagcagtgccagggactatgtggatggactgcatcatgcggcccactcgcacacgcatccgcattcgcatccgcaccactcctcgcatcattcgcatcacacggcatacccgcactcgcattcgcaccatcagcagcagcagccgcatcaagcccaccatcaccaccatctgccatactcgaaactagacttagattacccgaaactgccgcaagagcataagcgacaagtaagttttaaatttgacgtagacacgctatccctagactcctaa

SEQ ID NO: 29493 - protein, 466 aa, DROSOPHILA
MYNNYTGASGSSPPLPDIIGQYYGPGSLGPGPLSYGSGNGYGPPGYDLYGPSTSTAAGGYGLYDPQIYGPCQQTSPIRRRRYSIAGLPSATMYNDVYGYPAPPLQQTSSSNIVNLLNEAHKSISRSSQILNLTNQARQLGQLVTTPLGGGGVGMGLGRVVSSYPTLHPGDTSPPYLNDNLMQMSTSFSSQPNMYFQPQAQVQQVLPTQLTAAQSAAAAAARLRPAYSVTNLVSSYPTTTAAGYGCKYGGYGNPYQSDLGYGNPLAPFQQRQLMAHQSLHASNPAISQYYQNQGAATGTGASAAALAYNLQQQFAGTQHYGGGSQGPPLGHSHIQASVQQQMHPQYQYHVHQHQNHLQTHPLAALANTSGPFGGTLASSARDYVDGLHHAAHSHTHPHSHPHHSSHHSHHTAYPHSHSHHQQQQPHQAHHHHHLPYSKLDLDYPKLPQEHKRQVSFKFDVDTLSLDS

SEQ ID NO: 29494 - DNA, 3661 bp, DROSOPHILA
ctgaccaggctctggaaatggtttttcctattttccttcactcccttgttttccctttcccccactttacattttctctgtgcttggttgccttttgttccgtttgcgcttaatattacgcatacgccgtgtgtgtttgtgtgggagtttagctcggggcaaacatgtaattaaagggggtgtacgagaattcggatcagtaataagcagttggttgtttgccgtgtccttggggaggtcgatgggtagaaagttaagctgcaaatgcagcagcaacttcggacttatttcagattgatttccccggggtgaggcattacgtctccgcccaggcccccgccgataaataatggaatgcaacaatggtggggcaaatgcacttttcctggaactgccaatgcattactgctgcatacataaatggggcacgcgaagatgcctccattgtggcgccgaaaagtgtgcaacaaaatcgagattttattgggtggcgaacaaagaaatgactaagctgctgtcgtagtgtgcgtgattgtgtatgaaaggtggtgtgagtgcaagtgtaagtgtatgtgtgaaggtgtaagtgcgcgtggtacttgtatgggtagtgcactgcacttaatgttaatttgaacgacgttcattgatgttgactgcctccactgtcctcattcggcgtcggcacaaagttgcaaattaattaagcgacaacggcaacaagaacaaaacagtacaaaatatgcaaaacatgtagcaaactgaatgaaaagtgtcaggctctgtgggcgtgtgtctgtgtgtccatgtgggaaatgaaaaatcaacagtgtgtggaaaaaagtgtgaaaacactacgaacaactcaagctttagttgacataaaagcgaacattttctaggctctacttttccatgttttaactatattgtaacagttataaagtggtttgtatatataagatgtagtataagtgtagatatatcgagtatataaggcttaaggtctgcgtgtgtgtgtcttgggttaaacaaaaagtggtaaaagttctgatgttgcatcaaatgtatcgaactcaagatgcataaaaagtgtttttcgtgtttcgagagaaaggtcaggcggggagaaaggaagaggggaaagttccccctttctccccagctgcccgtgttacgaaatcattctctagagcattgtttgccgaacgaaagaaaattagagagatagattgacagagacatatagaaaggtcgtctgagagtcagggagcgagagtgggtctcgacctcgtccctcttttccggtgaagattggcaaggggctccaaagcatatgatcgtggcttacctgcttctgggccatggcctgcatctgctggaacatctgacgctcctcctctttgcctgtcaacaaagaatgatatcataagtatgacaatgctttatgcttaatccattcaacgactcacccattcccttggcctgcagcatttccagcagcttcttgatactctcgtcgcgggcaatcagtgtttgcttctgggtctccacccggcactctagatccttgatcgtctcgcgcaggatgctgatctcccgctgcaagtggtcgttctccgcgtagatcgcctccatctgctgctgcatctccaggttgggctgtcgcattcgcaggcgcagctcctcctccagctggcgcaccagcatagcttgtttctggtgggggatatcgtttaagttattaaccaaacatagttatatacattttgtttatgcttcagtggtatattaagttcgtttgctggttcattgaatattcgttaaacactgtgcaacatgacaaattaaccaatcgaagagtaaatacttctggcacacaatcttcgcactcacctggttctccgtgctgagcagcttcaactgatcgttgatcagactgtacttggcgctctcctccttgcgcagtgctcgctccttcttgagctccggcgaccagaaggtcttgatgctgtgcatcgagctgcccagcttctggttagtcagctccagttcccgcttcaggttccccagctcccgctgcaggtcggtgttctgatgctgcaggtcgcccaaataagctcgatccgatgtggggcccatgcccgtattgtatccacccatggcgctggggctctgacgcgctgatctgccatagagctcgtcctctaggtacaggccccgttcgagggatctgtccctggagcggtcgcggggctcccgaatgggtatgaactcgcgatcatggggatccacgagtccaccgcgatccagcgattggtagcgggttcctaagtgggattagttcgaagaatgcttgagtcccagttatgtgtttttacatatgttagggtatcttcacatttaggataaaacgttaatacttcgaggtcaatttgatatttatatcttctgttcattgtatcctgtctttatatcctttcaaatggacctcgaagatataaaccttgatctgtgcctcattagaatgctgtgtcggttattacttggatagtccatggcatgggccatcggtggtctgctggcgctccggctgcgatggtgacccgctccggccggactggttggctcatccatgtcgcggtagtatggactgcccattgctgaaattcacacacacacagaattcatgaggatgaccaaatgaggatgacggaacgggcggaacgggtggtggttcaggtggttgtttcgtgttttcgtttcggccaccagaacaaaaggaacgcaaccaaagaaaagtatacagagtgatttttttctagaggtggcaactagtgcagtggagtctctgcctcatttcctttgcttttttctaatttttcagttgggtttggtttggttttgttgggttaggttaggttagtggcaaggaatgcaggtaactaaaaaggaaatgcaaaaggaaaagtcaacaaacgaaggagaggaaggagtgttggtcgtgttctggctttgctcaccgcccccccccccctcctcctcaccaaccccctctcacccacacaagccgctcgttcgctacccgctaccctgtttgtcctggcgcctcgttcatatttcatatctcagcccaccgtcgagggtcataaactaagttttgcccggcacgaaatcattttgcacgtcagagcacgaaactaaatttgcggttccgccaacgtccttgtccgccactgttcactactcactactactcagtgttccggtattcgactcataaatggtttattcaagcccccccgcaatggcggccaaatgctaattagctggcgtaatcaagtgctgaccccgttcaagtgcaaaacagtttagctaaccataattgtaatccagtttgaggctttgatatcaaacgcacggctccgggcaaagtttcagattcagatacagattcagttcagtttcggttgcagtgttactatagttgatggtgatattttccaaggtgcacctttccgcagtggctttttctagcgtccaacggctcagctgtgggccattttctagtcctgttgtcccggtcggttcaccggttctaatgcaatttcccggcagcggcagctgcttcacggaaaatacccatccaatccccgcgtgg

SEQ ID NO: 29495 - DNA, 873 bp, DROSOPHILA
atgggcagtccatactaccgcgacatggatgagccaaccagtccggccggagcgggtcaccatcgcagccggagcgccagcagaccaccgatggcccatgccatggactatccaagaacccgctaccaatcgctggatcgcggtggactcgtggatccccatgatcgcgagttcatacccattcgggagccccgcgaccgctccagggacagatccctcgaacggggcctgtacctagaggacgagctctatggcagatcagcgcgtcagagccccagcgccatgggtggatacaatacgggcatgggccccacatcggatcgagcttatttgggcgacctgcagcatcagaacaccgacctgcagcgggagctggggaacctgaagcgggaactggagctgactaaccagaagctgggcagctcgatgcacagcatcaagaccttctggtcgccggagctcaagaaggagcgagcactgcgcaaggaggagagcgccaagtacagtctgatcaacgatcagttgaagctgctcagcacggagaaccagaaacaagctatgctggtgcgccagctggaggaggagctgcgcctgcgaatgcgacagcccaacctggagatgcagcagcagatggaggcgatctacgcggagaacgaccacttgcagcgggagatcagcatcctgcgcgagacgatcaaggatctagagtgccgggtggagacccagaagcaaacactgattgcccgcgacgagagtatcaagaagctgctggaaatgctgcaggccaagggaatgggcaaagaggaggagcgtcagatgttccagcagatgcaggccatggcccagaagcagacacacacacgcagaccttaa

SEQ ID NO: 29496 - protein, 290 aa, DROSOPHILA
MGSPYYRDMDEPTSPAGAGHHRSRSASRPPMAHAMDYPRTRYQSLDRGGLVDPHDREFIPIREPRDRSRDRSLERGLYLEDELYGRSARQSPSAMGGYNTGMGPTSDRAYLGDLQHQNTDLQRELGNLKRELELTNQKLGSSMHSIKTFWSPELKKERALRKEESAKYSLINDQLKLLSTENQKQAMLVRQLEEELRLRMRQPNLEMQQQMEAIYAENDHLQREISILRETIKDLECRVETQKQTLIARDESIKKLLEMLQAKGMGKEEERQMFQQMQAMAQKQTHTRRP

SEQ ID NO: 29497 - DNA, 2834 bp, DROSOPHILA
ggctttaagtttgtatatagttaaacatttaattcctacttaagcgaacataaatctcaacaggccattggtcatttttataccattctgtattacgaaagtatttaaagaagaaatgctccattgtcaacgaaaaaacttcttcctctgaacaggaactaaaacttttttatgtgtaatccccaaaataaagcaatcatggtggcgaaatttttcgcggtttttccatcaccgcggtgcgatgtgaacaagcgtagaaggaagtcccggatccatcgaccatcgagccatgggagcaacgtggcaccatggcactatggaaccacccacccacgggatattgccgactctgaataggtgcgaggacaatcgacctccgacgtggcctaaatgcaattcaatagttaactttctggccattgtggcagccggaacaatgcagatttatgcgcttatctatgaggcggttcaacgacattcgtcgggaaggagatagagttatagatatataggtatggaagttgcctagtagtggagttgtggactccacgaaaacataattaaagtgccagtgaaagatggccgccaggcaattaaccgcattgccagccccactacgctctactccggtccttttcatcccatcccgaaagtttggacaacaatggtgctgctgctgaagctttagccagaagccaatggcaatcataaagtcagttggagcacggaaattgcgagctgcggtttaaaaggtggcacgctctcgccataactcagcacccgacacccggcaccactcccgactcctcactactcctcgcttcaaactcccgatcccggacacgtggcggtggctgctgtcttggccgaaaactatgcagcaccagctaaacggaaattgcaaactgcggctccttgtcctcgctgctctagaccatttttatttatttctcattttacaagcaccttgggaggactggtcagtgaaaacgctcgctttgtaattatacatatttaatgcactttgtttaacggatacattttgtggcccgctgctctattggtgcagattcaggtagaaatgttgcttctgcagttggaataccataagctcattctcctaaacaaattctagctcgattttatgggaattcttcagctcatgatcgatgtgttgttgcttctgttccactgctcccaaagaaaccaagtgtccctgggcagagttttggtgatgctgctgttggacttcaagctccacacggtgcggtggcttctggtcaacaggcttgatctcaatttccaagtgctgtggaggcttctgttccacctgcttgatttccagttccacctgatgattttgcgaagaatgttgttgctgctgctgcttaatctccacctccaagtgctgaggtggcttctgctccacgggcttgacgcccaaagaaaccaaatgtccctgaggagagttttgctcgtgctgcggcttcacctcaaactccaatcgctggggtggcttctgctccaccggcttgatctcaaagtccacggtgtgaggaggtctcgactcgacctgagaagaactttgttccatgtactgaggctgcttgggctccacatgattgatttccgcattgacctggttgctcggcagagagttgtggtgctgtggctggaattcaatctccatgttctggtgcttctggcccggtggtcgtacctttgcaaatatgtgagcgtactgatcaagctcactgcctggtttcggcatcaccctgactggcggagccgtcaaaactgtaccgattagtgccaaaattattgctgccttcatcttgattggttcacaacaaactgtgaatcaagctactttaccattcgacttaaatacccaaatcgaagtgcttgaggccccaatattttgcaactaattaggtgtcaataacatcttatcagagcacgtaaaacaggagccgcggggagaaccctgaacacagttaattgcaacagattagataccgacattcagataaatcaggcgagacgagacccatcatcccctttccactctgtctgcagatgatacagatttctaattaaacgcagcgggtggagttaataagactactttaatgcatatggagctaaactcatgtgagcttaatgtcgtagatgcgtaccagatgatcctcaccacaactcgcaagctggagttgttttcccgggcggaactgcagacgtcgaacggtgagatgatgagcttggctaaaagtttacaaaacattaaaactacagcacataaatagaagaaaatacaactaacctcttattcaaatcgcttagtaacttccatgctcctcgaacaaactgatatatttttatcagtccggtttccgtgcccaaagcaagaatgtatgtgtcatctgtaccactaagataagaattggaaaaagccacggctgtgattgactcatttttaagttctaaaactccattcgcctgccagccatttagcgaagactccttgcagtcttcttcctttttccaaaccactacttttccatcccttgagctcgtcacaaagaactgaccatcatgcgaccaatcacacgaccaaatgatgcgtgtatgaactccattggatttgtcagtgctggccaccagttgatagcttactgaggaatcctgcctctcgtagagacaccagcgacgatcccgggacactgatagcagatatcgcgaatcgggggagaaactaagttgggtcactgtcaactggtgtccactcagcttctgtatttgcttccagtttgaagggttcctgaaagaaatat

SEQ ID NO: 29498 - DNA, 834 bp, DROSOPHILA
atgaaggcagcaataattttggcactaatcggtacagttttgacggctccgccagtcagggtgatgccgaaaccaggcagtgagcttgatcagtacgctcacatatttgcaaaggtacgaccaccgggccagaagcaccagaacatggagattgaattccagccacagcaccacaactctctgccgagcaaccaggtcaatgcggaaatcaatcatgtggagcccaagcagcctcagtacatggaacaaagttcttctcaggtcgagtcgagacctcctcacaccgtggactttgagatcaagccggtggagcagaagccaccccagcgattggagtttgaggtgaagccgcagcacgagcaaaactctcctcagggacatttggtttctttgggcgtcaagcccgtggagcagaagccacctcagcacttggaggtggagattaagcagcagcagcaacaacattcttcgcaaaatcatcaggtggaactggaaatcaagcaggtggaacagaagcctccacagcacttggaaattgagatcaagcctgttgaccagaagccaccgcaccgtgtggagcttgaagtccaacagcagcatcaccaaaactctgcccagggacacttggtttctttgggagcagtggaacagaagcaacaacacatcgatcatgagctgaagaattcccataaaatcgagctagaatttgtttaggagaatgagcttatggtattccaactgcagaagcaacatttctacctgaatctgcaccaatagagcagcgggccacaaaatgtatccgttaaacaaagtgcattaaatatgtataattac

SEQ ID NO: 29499 - protein, 237 aa, DROSOPHILA
MKAAIILALIGTVLTAPPVRVMPKPGSELDQYAHIFAKVRPPGQKHQNMEIEFQPQHHNSLPSNQVNAEINHVEPKQPQYMEQSSSQVESRPPHTVDFEIKPVEQKPPQRLEFEVKPQHEQNSPQGHLVSLGVKPVEQKPPQHLEVEIKQQQQQHSSQNHQVELEIKQVEQKPPQHLEIEIKPVDQKPPHRVELEVQQQHHQNSAQGHLVSLGAVEQKQQHIDHELKNSHKIELEFV

SEQ ID NO: 29500 - DNA, 3151 bp, DROSOPHILA
cattttttgtcctattgcaatggcattgcggtatatagtcttgcctacacgtcggtagtctagtctaaaatatagcatagtaacaaatccagatatatatcagatttcgcctgatttgcaaatcgcggtcacttgacaaccctgaaaacacaaatgtctttaaagagactcgtaccatatctggcgtatggtacccgtacccagtccaaataaaaaaaaacttcaaaacccagtaaaaaaaatgcaaatcccaaatgtaccattcgattggaccattatattacagggtatttttataaagaaaattataaatataacataaaatggataaaaaaaactacacttacctttctacgacacgacaaactcgtttattaacttatatattaccgaaaactattgaaatatgacttgtggtctaacggcaactatcaaatgtcaatgatttgaatgaatttaacagcttctccgtgatttgtttacaattcgcaggcaactccacttccgatgcccttaaacgacgaagactgaaacacagactaaaatcgcacaacaacagaaggtgccgaaaagaaccagtctatgcacaactggttccgaagagcagcgcccagattgcaagctagcggcacttggaatagagattggcgcgtgattccggatgccgatttctgatacgcatcgagaagacattttttatggacgtttctaacaatacttattatttttgtatttatttaggttggattttggcaaaacttattttatcttatattcaactttgcatttttacgcaatttgtattattattattattattattattaacatgatgaccagatataacttaaactggttaccttctcattacgatagtaatattataaaaggatgtatatttaatagctgaggagaagcagcatttctatagtatttatatacaaaaataaaaaacgttatgcagttcatgcacgtgtacatccctagtttggaaccaaacaaaatcatatgttgttactagggctgtatagctaaacgttttatttatgggagcagaactattaagtgccagttggaactaagacgtgatctcccctgtcccttcttttgcttaaaactgaatcatattgacaaatgttttcggcccgtttaagtaatgtgacgttctcatgaaatacaacggtgaacattgcaaaaatcgtgttattttcgttaattgttccaatgggtgaactagtgaacggagtcagcatgtgccagccctgatggctgctttgttgaactagttccagttccggagctagtgaaccaatagcaaacggaacaaaacaaaaacatctgtagattataggttaatttgttttataataacaaatgcgggaattattcaattaagatgagcaatctgctgaattttgccctgcggcagggcgtcaactccatcaagcgccttagcctccagagtttcagactggcagctccggccattgtaacaaaaacgccggttacttccacgataaagagattctcctcccaagccgcccccttcgatgtgaacaccagtgtccccaaggacataatacttttcaagtatgaaaacccccgattctaccagatgcttaactttttcggggtgtgtcagtttgttttctggacatatctctcgcacttcgccttcacgacgcttaaggatgctccagtggtggaaaaacccggagaggagctgaagtggttccagcgcataaatctgggcgataataagtacagaaatggcattacagcctgtagctttctgataggtaagagtggtttactacgttctcggcaagccgaaaataaaactcaaccaacattttaggatatggcatactgtttgctgtctggatgtttaccctgcgatcggtgcgttttcttatcttgagaaagggtggtcagagcgtttcctttgtgacctacggtcccttcaaccggaatcgcattatgaccgtgccattaaagtgcgtctccgccgaggaatcacggaacatggccagggtgcagctacccattaaggtgaagggcaagacactgtattacgtcctggatatgcgtggcgagtttcggaatggcgagttattcgattacacggcgggcctcaagcgtcgcatttaaagggcaagttttgttgttttgtagcttattatttgtaaataaagatgtacactaattaaaactaaaatgcggcttagtaaatgggctccggcttctgggtgagcagcagtccaaagcgcttcttgatggtcagcctctggcgggagtacttatcctccggtgaaaaacgtgctggatgagcagatagtgtgggacgaccatcctcggtgcgtttctagaagagcaacaagtggtgacttagttgggtaatatatatatagggttttgataataatataccttcagggtgtaaacgcgatcgccgttttcgttaattgtgtacatcagatacatttttgcagtttttggattgtttttctgtagtcaaagaagcagaaaataaaacacgtgtggcgtgcgttgcaaggtgctaccaggctttaaaaaaaaataagcactaaataatccaacttaagagaatagtcaagcctcgaaccgtggaataaatgttagctagattttcgtagctagatcgcttgttatcgattcacttccatctctaagcatatttgtatagaatatttggcggacttttgtacacaatgtcaaataaagtggacaagctgcacaagcaggctttacgcgaacaacagaagcgtattaagcccggagaatgtatgaaatatgtgcggatggtcatagatgccggatttctgggcattcccgtgggccaggaggcactgcagcaattgaatgcgacgggtttgaagtatgaaataaggagcttgcccgtgagccactgcatcctgtgggaacgcaatgttggccagcagacgattgctctgggcagcagtcccaccggcctagatgaagcctggaaatcggaaaaccaagtggtccagtggctatccgaaagcagcttccaacgggctgtaaaggatcaaagtctagtttgcctgggaccgcgcttgcaggactcatttccggactgccagtacaccattgccctgccaacgctccg

SEQ ID NO: 29501 - DNA, 1092 bp, DROSOPHILA
aaaatcatatgttgttactagggctgtatagctaaacgttttatttatgggagcagaactattaagtgccagttggaactaagacgtgatctcccctgtcccttcttttgcttaaaactgaatcatattgacaaatgttttcggcccgtttaagtaatgtgacgttctcatgaaatacaacggtgaacattgcaaaaatcgtgttattttcgttaattgttccaatgggtgaactagtgaacggagtcagcatgtgccagccctgatggctgctttgttgaactagttccagttccggagctagtgaaccaatagcaaacggaacaaaacaaaaacatctgtagattataggttaatttgttttataataacaaatgcgggaattattcaattaagatgagcaatctgctgaattttgccctgcggcagggcgtcaactccatcaagcgccttagcctccagagtttcagactggcagctccggccattgtaacaaaaacgccggttacttccacgataaagagattctcctcccaagccgcccccttcgatgtgaacaccagtgtccccaaggacataatacttttcaagtatgaaaacccccgattctaccagatgcttaactttttcggggtgtgtcagtttgttttctggacatatctctcgcacttcgccttcacgacgcttaaggatgctccagtggtggaaaaacccggagaggagctgaagtggttccagcgcataaatctgggcgataataagtacagaaatggcattacagcctgtagctttctgataggatatggcatactgtttgctgtctggatgtttaccctgcgatcggtgcgttttcttatcttgagaaagggtggtcagagcgtttcctttgtgacctacggtcccttcaaccggaatcgcattatgaccgtgccattaaagtgcgtctccgccgaggaatcacggaacatggccagggtgcagctacccattaaggtgaagggcaagacactgtattacgtcctggatatgcgtggcgagtttcggaatggcgagttattcgattacacggcgggcctcaagcgtcgcatttaa

SEQ ID NO: 29502 - protein, 231 aa, DROSOPHILA
MSNLLNFALRQGVNSIKRLSLQSFRLAAPAIVTKTPVTSTIKRFSSQAAPFDVNTSVPKDIILFKYENPRFYQMLNFFGVCQFVFWTYLSHFAFTTLKDAPVVEKPGEELKWFQRINLGDNKYRNGITACSFLIGYGILFAVWMFTLRSVRFLILRKGGQSVSFVTYGPFNRNRIMTVPLKCVSAEESRNMARVQLPIKVKGKTLYYVLDMRGEFRNGELFDYTAGLKRRI

SEQ ID NO: 29503 - DNA, 2930 bp, DROSOPHILA
ttccagcgcataaatctgggcgataataagtacagaaatggcattacagcctgtagctttctgataggtaagagtggtttactacgttctcggcaagccgaaaataaaactcaaccaacattttaggatatggcatactgtttgctgtctggatgtttaccctgcgatcggtgcgttttcttatcttgagaaagggtggtcagagcgtttcctttgtgacctacggtcccttcaaccggaatcgcattatgaccgtgccattaaagtgcgtctccgccgaggaatcacggaacatggccagggtgcagctacccattaaggtgaagggcaagacactgtattacgtcctggatatgcgtggcgagtttcggaatggcgagttattcgattacacggcgggcctcaagcgtcgcatttaaagggcaagttttgttgttttgtagcttattatttgtaaataaagatgtacactaattaaaactaaaatgcggcttagtaaatgggctccggcttctgggtgagcagcagtccaaagcgcttcttgatggtcagcctctggcgggagtacttatcctccggtgaaaaacgtgctggatgagcagatagtgtgggacgaccatcctcggtgcgtttctagaagagcaacaagtggtgacttagttgggtaatatatatatagggttttgataataatataccttcagggtgtaaacgcgatcgccgttttcgttaattgtgtacatcagatacatttttgcagtttttggattgtttttctgtagtcaaagaagcagaaaataaaacacgtgtggcgtgcgttgcaaggtgctaccaggctttaaaaaaaaataagcactaaataatccaacttaagagaatagtcaagcctcgaaccgtggaataaatgttagctagattttcgtagctagatcgcttgttatcgattcacttccatctctaagcatatttgtatagaatatttggcggacttttgtacacaatgtcaaataaagtggacaagctgcacaagcaggctttacgcgaacaacagaagcgtattaagcccggagaatgtatgaaatatgtgcggatggtcatagatgccggatttctgggcattcccgtgggccaggaggcactgcagcaattgaatgcgacgggtttgaagtatgaaataaggagcttgcccgtgagccactgcatcctgtgggaacgcaatgttggccagcagacgattgctctgggcagcagtcccaccggcctagatgaagcctggaaatcggaaaaccaagtggtccagtggctatccgaaagcagcttccaacgggctgtaaaggatcaaagtctagtttgcctgggaccgcgcttgcaggactcatttccggactgccagtacaccattgccctgccaacgctccgtcacagcaagcatggcagctcatccagccaggacgctctgattgagatgcagttgctccaggagctacacgtggaacagctagatcaacccgaaagccaggatctagtggccctgctgcagcgctatacaaaagcaatagccgaagccccctataagaagcaacgcaacgagacattgggaggcttcaagaaatacctggccaacgacaagaagcagtgcgtccgtgtggatcagggaaacggatacggaagactctggcagcagcatctgaatcgactgccaatggtcacgctggaagtggccgagtccataatagcgcagtatccctgtcccaagaaactgatcgatcatttctccagcgatccactggctgtccaaagtctcgccgatttgaagatcaagcgatgcaatggaccacagcctcttcacaccgagcgacgtattggaaatgttctcagcaacaaactgtatacattgtatactgccaaggatcccaatactctaatttagaaaactaaactaaactttcttagctttagaatctgctcatatattagcttcctaaagtatgtacaattataattaggttttaagttaagatctaagtattttacattattttctcatcgtataaggtataattttaaaaatcacaatgttcctatacacataactatgaattcaattaattgtggtttgcacacctgaagaattgataatatgtccgcttggaagtcggaactctgtgaacattggattgggcgcgatgtggagaatggagtgttggccatggccgatgaaaaacttcagtccgtgctctatagcgtggccagaatccgggtgaatcccaggcaggcggagacgatggtctggccgaggccccagatcatggcgtatatgggcgacatgggcagactggaggcgcgatgcacaaaggcgatgactgcactgctgattatgccactggaggccggggaaaggaaacccatgacaaggatgaggatcgagaagaatcgtccgaacttgtgcttccggagcgtgaagaaggccaccacggcggcgcaggtgtgaatgaatatggaggagaacagggcccacagaaagacgtggtaccacatttcgcgaaacgtattgagacgcgcctgtgaccggagtcccatcacatcggcgatggtgtccaactcatcggtgtcgtccgagaacatggctaaaacgtagtcgatggatgttgacgtggtatccctagttactagttgctagttattgcttttccgttggtcagttgagtgtccagccgcatgtctggtggggattccctttctatagcatgtatccagccaatattcatggacctgcaaacaataactccctttagacttgaccttctggcatttaattatactcacgccaacacatgtgtgtgctaatggccacacccataccacatttgtcgtattctatagccggatttggattgcagtctttttcagttgcttgatcctatttagca

SEQ ID NO: 29504 - DNA, 930 bp, DROSOPHILA
atgtcaaataaagtggacaagctgcacaagcaggctttacgcgaacaacagaagcgtattaagcccggagaatgtatgaaatatgtgcggatggtcatagatgccggatttctgggcattcccgtgggccaggaggcactgcagcaattgaatgcgacgggtttgaagtatgaaataaggagcttgcccgtgagccactgcatcctgtgggaacgcaatgttggccagcagacgattgctctgggcagcagtcccaccggcctagatgaagcctggaaatcggaaaaccaagtggtccagtggctatccgaaagcagcttccaacgggctgtaaaggatcaaagtctagtttgcctgggaccgcgcttgcaggactcatttccggactgccagtacaccattgccctgccaacgctccgtcacagcaagcatggcagctcatccagccaggacgctctgattgagatgcagttgctccaggagctacacgtggaacagctagatcaacccgaaagccaggatctagtggccctgctgcagcgctatacaaaagcaatagccgaagccccctataagaagcaacgcaacgagacattgggaggcttcaagaaatacctggccaacgacaagaagcagtgcgtccgtgtggatcagggaaacggatacggaagactctggcagcagcatctgaatcgactgccaatggtcacgctggaagtggccgagtccataatagcgcagtatccctgtcccaagaaactgatcgatcatttctccagcgatccactggctgtccaaagtctcgccgatttgaagatcaagcgatgcaatggaccacagcctcttcacaccgagcgacgtattggaaatgttctcagcaacaaactgtatacattgtatactgccaaggatcccaatactctaatttag

SEQ ID NO: 29505 - protein, 309 aa, DROSOPHILA
MSNKVDKLHKQALREQQKRIKPGECMKYVRMVIDAGFLGIPVGQEALQQLNATGLKYEIRSLPVSHCILWERNVGQQTIALGSSPTGLDEAWKSENQVVQWLSESSFQRAVKDQSLVCLGPRLQDSFPDCQYTIALPTLRHSKHGSSSSQDALIEMQLLQELHVEQLDQPESQDLVALLQRYTKAIAEAPYKKQRNETLGGFKKYLANDKKQCVRVDQGNGYGRLWQQHLNRLPMVTLEVAESIIAQYPCPKKLIDHFSSDPLAVQSLADLKIKRCNGPQPLHTERRIGNVLSNKLYTLYTAKDPNTLI

SEQ ID NO: 29506 - DNA, 2426 bp, DROSOPHILA
atccctacacactggctgctccgccattcgagaacgtatgtagttaattagctgatcttcttgggaaatttactaaaaaatttgacaatttcctcagcccctgcacaaccttaatcagatccaggccaatggcgacaagaccggcgtcaaaatcaacttcgatcacggcaccacaacgttgggcttcaagttcaagggcggcgttctcctggcagtcgattcccgtgccacgggtggatcgtacattggctcccagtcgatgaagaagatcgtggagatcaatcagttcatgctgggcaccttggccggtggcgcagccgattgcgtttactgggacagggtcctttcgaaggaatgccgccttcacgagcttcgaaacaaggaacgcatctcggtggccgccgccagcaagataatggccaacattgcccacgaatacaagggaatgggtctgagcatgggcatgatgctggccggttacgataagcgtggtccaggcctctactatgtggactccgagggatctcgcacgcctggcaatttgttctctgttggtagtggatcgctgtacgcctacggtgtcctggactctggctatcattgggacctggaggacaaggaggcccaggagctgggacgtcgcgccatctaccatgccaccttcagggatgcctactccggtggtatcattcgcgtgtatcacattaaggaggacggctgggtaaacatctccaacaccgactgcatggagctgcactacatgtaccaggagcagttgaagcagcaggccgctaagtagagttttgattaagggaatataagatattcagtttgtatacgtttgaatttcttggaataaataaacgtgctagagactatgttttgtgtataattgattgggctaatttgttttgcttttcataggtttattactataaatgtagttgtatgtatgtaatgtatttttggtaaatataacaagtacgcatatattaatagtttaggtttccttattctttttttgctgtgagatcatttgcaatgtttccttgtgtcgcacttccgctcgtttttgcttgaatgtccgctttccgcccttggtttccactcgctttcttcgcaggactccccgttccattgcgcttcgaagttcctgctcggcatccaagtacgaaggtatgtggatctgccgtatcattcgattccgcaccataaagtgatcaaaggggtgctgaccaccattgcgatcgatgaaaactgcatgggtgagctcgcaggtcatgtgtccatccgctacatcgatgattccggccacagaggtctcgttgtgcagatcgatcagtacggaatgaccctgcagcatcacgggccaacaatttaaggtgttggacaccaaatacttctcccgcgcactaaactgctgcattatatcgatatgtttaaaaataagtgtttgctcttggacacggagctgccaactcgcttcataagtaatttgacattttcattaattagttttgaactacatctaagagaagtacttacggaagttttcaagtaaaggttttttccctttttcacgtttgcgtgacggtcgtgtaaaacagttttggcaaacaaatccagctatggtgcgtatgaacgtattggccgatgccctgaagtgcataaacaacgccgagaagcgtggcaagcggcaggtgctgctgcgtccctgctccaaggtgatcatcaagttcctgaccgtgatgatgaagcatggctatatcggcgaattcgagatcgtcgaggatcaccgtgccggcaagatcgttgtcaacctgaccggtcggctaaacaagtgcggcgtcatctcgccccgcttcgatgcgcccatcaacgacatcgagaagtggaccaacaatctgttgccctcgcgtcagtttggttacgttgtgctcaccacctctggcggcatcatggaccacgaggaggctaggagaaaacatttgggaggcaaaattctcggcttcttcttctagagacaccaagttcacatcgtagagggatggagtttgatatgtagattgacgttttatttcaccgaccatgcatccaactatgtactttgtgcacaggaaacaaagggcgaaaacgctactacgttcattcagaaaacaaacgacgatgaatgttcacaaagttacgcgaaataaaatgaaaaatttggacatctaatatcgaaataatgagtttactttttaatcttccagcttcaacatttcctacgtttaaacttttatgtgtaaacaattggacgattgtgtggtattataggcgaatttcatgtaaactgcacttgcaaaaattatacgtgcacaaattgaactctaatcttaagggtaataaaatactaaacttaaatagctgttccccgctccaaattt

SEQ ID NO: 29507 - DNA, 426 bp, DROSOPHILA
atgcagcagtttagtgcgcgggagaagtatttggtgtccaacaccttaaattgttggcccgtgatgctgcagggtcattccgtactgatcgatctgcacaacgagacctctgtggccggaatcatcgatgtagcggatggacacatgacctgcgagctcacccatgcagttttcatcgatcgcaatggtggtcagcacccctttgatcactttatggtgcggaatcgaatgatacggcagatccacataccttcgtacttggatgccgagcaggaacttcgaagcgcaatggaacggggagtcctgcgaagaaagcgagtggaaaccaagggcggaaagcggacattcaagcaaaaacgagcggaagtgcgacacaaggaaacattgcaaatgatctcacagcaaaaaaagaataaggaaacctaa

SEQ ID NO: 29508 - protein, 141 aa, DROSOPHILA
MQQFSAREKYLVSNTLNCWPVMLQGHSVLIDLHNETSVAGIIDVADGHMTCELTHAVFIDRNGGQHPFDHFMVRNRMIRQIHIPSYLDAEQELRSAMERGVLRRKRVETKGGKRTFKQKRAEVRHKETLQMISQQKKNKET

SEQ ID NO: 29509 - DNA, 2240 bp, DROSOPHILA
tacactccccttctgtgtttgaattttgcgccacatttttaatgccgaaaccataaaagtgctcatgtgtgtgcagaaataaaaaaatataaaaaattggctaaaataaaagccagcttggaagactgaatgcttgttagcagcagcagcagctaccgaactataaagtgcacagaaaaagaagaaacaaaccgaaaagagcggctacaaaaagtctgaaattagttttgattttttttttttttaaactcactttgccatggcggaatgtcttagtcacgccacctgctgcaatccacttggattttttgggcataaagtaggtaagggaaggtaaggaaggtactaagcgcactccaaatctgtttggtaaacattgtagacgaagcgtgtggaattaaagccaaacacgataattgtgccgagactcttggccagagattgtcaaggtcgtgcatcttacgcgagtaaatcaaggaaaatgtgagcaggttaaagaaaatttctacctactaaaaacaatattaatgcatctccaaatattagtttcttcctacaggatggtagatggttttggaaatgtatctttttatgtaacctgctctttggtgtcagatcattttgtagctcaattaaaaagacgcagtacgacttcggcctcgaagtgtatatcataatgcatgcttatcggaaactacacattgaacacatttagagtggccccatgcatagccgggaaatgaagcgaaggggcgacgaacaaagcgaagaggaaaagatacggatggcaggggatacatgcatatgtatgtaggtatatacatatgaacaagcccccattccctgcaagtaatatgagacattgctaagggcacatgaaacaaaataatcaaaaccttcgccggataaacgcttgagtgcaggtcagaaaggaagaaggaccccgcagacctcgatgtcctcggtaaacactttacggcgtctactcgaaatgtatctcatggatgcgaaagcccggcccggcacggcccggcccggcgttgctgactcattttccttgagttccgaacaggttggccgactcacacttccacacacatccgcacccctgcaatccggactcaaacagtcgcactcagatacaaatgcaaatgcccacacaactgcgcaaacattgcgaaaaacatctacttggggttcgggaacaacaactacgcgcaagcggaatgaaatgccctgaaattgcatggaaattaacaaaacaaaatgcaatgaaataaaactaaaaggtgaggctagacgtgcacattcgccatggcgatacctttcaattgaactgctgagcgcggagaattgtgattttgagattcaacattttgttattatagaaactatagaaactaaagcaagggcaggtgatattcgataattcgagatggtaaaggttagttatatgcatcacaaccattttttaatcttgaaggttaagtatctaaaatacatttgaatctctactgcatttcgaaaagcatattaaacactgtttctgaataagtaagacgaatgaacgaattattctaagctcccagttgaaacagtgttagccccacgcaattgcccattggtattcaaggctaaatgtaattggtgggaaactgcattgaatagttcgcacattcagcattgttctcacaactgcaagtgcgaatatacccgcatggaacattcgtataagtcgctgggtatgtgcacaacttaaaggcgaactaagaaacacaagacgacgacaaaatttactttagaccaagctcaagctcaagtcgcagctccaactccggtgctcgagtgaacaactcgatgcaatcggccagcgaattcgaacgaaaggtacttgaaaaagtgcatgcgggttcatttcctgtttgctcttgccattttagctacacggcggcaaataatgggtattattcacagaatttgtacgaagcagatagttatttgaaagaaagataaggataactttgattatggacgaagatttgtaagttatgtaattggttttcagctgaagtttttcttcaacagaatatgttaagttcatacatcccgcaattatttatgtaaatcttattaaatatttctctaatatgtgactgagaactgcaaattagcatttcattgcaatatttggcatggatgtttttaaaaactatttttttctgtgcatcatacagagactt

SEQ ID NO: 29510 - DNA, 240 bp, DROSOPHILA
atggatgcgaaagcccggcccggcacggcccggcccggcgttgctgactcattttccttgagttccgaacaggttggccgactcacacttccacacacatccgcacccctgcaatccggactcaaacagtcgcactcagatacaaatgcaaatgcccacacaactgcgcaaacattgcgaaaaacatctacttggggttcgggaacaacaactacgcgcaagcggaatgaaatgccctga

SEQ ID NO: 29511 - protein, 79 aa, DROSOPHILA
MDAKARPGTARPGVADSFSLSSEQVGRLTLPHTSAPLQSGLKQSHSDTNANAHTTAQTLRKTSTWGSGTTTTRKRNEMP

SEQ ID NO: 29512 - DNA, 5217 bp, DROSOPHILA
tggcaagaccggcaaggaacaggcgcaaggtatagagtctcgtgtctactcgtgcgatatgtgcctgttcgagacgtccaccgttagccagttgcgaacacactacaaggaacggcacacggtccagcccacggaggtgcagctgcgtcccagttggacgggcgagccaacgacaacgagaggcgttgccgccaagcagcagactccggccaagatattaaatcacaccgacatcccgttgggcattaaatgtgagtcatgagatcgttttaaccagggcatttaaactggtatcgactttcgccggttttttggacagttatgaaatgattcgcaaacaaaaattcgtattaatcttttcgttggttgaatgagttaatgttgatatttatttatttattattttcttattattcattaggtattttaccatactttttgttgagctctcaacttacttcgtgcaatacgtttttttttatcatattttttgcggtaattttgtgacaaaccatgaaccgaaattctacacaacagttaaattaaacgtttacactcgaaaatatgtagatcacagcaatgaaattttaaattgtaaaattagttgtacatacaaatttagcataacaccgtgtatatccaggctatgtcctctttctagtaaattgatgctcataatgatcataatggcaattagttttttggcattaactatcgggtaggattggggaaactctctttagctatcgcgctgatgaaactacaaaaacgttgaggcctttattccatgtaaataaaagcaaatcgaatacaagtggagggattgtggactttcggtaaggacttcaaaggagcactttaactcgtttttgataattaattgtttataattaccgtgtttatctttgagtttctccagcctgcactctaaccaaattttatttaagtccaacagtttaaatttgtatactcatttgaattccctggctttccgttttatatgtttcatgttggcatgtttgtaatgcaatgtcttccagatccgcctggtgttttggaaacgcaagcgccattgccgcaaccggtggtacatcaaccaatgcctgatccaatgcagcaaacggagccgatggccaccacatcgacgaccatcaccgaatcgggcgacatcaacgtagtggtggatgcgacgccgctcttctatgcggcaacctccaactccctgttagtgacgaacccggcaccggtgacaacggtggaggaaaccaccggtacggccagcaaccatgcatttggaatctttcccgaaatctcagagggcaacctgcccgtgaacgaagccgtacagcaggcaccagccaattcatctagcgtttcggtgtttggcgacatgcaggactttattgacaacaccgatgtggctgccatatgcacaattcccgcggatggcatgcccgttgtggatggtgatgacattgtgattgataataacaatatcagtctggactttgatgccgagaatttgttcgaggacttcgaggaggaggaggatgatactgtggccgacgaagaagacgaggccgacaatgaagacgagaatgacaacaatgatgctgccactgatcaaaatctgttgctgaccagcgacgatgatgatgtggacgactttgatgacgagcaatcgaagcatctgcagaagccctactgcatttactgcaataagaagtttaccagtcagtataaattcgagaaccacatgtttgttcatcggggtaagtaagctgggtcggtcacacagctctagttactaaataatcatgcatatatctggttggacttcaggtctggctccctatcgctgcgaactgtgcactaacctctacaacatgaagcgattgctgatcaagcactataaaactgtgcacaagcgaatgcccacgagggacatggtccaggcgaagggcgataaggtttccgtagcccgcaccaacatcgaaaaactgtatcctggcaggataaagagtaagctacataaaatacagtatacagatcacaccatcttcagtttctatctaccttcagatccaatgctcatgtgcgcaaagtgtccgtttgaatgcgaatcggattcggagatgcgcaagcatctgaatgcccaccatggaatcaatgacggaggtgagtaaatcaatgatcaattattaagcattgatagattaaagatataatttttaattctaccattgtttttatgaaataattctaataagataaatcatattttcattccagtgtccgagcatgcaaacgaagtgtttatcatacgcagtaagtagttttgttattttgataaggtttgaaacgattttcatcgttgtggctatgacatatgaactcatctttcgtccaacaacagaattaccatttgaatgtccgcgctgcattcgatcgtttgcggccaagaccactcttagtcgccacctgcagcgcagtcatttggtggatacaattatagagatgcaaacgccgcattgcggggaagccatcacgactacgatggccacatcctcatcaacgatttctgagcccgtaaactcggtcacagtggatggccaacacaatgagatgatgcagacggatgttggggctgaaaagatgacggaagctttaggcaatggcgatggcaatggtaagagcctcaatagccttgcactaatcaaatcaaattcccatttcaactatgcccaaaacacgccaacgcataatacaaatgataatctaaaaacgctgttgttcggcgacgaacaatgatcgtcgattgttgttgtactcaccagaagaaggcggcacagatgatggaacaggagttaaagcagaaccggcggtgccagaggaagaactagatccggtaacattggacgcagccacagcggtgactacaacagcaatagcagcagcaatatcagcggcagcagcagcgacagctacttcgttagaatcacccgtagcaaccacagcttcatcgtccaccactctctttcccacgcccacaccatttgattttgattatgacataatgagagacgaagcccagcaatcgtcgcccaatatccatgacgtatccaaagccctcagcgacaatgcatcatccagctgcccaattaatgaaagctataaactgctgtccaccactgccctggaaacatcgccagcgaagggtttacgctccaacagccgtctgcatcgttcttccattcacatttgcaaactctgtaaccaaacatttgacgagctgggcaagttggtcaagcatgaaatggagctgcactccaatacggaacgttcgcgatggggctatcagcacaagtgtgccatctgcaatacatcctaccgcacgcttacgttgctcaagttccacatgaagcgacacagtaatagaaaatcacagtgcaagctgtgccccaagtcctttgtaactatcgcagagctcgagcggcacacgaaggccaagcacagcaaggataagacgcttcggtgctttatggatggctgccggaagacttttgccttcaaacaccatttgatacgccatcagaaggcctctcatctgagcacgcggtatatatgtcccgtttgcaataaggaggaaaagtccaatgtgcatctgaaaaatcatatgagcgtgcacaaaggtgagataacctacaagtgtcccaagtgcgatcgctcctatttgcgacgtggcaggtgagagattccccttttcaaatcgtttgtaagccttctacaataatttctcttatgcagactcgtaacccatgcactcataatccatgacttgcgcttcaccaccgaagagttgggaaacctctcatccctggctacgaaccaagccagacctaacgatcttaaagtcgcgacgcccgtgggactcctggatggccgtaaggatgtgagcggtgcaagcgaagaaaatgggcagccctaaggagctgacgataattccaagtagttgtgaacttatgcttttacgaatcaagcaaagtaatcgcacaatgtacaaagtttgatatagtctaagtactgttcctctccatcattttagcacatcaaatgtcttgaagttttcttgttaagttctagactaggacattaaacacaatctcttatacaaaattagttgaaatacagacgaccgatcacttattgacaaatagacttcggtgaaattttcaatgtattatgaggatccaaaagtagcaatgcccaaatggcaacttaaggtatcgccttaaacataacaatccgcaacgggtctcaaggtgtcagtagttaatccattcgattcccaagcatgattgaggcaatctccaccagctggctctgtattggccaaagagaaacgcttcacatctaatgtttaaaattctccattatatatatgtataattatttttttttttgcaaacggtcatgtatttcgtatatttacgagcatcgtcatgaatagaataacccaatagttttaggtttaaattcaacgcgtagaagggataagttatcttcaacgatgttacttataaaagaaacgtacattaaataacttttactactagattcgagataaatatgtatttatattgcacctaaattgcatgcttgggtcagggaagctccttcttaaagatgttccatttccagctccattgattttccagactgatcaactgctggtaggaagcatagtcatcctttgcgaactccttcagccgggccagctgcatcatggcctcctcggtggaatagataggctctatcagagtcacggggtatggctcatcacaatcgtccttattcgagatgggttcgcttttcaccagaatcgcctcgaactcctgcagatccaggctgtcaccggtgtcattgtatcggacgttgtgtcgctttcgccatttctccagccatccggaggaggcagagaaattggagtggcccagctccacagctaactgcttggccttcttccgcaccatttcccccgatatgggtatattctcggtacggacacgggagaaccaatcaaagcacatctcatcgatttgggcgccccgctgagagaggggattcctccgcatctgattcaacttaagttctccactcaacagaccctctttaatcgactgtttgtgcttcaaaatgtctgctgcttgtgtcttt

SEQ ID NO: 29513 - DNA, 2677 bp, DROSOPHILA
atgtttcatgttggcatgtttgtaatgcaatgtcttccagatccgcctggtgttttggaaacgcaagcgccattgccgcaaccggtggtacatcaaccaatgcctgatccaatgcagcaaacggagccgatggccaccacatcgacgaccatcaccgaatcgggcgacatcaacgtagtggtggatgcgacgccgctcttctatgcggcaacctccaactccctgttagtgacgaacccggcaccggtgacaacggtggaggaaaccaccggtacggccagcaaccatgcatttggaatctttcccgaaatctcagagggcaacctgcccgtgaacgaagccgtacagcaggcaccagccaattcatctagcgtttcggtgtttggcgacatgcaggactttattgacaacaccgatgtggctgccatatgcacaattcccgcggatggcatgcccgttgtggatggtgatgacattgtgattgataataacaatatcagtctggactttgatgccgagaatttgttcgaggacttcgaggaggaggaggatgatactgtggccgacgaagaagacgaggccgacaatgaagacgagaatgacaacaatgatgctgccactgatcaaaatctgttgctgaccagcgacgatgatgatgtggacgactttgatgacgagcaatcgaagcatctgcagaagccctactgcatttactgcaataagaagtttaccagtcagtataaattcgagaaccacatgtttgttcatcggggtctggctccctatcgctgcgaactgtgcactaacctctacaacatgaagcgattgctgatcaagcactataaaactgtgcacaagcgaatgcccacgagggacatggtccaggcgaagggcgataaggtttccgtagcccgcaccaacatcgaaaaactgtatcctggcaggataaagaatccaatgctcatgtgcgcaaagtgtccgtttgaatgcgaatcggattcggagatgcgcaagcatctgaatgcccaccatggaatcaatgacggagtgtccgagcatgcaaacgaagtgtttatcatacgcaaattaccatttgaatgtccgcgctgcattcgatcgtttgcggccaagaccactcttagtcgccacctgcagcgcagtcatttggtggatacaattatagagatgcaaacgccgcattgcggggaagccatcacgactacgatggccacatcctcatcaacgatttctgagcccgtaaactcggtcacagtggatggccaacacaatgagatgatgcagacggatgttggggctgaaaagatgacggaagctttaggcaatggcgatggcaatgaagaaggcggcacagatgatggaacaggagttaaagcagaaccggcggtgccagaggaagaactagatccggtaacattggacgcagccacagcggtgactacaacagcaatagcagcagcaatatcagcggcagcagcagcgacagctacttcgttagaatcacccgtagcaaccacagcttcatcgtccaccactctctttcccacgcccacaccatttgattttgattatgacataatgagagacgaagcccagcaatcgtcgcccaatatccatgacgtatccaaagccctcagcgacaatgcatcatccagctgcccaattaatgaaagctataaactgctgtccaccactgccctggaaacatcgccagcgaagggtttacgctccaacagccgtctgcatcgttcttccattcacatttgcaaactctgtaaccaaacatttgacgagctgggcaagttggtcaagcatgaaatggagctgcactccaatacggaacgttcgcgatggggctatcagcacaagtgtgccatctgcaatacatcctaccgcacgcttacgttgctcaagttccacatgaagcgacacagtaatagaaaatcacagtgcaagctgtgccccaagtcctttgtaactatcgcagagctcgagcggcacacgaaggccaagcacagcaaggataagacgcttcggtgctttatggatggctgccggaagacttttgccttcaaacaccatttgatacgccatcagaaggcctctcatctgagcacgcggtatatatgtcccgtttgcaataaggaggaaaagtccaatgtgcatctgaaaaatcatatgagcgtgcacaaaggtgagataacctacaagtgtcccaagtgcgatcgctcctatttgcgacgtggcagactcgtaacccatgcactcataatccatgacttgcgcttcaccaccgaagagttgggaaacctctcatccctggctacgaaccaagccagacctaacgatcttaaagtcgcgacgcccgtgggactcctggatggccgtaaggatgtgagcggtgcaagcgaagaaaatgggcagccctaaggagctgacgataattccaagtagttgtgaacttatgcttttacgaatcaagcaaagtaatcgcacaatgtacaaagtttgatatagtctaagtactgttcctctccatcattttagcacatcaaatgtcttgaagttttcttgttaagttctagactaggacattaaacacaatctcttatacaaaattagttgaaatacagacgaccgatcacttattgacaaatag

SEQ ID NO: 29514 - protein, 815 aa, DROSOPHILA
MFHVGMFVMQCLPDPPGVLETQAPLPQPVVHQPMPDPMQQTEPMATTSTTITESGDINVVVDATPLFYAATSNSLLVTNPAPVTTVEETTGTASNHAFGIFPEISEGNLPVNEAVQQAPANSSSVSVFGDMQDFIDNTDVAAICTIPADGMPVVDGDDIVIDNNNISLDFDAENLFEDFEEEEDDTVADEEDEADNEDENDNNDAATDQNLLLTSDDDDVDDFDDEQSKHLQKPYCIYCNKKFTSQYKFENHMFVHRGLAPYRCELCTNLYNMKRLLIKHYKTVHKRMPTRDMVQAKGDKVSVARTNIEKLYPGRIKNPMLMCAKCPFECESDSEMRKHLNAHHGINDGVSEHANEVFIIRKLPFECPRCIRSFAAKTTLSRHLQRSHLVDTIIEMQTPHCGEAITTTMATSSSTISEPVNSVTVDGQHNEMMQTDVGAEKMTEALGNGDGNEEGGTDDGTGVKAEPAVPEEELDPVTLDAATAVTTTAIAAAISAAAAATATSLESPVATTASSSTTLFPTPTPFDFDYDIMRDEAQQSSPNIHDVSKALSDNASSSCPINESYKLLSTTALETSPAKGLRSNSRLHRSSIHICKLCNQTFDELGKLVKHEMELHSNTERSRWGYQHKCAICNTSYRTLTLLKFHMKRHSNRKSQCKLCPKSFVTIAELERHTKAKHSKDKTLRCFMDGCRKTFAFKHHLIRHQKASHLSTRYICPVCNKEEKSNVHLKNHMSVHKGEITYKCPKCDRSYLRRGRLVTHALIIHDLRFTTEELGNLSSLATNQARPNDLKVATPVGLLDGRKDVSGASEENGQP

SEQ ID NO: 29515 - DNA, 4436 bp, DROSOPHILA
tcgctttcgccatttctccagccatccggaggaggcagagaaattggagtggcccagctccacagctaactgcttggccttcttccgcaccatttcccccgatatgggtatattctcggtacggacacgggagaaccaatcaaagcacatctcatcgatttgggcgccccgctgagagaggggattcctccgcatctgattcaacttaagttctccactcaacagaccctctttaatcgactgtttgtgcttcaaaatgtctgctgcttgtgtctttccaatgttaaaccttcggaaacttgttatttttacccattcatatgtatgtatcaggcattgatcttacctcttggccagatcccgaaccgatagcttgtttcgctcctgggactggattacctccattttctcttccaaagtgagcgaggttctaggttttctgactcttcccgatggcatatttgtcgacgaacattactagtgagcgatgaagacttttatctgtcgaaattgctaccaaattagacagttttcttgtccgctcaagggagtgtccgtccgtccacagatatgtggtgttgtatgaccagagcgatgaagtatacaaaaggcaagggcgtatgctaggttttttatggctgcggtttagggggtttaagaaactccatattttactatatttgtaaagaataaactttttgtctagtattgtgtctttcatcaaaggcattttttataggccttgaatcattttcttgctagcgactgtagcccaaaggttactgcccggcctgtgatcttattgaaagcatgtaggttgatatatattatatatatatatgtatttaatatatattcgcttctatacgtgacttaactccctttgggaacgccattgaaacttaattgaagcagcacgcagccggcatgggaacttttgcgattgcagacacggtcacactgcatttgatcacaaaagagcggtataaaatacaatacacattgtttgccgaacttatttttgaaactacttctatctacaacaaacggataaaccagcgcaggagaagcatcttgatcaaccgcagcgccatggacgccgccgtaccggatcccgcgctcctggcgatgaacaagctgaacaagggctccaagtgccgagcctgtctatcggtggacaggaaaaccgtgcagttgaacgccgaggtgcccaacctgcaaaagacgcgtacctacgcccagagcctgaagcagtgcaccaacctggacctgcgggtcattagtccaggtggctacctgtggccgatgcaaatctgcgtgcgctgctgtcgcgccctggaggtggctatgcactttgtcgaaatggccctggaatcgaatctcaagctccaagccgaagccaaaagcgtaaagctgcccagtcccactggagagcttaaacgaaaggccagcaacgaaacgataccatggaatcagtttagccaggagttcgagcagtttgtcgagggctatgagggtcccatcgaggagaatgtcctctatatgcgaggaaccaaggtgccgcggctggatgtcgacgcttcttcgagcagcgagacagcgccaaaggaagatgaaggtaggcctaactgacagcttagcccagcattcaccctaatcttctctcttacacaccgaaaaagtaatactcttcgacgtcaagtatgacaccaatgatctggaggaggaggacgagaacgacggctcggatgccaagaacaatgagaccttcttcgagaacagtattacacctggagagtcagttatggtcgtctcagtcgcggaaaaagctgtcgagaataataacaattataatttcaataacaaaaacggcgatgtgacggacgaggagtgcgaccttatacaacgcgctctggagatgactctaaacgacgatggctgtagccaaagtcccaagaacgaggccagcaatgaaactcagctgaaatgtaagtgtatatcgagttggactattcatagttatcatcctcctcctttctagccaatggaatagaggtctcatcgccactctttattaagctggccacgactagcagcacgacgggtaatatacccattctgaaatgcaacatttgccaatacacgcataccgatgcggagcagttaaaaattcactacaaaagtattcacaagatttctatgatggaagacgatataattggcctaaacaaaagtgagccatttttctagtaaattccttttaccaccgatcttatacgtattgttgcagatcaaaacttcaagtgccgaccttgcaatagttatgagacgaaagacaggtctgaaatgcagaagcatctcatcgatcaccacaaaatagatggtgattttggtaagctctaagattcgaatcaaaagatcccttactcactgagtttattcaccagaaatgtactgttatatgcaagcaaactgcccggcttgcgacaggatcttcaaggatcagcgctcggctagaaaacattacacccgggtgcacactccggtgcaaattgcggtgtcaccaacagaatcatatgcctgcacggcatgcgataaggtgttcaaccagaaggccagcctgcacagccatcagcgtttctgtcaggtgaaggatgtcgtgcattgcagcttctgcgatcaacagttcaacagcatgcgcaagtacgagctacacttgcagcaactccatgccgtggaaacagtacacgagtgcgagatctgccggcgtagcttcaaaagcgccgaaaccctaacgatgcatcgcaagcggcactcggagcggcactaccagtgcggtaagtgctcgcttaactatgttaactcggcggagttgcgagtgcactacgaacgggctcatgtcaatgaggaaccagttagctgccttacctgtggcaatcagttccaaaacatgaccctgctgcgcgagcacgagcaaagaagtcaccagaagtcgaaggtctggcgctgtgaggtgtgcaactttgagacgaagaccagatggcgcaggcgtcagcatcagtacgagcacatggattacccgtacaagtgccagaagtgcaccagcgagttcgctgatcgcagcaagtacgtaatttactctatcacagggccagcaaatcatcaccatgccacttacagattccgccaacattccaagaaggtgcatggcatcgaactgagcgacgagcagttggctgagatgttccgcgagaagaagggctacaccaatcggcatgatgcattcaacaagtcgattaactcactggagattccaggcctcacggaagactgtttcaccgagctggagagcctgggcgtagactatgacgccataactactgatctctttgccagctccgccgctctggacaacctgctcaatttgataccttaaaaacagggccacgatcaatctacctgcatagaatttacaaatttaaacggcacacatattagctgacgagagcaagaagactgtctgcactttacaaatcgccctaacaaaaaatagcatttatacaccacaactgtttaagtttgaacaactattttgctcaaccgattcagaatccagatcagaacattcattagtatgtattcacagtgaaaccatgatatttttgaagtcacaatctcaataaacaaggacacacgcgtttctgaagcgcacaaaactccctttgtttcgttttacactctgtcggagtttgtatttaaactatttcaatttgaataactaattaacgccctggatgaattttgagaggaagtcggtgggcttgggatcctgcgattctttccagtagcgcatgatatggcccttctgcttccagatctccacggattccttaagctccatttggccctgcgtaagatagtattatcacctgcagcatagctctcttatggatgcgtttaccttgatgaccagcatgtcgatcacccggatgtcggtcacattgcgatgcttgacgaactcctcgcgcagcttgtcccgacactgctccacggtcatggggatgtcgtagtccatgactgcaagcggacggatggcattacatggcgtcgggatacggatgcacactctgatgacataaccaggagcacttaccgatgtagggaatctggcggtaccaggccttgtacagattgagggcacgcttacgggcctcctcgcggtccacggacaggatggggcgcacctgctgtacggctcgcttcacggcttcacgtccggccatttgatttgtttttatttctttctgtttttcctacgaccaaattgctccaagcagaacagtgtgaccgcagttcactacgcacaaatggacaaaaccaaagtttggtaaaatgatttttatttaaaaatgttttctactcgaaaataatagatg

SEQ ID NO: 29516 - DNA, 2084 bp, DROSOPHILA
cattgtttgccgaacttatttttgaaactacttctatctacaacaaacggataaaccagcgcaggagaagcatcttgatcaaccgcagcgccatggacgccgccgtaccggatcccgcgctcctggcgatgaacaagctgaacaagggctccaagtgccgagcctgtctatcggtggacaggaaaaccgtgcagttgaacgccgaggtgcccaacctgcaaaagacgcgtacctacgcccagagcctgaagcagtgcaccaacctggacctgcgggtcattagtccaggtggctacctgtggccgatgcaaatctgcgtgcgctgctgtcgcgccctggaggtggctatgcactttgtcgaaatggccctggaatcgaatctcaagctccaagccgaagccaaaagcgtaaagctgcccagtcccactggagagcttaaacgaaaggccagcaacgaaacgataccatggaatcagtttagccaggagttcgagcagtttgtcgagggctatgagggtcccatcgaggagaatgtcctctatatgcgaggaaccaaggtgccgcggctggatgtcgacgcttcttcgagcagcgagacagcgccaaaggaagatgaagtaatactcttcgacgtcaagtatgacaccaatgatctggaggaggaggacgagaacgacggctcggatgccaagaacaatgagaccttcttcgagaacagtattacacctggagagtcagttatggtcgtctcagtcgcggaaaaagctgtcgagaataataacaattataatttcaataacaaaaacggcgatgtgacggacgaggagtgcgaccttatacaacgcgctctggagatgactctaaacgacgatggctgtagccaaagtcccaagaacgaggccagcaatgaaactcagctgaaatccaatggaatagaggtctcatcgccactctttattaagctggccacgactagcagcacgacgggtaatatacccattctgaaatgcaacatttgccaatacacgcataccgatgcggagcagttaaaaattcactacaaaagtattcacaagatttctatgatggaagacgatataattggcctaaacaaaaatcaaaacttcaagtgccgaccttgcaatagttatgagacgaaagacaggtctgaaatgcagaagcatctcatcgatcaccacaaaatagatggtgattttgaatcatatgcctgcacggcatgcgataaggtgttcaaccagaaggccagcctgcacagccatcagcgtttctgtcaggtgaaggatgtcgtgcattgcagcttctgcgatcaacagttcaacagcatgcgcaagtacgagctacacttgcagcaactccatgccgtggaaacagtacacgagtgcgagatctgccggcgtagcttcaaaagcgccgaaaccctaacgatgcatcgcaagcggcactcggagcggcactaccagtgcggtaagtgctcgcttaactatgttaactcggcggagttgcgagtgcactacgaacgggctcatgtcaatgaggaaccagttagctgccttacctgtggcaatcagttccaaaacatgaccctgctgcgcgagcacgagcaaagaagtcaccagaagtcgaaggtctggcgctgtgaggtgtgcaactttgagacgaagaccagatggcgcaggcgtcagcatcagtacgagcacatggattacccgtacaagtgccagaagtgcaccagcgagttcgctgatcgcagcaagtacgtaatttactctatcacagggccagcaaatcatcaccatgccacttacagattccgccaacattccaagaaggtgcatggcatcgaactgagcgacgagcagttggctgagatgttccgcgagaagaagggctacaccaatcggcatgatgcattcaacaagtcgattaactcactggagattccaggcctcacggaagactgtttcaccgagctggagagcctgggcgtagactatgacgccataactactgatctctttgccagctccgccgctctggacaacctgctcaatttgataccttaa

SEQ ID NO: 29517 - protein, 663 aa, DROSOPHILA
MDAAVPDPALLAMNKLNKGSKCRACLSVDRKTVQLNAEVPNLQKTRTYAQSLKQCTNLDLRVISPGGYLWPMQICVRCCRALEVAMHFVEMALESNLKLQAEAKSVKLPSPTGELKRKASNETIPWNQFSQEFEQFVEGYEGPIEENVLYMRGTKVPRLDVDASSSSETAPKEDEVILFDVKYDTNDLEEEDENDGSDAKNNETFFENSITPGESVMVVSVAEKAVENNNNYNFNNKNGDVTDEECDLIQRALEMTLNDDGCSQSPKNEASNETQLKSNGIEVSSPLFIKLATTSSTTGNIPILKCNICQYTHTDAEQLKIHYKSIHKISMMEDDIIGLNKNQNFKCRPCNSYETKDRSEMQKHLIDHHKIDGDFESYACTACDKVFNQKASLHSHQRFCQVKDVVHCSFCDQQFNSMRKYELHLQQLHAVETVHECEICRRSFKSAETLTMHRKRHSERHYQCGKCSLNYVNSAELRVHYERAHVNEEPVSCLTCGNQFQNMTLLREHEQRSHQKSKVWRCEVCNFETKTRWRRRQHQYEHMDYPYKCQKCTSEFADRSKYVIYSITGPANHHHATYRFRQHSKKVHGIELSDEQLAEMFREKKGYTNRHDAFNKSINSLEIPGLTEDCFTELESLGVDYDAITTDLFASSAALDNLLNLIP

SEQ ID NO: 29518 - DNA, 3831 bp, DROSOPHILA
gtatatatgtagtacaccctggttacccctttactgcccacgtttcgtgcatttttacttaattttatttgtattggatttgcgccgctgtctcggcgagtcctcctctgtgcaacgcagcgcagagcggcgcgatttcggaattctgcaatttgcacaataaattttaattcaatttactgttaaactcacccagagacacaacaactaactaaatgcggacgcggaagtgcgcattctggcatgacaatcgtcctccgccagtcggggaattcatggagatgggaaagaggacgctgtgcagccggagattaccatcagccaagggctacagtgaagcttaggcacgggggaatatgccagcagaataagttcgtgttgattaaaatggaatacttcttttgattcttttatttgtttcgaaattcaaggatattaggaacataatattaagaaaaatctgattttgtttgaagtttcccgattagtcagattgtagtgaggtattaaattaacaagtttgaaaaccgcaggcttaaattagctcagtaagtcgcccgtaatttgggctaaccgtagccaaccgcgaaaaccttcatcctgcgaccgccgcaggaccaatacgccgttagttggagaactttatgtcctgcaggaccgcaaaaggggcaataagttgcgcttattatgataatgggtgcgcatgtgcagccattttgattgggctgcggcaggattgtagtggcactgctaaatgcagcgccagttatcaaacgtaagtgaattgaatgtgcgcagctgcattgtcggaaaccggaaacggaaatggaagtgagattgggaatgggaatggcaacggagctacgcaatcgactaaaccaatttggaattgttgtcaaaagttcgggtataattttgacgttgactctgtgtttgtttgtttttgtagctattttttgtgtgacgctttcgttttcctgccgctgatgtcgccacgggaatggagccaaagtcgcaggatcaggctccaaatcgggacgatcctgacctgcagactgagcctctgaccatagcgtgagtgtgtcctgcatccgttccatttacagactaataatattgtggctactttgcagccagtccataacctctttctacatgtacaatccctacgagaagcgaagtgtggaggtgcccctaacgtgagtttcatgtaggataatgaattgattgagtttgccaaacatactgcttaattacataaactttttatcgctcataacgaagtaactgtgacgccttcatttccctgttaaaatgtgtgattggaacgggcattctggcaatgccgctggcctttcgatgctcgggattcgtgatgggcaccgtgatgtccattctgctgatgatactcctgacgtactccatccacttgctggtctgtaagtggctacctcggccaactggaacaccctctttaaatatctatggaaccaacagatagctgacatgacggagtgctgtcgaaggcgccgagttcctcaagtttccatgccggaggccgtgaggattgcctacgaggagggtcccaagtggatcaattgctttggtcgggccgctggttttatgaccacttgcgttttggtcttcggtcagtttctgctgtgcaccgtttatctggttttcgtgtccaagaacttcaaggaaatcggtgaccattatattgagaggtacaatgaaaggtattatgtgctggtcgcctgtttgctgctcttgccgctcttcatgatccgccgtctaaagtatttggtacccttgaatttgatctccaacttcttgctatacgcgggattcgccctaatcatgtactatctgttcaatggtcttcccaatattaatgatcgtgagatggtcacacctcctgtcgaatggattgaattcatagccatcgccgccttttccctcacagccgtgggttctgtaagtttaataagtgtatataataaatctcaaaaacttctattgtttcttattctccagatgctcgtcgtcgaggcccatatggcacatccgcagagctatctgggcctctttggagtcctcaatcttgctgttttattcatcctgctctcgaacatgttttttggaatcatcggctattggcgtttcggagacaatgtccatgccagtattaccctaaatattccacaggatgaaatgtaggtaaaataattcctaattaggtattccaatttcaactttcgtttattctatatgtctgttatttatgcatacaaaagtgtaaccttttttaaagtggtattcacatttcctacttagcctttcccagttcattaaggtatttattgcctctggaatatttctgagttatcctctgaatggtttcgtagtgatcacagtgatgtttagcgactatgaaaactctgaaccgaggggcaggtatcgcacgctaattgagtacgtagttcgattgctgtttctttttctcacaggtgagttttgcacgtaaaaaaaagaaagaaaatcataaaaatgattactgaatttcctaaggtgccgtggcaattggtgtgcccaatctagcggctctcacggaactggaaggcgctttttcgttgagtaacttgaatcttctatgtccggcattgatcgatgtgttcctaaactataatgtgggctatggccggctgatgtggaagctgatccgggatatcttacttatcctgattggtcttattttcggcatagttggttgcacggttgccttgatgcaactgatccgtgattttcagttgacgctcaacagtatgtaagagagaatgggctgcaagtttggattttctcagcttctggtgcttattgttggaaataaaatcggatttaccaagttgtccgccctcgttccttctagcgttccttagcgtttaagaaccaaatatttggttgcttgttcgggggcttttaattaattgccagccaagtgtttgccgcctgctggcttatcccccattaagtcggttgtctaagctctggcgtccagagtcttgtttgcttaacgtggcgtactagactcgactgggctaggcgcacatcaagtatacgccacgtttaattagctgagcccaggctcaggagccgccgatcatttaaaatggagccctcggcccggggaactgtaatcaaatgcagtgaggggtggcaggaccacaagtccatgctacgtttgcgcctgatttgggtgttttaaaattgaattccttgcctcaatggagcgcaaatacaaaaggcaaagttgcctagctgccgcacaataaactaaaagacaaatacacaaatacaaattccgagccaagaagaggaagttaaatcgctgcccgtccggcagctcctgcaaatatatacgtatacgaatacctacaatatatatatatatatatatttatataaataggcacaggaaaagcaactgccgacgacggcgactgttgactgcgccagtgtaaatagcacggccagcgaaatacaataaaaaataaatacgaaaaaatagtcctgcagctcctcaaggaactgcacgaaggacaaggaagaccactgcagcaaacacacacaaaacacaatttccattcttcaaatagaaatacaaaaaaaaaaaaggaaaaaaaaagtaaaaccgagaggaggctaagaataaaacgttgcgactgccagcgacagcagccaggatgaagggaacaaggacgagtacgggtatcctggggcatgatttttgcagacatgttgcttaaaacttaatttagagcgccgcttgca

SEQ ID NO: 29519 - DNA, 1383 bp, DROSOPHILA
atggagccaaagtcgcaggatcaggctccaaatcgggacgatcctgacctgcagactgagcctctgaccatagcccagtccataacctctttctacatgtacaatccctacgagaagcgaagtgtggaggtgcccctaactaactgtgacgccttcatttccctgttaaaatgtgtgattggaacgggcattctggcaatgccgctggcctttcgatgctcgggattcgtgatgggcaccgtgatgtccattctgctgatgatactcctgacgtactccatccacttgctgatagctgacatgacggagtgctgtcgaaggcgccgagttcctcaagtttccatgccggaggccgtgaggattgcctacgaggagggtcccaagtggatcaattgctttggtcgggccgctggttttatgaccacttgcgttttggtcttcggtcagtttctgctgtgcaccgtttatctggttttcgtgtccaagaacttcaaggaaatcggtgaccattatattgagaggtacaatgaaaggtattatgtgctggtcgcctgtttgctgctcttgccgctcttcatgatccgccgtctaaagtatttggtacccttgaatttgatctccaacttcttgctatacgcgggattcgccctaatcatgtactatctgttcaatggtcttcccaatattaatgatcgtgagatggtcacacctcctgtcgaatggattgaattcatagccatcgccgccttttccctcacagccgtgggttctatgctcgtcgtcgaggcccatatggcacatccgcagagctatctgggcctctttggagtcctcaatcttgctgttttattcatcctgctctcgaacatgttttttggaatcatcggctattggcgtttcggagacaatgtccatgccagtattaccctaaatattccacaggatgaaatcctttcccagttcattaaggtatttattgcctctggaatatttctgagttatcctctgaatggtttcgtagtgatcacagtgatgtttagcgactatgaaaactctgaaccgaggggcaggtatcgcacgctaattgagtacgtagttcgattgctgtttctttttctcacaggtgccgtggcaattggtgtgcccaatctagcggctctcacggaactggaaggcgctttttcgttgagtaacttgaatcttctatgtccggcattgatcgatgtgttcctaaactataatgtgggctatggccggctgatgtggaagctgatccgggatatcttacttatcctgattggtcttattttcggcatagttggttgcacggttgccttgatgcaactgatccgtgattttcagttgacgctcaacagtatgtaa

SEQ ID NO: 29520 - protein, 460 aa, DROSOPHILA
MEPKSQDQAPNRDDPDLQTEPLTIAQSITSFYMYNPYEKRSVEVPLTNCDAFISLLKCVIGTGILAMPLAFRCSGFVMGTVMSILLMILLTYSIHLLIADMTECCRRRRVPQVSMPEAVRIAYEEGPKWINCFGRAAGFMTTCVLVFGQFLLCTVYLVFVSKNFKEIGDHYIERYNERYYVLVACLLLLPLFMIRRLKYLVPLNLISNFLLYAGFALIMYYLFNGLPNINDREMVTPPVEWIEFIAIAAFSLTAVGSMLVVEAHMAHPQSYLGLFGVLNLAVLFILLSNMFFGIIGYWRFGDNVHASITLNIPQDEILSQFIKVFIASGIFLSYPLNGFVVITVMFSDYENSEPRGRYRTLIEYVVRLLFLFLTGAVAIGVPNLAALTELEGAFSLSNLNLLCPALIDVFLNYNVGYGRLMWKLIRDILLILIGLIFGIVGCTVALMQLIRDFQLTLNSM

SEQ ID NO: 29521 - DNA, 2527 bp, DROSOPHILA
acgaaactttgctcaagaatttttggaatgttgcacaaatatgcgcaagaatgcaggaaaatatgtttggaccaatgcaaacgtgattggccgtgggagggagagagagatggctagaatgggaaagagacgggtagagatcgactgaagtggcagacagaagctcgttcaagttgctgttgctggcttatatcaataattgccaaaagcaaattggaaaagttatgcgcctgcagttaatgcgaccagcggaaatagtcgcagtcaaaatggcgcaacaaccaaacggaagtgccccaaacgcccacacccacacacacacacacacacttatgtatgaatatccaaagttgttattagtattttagtttcggaaagagtatgtccatttgttgactaagttcgtggggtaatattcaaactttgtgtacgatattcaaaaatgtgtatagtttagtattggtatagttagttattttaaaacactttttcgtttatatattcaattaacttagcataacgaattcatagtagccccaaagacataattaaatcattgataaatttacagtatttgctcttcggcaattgaaagctgcggcttcccagacgatttcttcttgttttgtttcaaaattttgttttgcaacttgtgtattttttccttttttgggtgagaggaaaacttgctggcactcgggatttgttgaagcagctcttaagatacttttggtatgccaattggcattcggtatcgatttggcttctgcttggctcggcttggcttgttactcttcgctattgaaacttgttcaggcttttggccacggaaaccgcgaatttcgctcgcctcattgagttgatattcgcaattaaaatgattcccaagctgccactaatgatcgaaagatgagtctataaaagcggcgctgctggccagataaaagcattcgaatttaacaaaatgaatcgagttctagtgctattgctggtgcttaaaatgttcgctttgagcgaggtgagtttgggttaaaaaaaaaaaaaaacaatgggatttgcttataaaagcacatcttctgtcagtcccgtttcgccaagataaacatcaatctgggactaaccgtggctgatgaatcccccaaaacgatcaccgaggaaatgattcgcctgtgcggagatcaaacggatatatccctcagggagttgaacaagttgcaaagggaggacttctcggatccctcggaatcggtccagtgtttcacccattgcctctacgagcaaatgggtctcatgcacgatggtgtttttgtggaacgcgatctattcgggcttctttccgatgtcagtaataccgattactggccagaacgtcaatgccacgcgattcgtggcaataacaaatgtgagacggcctacaggattcatcaatgccaacagcagttgaaacaacagcaacagaacttattggccaccaaggaggttgaggtcaccaccacaccagctggatccgatgaaacaaaaccttagaactttgcacaacacttggtggtgggcttaaaaattagaatataactatatgaacattaaatgaattaaaaattttaatggaaattgttgcgttaggaaaagtcttgattggtgtctttaccattaattttaagaaagtatgttgatgaggtcctgcttggcacgactccacttagcaaattgaacatcttggacagctcccgatccaatgcgccgtttgatatttccatatggccaaagtcggacacttgactcgacggcgaccattagcgtttggtggtgttccgattggggatttttccggcggctgctgcggttacttcgcttttctatggaaattttgccacttaatgccgccgacgaaggcagcagcattgttagctaagcgcagttcgtggtgcacacacagatgtgtaaatgacgctaatgccagatcgaagttgcgagttggcctcagactccacttaagaccacccaaaacccaaaggccacccaacacacccaacatttttgcccacttgtctgcgatttcgagtgcattttgtgcggcaattattttctgctcaatactcggcaaacgcgccacttgactttaaattgtcgccagatgctctgtgaccaccacctgaactctcgactcagcctgactcgactcgacgcgactcgattttccatttccatttattttgcggtgccacgcccacttggctgccttttaatttgttgcctgcgccaattgttaagcaaaagtggctaatttgaaattcttttgagcgaagtgcgcacatttttgaatgtcaactttccggcgtcttcccgaatgcactgcacatttccaccccccacaccccccaccacttttcccgccctcattttcacccagaaaagcgggcgagcgggaaagcgggaaaaccgtccgtctttggtggctttgtctttgtctttgtgtcacgcggcatgaaattgaattttcggtctgcaccgccagcagaagcgacaa

SEQ ID NO: 29522 - DNA, 462 bp, DROSOPHILA
atgttcgctttgagcgagtcccgtttcgccaagataaacatcaatctgggactaaccgtggctgatgaatcccccaaaacgatcaccgaggaaatgattcgcctgtgcggagatcaaacggatatatccctcagggagttgaacaagttgcaaagggaggacttctcggatccctcggaatcggtccagtgtttcacccattgcctctacgagcaaatgggtctcatgcacgatggtgtttttgtggaacgcgatctattcgggcttctttccgatgtcagtaataccgattactggccagaacgtcaatgccacgcgattcgtggcaataacaaatgtgagacggcctacaggattcatcaatgccaacagcagttgaaacaacagcaacagaacttattggccaccaaggaggttgaggtcaccaccacaccagctggatccgatgaaacaaaaccttag

SEQ ID NO: 29523 - protein, 153 aa, DROSOPHILA
MFALSESRFAKININLGLTVADESPKTITEEMIRLCGDQTDISLRELNKLQREDFSDPSESVQCFTHCLYEQMGLMHDGVFVERDLFGLLSDVSNTDYWPERQCHAIRGNNKCETAYRIHQCQQQLKQQQQNLLATKEVEVTTTPAGSDETKP

SEQ ID NO: 29524 - DNA, 2153 bp, DROSOPHILA
tttaactggtcattgaaaatatctatttcatttttaacttcgttttagtcaagcaatcagtttatgcataccttgaaaataacattagaaagttgaatttgtgcgatgcaataaatcttctgtttattcaaccaagaataatcggaataaattaaaaaaatattctgctgtattagtaatatttattacttgttatttaaaagatttcctcaaaataactgaaatttgatatgaagtgagacttgaagaatatgttattcgctttagttttttatttaccttcggctgcctcttctgttttatgtccattcatttcattcagccgctggccagcccgattattgcaatttttcttcattaactttttccgggaactcatcgagctctcaataaacactcacaaaagtctgctggccggtctttcaggacctcggtgtattcatgccattgacaaacgaaggccttccatctggaagaccgcaggatggttgtgcaaatgtaaaatgtttgaatggggctcgagtgtggccagatcacggttgagtgaattgctaagggccggcgcctcatgagtgtgaccacagttgcgattgcagcaagtgctgcagttgccattgcagcgagtttgcttttgggttaaggcaacgctaacgagcaaaagttgggagttcccttaaattttgctttcattcctctctactggccagtctccggtgaagttccctttctacttctatcaggaagtttttccacgcgaaaaccccatctctctgccgctcctagacggcgaaaattgcaacttttgtgtcaagcgctaaaattacagcgcaaagaatgatgcaaaggcaacaaagcgagagaagcgaaagaagcgccagttaaggggtgtaaaatggggcagagtgttggcttttagctcggctttaagagctgtcatctcgtgcgttgcctgctgtgtgcgtggcagcgtttgaaattacacccaaaaggacaattaagcatgaagtatttatgtgccgacgcctcgccagctgaggaaccgtggcagcagcagcagcagcaggagcaacatcagcagcaacagcaacatcagcagcaacagcaagtggcagcgatgcgttgccatcatcctgttgtcgtcggagcggcctgagaaataatttcattatgcttgcaacttaatgccaacttacagttttacagcctggcagcttcttcttcatctttttcattactgctgctggccgcatgactttgctcttagttcttagccctttttagttgctggcggggggataggagcaacagcaacatagaaatcccgagctggacaagctccttaccacttctctcatccacggccgactttattatgcgagctcagcactaaattttattgtcagttcatgtcctgctaaattatgtagcgcggcaagagcaacagtaacagcagccgcatcacagaaccacagagaaaaaaatgtgggaatggtgttagggatacattagaatgaattgctaaaatgagggcctacaatatgtacactacaactacagtacagacggtgatgaaagttaatacaagcaatcataaataattgaatattttgttaaataccttatgcagttatatttcgtgtgtgcctgttgcatgcccacacatactcccactgtgtcacacttatttctcgctgtgtaagcgcataaagtcggccagtaagcaggacagcattatcattgtaatgcattttgcttagctctgacttgacttttatgcattcgcgagcactcaacaagccggcaaagggcggatagctaacgttctgaaccttattaaaacccatcaaagccggaatccgaaacgctcataagacattggtgatggggtcggggttaaggatgaatgaagggaaagggaaagggaaaggtcgagtcgcgaaatgccttaattaacatttgtcacgccggttacaaagccaagttcgccgggtctgattttgcatacaggcgcgtaaattgaattgtgcattgacctgattcggaaaatggaatggaaaatgggtgtgagattgggattgcgaaagggatgcgagtggcagagcacaaatttaagcatatttagtaaacaattttaattaaatgccaggccgcag

SEQ ID NO: 29525 - DNA, 153 bp, DROSOPHILA
atgaagtatttatgtgccgacgcctcgccagctgaggaaccgtggcagcagcagcagcagcaggagcaacatcagcagcaacagcaacatcagcagcaacagcaagtggcagcgatgcgttgccatcatcctgttgtcgtcggagcggcctga

SEQ ID NO: 29526 - protein, 50 aa, DROSOPHILA
MKYLCADASPAEEPWQQQQQQEQHQQQQQHQQQQQVAAMRCHHPVVVGAA

SEQ ID NO: 29527 - DNA, 9835 bp, DROSOPHILA
taggcaatgcataagagaaattgtttacattaaataattacgtatattcattaaaaacagagcaaccaaaatgcgtttatgtcatattccgaatatcaattaaatttaatataggcattcaataaactttatgtttatagctttccaattttgagtggtgcggtgaaatgtgaaaattttcagacctaggcaacacttaaaatacaattaaaattaaattaaaattaagaaaataagcattttcaccgttttctgttttctctcgttttgtttaaaacatattttgcacttttacttttttcttgtatttgtgtttctatttactgatgctgacatatgaaactaattacttattataattctttacatgtacatatattttttctagcttttagttttttgtttttttttttattttgctttttttacattttcattttggcagtgtatgaaaacaaaattattattaagttactatttttttttgtttttttttctagcaaatgctggatttttgtcgctgctttactaattaaagaaatcagcttagctttggtaaattgtacacaatttttgctgtttgttcagaacttgcggctaaatgataggtgtgaatggggaaatgtgatcaggctgctaaagcttaaacttattcttaacaaggcattgaaacaaatcgaatttgcaattgaaacgataacgacgataaccatacgataacgaaaacgataacggcgacaataatggcaacacaaatgtcaatcggaatcagagaacttgagtttccatctttgtgcttgtgttgtgatgttttccctagttggttttttccttgattactttcccacccctctatgctccacgaataaagtggttttgattagcgttacgcaagtttttcatcgttccttgatggcacacagtttccgctggattcctcctcctcccctctgcctctggattttccggctcttccggatggccctgcttaaatctcgcctcacatgtggcgcttcatgtgcagcgccaggtgatcggacctcgagaagcagcgatcgcagttgcggcacttgaacggcttggcacctgtgtgcttgcggtagtggcgggtcagctcgtcgctcctcgcaaacctccattcacagccctcccaggagcacttgtacggcttttcacctgcaacgggaaggaagggcggaaaactcttattaaataagttacattcacaatggcaaaactaaagtgtgcacaaaaaacgtataacaaatcgtaggtctagagaatattatattatatatagtctattttatattatatttatatatattataacttatatatatataaaaaaaaagaaaacagtgatcaatggcggtgaagtagagccttcccgatgctcaggcatcgccatattcgggtccattgtttatggtaagagcaaatatccttccgaatcaagaacattttttccagtgtctagaaactgccgcagtggaaagtggctgcaatttctccgctgcttcgctgctgcagcacaaacaataaagcgcataaatatgcgtgctctgggaggaaaaaaaagggctagagtttggggaaacattttttatttagcacgcgcctgccaaatgaaaaaactttttcgacgctgccgacgctccacggacgagaaatatgcataaagtaaaacatgagtaaacagaggggcggtggaaaaacgcggtggtgaagcgggcaaaacgcacaagcagtcaggaatttaagacaattaaaaatgaaaaactgtaaaattaaaaccgaaccaaaacgaaacggaacgatacgaaaagatgctaaagtcggcgtcgacggtgtgccaagcgcggtcctttgccaacatttttcatgcgtgccaaaagcctcaaaggatacaagccgagtagcgccaaaagccaaccagtgcaggatcccgaaccagaaacagcaactgaaactgaaacagagccagagccaaaaccagaatcaaaagcagaaacagagccatggcgaaaaccagccagccgaaaggaaaaggaaatgcagaagttgtaatttcacacaaagcaacaaaaaacgaagaggaacctaaaaatgcgagggccagagcgagaacgacctgaatagagcggggtgtaaagccggccagtgccagaacgaacacactgaaaaaatacgaaaacccggcccgaacccccgaaaaaaaaaagaaaatgggaaaattatttcagtttaaaagacaaacagcagccgaggcaggaaattgccgccgttgctgccgctggagaagaagaaaaaaaaaagatggaaaatggagcgagataaccggcaagtagacgacgacagccaagaaaaatgcataaagctgagtggaaaactttgtaacgcataccatacacacacacacacacacacacacacatagacttggcttaaaacttaatgcatgcggaaatgtgtgatatttccgtgctcaatttcacattatgcacttgcggctttcctcccattttcccgctgccattttccccagccttccaacccttccgttgaccggggcttggacttgccggctgtcttaatttccatttgtttacacttggccatagctcaagtcgcaactgtgcgtgtgccattggatgtgtgttggtgagttcttgataaatttgtccgtgaacgccctcgtattgatcatactcgtattaaacttttaagttatttatagcttgtaagaaattctagtgaatttattggggaaagagttgttaactcatttttaataatgtttgttggtgaacaagcgatataatgttggtgaatttactaataaataaatataaataataaatatatactaataaatatattcaattttctagctaaatgtgttcttgatgtctttagtttatacagggaaacctctttaagattgctcatttcgttggttctattctttagctaaatatgttgttgagttcgttggtgaatgccttggtgaacgccgactgtgttggaaagtgctgtatgtatgtacataggtacatctaatggaagcgagtgtgggtgacagccacttggactttggcatgttgtcagaactgtttgggaatcgaagcatttggcaataaataaaggaatgcacactcgcacacacatcgttgtctttggcagtttgttggctacactcctctcgctctttatcagtttttctctgtttctggccatccgcctctgcggacttccctgcactcctcctgccgcccctctggctgtgtaaatcagcgtcaaatgcacaaagtgcaggcccagagatctaggatgcgacccccaagagtctcgtattgaagtgcatttaaacggcaaaagagctggcagcaggcggtcggcaatccgagggccaaaagcagcgataaagcacccaaaatggccgtgttatctggccattgaagtggcccggcaaaacggaacgaaaccaaaaacgaaatgaaaccgaaacgagccaacaacaaaacgttagcgatgcaccaataactgactaattggataccctctttttgtaaagcatttaaataagaaagttgttaataaagtgctgtgtggtaaattggtcttaccaaacgagtaaagctttgggaaatatgttttccacgagtaaatccaatttggctattgaaattaaaatatactatttacttagtataattcatacaaccggcatacccttttcctaccctctttgaagcacccggcggacctggcccaatagttgcccattactcaggctttggatattggccatttcaacgggccgggccctaaagtacgtgtatgcaatgaccgcgcatgtggagcaagatggttttccgctttcgcgtttttccgcccaatgcagcggcagccctttaattagttttcatggcaagtcatctgagctgagctgacattgttagccgcgatgcagctccacgggcctggccaaaacgccgaaaagccaaaaagccaaacagccagccaggcaatcggcaactgggttaagcgattttcgcctgcttttatttcctccaatcgcgccgagacgtcgccatgttaatttattgagccgaacgcagttaaaacttaacctcagccgtttgtccgcatatatatatatattgatagtttcagctgcgattctgtggcactggcaggccataaagccagcacttgtaacttgtttaaaggcaataaggaggcggccacgatggaggaccgccaatgcaaccgcttagcaaaataaaaaaaaaagtggggaaaaaggagcaacgaatggagccagttaatattttataaatttcacttggcgctgggttttaatttcgcccggcaataggaaagaatgcaccggcgggacatgcgatgtggaaaagcgtgggagtaggagagtgatgttgagggcggtcgggaaatggctgaggaatcccttttcctcggtggctcgcctttttatggagctgctcgatgccttctcggcttttgcactcaacacaatttttatggtctgtttgcgtcttttcacttgattgcacttgtaatcttttcttaacggcttcggcgtctcggcgcttttcctggttttgccggctttcccggcttttcccgactctgcttgcatgccacgctggcacttttatagtcgcctgcgtttaactaattgaaatcgtttgtggccaaagtttgcgaggaggattttatttcgccaaatgtcgctttaattgatattcaattgggccgataaatatatatatacgtatctatatctatttggtgtgtgtgtgtgtggccagtgtgctcgaataggtttctaattaaatggcgacgggcagatgcaaatggaaatgggaatggatggatggcaaaagccacaggaggaaatgcaggaagtgcgctcgaaaacccaaatcaaattaatttcactgtctgttccgcccaaattccccgggaaaatgttcaaggacactgtttggcaactaaataatagctcgtcatcaattattcgcatgcgtccgcttttcaaatgcgacaacatttaaagaatcctccatctaggcgctctaatgaaattctctgccgagctgagcttcatttgccatgcaaaaaacgtaattcattaggttttctttaatttaaaaacctcgcctggtctccatggtatcattaaaataattacgttttcctttttccgcccgactccgcccattcataaaattcttttttttttgcccgtttttcgccgagcttttccgcatttcggtgccaaatcaaatgtttcaatcttatcgtcgggccaacaccttggcttttgatttattggtctcaccgggtttttacctatctgccccgctgcacttgccagtagttgaacatgtgtaattaattaaaaactcctcaggttcaaggaacactatagaacttttcctggcaaaattaacacttaaagctgttgaggcaacaaaacaaggcgccaacagcaggaagggcccttgtagtccgttcacttcacttcagttcagtttggctttggcttcggttttgcccaagataaactgagagttatgagcaaaaactttgactgttatggatttttattgggccaaaggcttttggctttcctgtggcaagggcaaacaacagcggcatcaggtccggaattcgatgttaattaaaatgttaagccccagcagcccggggccaaagtaaatttataaattgagcaatatcctgcggccgtcacagaaagttgctgctgttgacactcgccaccaagtggcatgatgggcctaagccttgagctgcacatgaatcttccttatggcacgccttcaaggggccatttcggcagtaaccgagcagctttgaccaacattcgggcactggacaaacaaacccacatagacatggccataaccatacacatatagccattgtcgacttgagtgagaaatttgcgaggcctgaatttcatttgcggaccaaacatgggctgctgggctggcaaagaacaaaatgcgacttgggaacacttgcatgcataagtaaacaaaaacccacccattcaggctgctctttagccagggtatcatcgattcggcaccgctgcagaaagtcagccttcttgcgtatgaatgggtttggcaacggcattgcaaaatcatttgcctggcatttgagtgcgtgccaaatgatttgttggtgccacccctgcggtgccccaagccgaaaactgacaagccaaaacaaagaatgaatctaccacaactcataaagcaagctcctagttgtgcagatggaaaaatcaggcatagctctcagttttcatatggtttcattggtggtacatatgtactcttatttttggacatgctaaaatgttctcctagctatcaattgaacttaaacacttttgaaattaggaaaaaccattcattcacccccatcgatatttttttttttctgagtgcacaagttttaactgaatgcgcacaaatgttgttcgccagcaactgcaaaactgttttttttcccaatttttggcagaacttgaaatggattttggttttctattttatgggttaagtgttcgctggcaaagctcttgtaagcgcacacgcagacaaccaaccgttgtggagcccaaatcaatagatttgctctctcgtgttcgaatgtggttgtaataaaattacatttcaacgcttgctgcacgagtgtgtgtacgtgtgtgtgtgtgtgtgtgaccaatatttcatgtttgaattatgcgatttttattgaaatttcaaacatcgtctgctgtcaggcgatgaggttgtttttggtgcccaattgccggtgccccaaacccagtttggttcctatccggctcctgcccctgctccattcatcgtttacatcatccagcccattgcatgtttttgcgtggttttcctgccgcgactgcaaggctgtggaaagtggagcctggacaaaggacggtgtcgcgcaaacaatgcaacatgtcactcctgcctgtcccagggaactctgtcgaggacattgttgtcgcaggcctctgatttattgggcaggagcaccggtggaagaggaggaggagcggcatgggcaggggcaggtggtgatgcaggtgcgttggggattcgtcggcccctttcccggggcacacgcttttaattgccgactgtggcagttggaaattcggatctgtcagtggcacacacatcgcacacacttccactcaccgcactcattcagtgcattcatatttttcggggcgactcacctgtatgcgttctttggtgggccttcaggtgcgaactcttcgtgtagacttttttgcagccgagaaattggcacttgtgtatccgccgcttggcgtccgggctgtgatcgctgtgatgctggcgcgggtggtgcggtttcgaggagcctgcgggtcacaaaaaaacaaagataaggctttgaactgggtcaagtactagtcaaactcaccattcgccgacttttccgaccgttgcgaaagcacctgttgctgcggcgtcgctgtgttgatgctgttgctgctggtgttgctgctgctgctgttgctgttgctgttgctgctgccgctgttggctgctgcactgagcacggcggcaacattggcattgccgttattctgcatttggatgacccgggccagactgatgccagccgctcctggcttcccgttggccgtcgtcaggcggacgatggtgctgcgcggaatgttgctgtgtgttggctggtcgctgctgccgctgatgctgctgctgctactgtggctgctactgctgctattgctgctgttgctgctactgctgctgctgctcttgggcgaattgctgccgatgttgctgtggccaagggcctgtggcgatatgctcaaatgctggacggccagctgctgctgctgctgctgcagttgcgtcattgtgggattgctctggctggtgaagcgcaggattgctgtagcgggtgtggagttgccgggctgtggattgagctgctgctgctgctgctgctgctgctgttgctgttgctgttgctgctgctgctgtatcagtgccgccaaatcgttggcctccagctgctgggcgtaattgtggctgcgcaggttggactctggcgaagagggcggcgtgagcgtgggcaacacaaagtcctggacatgccccaggtgcattctcgcattgctgcccgggtgattcttggcctggacgacgcgcaccttgatgcccggcgccgaactgttgcgggaactcactgtgatggtgctgccactgcccagactgctcagcgggctggcgatgatgttgctgctgccggtggtgttgccgttgctattgctgtggctattgctgctgctgatgctgctgctgttgctgatgctggtgggcgtcatgttgcccgcactgccgatgctgggattgggagagatggccgagggcggagctgcgagcagcacgctcagcttgtcgtcacagcccacatcgtcgtcctcctcgtcgatccgctcctgcttgaccagcaccgagcagctcagtgcctgggaaccattgctgtcccaggaggtgcccgagcagttggacgagaccgaggaggtcgtcgagatcgtgtccaggtgctgctccttgatcttcagctcctcgagcaggcgggcgggtgtggagaatatgtcccacggattgtccagattgctgtgcatcttcttctgcagcttgggctcatcccgcagatagcgctccagttcgtagcaggtctgcgaatggaggaagcaaaaaaaaagcgaaagttcatgaaagtgtgggtccattagggcggtaaaagcggcaagggcgtttagggtggctaatggctgctgtggcccaattcaatttgcctggcttacacattggcagcattttcgagcacattaagctgataatttagggacgctgcccgcggccagaaacataaacataaatttcaaattatgatttatgcctgccgcaattacaggtaataattttgcgcattggatttattgccggttgcatactttcgggcgcctgactttgcctaatggaggcgacaattaagtgcacatgaaagagggccgccaggtgacttgctggagtgggtgcttcagtggctgactgggcggttcgatggcgggtgggtggtgcgccgccggcgggcggttcctttgatctgcgctccactcgagcggactcatttcgcaactcgttgcaagtggtgtgcgcacggtaaacagcaaactgcaaacatgccgccggcacttgccacgccccttcgatgcactgctgccaataaggggcgggcaccctgggaggggggaagtgactggggaatttcggtggcctgtgaccctcttaaagtcacccacgacagccacaaattgaacacatgaacggcaatttgcgctgccatttgtaggggaccccttcaaattcgcgggatgttccaatttgattggggctactaacaaatcttattgagtgcgatgcaaagcgcagaaaaccaatgagtcggaataagcagccgtatcagcagaagggtcgaccggagcccgctttgaccatttttccgaatctcacacatgcccgccgcgtaaatcactttaagtgttatttcaagaaaataattgcaacacataaatttgcgctaccctttctgccacaaatgtagcactgagctcgagcccagggagaacaggggaaactataatggtttatgaatcgggataatggctgagggtctctggatc

SEQ ID NO: 29528 - DNA, 1548 bp, DROSOPHILA
attcgcagacctgctacgaactggagcgctatctgcgggatgagcccaagctgcagaagaagatgcacagcaatctggacaatccgtgggacatattctccacacccgcccgcctgctcgaggagctgaagatcaaggagcagcacctggacacgatctcgacgacctcctcggtctcgtccaactgctcgggcacctcctgggacagcaatggttcccaggcactgagctgctcggtgctggtcaagcaggagcggatcgacgaggaggacgacgatgtgggctgtgacgacaagctgagcgtgctgctcgcagctccgccctcggccatctctcccaatcccagcatcggcagtgcgggcaacatgacgcccaccagcatcagcaacagcagcagcatcagcagcagcaatagccacagcaatagcaacggcaacaccaccggcagcagcaacatcatcgccagcccgctgagcagtctgggcagtggcagcaccatcacacaatgcgagaatgcacctggggcatgtccaggactttgtgttgcccacgctcacgccgccctcttcgccagagtccaacctgcgcagccacaattacgcccagcagctggaggccaacgatttggcggcactgatacagcagcagcagcaacagcaacagcaacagcagcagcagcagcagcagcagcagctcaatccacagcccggcaactccacacccgctacagcaatcctgcgcttcaccagccagagcaatcccacaatgacgcaactgcagcagcagcagcagcagctggccgtccagcatttgagcatatcgccacaggcccttggccacagcaacatcggcagcaattcgcccaagagcagcagcagcagtagcagcaacagcagcaatagcagcagtagcagccacagtagcagcagcagcatcagcggcagcagcgaccagccaacacacagcaacattccgcgcagcaccatcgtccgcctgacgacggccaacgggaagccaggagcggctggcatcagtctggcccgggtcatccaaatgcagaataacggcaatgccaatgttgccgccgtgctcagtgcagcagccaacagcggcagcagcaacagcaacagcaacagcagcagcagcaacaccagcagcaacagcatcaacacagcgacgccgcagcaacaggtgctttcgcaacggtcggaaaagtcggcgaatggctcctcgaaaccgcaccacccgcgccagcatcacagcgatcacagcccggacgccaagcggcggatacacaagtgccaatttctcggctgcaaaaaagtctacacgaagagttcgcacctgaaggcccaccaaagaacgcatacaggtgaaaagccgtacaagtgctcctgggagggctgtgaatggaggtttgcgaggagcgacgagctgacccgccactaccgcaagcacacaggtgccaagccgttcaagtgccgcaactgcgatcgctgcttctcgaggtccgatcacctggcgctgcacatgaagcgccacatgtga

SEQ ID NO: 29529 - protein, 273 aa, DROSOPHILA
MHSNLDNPWDIFSTPARLLEELKIKEQHLDTISTTSSVSSNCSGTSWDSNGSQALSCSVLVKQERIDEEDDDVGCDDKLSVLLAAPPSAISPNPSIGSAGNMTPTSISNSSSISSSNSHSNSNGNTTGSSNIIASPLSSLGSGSTITQCENAPGACPGLCVAHAHAALFARVQPAQPQLRPAAGGQRFGGTDTAAAATATATAAAAAAAAAQSTARQLHTRYSNPALHQPEQSHNDATAAAAAAAGRPAFEHIATGPWPQQHRQQFAQEQQQQ

SEQ ID NO: 29530 - DNA, 3661 bp, DROSOPHILA
gccaacacaaatcagatggggggacattacccactagatcttaacaaaaacaaaataaattgttgaattcgagtagagaaattattaatcaagattatgatagcggaccaatttgcgtataagatttgtgaaatcaatttagataaattatcttggtttgccatagacctggacgattacgacgatatgccagccttagttgagaattctagttagcctgcctgtgctttgggttctgcttggtgttttactaggtttaggtacgtttaattgtgaacagcaaactgggttttgactattcagtatgtgccgtatattggataacattctctgcatacagtacacttcactaatgcgtaaagttacttagttgcatacgaattataataacaatgaattgtaatcaaaacataatacattttaggtgcatgatttaaaatacaacgaataaatatatttacaccgaaattcttttctaattttttcttacaagtatatacacacactatatagatctatatacatagatatataaatatattagttgtatacatattaaattagattttacaagattcgaaaaccgaatatttaattatcgcttacattcaattaatacgcaactcacaaatgagcgcccactgctaataatattattattaataatcgcctgagcgccaagttgtaaatataaatgatcaacaagttacatataaaaattatatccgattttttgaagggccggcatcataataataacaagcaaaatataaacagtttcgtggcctacttaaaagatcttattgttgaagatttatcttaataacacttatcgcgcaaatgagattaagtacatgcaaaataatttaaataaaaatttaactatgacaaatcaaaaaatgaaaaaattgaattatttgccgaccataaatggtctctaataaactgggtaaaaatctcggacattacacttaaattacaaattgtttgtttgcggccgctacacattatcaatgttattatcctcgtgatcgtcgaccagcgtgaatccttcatcttcagctacacagcttttgctcttgcttttgctgctggaatcgctttcatctaaattttcttttttcgatggtgtggtgggagcttcctgcttttcctctagctcttggacgcccgaaacgtctggaattcgctgtagcgactcctttggaacatttctcacgttaattacatttagcagcatctttaagttgtcgcccgatatggagtcgccttcgggcgcccgtgcattaatggactggtgaatcgttggtgtcccttgtggcgctggcttgtgtaaaagtgacgcccatgctcgggggcttaaaatgtatttaaagcacagctttatggtgtaacccactaaaaacaccaaaaggactggtgcaaggaggttatacgggaaggataatccggctatgggtaaatatggtaattaagtggtaagtggtaattattgactgtgcgaattcttggttaaatacttacaggacagtttagtcatagttaccgacaccttttctatcatgatttccaactgcttgataaatatgttattcatgtacataaagaacacttgatctggcatgcaaatggaaatgctgatttttgcggattttctgaatggaaacgatcatcaatcgacttatttaattatatgttatggtcttacttgatcatttctatcttcttagtttttggtgaggcttggtatatgtagcctaacagtcgaccaaaccaggacgattcaggctcatggtgatgatttacgacctctatcatcctatcgatgtctaattcctaattataaacatataatgagcacaatttcacacactttcaggctagacctactctgttgcattctaaataagtctgaatatatccgcacagaaacacgcctcctagtacaattgaaattagtccgacacggaaacgtttgtgcacaatgacgacaagtgcaattgctaatgttgcatataggataaatttcacctaggaatgagaaaacccattaaatagcaaatagtcaagtttccataaaaaggcgcaacaggtacctcggtcgtttgcgtcagttcaattacatccttgaaaatatccaccaataaggagaaaaagccgtgtcggacgtatgagcatccggatcttccattaaacaaaggagcctcctcggcactctccaatatcttagtcagcaaaacgtccaaatcccgagcatcctgcaccctctccagttcatccagttgcgatgggatcagggagaagagcagcgatcgcttatggaccgccgacataacatcgtactaattacacaaaagttacacacatatgacgtcatgtcgccaactttggtctaaacagcgatcatacctgaaaacgcttgcgctggaacagcagattgacgaacttcttgaagtatgtgagtgccacggcatcctccatggccactggagacacatctggacacgtaggacactggcacaattcaccgggctgattgatatcgttaaccaggtccgaccaggcgggatccggactcagccaggactcatcgttgccgctctgacagcataccctgtgcaataccaacaggaaacaactgaccgctgcctccgttctcattgtcctggtttctcaatgtaatcactcctaggtagtaagcactcgataataattataattcagcgcaatttcgtggtaaggcggctgatgcaaattggcagtgtgaccaagtccagttagcaacatcacagcgtcacgtcagtgctgcaatatctacttatcacttcaggaaaatgtagctttatatttattagacaaacatgcttttatgatttttcttcacttctactgcaaattgaattatttttattaaacatctttatcaaataaatcaaacaaattgttgtaaattgaccaagatcaaaaatcgtaactgcgaaaaacaaagcattaaaataaaataaaagctagactgtcagcaccaaagctttatgcgatcgctagatggccacactgcgtgttgtgaataactgtttagccaggtcagcactgcaccaataattgcaagctttaaaaccgaaataaaaaccacgaggaaaatggttaggtcagctctcgttgttgcagccatcgcactttccgtacttattgcactgcagggcgtggatgccgacaaaaagcagagcaagaagtacagcaaggaggccaacgacccgcattttcagcaagtaaagcaggagaagtatgatccggattttaagagcatccagcggccatttcgcatggccaagttgaatctcgtgtgggccaaggcgcagaatgtaagtggacaccataagatatctcatatttaaccgtactaacctcggttacagcgcttaacagagcccaagctcaagtcactgtacatggaactcaagatccacgataaggaggagatcgcttggaagcagctcaactcgcagcacaaggacaaagacgggctgaaggccgacgaactgcgccgcaagctcattggcatcatgagcagctacgatctgctagagcattttgacgacactcaggatacggagaagcttaagccctacaaggtacgtatctaaatcatctttcctaagag

SEQ ID NO: 29531 - DNA, 825 bp, DROSOPHILA
atgagaacggaggcagcggtcagttgtttcctgttggtattgcacagggtatgctgtcagagcggcaacgatgagtcctggctgagtccggatcccgcctggtcggacctggttaacgatatcaatcagcccggtgaattgtgccagtgtcctacgtgtccagatgtgtctccagtggccatggaggatgccgtggcactcacatacttcaagaagttcgtcaatctgctgttccagcgcaagcgttttcagtacgatgttatgtcggcggtccataagcgatcgctgctcttctccctgatcccatcgcaactggatgaactggagagggtgcaggatgctcgggatttggacgttttgctgactaagatattggagagtgccgaggaggctcctttgtttaatggaagatccggatgctcatacgtccgacacggctttttctccttattggtggatattttcaaggatgtaattgaactgacgcaaacgaccgagccagcgccacaagggacaccaacgattcaccagtccattaatgcacgggcgcccgaaggcgactccatatcgggcgacaacttaaagatgctgctaaatgtaattaacgtgagaaatgttccaaaggagtcgctacagcgaattccagacgtttcgggcgtccaagagctagaggaaaagcaggaagctcccaccacaccatcgaaaaaagaaaatttagatgaaagcgattccagcagcaaaagcaagagcaaaagctgtgtagctgaagatgaaggattcacgctggtcgacgatcacgaggataataacattgataatgtgtag

SEQ ID NO: 29532 - protein, 274 aa, DROSOPHILA
MRTEAAVSCFLLVLHRVCCQSGNDESWLSPDPAWSDLVNDINQPGELCQCPTCPDVSPVAMEDAVALTYFKKFVNLLFQRKRFQYDVMSAVHKRSLLFSLIPSQLDELERVQDARDLDVLLTKILESAEEAPLFNGRSGCSYVRHGFFSLLVDIFKDVIELTQTTEPAPQGTPTIHQSINARAPEGDSISGDNLKMLLNVINVRNVPKESLQRIPDVSGVQELEEKQEAPTTPSKKENLDESDSSSKSKSKSCVAEDEGFTLVDDHEDNNIDNV

SEQ ID NO: 29533 - DNA, 4002 bp, DROSOPHILA
cgcaggagaaacgaggacatgacaatagagaatttggtcagtttggcctctttcatggccttgatgaggttctcggtgccgcgggatagctccgtggtagcctccagcttgttgcgggtgcccaggatgacggctaccgcatccacgccctcgataacgcgctggacatcctcgtagttggtcacgtctcccttgaccaattcaaccttggacttgaagcgttctggaactgtcttttcgctgcggtatagcaatttcaccgacagacctgaaaggaagaatacggtttaactggcgtttccgggtcttaaggtgtcacctacccttctgcagggcgtgatccacggcacactcgccggtcatgccggttcctccaataatagcaatgcgttgcataattcggatgattctttaattcccgtcgattgaaatgcgtttagtccagttgttggtttgcaaaagtgcagtctcacctgtgctccaggcgcaacttatctatcaaatttccaattcacaagtgaatccagcgcgattgcctcgcattctcacctcacccgtagcaatgaatgtacagtgctctttctaaatagtgaacgctcactgatctgaagcttctgtagaaggtaacaagatatttaacattcatttgtatttttattaagctacgaattattgctttaaaaatatcgtgttatttttgtctctatgcaaataatcttattttgtttattggttcattgcttctagttagcactgtactggcaaaacaatatgaatttttatatagattactgtcaggcataatgataaggtatatcatatctggcgataacaattttatttacaaacgctaatggtcatttgtcatggtgattaatattaaaattataaatacatttgcgaaaattaaaattaaggcggttgttctcagtctggcagccctgccacttggttcagtgtggtaaaatgcggcgcagttgaaagtttaaccgccaaatcgttacgcctgcgactccgattcctcggaatacggattatccgccggattcttgacccgtctcagtgttattcccagcttcagttcacttagaaagtcggtggtcaccggcttacgttctggacgcggcttaatgccacttatggtggctgccttctgatccactttctgcaagaatcgaagaaggattagatttccaatttaaatgggtgtctacttttaataccttcagctttacgccttgtcgaatgctctccaagaacgcatccctcgggtctccgccggtggaggcagctgaaacagccttgggctgtgatttctgcatcggaggcggtggtggaacgccggccatgccacttgatggaggcggtggtggaggaggagcgcctcccgcgccaaaaactggcattggtggcggtgctggtggaacacctgctggtggcgctggaggcggcggtggaacaccaacggatgccgctgtaggcggcggtggtgaaactggcaccggagtactactaatctgggttttctgcgctgacagtggtgtcatatagacagccgaagatctagaagtcggcttggcaggagcagctggtggcgccggcttggcaacaggcgcgtactgcaccggggacacagcatacagtgatccgttggaaatcgtcgagttcgtatgaggcactattgttggctttggaggcgccggcggtggaacgcgcattgagcccactttccgttgcggtgatatggtggcgtacgtctcattcgctacctttggcgccacagatggcctcacttgacgaatgtcaatggccgctggatatccatgtgtgttcttcgccattaccgccgatggaggtggaggaaccttaggtttcacactctgctgaggctgcacttggacgggtatcacacttccgacctctgccggttgaaaaggagttggtgcagccggcgtaggagcaggtaagtccatatcggagatatccacaaaccgtgaagtaagcgaggcgtagttggagaagtttggtgcctccgttggcctcgaaatagtggctattggaggcggcggtggagacggcggaggagtaatctggttattagtggaaatggtggcatagagcagcggcctggcatgatcttgaacttttggctgcgcctgaagatcactttttggtggcttaaaaggcaaatgttatattaacagcttccagttaatttcaagacctaccatccaagtaaaattggagtgaatgatcttcttgatcacttcttggcgccgcatgtcactaatgtccgcctccgtaatgccacgctccatcatgtacttcctcagcaccttgtcgttgggatcggcattcaggtcgaaggcgtttcgcgtgcgatcccgcgtcacatcgccggaaacgtgctggaagttgactggtccgctaatctcgtacttggagcccttgctgctgaccaagacgctggtggcgaagctgggacccgccaaggccacagagggcggagcgcccagatacctgtccaggctgttcgaggaggaggagctcttcatgccgtctagactggcgttgatgctcacgttgtcggcgtagtgaggcggtggacgaactgctggcggtggatgtgcaaagacgtcgctgctcacttgcatagacggtggctgaaaggagaagaaaacggctgcgttcaggacaactgtggacaacatcaaggacactttcggctgatgaagctggcaagatgagatgctgcaggatattaccacccagtaaccgggttccttattgcttctaattatgtcatagacataggcgcgccgcacaatagccggcagacgttcaagatcatcggacaaatttgccttgcgcaggtacaactgaagcatttcgtcggtgccctggcctcgcagatcgaatgtcttgcggaagtcaatcgcattgccctccagctggcggaactccacgggctcggagatgtaggcgtatgtgtaatcctccatcgaactggaaaaacggatacgtagttggtagctgcgttattacggctgcaaaggaggtgccgcccattggcattgtcttggatctctccccgttgccgccgtgcgtccactgggcccagcggcattatctagtagccaatttgcagataagaactgctggcgcaacttggcgttttatcaatttcggattcggatcgcggtgggccttcacggacgtgactcatcgacggtcccagtcaccagttaaacaggctaataattattacgaaagcccattgaaacgagatggtggtctagaacgacagtaggcagcggcgatgagcaaggatcaattaccgtgcgcacctggaaacgctgtttgcagggattctgcaaatgctgaaccggatcagctcggctcgggtcggctggtgtgtttgaatggcacggagaaccttgtgggactgattaacaacgtcggtgtgccatgttaggcactgcgtttactcatttcgcgaggcgtcttatctgtaaccgaagtgctgaatgcagataactggcggccagtaatcacctgggccaactacgacgactccgactctgacagcctgagccaaaggaaaacataaacaaatggcgttaactacactttgcggtctacgatatgcgccttggctgtcagaagtctgcaaaatgttgggtaagtccaaaatttaaaaattagctaatgactaatgtgttgtagaagcggaaacggctttataaatcattttatttttaaagatgaatgcatatgcagggacttaaaaacacagtttcaaaatgtataactacgaacccattggtttgagtttctcattattgagatgtactttaaatcttatgtgatattagaaattaaaattcaaagcaatttaaagactacatttatattatacatatatattttacgatatacgtatttataatattcagttgattctcaggtcatttaagttataaacatatcggtaagttgtca

SEQ ID NO: 29534 - DNA, 1893 bp, DROSOPHILA
atggaggattacacatacgcctacatctccgagcccgtggagttccgccagctggagggcaatgcgattgacttccgcaagacattcgatctgcgaggccagggcaccgacgaaatgcttcagttgtacctgcgcaaggcaaatttgtccgatgatcttgaacgtctgccggctattgtgcggcgcgcctatgtctatgacataattagaagcaataaggaacccggttactgggtggtaatatcctgcagcatctcatcttgccagcttcatcagccgaaagtgtccttgatgttgtccacagttgtcctgaacgcagccgttttcttctcctttcagccaccgtctatgcaagtgagcagcgacgtctttgcacatccaccgccagcagttcgtccaccgcctcactacgccgacaacgtgagcatcaacgccagtctagacggcatgaagagctcctcctcctcgaacagcctggacaggtatctgggcgctccgccctctgtggccttggcgggtcccagcttcgccaccagcgtcttggtcagcagcaagggctccaagtacgagattagcggaccagtcaacttccagcacgtttccggcgatgtgacgcgggatcgcacgcgaaacgccttcgacctgaatgccgatcccaacgacaaggtgctgaggaagtacatgatggagcgtggcattacggaggcggacattagtgacatgcggcgccaagaagtgatcaagaagatcattcactccaattttacttggatgccaccaaaaagtgatcttcaggcgcagccaaaagttcaagatcatgccaggccgctgctctatgccaccatttccactaataaccagattactcctccgccgtctccaccgccgcctccaatagccactatttcgaggccaacggaggcaccaaacttctccaactacgcctcgcttacttcacggtttgtggatatctccgatatggacttacctgctcctacgccggctgcaccaactccttttcaaccggcagaggtcggaagtgtgatacccgtccaagtgcagcctcagcagagtgtgaaacctaaggttcctccacctccatcggcggtaatggcgaagaacacacatggatatccagcggccattgacattcgtcaagtgaggccatctgtggcgccaaaggtagcgaatgagacgtacgccaccatatcaccgcaacggaaagtgggctcaatgcgcgttccaccgccggcgcctccaaagccaacaatagtgcctcatacgaactcgacgatttccaacggatcactgtatgctgtgtccccggtgcagtacgcgcctgttgccaagccggcgccaccagctgctcctgccaagccgacttctagatcttcggctgtctatatgacaccactgtcagcgcagaaaacccagattagtagtactccggtgccagtttcaccaccgccgcctacagcggcatccgttggtgttccaccgccgcctccagcgccaccagcaggtgttccaccagcaccgccaccaatgccagtttttggcgcgggaggcgctcctcctccaccaccgcctccatcaagtggcatggccggcgttccaccaccgcctccgatgcagaaatcacagcccaaggctgtttcagctgcctccaccggcggagacccgagggatgcgttcttggagagcattcgacaaggcgtaaagctgaagaaagtggatcagaaggcagccaccataagtggcattaagccgcgtccagaacgtaagccggtgaccaccgactttctaagtgaactgaagctgggaataacactgagacgggtcaagaatccggcggataatccgtattccgaggaatcggagtcgcaggcgtaa

SEQ ID NO: 29535 - protein, 630 aa, DROSOPHILA
MEDYTYAYISEPVEFRQLEGNAIDFRKTFDLRGQGTDEMLQLYLRKANLSDDLERLPAIVRRAYVYDIIRSNKEPGYWVVISCSISSCQLHQPKVSLMLSTVVLNAAVFFSFQPPSMQVSSDVFAHPPPAVRPPPHYADNVSINASLDGMKSSSSSNSLDRYLGAPPSVALAGPSFATSVLVSSKGSKYEISGPVNFQHVSGDVTRDRTRNAFDLNADPNDKVLRKYMMERGITEADISDMRRQEVIKKIIHSNFTWMPPKSDLQAQPKVQDHARPLLYATISTNNQITPPPSPPPPPIATISRPTEAPNFSNYASLTSRFVDISDMDLPAPTPAAPTPFQPAEVGSVIPVQVQPQQSVKPKVPPPPSAVMAKNTHGYPAAIDIRQVRPSVAPKVANETYATISPQRKVGSMRVPPPAPPKPTIVPHTNSTISNGSLYAVSPVQYAPVAKPAPPAAPAKPTSRSSAVYMTPLSAQKTQISSTPVPVSPPPPTAASVGVPPPPPAPPAGVPPAPPPMPVFGAGGAPPPPPPPSSGMAGVPPPPPMQKSQPKAVSAASTGGDPRDAFLESIRQGVKLKKVDQKAATISGIKPRPERKPVTTDFLSELKLGITLRRVKNPADNPYSEESESQA

SEQ ID NO: 29536 - DNA, 3309 bp, DROSOPHILA
caactacttcatccacctcaaccacaacgacaaccacatcgacaacaactacaacgacgacaacaacaagtgagtgcccagataattttggttgtccaataataaactggacaagctatagttatgttggctacatagtgttgatctaagatcgctgcaacttgttcgaatagccatgcaaactggtctaagatgctggcactgacctagctttttggtttcgaccataaagatcgaaagtggcaatgcgaatacagccacaatagtgacaaagaagttgtctgggaaaaggtcactcaaagtgtaccgatggtggaataccctttgcataaatgagttagtttaggatctagaaatctagctacctatatatatttatatctgatcacttcaaagtttctagcatcagaactaagctgaggtgccaatcctggttaagatcgcttatccattaagctacttggacaatcaaaagtaaatgcaagattaattgcaaaactgcagataaatagtttcgccttggattcacaggtttcattattctgacaaattgtgaataaaaccagatatacccgtttgggattcgttaacgtagttagccataggtgcataggtaactggagcaccggagctttcgaatcggcttcggctgcatcaggagaccttggctaagtccgaactggagaggcgtatgcaaggccacgaattattggggcctaggcctttgccaatttgcatgatcgtgatcatgatcactcggctatagaattccaccccattttcggtcggggagggtctaaaattaaattaaatttaagctacttctccattagctacttttatgagctggaaattttaagtatataccatcaaattgctctcgaagaagatctcgttaacatagggagtaatgatctgggtagtatggccgttttcgcgggtgattcacttgcgtccacctgctgttgcaagcagccaagtagacaattgcgttgggtctatggagcgcatggagtgggtgggaaacgtttgccaacaggctgcgctattgctgatccattgttggcctggcttaataacgaaacagaagtataaaacaaaaaaaaaaaacaaaaaagccaaatcaaacgctcttcatgagcggcgggaactgcgctttacttgacgtgtaatgtctgctatttggagcagaaacactaatggtcattaagcacactggtaaacccgctttccacatccaatccccagctccgcgtcccagcctggccaacggcttcaacttctttaatcggaacttctggagtttcggccagcagagtctggtggcagtgcgtccgcccaccaagcaggcccatccgccgaaaaagtttagtcccaaggacgaaaagtccggccaacgaaaagtggccaagaccactaggaaaccgatggatcagagaacgagtacaactagtcgaagcgcaacaacaactagcacacaaaaacccactacagatggaccctttcgcattgcactgcccaccttgaacttcccacgcgacaaccaggataagaacagggatagggaaacggagaagggcaagaggtcggctgccgagctgcgcttgaggttcgattgtccgcgggagaacgaggtgaggttccagctattccccaagatctgcaaggcggatcgagactgtgccgtgtggcaacgggatgagctgtgctgtgatatctttggagcaagcagctgtgtctctggcgttccaaagccgctagaggagactccacatgctcgtaagtgggtttaatccttagctgctatagatattattcaatttattgctcttgctagccattctgggcttgatacctcgcaagtgcccgagtagaccgctcgccgagctctggtgggacgtccaggagtgctccacagacatggactgctggccaagggtctgttgcccggatgggcgtaggagatactgccgcacctcgcagccggagttggaaacagctccagtgccagtgaagcgatccttcgactatcgtaagttaaaagttttccgtatgataaccgaaatcaatcgaagccttgcgcttttccagttacagagtacctggagtgcacagccccgccgccgcccatctttgaccttcatcccaaggcgtgcacctccaccttggattgctttccgaatgtgtgctgccaggaggcgggactgcgccactgccggccgcccaagaagtccgtgctcacactgatggccaactttctcaacgtggacttcgtgaagcgactggcacagaatatcgttatcaagtagggcgaaccgtgaatttcccactatttttcaacgtgcgtcgagcaccttcgacagaaccatttcgaaaccgccgtgaaatctcgcccgggtttgtttggccacgctgataaccaaaaagaagatatgcccacacccataccattcatagacatacatatgtatgcacctttgtatactgcgcaccccatccattcgtaattctccattaagtattgttcacctagcctagtattagacctaagctgcattcgtaggctagcaaagtaaataaagtatatatgtatgtatacgaaccataaactccatctgcggcttttccactggaggtctgaggtggaggtctcccgtaaccctacgcctcctaggtcacttcacccgactgccgtggggttcttgttcttgacttatttcgttggtatatcgtttatatgccgggttcttacactttcatgttaattgcgcgatcatattacatctaaaactatatggcacttttgcgctataaacgaggcatttcacaaaacagactgagcaataataagtctacaatcatatatttctatgaatcacctataaaataatggaagccgatttaaatatgaactttcattacccatttcgttgttatgcctaaaatcgttttaaatttgatagggtaatatatttttattatttctaaagctagtattctttaatattatccattcgatagcggctatattctaacgcccgcaactgtatttttatctacaagtcatgagttcaagccgctgtgctttgaaactcaatccctcagtcgcttcagaagtgaggcatctcagattaccatattgctcaactgactttagtgttatgtacatatgtatatgcacattgtggaaaacacttgaccatcccatttccacgacgcatattgccgaccacgtagctagaagctacctccaataaaagcgaatctaacctagaatgccgcagaccaattgattatgcaacccgaaaa

SEQ ID NO: 29537 - DNA, 1005 bp, DROSOPHILA
atggagcgcatggagtgggtgggaaacgtttgccaacaggctgcgctattgctgatccattctccgcgtcccagcctggccaacggcttcaacttctttaatcggaacttctggagtttcggccagcagagtctggtggcagtgcgtccgcccaccaagcaggcccatccgccgaaaaagtttagtcccaaggacgaaaagtccggccaacgaaaagtggccaagaccactaggaaaccgatggatcagagaacgagtacaactagtcgaagcgcaacaacaactagcacacaaaaacccactacagatggaccctttcgcattgcactgcccaccttgaacttcccacgcgacaaccaggataagaacagggatagggaaacggagaagggcaagaggtcggctgccgagctgcgcttgaggttcgattgtccgcgggagaacgaggtgaggttccagctattccccaagatctgcaaggcggatcgagactgtgccgtgtggcaacgggatgagctgtgctgtgatatctttggagcaagcagctgtgtctctggcgttccaaagccgctagaggagactccacatgctcccattctgggcttgatacctcgcaagtgcccgagtagaccgctcgccgagctctggtgggacgtccaggagtgctccacagacatggactgctggccaagggtctgttgcccggatgggcgtaggagatactgccgcacctcgcagccggagttggaaacagctccagtgccagtgaagcgatccttcgactatcttacagagtacctggagtgcacagccccgccgccgcccatctttgaccttcatcccaaggcgtgcacctccaccttggattgctttccgaatgtgtgctgccaggaggcgggactgcgccactgccggccgcccaagaagtccgtgctcacactgatggccaactttctcaacgtggacttcgtgaagcgactggcacagaatatcgttatcaagtag

SEQ ID NO: 29538 - protein, 334 aa, DROSOPHILA
MERMEWVGNVCQQAALLLIHSPRPSLANGFNFFNRNFWSFGQQSLVAVRPPTKQAHPPKKFSPKDEKSGQRKVAKTTRKPMDQRTSTTSRSATTTSTQKPTTDGPFRIALPTLNFPRDNQDKNRDRETEKGKRSAAELRLRFDCPRENEVRFQLFPKICKADRDCAVWQRDELCCDIFGASSCVSGVPKPLEETPHAPILGLIPRKCPSRPLAELWWDVQECSTDMDCWPRVCCPDGRRRYCRTSQPELETAPVPVKRSFDYLTEYLECTAPPPPIFDLHPKACTSTLDCFPNVCCQEAGLRHCRPPKKSVLTLMANFLNVDFVKRLAQNIVIK

SEQ ID NO: 29539 - DNA, 5466 bp, DROSOPHILA
aactttaggtaatcttttacctttttttgcagtgatactatgggcaacatgggcgcatttattaccattacgggtaacaatttgaaaccaaattacaaatcattcgaggctgtggtaagtactaaaaaacaactttattcgggtcaattcattagcgtaatcttttcagccacatcccgacgtcaagcccatggcctatgccaacagcctaatgaactggctggcgtagtcagtttcgcattaacttcaatagctaaaacatactcccacacaacacataccaatttacaaacagcttgagaacttacaatcgcaagacagcccagcttacaatgatcaaaggagaggaaaaggattcgaagatgctcaatagacttatgcacaccgcgagctgcttcactacttaagtacgagtatggcgagtccataaggcgtaggacgagtggaggacggggaaaggatcaagatcacaaatacagaacagcaatcattttataaattcagctatatttgatacagaacgaaatgttatagtgtattgtggctttagaagtcggatgctaagttttatcggtgccaagcatctggggttccacttgtaagtaaaaattgaaagaaaatgtttgtttatgcatagcatttagttatggctaccaaaacataatatacgattacatatatacaatttttcatcaattttgtttgttccgaacgctttatttgtgtataaaaccccagttttgttcaaaaaccttgccttgtttatattttataaaagtcatttcaataaaactattcaagttagatacctcaataataatcccatacatttttttaatccaataactattgcctactctccgggcacaaacaaaacagttctgatcaaaatattcgaaactgcattaaaagacacctagcttaagagcctgtaatgttaatcgagtgaacagaaatcagaatagagcaattgtgaaataaaaaatcggtccgttctttattaaccaagatctcgtccactagctatgctaaagcccatgacctcgaagatctggttaacattagcctgataatcctgaagatgggcccgctgcaacagcgtaacgtatacgaagggtccattgtaagaaataagctggaggaagaacgctctggccggcgtctgtagctcttgcggctgtatttgtgataggtatattaccaccgtgctcatgatctcgtgcagatgtcttccctctatctgaagaccgagtataaagtccgcgaggctcttcagcagcttaagctgcagtttgtactcctgagtctgcgcttgcgaggtctccgtgctgctgtgcagggatgctgtcttcaggaactgctttaactggggtatcacatcactgaaaagcacaaggatagggtaaaaagatctagttatcctcgaaacagtgacttacctaaggctgcgtttaagtataaagtccttggcatgaacgcctagcaagtgcagcagggtgaagcatcggtttagcaccaatgcgtccttttggcggaatttttcgatcagaggttgccacactagatgcactaatggcagcagctcgtcctcgtagtccgccagtaatggcagaccactggagaaacattccaaagctgcaatctgctgcccctgatcggcggtggaaatgaacttgattacttgacctagtatatccttaaccatttccacgtggcgcggaagcacgggcttcgtgggtttctcttccgtgtcatccgcatcgtcggcttcatcctttgccggctcctcggcgtcgcccatgttggtgtcgccattcagatctttcaataactttggcctctccagcacactcatccacgtgcttaggacattctgctcctcatccacttgcatcggcagctcggtatcaacctccgccgcagcatcatcatgccaatcggaaacatgattcaggaatgatttgaagacgcgaagataagagtgcacgttggttgtctggtgtgatttggagcactcttcgcgtatagtttggaataagctgtccaggtggggcacattgccgcgtgtgctgtactgcaacacgacggtgaggatgtccacggcggccgtgctatctggcgatcgttttagcaacgcgtttaggtgaaaagtgatgtagtcggtggagcattcgataaaatgtgagggctccgcatatttaagagcgtactgcatggaaacgaaggcgaaactggccgcttgatggacgatagtgttactgctagccaccttgagaagcactttgtgtagacttaaaaatatatgcctgtcgaaggtatcaccaataaatctggcacagtgacccactgcatccaaaattaggcaggtgtgcagaacattaaactgggcgtctgcaatggtcacccgactaccgaccacctccgtctgctcgtcatcagaatcgcagtcctgggtgcgtacctcaatcgccgatgaatagatgccaggagtacggtcctcaaaccaatgcgtgggctaaaaaaaattatagtacacattgtacacatataaaatccattctcaccttgttgaccttaaggcgccacgccgagtccggctgaagggccaggttccaatgctcgtctcgaaggatctggtccaagaaaagtttagccagcaccagtcgacttccccgcgccttcttctcctgcggcgttaccatcagtgttagaagcagcacacactcgttcatggatggtgacctttgctgaatcatctcctgacagtaatcaaatacaagtcgatttattgttggctcagtacccaacagggctccaatgtcatataggatatcaactgtacgccttgagcttagatacttgaactgcctccaaggcagtttggccagttcggcggccagacctttggaatcaccttctcgaatacgtcgaagtgagtattcctcgttgagaaggtccctggttggccgttgatctagtgctgtcaacagacaagtgacgaacatctccagatttttgggaactagcagcaatagctgcaatttatcggtgttgacgttgcgtaggaatcctttgaagaacagaagctcggcaaactgttcgttgtcctcgcagcgatgcagtatgcgtggccatttattgaggtgtgcatctagcagcatctccgcattctcatcgaatatgtcttggctgctggcctgttgttgcagcagaagtagggtgtccctgcaccgctgggctatcttctcattctcgtcctctgacagagccaatacgctctctagtacatggagaaagtttcccctcagattgtaagcacaatgttttagcaacaggcaacacatatcggagtaggattcccttacccgtattgcgctgtgagtccgtagaatactcatttcggcaaatattggtcgaaggtgcctcgaagtggcggccacccactgatgcgaacgaagctccgtttgcatttgatgcaatcgctcctcattctgttctgtagtagccttcttgctggcaaaaaaggtgaaatcgcattgatgagcctcttcgttgtttttgaacagtttgcggaaggcatctccatcgtagcgcatttttataaactcattagtggtctcctcaaacattatgcaaataatgcgtcccagcgcttgaattgccatctaattataatatttaaatcaatataaatgaagttatacaaaaccatcgaaaaactcaccgattttatagtctctcccaccttgtcatctttcattgatgttttgaacagcacgatgagtaccttgggaaggaatataaatatggtattggctacctgactacgcaggacaacatccacttgatcggattcgtcatggacatagaaaaccatcatcagacactgaatggctgtctgtacgagttttcgatacttttcctgttcgatgatttccaagagcatgatcagtatctggccaataaccatcgcagtctccttaacgtagaaagattccaccacatcagtggtggagcgacgaagtgcctcgaatatacactgaacggctgccagtttgatttcctcggaaaggtttggtcgcatggacgctgtcttggagtcgcgtacctgttgcagcaccaccaccaggatggaacgcagacccttctcatcggccaggtatgttttggagacaatgttgcttaagcagttcatcaggctggtgcgaagttcctggttttctctgcggaagagacagtcttctctgaagtcgaaaacccaagcggagcggagccacttacccggttagctcatccagtttgaccaccagtggcaccaccgtttgcacctggtaaatgcgcatttctccaaagttgaatccctcgattgcgcgctccaccaccgacaacgtgtccttgctgggctccttgatgaagccttccaccgctggctttatcttcgtcacataccactctagatgcatcatcgtggcagcagtattcactaaccaaataaacccaaagcgaaacccggcaaaatccgggaagaagttttgaaccaacagctgttccgacagtcacatgcaaacgcgcgcgttttcacccccgccacccacaatcgctatcgaagtctatcggttattttgaattgcgcgccaagccgcccttaattttgattttcttttatttaaagcaccagtattgactaatatatttcgaagtttcaggattttggtaaactcgggattggctttgttaaatactacaagtttacatattcagattgtatttgaaattaatcatctagctatagaactcatgctgagcttcgtccttgcgcacgctggtcttataacccttttcgaagtccttggcattgaccacatagcgattctcgcgcactgcatgcataccagcctcttggcaaatggcattgatatccgcattggagatcttgtccggacgtgcaatgatgtcctccagatccacatcctcacccacattcattttcgaggtgattgtggtgaaaactaagcgcttctggcgacgatccggcaatggtaactcaattttccgatccaaacggccgggtcgtaacagagccggatctaaggtatctgcacgattggtggccatgataaccttaatgttggtggtctcatcaaagccatccatttggttgagtagctccagcaggatgcgctgcacctcgcgatcagcacctgtctgtgcatcaaagcgcttggtggcaatcgcatcgatctcatcaatgaagataattgaaggagaattctgcttggccaggcggaaaagatctcgcaccatgcgtggcccctcgcctaggtatttctggacgaactcggagcccacgacacgaataaatgatgcagttgtatgatgggccaccgccttggccagcatggttttgccacatccaggtggtccaaaaaggaggacgccgcgtgggggatcgatgcctggaagaga

SEQ ID NO: 29540 - DNA, 3243 bp, DROSOPHILA
atgatgcatctagagtggtatgtgacgaagataaagccagcggtggaaggcttcatcaaggagcccagcaaggacacgttgtcggtggtggagcgcgcaatcgagggattcaactttggagaaatgcgcatttaccaggtgcaaacggtggtgccactggtggtcaaactggatgagctaaccggagaaaaccaggaacttcgcaccagcctgatgaactgcttaagcaacattgtctccaaaacatacctggccgatgagaagggtctgcgttccatcctggtggtggtgctgcaacaggtacgcgactccaagacagcgtccatgcgaccaaacctttccgaggaaatcaaactggcagccgttcagtgtatattcgaggcacttcgtcgctccaccactgatgtggtggaatctttctacgttaaggagactgcgatggttattggccagatactgatcatgctcttggaaatcatcgaacaggaaaagtatcgaaaactcgtacagacagccattcagtgtctgatgatggttttctatgtccatgacgaatccgatcaagtggatgttgtcctgcgtagtcaggtagccaataccatatttatattccttcccaaggtactcatcgtgctgttcaaaacatcaatgaaagatgacaaggtgggagagactataaaatcgatggcaattcaagcgctgggacgcattatttgcataatgtttgaggagaccactaatgagtttataaaaatgcgctacgatggagatgccttccgcaaactgttcaaaaacaacgaagaggctcatcaatgcgatttcaccttttttgccagcaagaaggctactacagaacagaatgaggagcgattgcatcaaatgcaaacggagcttcgttcgcatcagtgggtggccgccacttcgaggcaccttcgaccaatatttgccgaaatgagtattctacggactcacagcgcaatacgggtaagggaatcctactccgatatgtgttgcctgttgctaaaacattgtgcttacaatctgaggggaaactttctccatgtactagagagcgtattggctctgtcagaggacgagaatgagaagatagcccagcggtgcagggacaccctacttctgctgcaacaacaggccagcagccaagacatattcgatgagaatgcggagatgctgctagatgcacacctcaataaatggccacgcatactgcatcgctgcgaggacaacgaacagtttgccgagcttctgttcttcaaaggattcctacgcaacgtcaacaccgataaattgcagctattgctgctagttcccaaaaatctggagatgttcgtcacttgtctgttgacagcactagatcaacggccaaccagggaccttctcaacgaggaatactcacttcgacgtattcgagaaggtgattccaaaggtctggccgccgaactggccaaactgccttggaggcagttcaagtatctaagctcaaggcgtacagttgatatcctatatgacattggagccctgttgggtactgagccaacaataaatcgacttgtatttgattactgtcaggagatgattcagcaaaggtcaccatccatgaacgagtgtgtgctgcttctaacactgatggtaacgccgcaggagaagaaggcgcggggaagtcgactggtgctggctaaacttttcttggaccagatccttcgagacgagcattggaacctggcccttcagccggactcggcgtggcgccttaaggtcaacaagcccacgcattggtttgaggaccgtactcctggcatctattcatcggcgattgaggtacgcacccaggactgcgattctgatgacgagcagacggaggtggtcggtagtcgggtgaccattgcagacgcccagtttaatgttctgcacacctgcctaattttggatgcagtgggtcactgtgccagatttattggtgataccttcgacaggcatatatttttaagtctacacaaagtgcttctcaaggtggctagcagtaacactatcgtccatcaagcggccagtttcgccttcgtttccatgcagtacgctcttaaatatgcggagccctcacattttatcgaatgctccaccgactacatcacttttcacctaaacgcgttgctaaaacgatcgccagatagcacggccgccgtggacatcctcaccgtcgtgttgcagtacagcacacgcggcaatgtgccccacctggacagcttattccaaactatacgcgaagagtgctccaaatcacaccagacaaccaacgtgcactcttatcttcgcgtcttcaaatcattcctgaatcatgtttccgattggcatgatgatgctgcggcggaggttgataccgagctgccgatgcaagtggatgaggagcagaatgtcctaagcacgtggatgagtgtgctggagaggccaaagttattgaaagatctgaatggcgacaccaacatgggcgacgccgaggagccggcaaaggatgaagccgacgatgcggatgacacggaagagaaacccacgaagcccgtgcttccgcgccacgtggaaatggttaaggatatactaggtcaagtaatcaagttcatttccaccgccgatcaggggcagcagattgcagctttggaatgtttctccagtggtctgccattactggcggactacgaggacgagctgctgccattagtgcatctagtgtggcaacctctgatcgaaaaattccgccaaaaggacgcattggtgctaaaccgatgcttcaccctgctgcacttgctaggcgttcatgccaaggactttatacttaaacgcagccttagtgatgtgataccccagttaaagcagttcctgaagacagcatccctgcacagcagcacggagacctcgcaagcgcagactcaggagtacaaactgcagcttaagctgctgaagagcctcgcggactttatactcggtcttcagatagagggaagacatctgcacgagatcatgagcacggtggtaatatacctatcacaaatacagccgcaagagctacagacgccggccagagcgttcttcctccagcttatttcttacaatggacccttcgtatacgttacgctgttgcagcgggcccatcttcaggattatcaggctaatgttaaccagatcttcgaggtcatgggctttagcatagctagtggacgagatcttggttaa

SEQ ID NO: 29541 - protein, 1080 aa, DROSOPHILA
MMHLEWYVTKIKPAVEGFIKEPSKDTLSVVERAIEGFNFGEMRIYQVQTVVPLVVKLDELTGENQELRTSLMNCLSNIVSKTYLADEKGLRSILVVVLQQVRDSKTASMRPNLSEEIKLAAVQCIFEALRRSTTDVVESFYVKETAMVIGQILIMLLEIIEQEKYRKLVQTAIQCLMMVFYVHDESDQVDVVLRSQVANTIFIFLPKVLIVLFKTSMKDDKVGETIKSMAIQALGRIICIMFEETTNEFIKMRYDGDAFRKLFKNNEEAHQCDFTFFASKKATTEQNEERLHQMQTELRSHQWVAATSRHLRPIFAEMSILRTHSAIRVRESYSDMCCLLLKHCAYNLRGNFLHVLESVLALSEDENEKIAQRCRDTLLLLQQQASSQDIFDENAEMLLDAHLNKWPRILHRCEDNEQFAELLFFKGFLRNVNTDKLQLLLLVPKNLEMFVTCLLTALDQRPTRDLLNEEYSLRRIREGDSKGLAAELAKLPWRQFKYLSSRRTVDILYDIGALLGTEPTINRLVFDYCQEMIQQRSPSMNECVLLLTLMVTPQEKKARGSRLVLAKLFLDQILRDEHWNLALQPDSAWRLKVNKPTHWFEDRTPGIYSSAIEVRTQDCDSDDEQTEVVGSRVTIADAQFNVLHTCLILDAVGHCARFIGDTFDRHIFLSLHKVLLKVASSNTIVHQAASFAFVSMQYALKYAEPSHFIECSTDYITFHLNALLKRSPDSTAAVDILTVVLQYSTRGNVPHLDSLFQTIREECSKSHQTTNVHSYLRVFKSFLNHVSDWHDDAAAEVDTELPMQVDEEQNVLSTWMSVLERPKLLKDLNGDTNMGDAEEPAKDEADDADDTEEKPTKPVLPRHVEMVKDILGQVIKFISTADQGQQIAALECFSSGLPLLADYEDELLPLVHLVWQPLIEKFRQKDALVLNRCFTLLHLLGVHAKDFILKRSLSDVIPQLKQFLKTASLHSSTETSQAQTQEYKLQLKLLKSLADFILGLQIEGRHLHEIMSTVVIYLSQIQPQELQTPARAFFLQLISYNGPFVYVTLLQRAHLQDYQANVNQIFEVMGFSIASGRDLG

SEQ ID NO: 29542 - DNA, 3103 bp, DROSOPHILA
tgcccttgtcactatccgcaccatcccaaatccaacgatcattcggcggagcaaagcgcatcttgcgacttgctttgacgaaggatgactcatcgtggtattgtttgcgagaattcggacaacagacgagcggctcgaggccttggaagccacaactggcgctgtgcaccttggcgaacacagcggactgttctccgggtccgtggtgaagtagaaggcgtgcaaagggggcacacttcccaaggcggatgcagtggcaggcggaggctttgcgatcccctgaaagtataacggatgaccaggctggatgacaaggcatgaaatcacttctcgaaggtcaatgtcggcacagcaatcacgaaccagaaaatcagcaaaccagaagtgcccacggcaattactcacttttttggttcggcattcgccgtcattcgtgcggtttattgcccttcgctgggaatttctagactaagaccttgacccactaagagggctggtctttaattaccccctaccgtcgcacgtttgtgtcttgagtcattgctttattagggatccccgggatacgagtacttaccactcaaacacaggatgcagaataagagtgagacgatttttaggcgccgcatttcgaacgatacaagtcaagaaattgggaaaccagtaacacaacgtcgcccgaccaagtgcgaaattgaaataaattggttcaatctccgagccagcatgcatatcttacttccacgcttccagctctattcagatttcgattttcgcgacgacgaatcaaaacaaaaagagagctcgaaaaaaccaattatcaggccgtaaactcggtttgggccacagccgtaaaccagcagcaacatcagacgaagagaaccaacaatgacggctagcaaaataaccgattgtcatccagaacagatcaatacaaaacatgttttgctggccggccactctaaacttgaaactgaggaatagtaacaggacaccgtttagaatgtggaactctctttcgtatgtatattattgacgcttactttaaagtttatgctcttaagttaggcgatgaaatgaacgtggctaagggctacagagtgcgaacaaagtctttttagtcggcctagcccagaagtgggctcgggcccagagattggcttacgtaactagaaatgcatcgcgtggaatgtcgagttgccgatgatgtacaactaaaatacttaactactcattaggcattttttatagtcgatctggtttgtctttaacgatcgttcctggcctaagccacggggggaacttctggagaagccacggtgactgtaacgctattctcgacctgttctacaggttcaacaatcggctggggagtgggggatggcgatggtgatatattcaccgcaatcgttgtcactgcagccgctggataatggccatttacatcggcattactattgcaatcttcaccggcagacttttccacgtcgtcgtcatcaacgggcgtttcttggcttaagaccgccgccaagcgattgtcatctgcttcgggagctggatcagcttcttgccccgccgccaaagtggcgacctccgtcacttctgactctggcatctgctccagttcggagtctccgccctcttcgctcgctccatttgcatttaaatgtacggctacgtcgccattgtgcacggaatggggcccccgaagctcattgatgatcttctcccccaccttcgcgtcgatctcactgatcttctcctgcagcttgcatttgaactcgatcggccacttggggctccattcacggaacagcttaatctgcggacaatgaaccatgagaaggggcaaaaccgagcaggaaactttctactacttacgcggcattggaacaggctcatgggcttgtcctgcactgctgcgttggccagcgagttgaccaatccattcacctggccatcgctggcgccagaactggatccccgggccaggtactccacgaaaacgtagacaaagtcatcccgctgcagttcactccactcgttgaaccactgaattatgtagcggaactcgccgtctattgataaattgctcatcgacatcccgcctccgtttgtttatattgctctttcccaacgcccccgcagttgctctgcctggctttcagtggatttagcgatgcgctggcacggattcggagactcgaaaaacagttcgctacgatgcggctgcaagtcaagactgctggcttaactgctgagcgttgagctctaaagttgctagtaaaagtaaaacccgtttccgcttcaaattttttttcaacaggctcggcttgtgcaatctagagatgcgcaaccaggagaatgttcttcacgataggcacgaaaattcttacaaagcttattatgctaatatggcttaaaaaatatacgagtgccatcttacacttactagatgctacttagatatcatgtaaactgtgtgttttaaaaagatttaattaaacatttatatgccaaatgaagacgttcaacccgtaagacgaaatgtttaaagtcacgcatgcatctctttagtaaacctgcctcaaaacagctgataaccgataactactcttaagatcgtatcgattaaccgcacctgcggagaaactttaaaatgtaatgaatcattacaaacttttgagctttcttacaacaactagtaaatgacttttgcataagtttgccttttctttcatgccaaagaatttcaataaatcgggtaagcatactctttgaaagaacatttaacaatatataagatgagcaactgcaatttacttattcgccttccttttttatacaatactcaaacatacatttgtcggctatgcgaatttacttcttaaacgaacgcgttttaagttagaaccatcatttgaatttcgcaggcattcaggcttatttagagcatttggtgtgaaagtcattataccatttggtaacactgccttgaacattttcagacagtaaataactttaagaaaatcatttattacaacaaaaaagatgtcttcgtccgaactggaagtacagaaggctgctgattgtcagcaggagg

SEQ ID NO: 29543 - DNA, 1044 bp, DROSOPHILA
atgtcgatgagcaatttatcaatagacggcgagttccgctacataattcagtggttcaacgagtggagtgaactgcagcgggatgactttgtctacgttttcgtggagtacctggcccggggatccagttctggcgccagcgatggccaggtgaatggattggtcaactcgctggccaacgcagcagtgcaggacaagcccatgagcctgttccaatgccgcattaagctgttccgtgaatggagccccaagtggccgatcgagttcaaatgcaagctgcaggagaagatcagtgagatcgacgcgaaggtgggggagaagatcatcaatgagcttcgggggccccattccgtgcacaatggcgacgtagccgtacatttaaatgcaaatggagcgagcgaagagggcggagactccgaactggagcagatgccagagtcagaagtgacggaggtcgccactttggcggcggggcaagaagctgatccagctcccgaagcagatgacaatcgcttggcggcggtcttaagccaagaaacgcccgttgatgacgacgacgtggaaaagtctgccggtgaagattgcaatagtaatgccgatgtaaatggccattatccagcggctgcagtgacaacgattgcggtgaatatatcaccatcgccatcccccactccccagccgattgttgaacctgtagaacaggtcgagaatagcgttacagtcaccgtggcttctccagaagttccccccgtggcttaggccaggaacgatcgttaaagacaaaccagatcgactataaaaaatgcctaatgagtagttaagtattttagttgtacatcatcggcaactcgacattccacgcgatgcatttctagttacgtaagccaatctctgggcccgagcccacttctgggctaggccgactaaaaagactttgttcgcactctgtagcccttagccacgttcatttcatcgcctaacttaagagcataaactttaaagtaagcgtcaataatatacatacgaaagagagttccacattct

SEQ ID NO: 29544 - protein, 252 aa, DROSOPHILA
MSMSNLSIDGEFRYIIQWFNEWSELQRDDFVYVFVEYLARGSSSGASDGQVNGLVNSLANAAVQDKPMSLFQCRIKLFREWSPKWPIEFKCKLQEKISEIDAKVGEKIINELRGPHSVHNGDVAVHLNANGASEEGGDSELEQMPESEVTEVATLAAGQEADPAPEADDNRLAAVLSQETPVDDDDVEKSAGEDCNSNADVNGHYPAAAVTTIAVNISPSPSPTPQPIVEPVEQVENSVTVTVASPEVPPVA

SEQ ID NO: 29545 - DNA, 4433 bp, DROSOPHILA
aacttatttatgaaactttaatttataatacaaaaaccagatcttaagcaaataaattacaatgcggtgattacatttaaaagttatatcgtatttatcaactcaaatacctttgtttcaatgttctacttcctgtttttattgcagctttattatacgttaagtaaagtacccaaaagtaaatgatgctattctaggaataaaggattacaactaatgcaatttaacaaattatttgcaaaagcaattgttttacttcaccgaatgaaggggtgtttaagaacatcaatttgtggacaaaaccagttattctttattgccattatttatgtcctactagaaataaaacttggaaaaaaaaaattgtttactgcaagcaagctatatttgtatctttcaaaagaatttgtaaaattgtaaataaaactaaaaaatattttacacgcaagatattggatcgcgaaataggaacattaaatacctaattatgtatttatagatataatcatcctgaagctaaatcacatattttattctcgcttccaaattgtttgaggaagtaactaatttaaaatgaggcgttaaaacaattataattctttaagcgataagttaagaactcttataagataattataccttcttcgccgtctattaacattattaattaagaccagtagtcagaagcaattaatgaaaaaataatatgttaacctctgattcttgtactgtattcgtgtaaaaaaagaacattgtttttctgaaaataaaatgagagcattgacatccgccatatacagtagaaaaatacaaatttgatgaatacgattgttatacacgtacattttattgaaatttaggtgatttgaagtggaaccgaatttttgtatttatccgtagaatgtatgaatcattgttctttacgtcgatgtattctgaagactttggcattggaagctttggatgtaatttgctagggatgggttcccaacacgaccgctcactggtcagatccttcggcgatgcttcgcagtatccaatcggagaagctactcaccagggtgtagacccccggaatggtggtcacgccgcacagcgtcggtccaaaggccacgatgccgatgatcgtataacgtccacttgttccaaagacgccggaggtaccgtcgtccataaaggggccgccactatcgcctcggcacacgtcattcatgggcattccctgggcgcacaggtggttgggagtaatcacaataggctgctggaagttctcactgagactggcataggcgatggcgcaactggtggtgttcacgatgggcaaacggatgaagcgcaccccagcggtggagtttgaggggtccatcgaactattatctggataaaatttgtagtagagaatgttatatacatttaaaacctaatatgcactgaattatatttcgatcgcattgatagtaagttaaaaaatgtaacagatcagatataaagttgtttcgagactaactttcagtactcccaatactccaaccagcagccactccaatttgtcctatcagcctgtttcccagtgtgattggcccgttgaagggtaagcatatgggtgtgaaagtgcctgcaaggttggtggtggttattcagcgtaatcattgacctaggataggagtataatctcttaccattagtgctgttgattcgtaggagggcaatgtcatttgcatacttgggctggtcgtagttcggatgaactataacctgctcgatggcaaacggagtcgccccatcctgacttcccaatcgaacatgggacctacgaaagagcgtggattacaaaagatttaattaggctttagacttacagttccaaatcgctgactaggttgaccacacagtgggcggcagttacgatgtggttgctggatatcagggatccggagcagcgaaagctaatgcggctgctgcctgaaaatattatcgtaaaacttctgtaagaataaagattttttcttgttttcagctcaacatgtgcgcttgcccttgttcaggaagaagtctaccacctcagagcaacaaccctgattcttgcccagctcctggctcacggggcggtccaggtgctggtggaggtgcccctggtgccggtggaggcggcccaggtggtcgtggagggggcccgccccaaaagcgtggaacgtgtggccccaaaccttgcggcggacagcagtgcaataaatgcggtaagggaggccctggaggaagaggtggccctggaggaaaaggtggtggccctggaggaagaaatggccctggaggtagtggtggtcccggaggcagaaatgctcccaatggcggtggtggaggcggaggaggaccttttgggctgagtgccccaccaaacaatcgcggacccaaggctctgggactggctgctctgctctttgccgtcggcgtctaccttacattaaaaatggttattgtggccagtgaaattggatgagcgcagacaggacggcattgggcccggctcagatctccaatgcggagtaagtttaagagcatttaagaggcgttgcgttgggtaaaataaattcgaaattgcgtatttagcctaacataagatgtacttacttcggttgcgataagcgatccttgtcagccagggaaactgtccggcactagcctgatctcctcccagcagtcggctctctacatttatcccacatccttgggtgttctcctgtgcgaaaggtggcatcgatgcggttgttgtggataaagaagcaggaattgtttcaattggtgtagctaatgttgtggtaaacggcgccaggggcggaccttgatctatgttggagtcaattgcctcctctccctgccgctggaagcgtaggtccccgggaaatactatgggcttatcctttggcacgggtcgcagtaatgtatcccgttcttcgtgctccacatgatacagaaagtggtgtcccaaggcgaaccgtcggtcgaagaactctggttccacgggctggggacaattgcgttgttcctcgaagttccagtagtcatgcagattggtctccgcttccagataatccccgtgtgtgtgggagtgccggctgcccttgtcactatccgcaccatcccaaatccaacgatcattcggcggagcaaagcgcatcttgcgacttgctttgacgaaggatgactcatcgtggtattgtttgcgagaattcggacaacagacgagcggctcgaggccttggaagccacaactggcgctgtgcaccttggcgaacacagcggactgttctccgggtccgtggtgaagtagaaggcgtgcaaagggggcacacttcccaaggcggatgcagtggcaggcggaggctttgcgatcccctgaaagtataacggatgaccaggctggatgacaaggcatgaaatcacttctcgaaggtcaatgtcggcacagcaatcacgaaccagaaaatcagcaaaccagaagtgcccacggcaattactcacttttttggttcggcattcgccgtcattcgtgcggtttattgcccttcgctgggaatttctagactaagaccttgacccactaagagggctggtctttaattaccccctaccgtcgcacgtttgtgtcttgagtcattgctttattagggatccccgggatacgagtacttaccactcaaacacaggatgcagaataagagtgagacgatttttaggcgccgcatttcgaacgatacaagtcaagaaattgggaaaccagtaacacaacgtcgcccgaccaagtgcgaaattgaaataaattggttcaatctccgagccagcatgcatatcttacttccacgcttccagctctattcagatttcgattttcgcgacgacgaatcaaaacaaaaagagagctcgaaaaaaccaattatcaggccgtaaactcggtttgggccacagccgtaaaccagcagcaacatcagacgaagagaaccaacaatgacggctagcaaaataaccgattgtcatccagaacagatcaatacaaaacatgttttgctggccggccactctaaacttgaaactgaggaatagtaacaggacaccgtttagaatgtggaactctctttcgtatgtatattattgacgcttactttaaagtttatgctcttaagttaggcgatgaaatgaacgtggctaagggctacagagtgcgaacaaagtctttttagtcggcctagcccagaagtgggctcgggcccagagattggcttacgtaactagaaatgcatcgcgtggaatgtcgagttgccgatgatgtacaactaaaatacttaactactcattaggcattttttatagtcgatctggtttgtctttaacgatcgttcctggcctaagccacggggggaacttctggagaagccacg

SEQ ID NO: 29546 - DNA, 1848 bp, DROSOPHILA
atgccttgtcatccagcctggtcatccgttatactttcaggggatcgcaaagcctccgcctgccactgcatccgccttgggaagtgtgccccctttgcacgccttctacttcaccacggacccggagaacagtccgctgtgttcgccaaggtgcacagcgccagttgtggcttccaaggcctcgagccgctcgtctgttgtccgaattctcgcaaacaataccacgatgagtcatccttcgtcaaagcaagtcgcaagatgcgctttgctccgccgaatgatcgttggatttgggatggtgcggatagtgacaagggcagccggcactcccacacacacggggattatctggaagcggagaccaatctgcatgactactggaacttcgaggaacaacgcaattgtccccagcccgtggaaccagagttcttcgaccgacggttcgccttgggacaccactttctgtatcatgtggagcacgaagaacgggatacattactgcgacccgtgccaaaggataagcccatagtatttcccggggacctacgcttccagcggcagggagaggaggcaattgactccaacatagatcaaggtccgcccctggcgccgtttaccacaacattagctacaccaattgaaacaattcctgcttctttatccacaacaaccgcatcgatgccacctttcgcacaggagaacacccaaggatgtgggataaatgtagagagccgactgctgggaggagatcaggctagtgccggacagtttccctggctgacaaggatcgcttatcgcaaccgaagtagacgccgacggcaaagagcagagcagccagtcccagagccttgggtccgcgattgtttggtggggcactcagcccaaaaggtcctcctccgcctccaccaccgccattgggagcatttctgcctccgggaccaccactacctccagggccatttcttcctccagggccaccaccttttcctccagggccacctcttcctccagggcctcccttaccgcatttattgcactgctgtccgccgcaaggtttggggccacacgttccacgcttttggggcgggccccctccacgaccacctgggccgcctccaccggcaccaggggcacctccaccagcacctggaccgccccgtgagccaggagctgggcaagaatcagggttgttgctctgaggtggtagacttcttcctgaacaagggcaagcgcacatgcagcagccgcattagctttcgctgctccggatccctgatatccagcaaccacatcgtaactgccgcccactgtgtggtcaacctagtcagcgatttggaactgtcccatgttcgattgggaagtcaggatggggcgactccgtttgccatcgagcaggttatagttcatccgaactacgaccagcccaagtatgcaaatgacattgccctcctacgaatcaacagcactaatgataatagttcgatggacccctcaaactccaccgctggggtgcgcttcatccgtttgcccatcgtgaacaccaccagttgcgccatcgcctatgccagtctcagtgagaacttccagcagcctattgtgattactcccaaccacctgtgcgcccagggaatgcccatgaatgacgtgtgccgaggcgatagtggcggcccctttatggacgacggtacctccggcgtctttggaacaagtggacgttatacgatcatcggcatcgtggcctttggaccgacgctgtgcggcgtgaccaccattccgggggtctacaccctggtgagtagcttctccgattggatactgcgaagcatcgccgaaggatctgaccagtga

SEQ ID NO: 29547 - protein, 615 aa, DROSOPHILA
MPCHPAWSSVILSGDRKASACHCIRLGKCAPFARLLLHHGPGEQSAVFAKVHSASCGFQGLEPLVCCPNSRKQYHDESSFVKASRKMRFAPPNDRWIWDGADSDKGSRHSHTHGDYLEAETNLHDYWNFEEQRNCPQPVEPEFFDRRFALGHHFLYHVEHEERDTLLRPVPKDKPIVFPGDLRFQRQGEEAIDSNIDQGPPLAPFTTTLATPIETIPASLSTTTASMPPFAQENTQGCGINVESRLLGGDQASAGQFPWLTRIAYRNRSRRRRQRAEQPVPEPWVRDCLVGHSAQKVLLRLHHRHWEHFCLRDHHYLQGHFFLQGHHLFLQGHLFLQGLPYRIYCTAVRRKVWGHTFHAFGAGPLHDHLGRLHRHQGHLHQHLDRPVSQELGKNQGCCSEVVDFFLNKGKRTCSSRISFRCSGSLISSNHIVTAAHCVVNLVSDLELSHVRLGSQDGATPFAIEQVIVHPNYDQPKYANDIALLRINSTNDNSSMDPSNSTAGVRFIRLPIVNTTSCAIAYASLSENFQQPIVITPNHLCAQGMPMNDVCRGDSGGPFMDDGTSGVFGTSGRYTIIGIVAFGPTLCGVTTIPGVYTLVSSFSDWILRSIAEGSDQ

SEQ ID NO: 29548 - DNA, 6968 bp, DROSOPHILA
gaaagcgtagcgcatgtttcgaattaaacagccatttttacttttaatttattttttatttataacttagatattataatactgctcacagtaattttacgctaaattcctaatatatatggtatttttaaatataagttttatgtaagttcgaccagtacaaaattaagtatttcaaaataaatgccggccagcgttgtaagaaaaaaatgggcattatttcctccaactttacactgagttagtacatatatatttgagcaagttattccaaaattatttatcatcacggaatgtatcaaaaaagctgcattggcttcaatagaaggaagcaatcgtttcgtcaaattttatttgactaaacctattctctggtgcatttgggttttttatttctctttaacgaaaaacatataacaaattggctgggctttagtttaaagttagtttaaagttgggtattgggtacgcaaacacaagtattaccaaacatttctttttacttataacaacgaaaaccatggccgcaaacattttgaattatccttctacatattccgaaataatgaatagtgcgaaagtgaaaaaaaacgaatttttacataattgcctcacaaataaatacaatcaatcataaataatacaataacaataactccagtctataaattcgtctgatccgatgccagtagtctaggatttttaaaaacttcagttaaagtatttgcattggccacaagtaaaccactgttctgcttgcacaatttaaaacctattagttatttcattggatattgatgtcgtgtaacttataattaacaacgtttaaaactaacacttcatatttggccgaaaataattgatctctccagaatattgttgtattttcgataataaagtggtataaaaagtttattctattgagttcgaaatgcagaatacagaaaattgtaaatcctaatcacaggggcgtgtcgaataccctgtggaatttctatagtcatacggtgctgtcgcgctttatcattaatggagtttggacggtgacctcgtcgtcggatacattctgctcggcggagtgtatgccatcgctggcgattccgatgcagactctgccacactgggcctggttcatgtggtgcatggcgatggttcgtccatgtggatgtggctgtggcaatgtgttcgtcgacgaggccatagagctattggatgcctgcgacggcgatggtgcgtgtccatggagcggctgcgccggattgtgaccaccgacattgaccctgccctggggaaaggtcagctggtggaacgtggaggtcggcctcgcaccggtgatgttgcagttgtagttgttccacacgttctgcgacgactgacgtggcagagtgcattgcgagatcgaattggagtacacgtgtggcgttacgttctgtgtgggtttcaagccaagttaaggaatcgccttacatacatatagggataggggtacctaaatcccaaaaaaaaaaataataattcgatctatctactcactattgagatttcgcccaccgaactctgggcctgggcatgcattccactcctcagggtgcagtatccaattccatgcgaggcacgcagggaaatctcggctgctgtcagatgctgctgctcattcacgaaaattcctcgattgggactgcgattggtatcaattgtcgatatctgctgccttttcctgatgctctcggcctgaataataataatgaagttacaatttttgcagatactagaattctatccaaaattacctgctcatccggttctatggattcgggtaccacatccggattcttttcatcgcaatcgtccacttccttgctgccggaactcttgtcgcttggtccaggcgactcatctctggatatattttcattcgatagttccttttgacgccgtctcgatgaagcggtacagggtattcgaagtgccagaatgatggccaaaactgcgaccagcacagcgagggttaggccaattgttaaggacatcactggtgaaaatagcagctcagcgcgaagattgtgggctaaatggtgcgggaacacatttggttatagaacctctaggatcaggataagatatgctggactcactctgttccgaggtcagttgcttctcgggcattcgcagcatggccgcattgactatagctggatcggatcgacccttcgtattgaacgcgtaaatattcagcctatatatacttcccggactcaaacctggcaccgtaaacttgggaatagtggatgttatattagctttaatttcctgaaaaaaataaaaataattatttgttcattgtgttataaggggtaaactagtagtagtttcctacttgtgtgtaagagtccagcagttctaaattaaaactctgtggcaagccgccgttgaaaccatcactacaagtgaccgtcaaggatgtcatagatatattgttcaccgtgcaattatgaactttttccggtcgtcctataaacaatcacaagcaataataaaaaagtttacttcttagtatttgacagcacgcacctgcggcgattatatggaagacacatggcactcgctgtttgccaattttgttcgacgccaaacacaaaagggttccgtagtccagttccgtaatgggtgtgtatgttacaatggaggtggtacctgaataaagagttataaatgaaatttgcataacgtcaataattccgcgaatgacaacagttacccgagcgtataatatgatttgtggcgacatcaatactctcggcagaattattaaatgtccagctaaactcgacctcgcgcggattagcgtccacggtgcacatgaccttcgcgtcctcctgcttggctatgccgtacaccttcttctgattctgggcacacgtgggggcgtctataaaacgcgagcatcaagaacagaccataaaaatattaattacctcttaaagccaaagaaaaggtggaaaaaaaaaatagggtaaacaagaagtgaaatatgctcctctgattggcattttaggaaacaagtgtgtcagcaaaacataaatggtactctcagcgggaaattttaaagttaaatgacttaaatctcaaaaaattaactgaactaaagcaaacttacagagtatgtttagtgcaaagggagcactgattccttctccttcggcattgaaacccacacaggaatagtttcccgcagtggctctagttacaccttgcagtaccaacgagtgattactaattatgacgcccagtgatatattgtgtgataaaggttgttcctgtggtaatggaaagcattttaaaaccaaaaaaaaaaaccattcgattagcgtgccaaaactcacgttgtgacgccattcgatgcgaaagacatttggatgggccatcaccaggcaatcaaagtagacatctgttccttctcgtaaagtgctcggatccagagatgttcccaaacgaacgtacgcttccgggacatctggaaagcagcatagggcttgttaagcttaagctaaaaaccattgtgatttaataaaacctacattgtatatctaatttccagccatcttccaggggctcggagggaacggcatggttgtaggctttgcatgataaatactttcccgcatctgatttgcttaggctgattgagagagtgcttgtggtctggttgccatcgcttgaagtctacgggaatacagttgaaatgagcgcctaaaccattccagccagtatattatgccaggatacttaccgtttcggttgtcttctccagccgtatgccattttgccaccaagtaattacggccggcggcctggagccagcactttggcacaatagatcgtatctgcgtccagcagacaatggttgatgtgcccccaacagtcggatgtttaaaggggcaactgaaagtagggaaagtgtttacatgtataccgcgattacccaaacgctgttcacatggcgaatggtgatttatatgtcttaaaacttacaattcatatcgatttgaaccaccgcttcgacgatgggtgcccgggggtgactcagtgcacgacaggtcagccgggagttaagatcctcccgacccagagacggtagcgtgatttcgcattctataattttgccgcctgccaaatgagacaattcgcatggaatttctatgccatcgcgataccaactgattgtgggcgtgggatagcctgattgaacaatatgaaaacggaatagagtattacgcatttactgattactgctggcgaaagagatggaattcgtacctccaattacttggcatttcagggatacgatgtcgccttcgctatatggtcccacaactgtagaacgctcaacattggagctgtctcgaataataacttgtttgggtggagctgggtaaattatagggggataggatacaatactattattatatactccaacagattgtttaaggaactcaagtaacgagcaaaaccataattatagcttcctgttgcgatttcaaagtcaattactcacatatgacattgagcctaatgcggctgtttatggtctgcgctttcaggaagtccacgcgacatctataagttccggagtcggatgcttgcgtattctgaattgacagttttcccggttccttgtcaaagataaaatatgctctatccccaaatacggagtcgtccgaccatcttttcggtgctttggatactccagctcgaatgtcaatgctaaagatatatggatgatagtgtttcgtaacaagcaggtcaagtaaacaaaaaactaatgaaaaattacaaaattagttttattagtttacctgtaaattggagtacccttatcatctcggtaccacagaaccagcacaggttcatcaccatcataagttgttacattgcaaggaagataaatattttcaccaactatagattcaatttggtgaattggtactggaaaaattaagttataatttgtttttattttaagctaaccatttaagatttggaaagctaataatatactaagagaaaatatgtaggtacatatatatatatttatatatgtatatatcacatggccttagccggttagctaaaaaagatatgttaaatcaaccaaaccgcaatcaaaaatttttgctaaagaaatcaaaaaaagttttacagttacattcattaataatttaatcatgctcatttttggatactattttttaagcattctgaacattgaagatacaagttttgacttaccatctttacttccgatgctggattctataagttgaagtgctagcataaacagcagcagtaactccatgttgtatatttattggaatagcactggttagttgttgattacatcgacttaatgactttcatatctagtacgctattggccactattgcagattggtacgtttaattggttagaagttacattttatcatctgaattttcacggaagatgagcacaccaacacttgtgcatgagcactcaattacacatctacacgggatataacattgtatgtataacacataggtttatatattttgccagtagttgcgtacacggtatatctaagttaaaggatattttcgaggatatttgatagtctcgtatttcatttagcactgaaaactggttaataatgttttgaagattacttaaatggtcacggttttgattttattcaacgaacaagtatgtatgtatgcgtgtatgtcttttcgtatgaactggtatatgtttgacaaaattccaggatacactttactatatcttattcttgtatgcgcacattcacaggatattgagtgcggtttcactcgaaataaatgtattaagccatgcttgaactactgtttttttttttttaataaaaaccaaggtggaaaataacgagcactggcagaaagttatattacttttctagccgcgatgcgaaactaacacgtcgaaattccatcgcactacacctgcaaacctgggctaaaaagctcctccggcgggcgcaggcgcttcgcaggaagcttttgatgtaaacattgcaactatgacctttgtacatgtgaatgtacgtgcatccgcttgtctcgctcaatataatcgtccttcttttctctgaatatgatgtgtaattggtcggcatcgaaactttgacttcatactgcactcatttcgatattaacccctattttagatgtccttgtccataggcttgcgtgtccacatcgacatcactaatttcacgctgtccattgtaatctattttaaaaacaagctgaaaagtcacggaggcgtgcaggtccgaccttttaatgtacgcgaaagtacatatactgtgaaagctctccggacggacagctgcaatggttctctcgacttctctcgctctgatgaccgtcttatcctttttgccggacaaagaaactgaaacctacgcagtccgcccatggtatctagtttcatttcatctgcgagtacagatactttcaggcggacgagaggttcaagtggggttacgtcaaggtgcatgagactagaaatgagacttaggacagtcacttactgattgctgatatgattacttaatcataaataaattggtataaacaaaaactattatcatgtcattgtttttaaatacaaatgccttataaagttaaattgagaatacaagaaatgtagttatattttttttataggggattcccgaacaagcatttgtaattttttccccatagatagtagttggagattatttcggattttgaaaagataaggagatcgtttaaaagtatataacaaatatatatatataaaagtaaaaactatcgatgtcccgtcacgacgaatcgatagtaccaggaccatcgctgttttccgccagcactagtaacctctcatccctaagtattgtttt

SEQ ID NO: 29549 - DNA, 3077 bp, DROSOPHILA
aatataactttctgccagtgctcgttattttccaccttggtttttattaaaaaaaaaaaaacagtagttcaagcatggcttaatacatttatttcgagtgaaaccgcactcaatatcctgtgaatgtgcgcatacaagaataagatatagtaaagtgtatcctggaattttgtcaaacatataccagttcatacgaaaagacatacacgcatacatacatacttgttcgttgaataaaatcaaaaccgtgaccatttaagtaatcttcaaaacattattaaccagttttcagtgctaaatgaaatacgagactatcaaatatcctcgaaaatatcctttaacttagatataccgtgtacgcaactactggcaaaatatataaacctatgtgttatacatacaatgttatatcccgtgtagatgtgtaattgagtgctcatgcacaagtgttggtgtgctcatcttccgtgaaaattcagatgataaaatgtaacttctaaccaattaaacgtaccaatctgcaatagtggccaatagcgtactagatatgaaagtcattaagtcgatgtaatcaacaactaaccagtgctattccaataaatatacaacatggagttactgctgctgtttatgctagcacttcaacttatagaatccagcatcggaagtaaagatgttggtgaaaatatttatcttccttgcaatgtaacaacttatgatggtgatgaacctgtgctggttctgtggtaccgagatgataagggtactccaatttacagcattgacattcgagctggagtatccaaagcaccgaaaagatggtcggacgactccgtatttggggatagagcatattttatctttgacaaggaaccgggaaaactgtcaattcagaatacgcaagcatccgactccggaacttatagatgtcgcgtggacttcctgaaagcgcagaccataaacagccgcattaggctcaatgtcatatctccacccaaacaagttattattcgagacagctccaatgttgagcgttctacagttgtgggaccatatagcgaaggcgacatcgtatccctgaaatgccaagtaattggaggctatcccacgcccacaatcagttggtatcgcgatggcatagaaattccatgcgaattgtctcatttggcaggcggcaaaattatagaatgcgaaatcacgctaccgtctctgggtcgggaggatcttaactcccggctgacctgtcgtgcactgagtcacccccgggcacccatcgtcgaagcggtggttcaaatcgatatgaattttgcccctttaaacatccgactgttgggggcacatcaaccattgtctgctggacgcagatacgatctattgtgccaaagtgctggctccaggccgccggccgtaattacttggtggcaaaatggcatacggctggagaagacaaccgaaacgatgtcccggaagcgtacgttcgtttgggaacatctctggatccgagcactttacgagaaggaacagatgtctactttgattgcctggtgatggcccatccaaatgtctttcgcatcgaatggcgtcacaacaatcagaagaaggtgtacggcatagccaagcaggaggacgcgaaggtcatgtgcaccgtggacgctaatccgcgcgaggtcgagtttagctggacatttaataattctgccgagagtattgatgtcgccacaaatcatattatacgctcgggtaccacctccattgtaacatacacacccattacggaactggactacggaacccttttgtgtttggcgtcgaacaaaattggcaaacagcgagtgccatgtgtcttccatataatcgccgcaggacgaccggaaaaagttcataattgcacggtgaacaatatatctatgacatccttgacggtcacttgtagtgatggtttcaacggcggcttgccacagagttttaatttagaactgctggactcttacacacaagaaattaaagctaatataacatccactattcccaagtttacggtgccaggtttgagtccgggaagtatatataggctgaatatttacgcgttcaatacgaagggtcgatccgatccagctatagtcaatgcggccatgctgcgaatgcccgagaagcaactgacctcggaacagacccacaatcttcgcgctgagctgctattttcaccagtgatgtccttaacaattggcctaaccctcgctgtgctggtcgcagttttggccatcattctggcacttcgaataccctgtaccgcttcatcgagacggcgtcaaaaggaactatcgaatgaaaatatatccagagatgagtcgcctggaccaagcgacaagagttccggcagcaaggaagtggacgattgcgatgaaaagaatccggatgtggtacccgaatccatagaaccggatgagcaggccgagagcatcaggaaaaggcagcagatatcgacaattgataccaatcgcagtcccaatcgaggaattttcgtgaatgagcagcagcatctgacagcagccgagatttccctgcgtgcctcgcatggaattggatactgcaccctgaggagtggaatgcatgcccaggcccagagttcggtgggcgaaatctcaataaacgtaacgccacacgtgtactccaattcgatctcgcaatgcactctgccacgtcagtcgtcgcagaacgtgtggaacaactacaactgcaacatcaccggtgcgaggccgacctccacgttccaccagctgacctttccccagggcagggtcaatgtcggtggtcacaatccggcgcagccgctccatggacacgcaccatcgccgtcgcaggcatccaatagctctatggcctcgtcgacgaacacattgccacagccacatccacatggacgaaccatcgccatgcaccacatgaaccaggcccagtgtggcagagtctgcatcggaatcgccagcgatggcatacactccgccgagcagaatgtatccgacgacgaggtcaccgtccaaactccattaatgataaagcgcgacagcaccgtatga

SEQ ID NO: 29550 - protein, 312 aa, DROSOPHILA
MELLLLFMLALQLIESSIGSKDVGENIYLPCNVTTYDGDEPVLVLWYRDDKGTPIYSIDIRAGVSKAPKRWSDDSVFGDRAYFIFDKEPGKLSIQNTQASDSGTYRCRVDFLKAQTINSRIRLNVISPPKQVIIRDSSNVERSTVVGPYSEGDIVSLKCQVIGGYPTPTISWYRDGIEIPCELSHLAGGKIIECEITLPSLGREDLNSRLTCRALSHPRAPIVEAVVQIDMNFAPLNIRLLGAHQPLSAGRRYDLLCQSAGSRPPAVITWWQNGIRLEKTTETMSRKRTFVWEHLWIRALYEKEQMSTLIAW

SEQ ID NO: 29551 - DNA, 2890 bp, DROSOPHILA
cagcctgcggtgatattcatgggcgatgcggagcggcccttcatgaagaaaattccaaagacggatcgcacagatcccaagcgactgaagaaggatctgcccaagttgataaagaacattgcgcccgaggatcgcgtcgttttcattggcacttccaatctgccctgggaggcggatcaaaagctattgcaatccgtctacaatcggttcatctatattccacgaccggattacggcgccatgtcacatgcctggaaaacattgttacagtgcgtaaatgtgggggattcatttgcaaaataatctactgatttggtttgcaccccgacagcgattactctggtggcatttccaatctggacaccagcgccatggccaaaatatcagatggctataccattgggtccatcgatgcgtgcctcaaggaggtgatgacctgcaagcggaaactccagctgcgcacccaaccattgaccaatgccgaactgatcaatgttctgtggtaagtagatttggctatgaaattagttagttgttagtttccatgcctttcagctcacgagatcccgtctaccgcgaagaggaggaagctttcgagtcctggtggtcgaagaccccgctcggccgccgtcgtcagcggtttttggagctggaggaggagcgattactggaggagcaggcgcaggcggccaagcagggaaatggtaacaagaaaaagggtcttaattaaaaggtaatcactggacttcttatatttaagcctaatttgtaaggaaacatctttggattgctaatggtaaccattcattcaacgctatggcttgctttacaatcttgcttttattagcaaactacaatttatatgttcatatatatgagctaatatggaacagattacatttttgatacctaataaagtcaatatatattttccactacattccaattgaaagatcagcatgcataaatatttatgattcagttaaagactggcaatatcctatttcaacgagtaggtaaaatccttgttgccgcactttaggtgcacctcattgaccgccaggcagagtttgtcctgatcatcaaggagctcttttaactccgtgagcttttcgttaagcagtgtctcctggtcgccaacgcaccaaagaaggctgacgtggaacgaggccggatcatagaactgttgcagccggtagtcgagcatcacttggtcgatgggctgcagaatggcagtcatcttctccacaaatgcagcgtccaggggcgcagcaatgaaggtcctggttcgctcctcattcgtgtagatccgcagcccctgcaaagtggcggcgaatctaaaagaggattggtcatcaggatgggagatactagatttaacttggttaaacatctcaccccgcagagctgttgagggcgctttgcaaggatcgggagaattcatcgatctgatggtactgcagcaccactgttcgactcaggctcagatggagcgactcgttcggctgcagttccaagtgtggctccagacgagcaatggcctccgtttggaactcctccagctggtcaacacatgctgttgccggcacatagacgtaagtggcccagtttccccgttcatgcttgaaactacgcatgcggccgccatgttccgcgggatcatccaccacatcctcgacgaactcctcgggcttgggcttcttggggcccagcagggtggctgctttgggtagggccggtctttggcggttataatgtagaaatctacgggtattccagtaaaggacgttaccttttcaaggtgatcaacgcgggagtttgaatgttttcggtgcagtcctcatcctcggaggcggaggagctgctgccaccatagtccaccagggccatattattatttatttatgtatttttatttgattgcagtaaacaagaaatgaccaacagcacaatgttcggcggtttttatttacatttatcgattaaattgaaagtgatgtgtatttagcttggttttaaatttatgttgataaactattttgttttaagcaattaaattgcaattaataacattaaaaaaaagttataaaattcacttttaattatttaaatagtacttatttttttaacatttttttactgtaaaatttccactttaaatgtattgaccgttaaagccttaaaacttgtttttatttagactaaatccattgaaatgcacaaattggactactacaaactggcttcaatagccgggcattgctcgccatttttctccagcctcgactgctcccactggtagttgtagtacctacccaattggaagagctgcgtcagactcacgaagagattaaccgcgaacaagctgtagttcttgggaatgatcaccagagagtagcgcgtccagatgaggttcgttgccccaagagccagacatccgttaggcgaaatcttgtccgcaggacgcgtcaaatcactgagacccgcgataacgaggctctgtggtggaatataaacggaatggttgcggagattagggagatctggccgatagtgcagggtaagtccccccattgactgcaaatctgaatagcatgttggcaaagctccccccagtcaaaacagtaaaagtattatgaaatattccatgagccccacaaaccgcacaatcattcagttatcagaatctcgcgcgtggagaggaaaatggtatataagtacatatatacatatttatcgcgggcttgaacaggtttgccgagaactaaacaaataataataaaacacaatattcgcccacaggtttgtttatcagtacggtgataatgggaattggctaaggacgcagggttcatggttatgcaagtagtgcaaaaacttacccacttaa

SEQ ID NO: 29552 - DNA, 777 bp, DROSOPHILA
atggccctggtggactatggtggcagcagctcctccgcctccgaggatgaggactgcaccgaaaacattcaaactcccgcgttgatcaccttgaaaagaccggccctacccaaagcagccaccctgctgggccccaagaagcccaagcccgaggagttcgtcgaggatgtggtggatgatcccgcggaacatggcggccgcatgcgtagtttcaagcatgaacggggaaactgggccacttacgtctatgtgccggcaacagcatgtgttgaccagctggaggagttccaaacggaggccattgctcgtctggagccacacttggaactgcagccgaacgagtcgctccatctgagcctgagtcgaacagtggtgctgcagtaccatcagatcgatgaattctcccgatccttgcaaagcgccctcaacagctctgcgggattcgccgccactttgcaggggctgcggatctacacgaatgaggagcgaaccaggaccttcattgctgcgcccctggacgctgcatttgtggagaagatgactgccattctgcagcccatcgaccaagtgatgctcgactaccggctgcaacagttctatgatccggcctcgttccacgtcagccttctttggtgcgttggcgaccaggagacactgcttaacgaaaagctcacggagttaaaagagctccttgatgatcaggacaaactctgcctggcggtcaatgaggtgcacctaaagtgcggcaacaaggattttacctactcgttgaaatag

SEQ ID NO: 29553 - protein, 258 aa, DROSOPHILA
MALVDYGGSSSSASEDEDCTENIQTPALITLKRPALPKAATLLGPKKPKPEEFVEDVVDDPAEHGGRMRSFKHERGNWATYVYVPATACVDQLEEFQTEAIARLEPHLELQPNESLHLSLSRTVVLQYHQIDEFSRSLQSALNSSAGFAATLQGLRIYTNEERTRTFIAAPLDAAFVEKMTAILQPIDQVMLDYRLQQFYDPASFHVSLLWCVGDQETLLNEKLTELKELLDDQDKLCLAVNEVHLKCGNKDFTYSLK

SEQ ID NO: 29554 - DNA, 3699 bp, DROSOPHILA
acgaaactcttgttggctagctggtttttggcaattacgctgcgctgtggcgtttcaaaacacgatgatggggctaaaaaaatgtgcctttgaggtatagacactggttaatttgcattgactgctgccacaacataactgcactttgcactcacacacacactaagatatgtttttcaacgcaaagcattcggggcggggttttaatattgctattgagctacaggcagagtaatccgaaatattaagaataataatactacacaccagacgcggagctcccgactcgacggcagacaaagacgcagtgtggtaaaatgtgcccagaccagacggggcgctcctctctctcacactctctttctctctctcgtttccgctgcgagtgtagatatatggatggaaaatcgaaactctgtggctgtggccagcccccgcggcccccttttgctatctcgcttgctcgcatggacaaaatcaacacaagttcacacacatacaggcacacggatgtgaactcacaatgacaaccacttcgtcaccagcagataaaaaagtgctggccttaaatcaattgcgttttatgtaattccactacattcgtacgttacgaaaacaagcactattcatattacacggtatacattattacttcctatcgagtccaaattgctaggcaggaaaggtcttaaatttttacgctttatgggagtttaccttgggttcgacctgacaaagagtgtggccgcggcgagactgtgagaaattaccaagtggtgtctgttatcttaatcccaaatactctagaaacatttgtatactagaatttgagatttaagcatattataaaagaaatttatttatatttaactaaaaatgcttcttaatattcgcaaaacagttttttaatagcaaagtaaaggaactggattttattttaataagtgtgtattctatttttttgtcatatttacacgttcacaaacacggccacactaatctccactgaaaacgctactcgcatttaactctagttgagaaaaacaagatttattaataaaaacattttagcttgcacctaaaagagtgtgcggtactataaaactaatcgtttaacaaatcggcaatacgaaaatgtaagtatctgcaccacattttgctccctaaatggtctaaaacagctcgcttttctcgacaaataaaaaaaaacagggcgcgtgcccagagtctcgccggcgagggtgagaaggaaaaggacaacaaggagaaggtcgccaaagagaaggacggcaaggcgaccagcggctcctcgcgcagggaccgcgaacgcaaacgccgcggatcggcgtcctccagcagcgactccagaagcaggtaaatcagccggcaaaggtctttcccacaaatggctgccatctgccaaccggaataagggttacttttaaaaggaagtccttcttcttctgtaaaacgtagcagatagtacgggaagaaaatagccttcgagcgaaaagattttgtaaaaattcacataccatatatggtaaaatttcatcacagttaggaagtgttttactttgtaccagcttcattgccgttttcttggttacgagaagtaaataaaacacttcactttttccagcacatcggacagcagctcttcgcggagcagttccgggtcatcgcgttccagctcaagcagctccagcgactcctcgagctcctcatcatcgtcgtccagcgattcggatcgcagcgagaagaaccgaagacgtggcggcggcgctgctggcaaagacaaagacaaggataagcccagcgcccgatcacgttcccgctctcgcacccgttcccccaggcgtgtctccaaatctccaagaccgggcagcaaggcgcgaaaagagccggagcgagatcgcgatcgtcgtagtcggtcgagggatcgtgcccgccgtgctggatccaacgatagggcagccgccgatagcaataatgttaagcgggagcgttctcgctcagccagtcgttcacgatcgccacgccgtcgtggtcgcggctccgttgagaggacgccgccaccgaagcgaagggagcgctcccgttcgcggactcgctcgccttcgcccaaacaggtgcgcattcatgtcggtcggcttacccgcaacgttaccaaggaccatgtgttcgagatatttagcagctttggggatgtgaagaatgtggagtttcccgtagatcgttttcatcctaacttcggacgcggcgtggcgtttgtggaatatgccacacccgaggattgtgagtcggccatgaagcatatggatggcgggcagatagatggccaggagattacggtatccccggttgtcttagtaaaacagaggccgcccatgcgtcgtccttcgccaccgatgcgccgtccgcaaaacaaccgctggcgatccccaccccagttcaataggttcaacaatcgtggaggaggtggtggcggcggcggcggacgtcgtcagtcacccatgaggaaccggcgttcaccacggcgtcgctcccgctcccccattcgtcgtcgacgccgcagcaatagcagtgacagctctcgttagaggacactgatcgactcctagtttctacaattgacacgattattgcacttttctttatattataatccaaataataaaggtgagcaaataccacacacatagagagttagcttagtgtataaacgagcactcagcatcatcgagaggacatcccagcggatgatgaagcttgaaaaagcagctacgtttcttgatggtcaaatgggatttggggagagtagccgttggtttaggggttcttattcctatgagatcaccaccgcagaattcgaaaacttcgtgtttattgcgcagcaatgttttgatgccgccgcactcggatttaatgccactcagctcctccttggtgagagcctgggcaatctctctcatgggcagacgaccagaccatttatcttcgttagagtccagaatcagtttgaagatcttaaacactagaccatcaattatggtcttatccacctgcgtgcaatttcgaacgctctcctccttctcgcgcagcttaattttggcatctccggtcttatactttcttagctcttcttggacaaagtactccagatcttcaatagcctttgaggcttttctcttaattcccagcagagccaatcgcttggtgcttggtatttttagacggtcttgtaggatctcatagccacattcatgagagacctgagtgacgtattgaaagaaatcctggtaggcacttatcttcgtattccgcctgcgaaacttggctcccgacagttcaaagggacagcagggcagtaggaaatagttaatgttcaaacgaccagccaaaaccggtagccaaggagacaactcgtccgaatggttaccaatcaaccaatccacacccggaaaatccaagcggaagctgttgggctccacggccttttcaatgaggctcctttgggtatccggtggatagagggaccatagctttcgctttcttatatcgtagccataccctttgtagccctcggcgttgaggacatgaactaacagaccgtttccacaacccaaatcagcgaaggcagtgggctccgattgtgtttgactccacaaaactataagataagcagcgatagccaaa

SEQ ID NO: 29555 - DNA, 1358 bp, DROSOPHILA
ctccactgaaaacgctactcgcatttaactctagttgagaaaaacaagatttattaataaaaacattttagcttgcacctaaaagagtgtgcggtactataaaactaatcgtttaacaaatcggcaatacgaaaatggcgcgtgcccagagtctcgccggcgagggtgagaaggaaaaggacaacaaggagaaggtcgccaaagagaaggacggcaaggcgaccagcggctcctcgcgcagggaccgcgaacgcaaacgccgcggatcggcgtcctccagcagcgactccagaagcaggtacacatcggacagcagctcttcgcggagcagttccgggtcatcgcgttccagctcaagcagctccagcgactcctcgagctcctcatcatcgtcgtccagcgattcggatcgcagcgagaagaaccgaagacgtggcggcggcgctgctggcaaagacaaagacaaggataagcccagcgcccgatcacgttcccgctctcgcacccgttcccccaggcgtgtctccaaatctccaagaccgggcagcaaggcgcgaaaagagccggagcgagatcgcgatcgtcgtagtcggtcgagggatcgtgcccgccgtgctggatccaacgatagggcagccgccgatagcaataatgttaagcgggagcgttctcgctcagccagtcgttcacgatcgccacgccgtcgtggtcgcggctccgttgagaggacgccgccaccgaagcgaagggagcgctcccgttcgcggactcgctcgccttcgcccaaacaggtgcgcattcatgtcggtcggcttacccgcaacgttaccaaggaccatgtgttcgagatatttagcagctttggggatgtgaagaatgtggagtttcccgtagatcgttttcatcctaacttcggacgcggcgtggcgtttgtggaatatgccacacccgaggattgtgagtcggccatgaagcatatggatggcgggcagatagatggccaggagattacggtatccccggttgtcttagtaaaacagaggccgcccatgcgtcgtccttcgccaccgatgcgccgtccgcaaaacaaccgctggcgatccccaccccagttcaataggttcaacaatcgtggaggaggtggtggcggcggcggcggacgtcgtcagtcacccatgaggaaccggcgttcaccacggcgtcgctcccgctcccccattcgtcgtcgacgccgcagcaatagcagtgacagctctcgttagaggacactgatcgactcctagtttctacaattgacacgattattgcacttttctttatattataatccaaataataaaggtgagcaaataccacac

SEQ ID NO: 29556 - protein, 374 aa, DROSOPHILA
ARAQSLAGEGEKEKDNKEKVAKEKDGKATSGSSRRDRERKRRGSASSSSDSRSRYTSDSSSSRSSSGSSRSSSSSSSDSSSSSSSSSSDSDRSEKNRRRGGGAAGKDKDKDKPSARSRSRSRTRSPRRVSKSPRPGSKARKEPERDRDRRSRSRDRARRAGSNDRAAADSNNVKRERSRSASRSRSPRRRGRGSVERTPPPKRRERSRSRTRSPSPKQVRIHVGRLTRNVTKDHVFEIFSSFGDVKNVEFPVDRFHPNFGRGVAFVEYATPEDCESAMKHMDGGQIDGQEITVSPVVLVKQRPPMRRPSPPMRRPQNNRWRSPPQFNRFNNRGGGGGGGGGRRQSPMRNRRSPRRRSRSPIRRRRRSNSSDSSR

SEQ ID NO: 29557 - DNA, 11294 bp, DROSOPHILA
aaagtaaagttaaaactttttctcaacttccatttacattggtgtgcattgaattttgttcacgtttagctaaaatcgtttttgatctcactcaatatcacttgatttcactagattttctcttgggttttcggtttctaagccatagttaaatagtttaggtctgtaggtaggtaagtacaatctaagtaaaacttcaactactcggagtcgctgacttgcgtcgttaaaactagaacaacaatcatatatcgcatacatcgtacacctaggcatgtaattatcaattatatcaagtatgtatgtatatatagagattctcttacggcctacacatttatcgccctagtaaagtatcagtgtagtgtgttgcaactatgtacgagtatttgagtagaaaaacttgtagttaacagtaattatgcactagtatttatcatagatcgggatttctcctcagctttagccatggttgtagtatagttttagatttaggtatagatttagatttagatttagagtacatctacagtcgagtcgagcagaataaacgcctactataaaaaacggtaggtatacaatgtacatgtatgtacatttacatattcgtatttcgtgttacttcaacataaatattgcacttgcctacaatagtcaataacaattcaatttgaacttgtaccaatccttggcttgacttataacctacagcgagtcgcagtgttttctacttaagggatagatagagaagtgattgaagaagaaaggggcttgagctatagatttagatagacctagtgaagaaatgcctttaactactacgtacacgtgacattgatttttagacccaaattcgtctaagcataaattctaacagtggtaaacaatgcttgccgcttgcttaatgcgattgtcaatcgatttttgtttgtttgctatatacgcctcatggtttccctgtccatatcgttcattcccccacggaattcctcgtcggtgtctacgatggtgcggttattgttgatgtggcgacggtggtcagtccagctccagcctggttttgcagttggtgtttctgatccggctcctggacgcggtgcgtcttcatgtgcgcactgcgactcttcaccttattgaagaccctggtggaagaaagaaagagcaaaagacggggcatcatgagaacacatggcactacgccacaagtttcgatcactactatctaagatgcagactaggcggattatttgaacatttagatataatggaagcacatagagtacacaattgtatagcacatgcatagatatagctgggtaaagagtcatgcagagatacgaagaggagactttaagctttcttgttcacttcatcttacttagccttgtgtggagtttaaatttgctttgttgttacaaataactatggaaaatagagagtttatgttgaggagcaaataaggaaacaaataagttagtgattaaatacatattacaactcgagttaacgaaagagttaagaatgtgcgcttgaatgatacagccgctctaggcttgtgatctctgtaatatgatggttttagcttattttttctttttgggtatccaaaagcagattaaatttggatcacttcgaaggccagctgttccaatatacatacatatgacagatcggagaggatggttctttaatatttacataagttatcaaaggcatttggcgctgtgagtaggattaagtcgaagacaaatacaataatacacgaaattagagaacagagaccaagtgaatggagtgttggaacggaagaggttatcgaaatgaaccgaaaggtgagaacgcaaaacgaagtcctcctacttaccgagcattttgccagcgagctgtgcgtgtggacttgtggagctgatatcagttacggatacgtctatttgcgagttgtgactcttcgctttaaaattgcaattgcgatttattgattgtattcgttaattggttttggtttgttttgttttgttttgatttgattcgatttgattggatttgatattgggggtttcgcatcatggaaccatacaatacaacaacaatataacaacagttaatatcgcttgacgaaaactctaactaaatggcatagtagaaatcggaaagtgacatacgaaggaaactaaagaatcaccagaggtatctactcagaactgaagatcatataagggagttgaaagtgggtagcgatataagaactcaggaggaactgttcgataaaacaataagtacagtgaactcaagatctattaaccaataactcgtatacggtatacggcatacgatacacaagtcagtttacggtacagcgtgcgtttacgatctcaactcaagtcaattacgggcactcaaatcacttgcggattttcgaattttcatacggatttcacgtgtctttggtttatgctttttgtgatggaaattgctttgggggaatcttacttgccgcacaccttgcaggggaactcgccctccttggcaatcggtatgttagtggtattgcccatgcccgcctccaatttgggcgtggtcgaaagcgcagatgttgctattgctgcattcgcatggccactgcagttgctgccgttttgagccatgttgctgctgtgtgttgctactgctccagcgacattggtactcgcattattgctgctgccgttgctgccacttagtgttgcgcatgcgtagctgctgctgttgttgttgttgccaccggaactggcactgcttgctgcggcatgctgcacgttgctgctgctgccagtgttgctgctgctgctgttgttgttggtggtgttgctgctggcactgcgaccataagcgtgtatgcggacatggccgtgcagtgccgccttcgaactgaagctctacattcggcgcaggcggggatgggcaagatatttggatttttgattgtgatattcgagcgttatgtacaggaaagagagtaaacagaaagagccagtgaggtgaggtggggcgttagcgtttggtttctggggagctgcagtacgtgcattggggcaaggggccatgctgctgctgctgctgctgctgctgctgctgctgcatctgagagcctagaacttaccgctgaacagtcggcaatctcgcagacatagggcttctccaccgcgggagcaatgaccaccacgggctccatcttcaagtgcgtcaccttgtagtccacgcacagcttcttccagaagtagtacatttgcacacattcgccggaggacttcgtttgcagctgcaagggtaaagggtaaagttattacacccattcgaattgtaatcatcatagggaacccacctcactggcgatcttgccaaagtccttgccattcttttccaatccgcgcaagaactgctccagctcgtaggcggtccacttcatctggaaggcgccggactgcgtttgtagtaggctgagcacagccgccgccgagtttcctttggcccgaagcagcgtttggagcgccacctcctcggaatgactgcccatgggcacggccgacgacttgctgagatcaatgtagcgcatcaggatcttttcgtcctcctgcacctcgggattccacatcatctcggcgccgggagagtcccgcaatgcctcctccagcggtcgacagctgggtatctgcgcctggtaggtggatcccaagttaaccttggactcgtccgagaagtctaccaagcccaccgagtccccaaagtcatcgtcgaaggcgtcgaagagaccctgacccaattgcttgcgcacattgcagtacagcccagtgcccttgcgatccggattcaggatgggtgctggcgtatagtgggttcgcgatggtttgcgcagcttggaacgatgcggcgacagagtgtggaacttggagaacttgtgcgtctcctggggtgcattggagcgtagtcggcgcttcagaatggaattggtttggttggacaagggctgcaagttagccacactcggcgggttggacacgatagccgccagggatttgttggccatggttgtcgtgttgccacaggcgaacatcaggcccgtatcgatctggccttgattggcattcatttggcaatcggtggtgagcagagattcattgcccccggctgaggcgttgccattggatgtggttgccccaccatagagcagtggttgcagcaggctgttgaggggctgcatccccatgcctccctggctgttatctatgtattgtgtttggctggtaacttgggtgaatccatgaccacccaccaggggcagcatgaaatcaccctgctgctgaccgactgccggcagggattccgtttgattgagtggttgctggggcatcagcaactgttgatgatgctgctgttgttgttcctgttgcggtggctgttcctgctgtgactgttgctgctggtgttgctcttgctgctgctcctgctgctggtagatgttgttgttgtcctgtagtgtctgctccatgggctgttgcatgttggtggtttgcataggcaactgctgtctttgctggccaaactcgcggggtgaggaggagagcagcggatcctccgaattgggcatcatctgggattgcaagcccaagccaggcaaatagtagagatcgatgatgttctcgccctgctgctcactgctcaattgcagttgcatattctcatcgggcaggacttcgcgcaaaacctgctttacatcctccgcggagccaatgccgctggtgaagaaggattccgagagcggagaggtggcattcctggagtcattgaggaactcttgatcctcgtccaaaaacgagaggttagtctccgcaaactcccgcagatcgcattccgtatcgtcatcggtgccattcaacaggtcctccactttgatcgagggatcgaagctgctgtcctctagcactgatttcagtttcaggatcttctcgttgtcgtgctcatttagctgttcaatggtggcctccccctcatccgttttgaaatagatgtgcgagaagtccgtcttgtcaccgaagaaggtgttactggcatccacaaactgggcagctgcatcctcgatgaagggcgaactctgggccatattctcgtggctcgatgggggagtgggataggccagtggcgagtggagcggcgaggccaggactccaccaccacttccgcgcatgctggctatcgcctggatctgcgaactgttctgcatgatcagctccttggaatggaattgctggaaggtgggcaacggcgtagtgtttgcgccagatacgcttcccgatccggagttggcctgtccactttccggctccagtttcaccagttgggtgtgcgcgctgtcgccggcctcgcttagcagggcaaagtcctcggaatgttcgctcttgatctcctcatcattgagcagctccatggagtccaccgtctgcagcagcatctcggtgtccgaaacgttgtatacctcggcatcgtcaaagagatcggtgccgtcacttgtgtaggtaaccgtatagactccacctcccccgctcgtgatcacacttcccgatccgctggagttgcctcctcctccagtcaactcctgattggaagcaattgtcagggaaagaggcgtgccatcggccagcgaaagatttcccgaggaggaggtgccactattggtcatattgcacttgacaaggctgcttaagctgcttagcttgcttttggtggaaaccacctggacatcggagggtatgatcacggtgcggttgttgttggtgatgatctgtcggcccactgtctgcactcctccaccggcaccaatggtggttaactcggtgacagcacccacagcatttgttgccgctccactggaggacatcattgtactggatcccgtttgtccatgggattggttctttttcgaagtgaccgcaatacgagtgccgcgtttcagaagctctataagtgtggaatccttgggatcggtgttggtagcggtagagattccactgatagtgcctcccgcttttagcgcagtaagagcactcatcgtcgtggtggtgggtacattgttggtggttatcgtgatcgtgttggtgccactgcccaggttgagcgtctttgcctgcttctgaccgccgctgaaaatctcgatgctctgcggcaggccaatctgctggatactaaggccattgctgctcttgatggtggtggccgctgggagaaccgctgtggttgtgcccgtagtggtggtcatcgtctgggtgtgactgctggagctcgtcttcgggttgagaaagctctccagatcgctgatcgatcgacgcagggtagtggtagtgccactgctgtgcggtggtgccggaaccacaaaggagccctgcagcagatagaagatgtgttagtaattatatcataaacattaatttttgttttataaccccaccttagtcatatccttgcgcttgctgatgatcttctcctcgattagggcgcgcactccaatgctcgcagtctgaaggggtggaccactggagtccttcttctcgctgcgtttggtttccggatcctttttgtagtagccgccatgtaggcgcatgtgcccattgagggcgggtatatttttgaacttacggtgacagagattgcactcaacgggcttgtcgagcttcacgatgttgagcaggtggggattcatggtgcccacaagctgtgagctgagctcctcctccttgacctccacgggtgagttggaggagggagtaacgagctcagagttgtcctcgactgtgacagttacattttgggcactatttagctgtagataatagggtttgatattatatgattataaatactatcctttatctagagtccacctaccaattgcatgttccaggtgcgcggtctgttctgcgatggcgacgaattggtgttgatcttgtaggaactgacactggtgggcgatgagacggtgacctgggcgctcgtctgcttcgtttgctgcattatcttgctgatgagatccaactgttcccgagtgagaccctcgccctcgagactcatcccatcgctgagcgtgatggtgggcgaacaagcggttatcaccgagccacttgacggtgacggggccatggaaactgatcctgatcccgatcccgaccccggtaacgagcccgtcgcggaaagcgatgagctggcggacgaggccgatgatgaggcattcgacgaggtcgaggtggtgggcgacagcaaggtcacgcccgtcttgatcggcagattcatcgccttgatctgttcatccgacagagcgatcccagtggcagcatccaccaccgaactgcccgtggaaatataggttcgaatgcaggtggctccgtccggggagctggcatccccgctggccgtagccggagaaaggctcaaggagctggtggccgcgccggcaccactactattgctggtaccgctcgaactggcggtgggcgaaagcgattggctggtggtgggcgtggctgctccgccggcatgatgattctccgaatggcgccttaatgatcgggcatcgcaatacgatttgccgcagccatccgccttacactcgtaaggcttcttgttccgatgagtcatcatgtgtccgtttctgggggcggtaaagagtggatgtgggttcagtggctcagtggatttgttggtcaagagatcaacagatcaacagatcaacagatcaatagagcactagttagtgcgcctcatttacttacaagtgatcttgccgcttgaatgccttcgagcagagcgcacagatgtatttccgctcgtcgctgtgcgtcagtttgtgcttggccagcgccgaggcatttccaaagatcttgcaacaaatctataaaaagtccgagtgaagaacgtatgagaaatgtaattagcactgcctgtcggctgccctctagataattgaaagcgctgcgcgctcgaacattttaatgagccacattgcgtatacgttatgttggctctctatgttttttccccgtttttacgcccaccacacaccgcatgctaattaccgaaaccgacgaattccgaaaccgaaagctaggccaaaagctggaccacatcccaacccccaaaaactatctgcaaaaacatctgtgctacgtgtatgtttgcctttgcgtgccctgcagcggtagtggaattccagtatccataccaacccaccgctgaccaaacacttcctcccaacatccgcagtatcgtaaaacgcgtcataaaatgtactttaccgccgtactccccactgcaaaaaaaaaaaaaaaaccaaaatgaagaaaaacgaggacttggagccgcagcactttgagcggctgtcagttttattgacagacgtcgaaacgtgttgaatgcccctagctgttcgattttggatgtggaaaattttcacgcggcaaaaaagcgctttaaatcaataattggtttacgaaatcaagacgaaggtgagatgtggtggtggtatgaagccagaaagtataagattttttggtgaatgcataaggaaagttttcgcagatgtcgtgattctgatgttaattggaactgtgatgcaagtaaactagtagtagtaattcaaattcaaatttatttcttatttttataggctcctcaaagaacgatatcaaagtagttttccccagtgccacagatgtgtttgaagaattctccttaaatgatttctaccctttgatggtcttcccacaattccctgaattatcaatgcgcgcatatggtagcccccaatggattgcagcttcccagccagacgggctctgcgctcaattaacgccgtgtataaacataacattagttccaagtgccagtccgccggattttaacgagctgtaggggatctgcaggtttagatacagatacagatacaactagtgatagattgagcggggtgatgcgtaggcactttgagaactgggcgcgtttcacctgccactcgaacgagacgaccttaatgtctgtttataaatattgcacgactgtctgcgcgacatgttggcatggctcagaatgagcggcgataaattggcgattaggccacggatatatacactatatatgtatgtaaatatatttagtatataggataaatgagtgccgcaaaagccgcagcggatttgcgtacgcacctgacactgctgcggtccgtgacgcgttggcgatgataatttgggtcgattcttgcggggcgcctcgacgcttatgatgccgccaatgccgctgacggtaccgttcgtgttcgtggatgccgccgatgaacttaatccgctcgcgggaacatgccgtccggtgcccttgaaactcaatcggtgaccgccgccgctgctgctgttgctgtcgttgctgttgctgttgctgccgttgctgcagttgctgctgctgctgttgctgccaacgctgatgctgctgcccaccgaggaggcggtactgaagttgctgctattgctgcagttgctgttgttgttgtgctgattgagtaaactggccgcgctgctcgtgctgctgttgctcataatctgggccaatgtggtgacattggtgaccgtgttgctgcagctgctgctgcgtatcaagcagttcttgatgtagctggtattgctcttgccactgttgctactgctgctgctgctgctgcaactactaatgctactgctgttcgtcgaggtgctcactgagtgcacactccgcctttttatggttatcttgttgggatttgtcagatgattgctgctcgtcgacttggtcgagctattgcttgaagttgctgctgtgattgagttgttgttcttgagagctgtaaggagccaagggcaataggtaagaatcatggaaatataatgtagatgggcacattatgcaattctacaagtacttcttcaaacgagttcagatactgataagaagctagaactaccttgcacacatgtttgtatataattcacttacaggctgtctgaatggtgcccaagacatctgccaacatttccggatccggatacccgatggtcagcgcattctctagcgtcgacgctggcgcacctgcaacgccatttggtgacgtcgtcgatgtggctgccgctgctgctgctgctgctgctgctgctgttgctgtctttgttgctgctgcctccaacgcgttcgcatcacgcaattgcagagtgacggatccttcggtgcccacggatgcgctgcacatcaacacgcgcggcgcgctgctgagagtcgtcaatggcagatggatgctctttggtacctgtgtgtaataggtgaaaaattcaatgaattcatggtaagctgaggtaattgtgagggaaggtggatcggtggagtcaaccaaaatagctgccaaaaggcgagacagcaacgggcagcgatggctgccaggcgagattagtcgagattattgataattcacggcaactgtcgcctaatggacgacgcgtcgcataattaattgaattttaatgcatttcactttgagtacgacaagtgactactgtgccatgcccaccgcgccaacgccctcgattcccgctggcagtatgcacggaagcatatcgagtatacgccatgtggcccatattatcaatgcacttgggaataagttttgcttattcgaacattcttcttaatgaacattttgattaggggtagttaggatgggaatttttattaaagaaaataatttgtacattcgccgccattaatgaaaatgccatttgaatgtagccatatttttcagcaatgggtttttctaagtgtgctggtcgccgccttcttggcactcacaaaacaatggtgtattttggtccgtcatttatttgcctcgtacacttggcagcccctcgacatatattaatttaaatgcaataaaagtgcactcataaattgactaaagagtgggctaatggggtcgcaggggagtccgttgttagatgaggcaattaatgctttataaaccgcaaccgatgcccaattaatgtggccaccaattgcccataaccgcaaaagaaaaggcgaatgaaaataaataaaacaccagagcataaatttccaaaagtgcctgcgacgctgaccacaatgcaaaaaaaaaaaagaaacaaaaacagttgtctgtatttcagttttcagtagtagtatgaaaaaccagagcgaagatgcataaaatttcacgcaaagtaaataaacagcaattt

SEQ ID NO: 29558 - DNA, 5943 bp, DROSOPHILA
atgtgcagcgcatccgtgggcaccgaaggatccgtcactctgcaattgcgtgatgcgaacgcgttggaggcagcagcaacaaagacagcaacagcagcagcagcagcagcagcagcagcggcagccacatcgacgacgtcaccaaatggcgttgcaggtgcgccagcgtcgacgctagagaatgcgctgaccatcgggtatccggatccggaaatgttggcagatgtcttgggcaccattcagacagcctctctcaagaacaacaactcaatcacagcagcaacttcaagcaatagctcgaccaagtcgacgagcagcaatcatctgacaaatcccaacaagataaccataaaaaggcggagtgtgcactcagtgagcacctcgacgaacagcagtagcattagtagttgcagcagcagcagcagcagtagcaacagtggcaagagcaataccagctacatcaagaactgcttgatacgcagcagcagctgcagcaacacggtcaccaatgtcaccacattggcccagattatgagcaacagcagcacgagcagcgcggccagtttactcaatcagcacaacaacaacagcaactgcagcaatagcagcaacttcagtaccgcctcctcggtgggcagcagcatcagcgttggcagcaacagcagcagcagcaactgcagcaacggcagcaacagcaacagcaacgacagcaacagcagcagcggcggcggtcaccgattgagtttcaagggcaccggacggcatgttcccgcgagcggattaagttcatcggcggcatccacgaacacgaacggtaccgtcagcggcattggcggcatcataagcgtcgaggcgccccgcaagaatcgacccaaattatcatcgccaacgcgtcacggaccgcagcagtgtcagatttgttgcaagatctttggaaatgcctcggcgctggccaagcacaaactgacgcacagcgacgagcggaaatacatctgtgcgctctgctcgaaggcattcaagcggcaagatcacttaaacggacacatgatgactcatcggaacaagaagccttacgagtgtaaggcggatggctgcggcaaatcgtattgcgatgcccgatcattaaggcgccattcggagaatcatcatgccggcggagcagccacgcccaccaccagccaatcgctttcgcccaccgccagttcgagcggtaccagcaatagtagtggtgccggcgcggccaccagctccttgagcctttctccggctacggccagcggggatgccagctccccggacggagccacctgcattcgaacctatatttccacgggcagttcggtggtggatgctgccactgggatcgctctgtcggatgaacagatcaaggcgatgaatctgccgatcaagacgggcgtgaccttgctgtcgcccaccacctcgacctcgtcgaatgcctcatcatcggcctcgtccgccagctcatcgctttccgcgacgggctcgttaccggggtcgggatcgggatcaggatcagtttccatggccccgtcaccgtcaagtggctcggtgataaccgcttgttcgcccaccatcacgctcagcgatgggatgagtctcgagggcgagggtctcactcgggaacagttggatctcatcagcaagataatgcagcaaacgaagcagacgagcgcccaggtcaccgtctcatcgcccaccagtgtcagttcctacaagatcaacaccaattcgtcgccatcgcagaacagaccgcgcacctggaacatgcaattgctaaatagtgcccaaaatgtaactgtcacagtcgaggacaactctgagctcgttactccctcctccaactcacccgtggaggtcaaggaggaggagctcagctcacagcttgtgggcaccatgaatccccacctgctcaacatcgtgaagctcgacaagcccgttgagtgcaatctctgtcaccgtaagttcaaaaatatacccgccctcaatgggcacatgcgcctacatggcggctactacaaaaaggatccggaaaccaaacgcagcgagaagaaggactccagtggtccaccccttcagactgcgagcattggagtgcgcgccctaatcgaggagaagatcatcagcaagcgcaaggatatgactaagggctcctttgtggttccggcaccaccgcacagcagtggcactaccactaccctgcgtcgatcgatcagcgatctggagagctttctcaacccgaagacgagctccagcagtcacacccagacgatgaccaccactacgggcacaaccacagcggttctcccagcggccaccaccatcaagagcagcaatggccttagtatccagcagattggcctgccgcagagcatcgagattttcagcggcggtcagaagcaggcaaagacgctcaacctgggcagtggcaccaacacgatcacgataaccaccaacaatgtacccaccaccacgacgatgagtgctcttactgcgctaaaagcgggaggcactatcagtggaatctctaccgctaccaacaccgatcccaaggattccacacttatagagcttctgaaacgcggcactcgtattgcggtcacttcgaaaaagaaccaatcccatggacaaacgggatccagtacaatgatgtcctccagtggagcggcaacaaatgctgtgggtgctgtcaccgagttaaccaccattggtgccggtggaggagtgcagacagtgggccgacagatcatcaccaacaacaaccgcaccgtgatcataccctccgatgtccaggtggtttccaccaaaagcaagctaagcagcttaagcagccttgtcaagtgcaatatgaccaatagtggcacctcctcctcgggaaatctttcgctggccgatggcacgcctctttccctgacaattgcttccaatcaggagttgactggaggaggaggcaactccagcggatcgggaagtgtgatcacgagcgggggaggtggagtctatacggttacctacacaagtgacggcaccgatctctttgacgatgccgaggtatacaacgtttcggacaccgagatgctgctgcagacggtggactccatggagctgctcaatgatgaggagatcaagagcgaacattccgaggactttgccctgctaagcgaggccggcgacagcgcgcacacccaactggtgaaactggagccggaaagtggacaggccaactccggatcgggaagcgtatctggcgcaaacactacgccgttgcccaccttccagcaattccattccaaggagctgatcatgcagaacagttcgcagatccaggcgatagccagcatgcgcggaagtggtggtggagtcctggcctcgccgctccactcgccactggcctatcccactcccccatcgagccacgagaatatggcccagagttcgcccttcatcgaggatgcagctgcccagtttgtggatgccagtaacaccttcttcggtgacaagacggacttctcgcacatctatttcaaaacggatgagggggaggccaccattgaacagctaaatgagcacgacaacgagaagatcctgaaactgaaatcagtgctagaggacagcagcttcgatccctcgatcaaagtggaggacctgttgaatggcaccgatgacgatacggaatgcgatctgcgggagtttgcggagactaacctctcgtttttggacgaggatcaagagttcctcaatgactccaggaatgccacctctccgctctcggaatccttcttcaccagcggcattggctccgcggaggatgtaaagcaggttttgcgcgaagtcctgcccgatgagaatatgcaactgcaattgagcagtgagcagcagggcgagaacatcatcgatctctactatttgcctggcttgggcttgcaatcccagatgatgcccaattcggaggatccgctgctctcctcctcaccccgcgagtttggccagcaaagacagcagttgcctatgcaaaccaccaacatgcaacagcccatggagcagacactacaggacaacaacaacatctaccagcagcaggagcagcagcaagagcaacaccagcagcaacagtcacagcaggaacagccaccgcaacaggaacaacaacagcagcatcatcaacagttgctgatgccccagcaaccactcaatcaaacggaatccctgccggcagtcggtcagcagcagggtgatttcatgctgcccctggtgggtggtcatggattcacccaagttaccagccaaacacaatacatagataacagccagggaggcatggggatgcagcccctcaacagcctgctgcaaccactgctctatggtggggcaaccacatccaatggcaacgcctcagccgggggcaatgaatctctgctcaccaccgattgccaaatgaatgccaatcaaggccagatcgatacgggcctgatgttcgcctgtggcaacacgacaaccatggccaacaaatccctggcggctatcgtgtccaacccgccgagtgtggctaacttgcagcccttgtccaaccaaaccaattccattctgaagcgccgactacgctccaatgcaccccaggagacgcacaagttctccaagttccacactctgtcgccgcatcgttccaagctgcgcaaaccatcgcgaacccactatacgccagcacccatcctgaatccggatcgcaagggcactgggctgtactgcaatgtgcgcaagcaattgggtcagggtctcttcgacgccttcgacgatgactttggggactcggtgggcttggtagacttctcggacgagtccaaggttaacttgggatccacctaccaggcgcagatacccagctgtcgaccgctggaggaggcattgcgggactctcccggcgccgagatgatgtggaatcccgaggtgcaggaggacgaaaagatcctgatgcgctacattgatctcagcaagtcgtcggccgtgcccatgggcagtcattccgaggaggtggcgctccaaacgctgcttcgggccaaaggaaactcggcggcggctgtgctcagcctactacaaacgcagtccggcgccttccagatgaagtggaccgcctacgagctggagcagttcttgcgcggattggaaaagaatggcaaggactttggcaagatcgccagtgagctgcaaacgaagtcctccggcgaatgtgtgcaaatgtactacttctggaagaagctgtgcgtggactacaaggtgacgcacttgaagatggagcccgtggtggtcattgctcccgcggtggagaagccctatgtctgcgagattgccgactgttcagcgagcttcagttcgaaggcggcactgcacggccatgtccgcatacacgcttatggtcgcagtgccagcagcaacaccaccaacaacaacagcagcagcagcaacactggcagcagcagcaacgtgcagcatgccgcagcaagcagtgccagttccggtggcaacaacaacaacagcagcagctacgcatgcgcaacactaagtggcagcaacggcagcagcaataatgcgagtaccaatgtcgctggagcagtagcaacacacagcagcaacatggctcaaaacggcagcaactgcagtggccatgcgaatgcagcaatagcaacatctgcgctttcgaccacgcccaaattggaggcgggcatgggcaataccactaacataccgattgccaaggagggcgagttcccctgcaaggtgtgcggcaaggtcttcaataaggtgaagagtcgcagtgcgcacatgaagacgcaccgcgtccaggagccggatcagaaacaccaactgcaaaaccaggctggagctggactgaccaccgtcgccacatcaacaataaccgcaccatcgtag

SEQ ID NO: 29559 - protein, 1980 aa, DROSOPHILA
MCSASVGTEGSVTLQLRDANALEAAATKTATAAAAAAAAAAATSTTSPNGVAGAPASTLENALTIGYPDPEMLADVLGTIQTASLKNNNSITAATSSNSSTKSTSSNHLTNPNKITIKRRSVHSVSTSTNSSSISSCSSSSSSSNSGKSNTSYIKNCLIRSSSCSNTVTNVTTLAQIMSNSSTSSAASLLNQHNNNSNCSNSSNFSTASSVGSSISVGSNSSSSNCSNGSNSNSNDSNSSSGGGHRLSFKGTGRHVPASGLSSSAASTNTNGTVSGIGGIISVEAPRKNRPKLSSPTRHGPQQCQICCKIFGNASALAKHKLTHSDERKYICALCSKAFKRQDHLNGHMMTHRNKKPYECKADGCGKSYCDARSLRRHSENHHAGGAATPTTSQSLSPTASSSGTSNSSGAGAATSSLSLSPATASGDASSPDGATCIRTYISTGSSVVDAATGIALSDEQIKAMNLPIKTGVTLLSPTTSTSSNASSSASSASSSLSATGSLPGSGSGSGSVSMAPSPSSGSVITACSPTITLSDGMSLEGEGLTREQLDLISKIMQQTKQTSAQVTVSSPTSVSSYKINTNSSPSQNRPRTWNMQLLNSAQNVTVTVEDNSELVTPSSNSPVEVKEEELSSQLVGTMNPHLLNIVKLDKPVECNLCHRKFKNIPALNGHMRLHGGYYKKDPETKRSEKKDSSGPPLQTASIGVRALIEEKIISKRKDMTKGSFVVPAPPHSSGTTTTLRRSISDLESFLNPKTSSSSHTQTMTTTTGTTTAVLPAATTIKSSNGLSIQQIGLPQSIEIFSGGQKQAKTLNLGSGTNTITITTNNVPTTTTMSALTALKAGGTISGISTATNTDPKDSTLIELLKRGTRIAVTSKKNQSHGQTGSSTMMSSSGAATNAVGAVTELTTIGAGGGVQTVGRQIITNNNRTVIIPSDVQVVSTKSKLSSLSSLVKCNMTNSGTSSSGNLSLADGTPLSLTIASNQELTGGGGNSSGSGSVITSGGGGVYTVTYTSDGTDLFDDAEVYNVSDTEMLLQTVDSMELLNDEEIKSEHSEDFALLSEAGDSAHTQLVKLEPESGQANSGSGSVSGANTTPLPTFQQFHSKELIMQNSSQIQAIASMRGSGGGVLASPLHSPLAYPTPPSSHENMAQSSPFIEDAAAQFVDASNTFFGDKTDFSHIYFKTDEGEATIEQLNEHDNEKILKLKSVLEDSSFDPSIKVEDLLNGTDDDTECDLREFAETNLSFLDEDQEFLNDSRNATSPLSESFFTSGIGSAEDVKQVLREVLPDENMQLQLSSEQQGENIIDLYYLPGLGLQSQMMPNSEDPLLSSSPREFGQQRQQLPMQTTNMQQPMEQTLQDNNNIYQQQEQQQEQHQQQQSQQEQPPQQEQQQQHHQQLLMPQQPLNQTESLPAVGQQQGDFMLPLVGGHGFTQVTSQTQYIDNSQGGMGMQPLNSLLQPLLYGGATTSNGNASAGGNESLLTTDCQMNANQGQIDTGLMFACGNTTTMANKSLAAIVSNPPSVANLQPLSNQTNSILKRRLRSNAPQETHKFSKFHTLSPHRSKLRKPSRTHYTPAPILNPDRKGTGLYCNVRKQLGQGLFDAFDDDFGDSVGLVDFSDESKVNLGSTYQAQIPSCRPLEEALRDSPGAEMMWNPEVQEDEKILMRYIDLSKSSAVPMGSHSEEVALQTLLRAKGNSAAAVLSLLQTQSGAFQMKWTAYELEQFLRGLEKNGKDFGKIASELQTKSSGECVQMYYFWKKLCVDYKVTHLKMEPVVVIAPAVEKPYVCEIADCSASFSSKAALHGHVRIHAYGRSASSNTTNNNSSSSNTGSSSNVQHAAASSASSGGNNNNSSSYACATLSGSNGSSNNASTNVAGAVATHSSNMAQNGSNCSGHANAAIATSALSTTPKLEAGMGNTTNIPIAKEGEFPCKVCGKVFNKVKSRSAHMKTHRVQEPDQKHQLQNQAGAGLTTVATSTITAPS

SEQ ID NO: 29560 - DNA, 2517 bp, DROSOPHILA
aaccacaataaatgccatggagcaatctgcaacacgcaaattgttaaagcaaagcccgagcagcaagtgcttgtcgcgtaccacgcgacgtatgcgtaatgcgggggcatgtggcacgcgattaaacgattggatcctgcaggcgacaagtatgtttaatttcctgcaccggaaagagctttaaggacactcgaagtgaactttaataggcataggtattaaatcttgatacgatttgccaataaaacataaccaattggttcttcgttcaattgaaacacacaaaagagcaaacgaaatcctatttaaaaaaaccaaagcgaatatctttatgcaacactcatgaatcactagggaatgctgaaggaaagtcgtgtatacacaaaacataatattttaaggcacaaacgaaattgaaatggactgcccacatttaagcgtacgattagcatatgagttttttatatatatatatatatatatttcttttttttttggatttttttttagctggctgcttgtttctgttttagctgcttagttttttttttatgagtgtttgttggtttggttttatttcttgtgtatcgaaatgtgtgctggattggtggatgctgatgatgtttggattattttctatcaaaactttcaacgcaatgttaatggataattcatttatagcttgtggcttcttgttcagcgttcagttcagttcgtttgacatttgggcgttcttgatacttttttctttgtacattttttttttttttggttcagcttttaagttgctggcggcatttagaatgaggcgacgtggtgattgatgctgttgttggctggttggttgatatttgttggctgtagcgagctcgatagttatagatagttatatagagaagtggtgtacattttatgtatggtgtagtagaggaagttgtgcgcaacttttgatttgatagttctatgctgatgctgattgcgtttgtttgtttgtttgttcttaatcagactcaccgtaacaccagcaggagttagtcttatagttgcccagctgcagttgctgttgcgcgttgctgctgctgctgctgttattgctgttgcagttggtgatgctgctgccgttgcctcctgatgttgctgctgctgctgctgctgctgctgatgcgagtgctgctgccgtgttgccactcgctgttgcagtcggcgtctgggcacctggtgtcccatttggcgaaccattctcactcaggggcgatagatccatctgatgatgcggaacatgactgggattagccgggctttctatttgcttttgatagctatgaacggctaatgagtatgcagcgttgctatgattgctgttgctgatgttgccgatgttgctgatgttgcttatgttgctgatgtggcttatgttgatgctgctgctgtcgctgctgctgctgttgctgctgttactgctgctgccgccgccgctggccagcgaatgtgtggatgagggcgacgacgtggttgtggaatgtcgtggctgatagttacaagctaattgctgcatatgtgtgggctttgattgctgatattggtatgtgagatgttcgttttctggttctagttgctggtgctgtggctgctgtgggctgctgttgtgttggttctgatgttgcaactgcagctgctgctgcaagtaatcaaaaccaaattgctgaatcagctgctcggccgccttgtccatggccaccttcataatactctccattgccttggaattgttgtcgttcccgttcagtcttcggttttgtttgtttgacggaattgatgctgccttgaatcgattgtactcgtttcgttccttattcaactgatccactgatcaactgatttatgcgttatttgttttcaattttttattatatttcgtaatttgcaatttgggctttagtttttttcttaactgttcagtgttttgattcaacctacgcgccgctttccaattattaaactttgttcaataaacgaaagaaaaagaaatggaaaatttgtttagataaagctggcttttcataggtttcgctctcctctgatcacacacacacacacgcgagcgggagagagatagataggtagatagagcacttcaaggaccttcgctttctgtctctttccccctcgctcaccatcgatatctgaattgcatattcattatagatacacatcgagtttaatgtgcaatcgagtttgtaaggctttggactgtgcatttgttgctattcttttctttttttttctacgatttgtttggtataatgctcttcatgatgatgcggtggttgtaagttaacatatagagatatatagatcgggctgattgagtggtgacttcgcagtggtttagtaggtcgctcgacttccggatgacttgatttagttcgatttgattcgatagctgacgatagctcgatattgattagatattggtgttgttggatggcgattttagtgttcttctgttctggtgcc

SEQ ID NO: 29561 - DNA, 756 bp, DROSOPHILA
atggagagtattatgaaggtggccatggacaaggcggccgagcagctgattcagcaatttggttttgattacttgcagcagcagctgcagttgcaacatcagaaccaacacaacagcagcccacagcagccacagcaccagcaactagaaccagaaaacgaacatctcacataccaatatcagcaatcaaagcccacacatatgcagcaattagcttgtaactatcagccacgacattccacaaccacgtcgtcgccctcatccacacattcgctggccagcggcggcggcagcagcagtaacagcagcaacagcagcagcagcgacagcagcagcatcaacataagccacatcagcaacataagcaacatcagcaacatcggcaacatcagcaacagcaatcatagcaacgctgcatactcattagccgttcatagctatcaaaagcaaatagaaagcccggctaatcccagtcatgttccgcatcatcagatggatctatcgcccctgagtgagaatggttcgccaaatgggacaccaggtgcccagacgccgactgcaacagcgagtggcaacacggcagcagcactcgcatcagcagcagcagcagcagcagcagcaacatcaggaggcaacggcagcagcatcaccaactgcaacagcaataacagcagcagcagcagcaacgcgcaacagcaactgcagctgggcaactataagactaactcctgctggtgttacggtgagtctgattaa

SEQ ID NO: 29562 - protein, 251 aa, DROSOPHILA
MESIMKVAMDKAAEQLIQQFGFDYLQQQLQLQHQNQHNSSPQQPQHQQLEPENEHLTYQYQQSKPTHMQQLACNYQPRHSTTTSSPSSTHSLASGGGSSSNSSNSSSSDSSSINISHISNISNISNIGNISNSNHSNAAYSLAVHSYQKQIESPANPSHVPHHQMDLSPLSENGSPNGTPGAQTPTATASGNTAAALASAAAAAAAATSGGNGSSITNCNSNNSSSSSNAQQQLQLGNYKTNSCWCYGESD

SEQ ID NO: 29563 - DNA, 3362 bp, DROSOPHILA
gacagctcctttgctgcagcccggctgcttagcattccagtcagaagtcggatagaagctattgagcggacgactcccatgccaatttgttgctgtgtgcaagaatttcatttatgtgcacaacaaaagcagcaaacaataaagacaagtgcagcaacaatggaacggtaaacgcgcccaagaaaactgggcaactcatttatggaaattattaagtgcaagctcgcggaccaaagcggttacttctcccagtcaaacggcattattatgcgtacatatttttatggacaagtgcgggaatgggcacacaaactggctgcccaggtcttaataaccgaaagctaattaaatttgagaccctcttgataaaactattaaaactagggggttgggaaatcttgctaccttaaacggtaggttctattcttgtcattttcacgttaaagttttaacgagagacgtttaagccagcaaaggtgtgaaaccacaaggaattcccagactcacagatctctagaaagctgaacatacatatctgacttatggagcccttatggcggcatatcaacccatgatcataaaaaagttataacccgattggccgtggtaattgcaactctgattccgcgcatctctcaattgatcttaattaatgttcattttaattcgagtgttctctttattgtctgctctttgccatccacatacgtgaacaaataaaattcaaacaaatatataaaaagcttgttaagcattgtattatcttacaaaaattgcttcagtaaaagggcataattttaattggtttataaattcaaaggccacatattatttattgatgaattcaacaccttgcctaattgtcaccactcacgttttccattctattagtggaaaacattgaggaaaccaattaccaaaccgcaaaccactcccacaggacgaagaccacatatataaccgctttctggagcaggaccagccacataacaccttcagaatggaacctgtgcagtacagctacgaggatttcgctcgattgcccacgacggtgttctggatcatgggctacgacatgctgggcgttccgaagacccgctctcgcaggatactatactggatatatcgtttcctctgtctcgccagccatggggtctgtgtaggagtcatggtatttcgtatggtggaggcaaagaccattgacaatgtttcgctgatcatgcggtatgccactctggtcacctatatcatcaactcggatacgaaattcgcaactgtcttacaaaggagtgcaattcaaagtctaaactcaaaactggccgaactatatccgaagaccacgctggacaggatctatcaccgggtgaatgatcactattggaccaagtcatttgtatatttggttattatctacattggttcgtcgattatggttgttattggaccgattattacgtcgattatagcttacttcacgcacaacgttttcacctacatgcactgctatccgtactttttgtatgatcctgagaaggatccggtttggatctacatcagcatctatgctctggaatggttgcacagcacacagatggtcatttcgaacattggcgcggatatctggctgctgtactttcaggtgcagataaatctccacttcaggggcattatacgatcactggcggatcacaagcccagtgtgaagcacgaccaggaggacaggaaattcattgcgaaaattgtcgacaagcaggtgcacctggtcaggtaactatgcaagtgatttacgccaaatgtttagtgatagttgaattttacgatgagcactttcatcagtttgcaaaacgatctgaatggtatctttggaaaatcgctgcttctaagcctgctgaccaccgcagcggttatctgcacggtggcggtgtacactctgattcagggtcccaccttggagggcttcacctatgtgatcttcatcgggacttctgtgatgcaggtctacctggtgtgctattacggtcagcaagttctcgacttggtgggtaatggctgagatccttggtatgcccactaactgaggttcttcgcagagcggcgaggtggcccacgccgtgtacaatcatgattttcacgatgcttctatagcgtacaagaggtacctgctcataatcattatcagggcgcagcagcccgtggaacttaatgccatgggctacctgtccatttcgctggacacctttaaacaggtaaaatgcaaacaccacgtatactttatatgacattatgtgaatttcgctttcaactgcagctgatgagcgtctcctaccgggttataaccatgctcatgcagatgattcagtagacagcaaacacaagcacggagtttgcaaaatcgggacgctttaatcgcactacgctagtaactatctttctatataactagatcacttgggatccgagggcagcttgaagcccaccaaatcggcggtatcccttacggatctctcgccccttccgtgatattccttgtagagctccaagtaccggcgctggctggctaggtaggtcaggtaggtttgacccaggaaagtcgcttcgttgcgcgccttgcagaattgttgttccgtggtggcgaacttcttgtattgcgccaaaatgtagcgcgcggccagagagtccttgatgcagccatttggagatgcctggcgcaattcgtgcagcagggagcgcagcaccttggttcccgccattctaaacacaaaatattaattgcatttgcaagaaactataaacaatcaacgacttacgtgatttttaagaaaattccaattgcttctgccgaacagctgttctcaacagagttgccacctagtcatacaatgaatatacagtgatcactctcacaaattgacactttgaaaaataacactggatcttattttttataattatcaataaatctgaaaaatcatcaaaagtttgactacgagcacagtaaaactctgtgacaaacgaaatatttaaaatttatttattttaattatattatattctcacttttgaaatcgttttgctataaatgtctaaaagtcgaacggtctgattggaaaacaagaacaaccaataagtaaagtacacaatccaactggactgtcaaactaaaaatacaaacagtaaatccagttggaaaaaaccaatttattttaaaagttatttagcagtacaccgaactcgttgcgtgggctgtttacttcctgggcttgccagcggctggcttctggccgggcttcttgccagcggctcccttggcgccagcaccacccttggtgaccttgccggcaccggccttggttcccttggct

SEQ ID NO: 29564 - DNA, 1179 bp, DROSOPHILA
atggaacctgtgcagtacagctacgaggatttcgctcgattgcccacgacggtgttctggatcatgggctacgacatgctgggcgttccgaagacccgctctcgcaggatactatactggatatatcgtttcctctgtctcgccagccatggggtctgtgtaggagtcatggtatttcgtatggtggaggcaaagaccattgacaatgtttcgctgatcatgcggtatgccactctggtcacctatatcatcaactcggatacgaaattcgcaactgtcttacaaaggagtgcaattcaaagtctaaactcaaaactggccgaactatatccgaagaccacgctggacaggatctatcaccgggtgaatgatcactattggaccaagtcatttgtatatttggttattatctacattggttcgtcgattatggttgttattggaccgattattacgtcgattatagcttacttcacgcacaacgttttcacctacatgcactgctatccgtactttttgtatgatcctgagaaggatccggtttggatctacatcagcatctatgctctggaatggttgcacagcacacagatggtcatttcgaacattggcgcggatatctggctgctgtactttcaggtgcagataaatctccacttcaggggcattatacgatcactggcggatcacaagcccagtgtgaagcacgaccaggaggacaggaaattcattgcgaaaattgtcgacaagcaggtgcacctggtcagtttgcaaaacgatctgaatggtatctttggaaaatcgctgcttctaagcctgctgaccaccgcagcggttatctgcacggtggcggtgtacactctgattcagggtcccaccttggagggcttcacctatgtgatcttcatcgggacttctgtgatgcaggtctacctggtgtgctattacggtcagcaagttctcgacttgagcggcgaggtggcccacgccgtgtacaatcatgattttcacgatgcttctatagcgtacaagaggtacctgctcataatcattatcagggcgcagcagcccgtggaacttaatgccatgggctacctgtccatttcgctggacacctttaaacagctgatgagcgtctcctaccgggttataaccatgctcatgcagatgattcagtag

SEQ ID NO: 29565 - protein, 392 aa, DROSOPHILA
MEPVQYSYEDFARLPTTVFWIMGYDMLGVPKTRSRRILYWIYRFLCLASHGVCVGVMVFRMVEAKTIDNVSLIMRYATLVTYIINSDTKFATVLQRSAIQSLNSKLAELYPKTTLDRIYHRVNDHYWTKSFVYLVIIYIGSSIMVVIGPIITSIIAYFTHNVFTYMHCYPYFLYDPEKDPVWIYISIYALEWLHSTQMVISNIGADIWLLYFQVQINLHFRGIIRSLADHKPSVKHDQEDRKFIAKIVDKQVHLVSLQNDLNGIFGKSLLLSLLTTAAVICTVAVYTLIQGPTLEGFTYVIFIGTSVMQVYLVCYYGQQVLDLSGEVAHAVYNHDFHDASIAYKRYLLIIIIRAQQPVELNAMGYLSISLDTFKQLMSVSYRVITMLMQMIQ

SEQ ID NO: 29566 - DNA, 3050 bp, DROSOPHILA
ttggatttgaataaataagaaaaactgtgttttatgctcttcaaaatatttcacaagcgtttgtataaattgctttttcatgagatttcaatcgagattttcgatttatgtgttttttcttttcttttacactctgaattcaaacacaaaactaacggacacaaacttttgaattatttcaaactgcgtccgccaaaccgtgcgttccgtctgagttgaaaatgttgactgcagtgccagaagttgaaaccgcggccgtagaaccatcagcatgaagaagcatccgcagcagcagcagcagccgacggggcggatgagcgattcgattcgggtcgggtgacttcgtattggtccagtgacccagtgctactcaaactgtttacttcttcatttcagtgctaatgaaggtcggcagcacaaatatttgtagtcgagggagttgcagccatccctagaccatcgaaaaccgtaataagggtgatgaaatgtatggttttcattggcacagaaagtacatagcaatccagttggaagccgcttaattcttttgttcttactattaatgtactcgtaaaaagtaaaaaataatttaaaaataaatcaaaattcaattcgtccctaacaattaatattacgttaaattataaatgcgtacaatcattttaaattacagtttgatgaataccagaacctagcgccaatttcaactacagtttgatgaacaccataagtccaccaaagcactgctttgcactgcttgcctagtgataactaaaaccactgctttggcgccaaatcaacgttgtttcattagcagcaatagcaatatgctaattttatagttaagaatataattcctaagatttgtggccccttaacgcctttataataatggcacagataatttgcttatcgccccccaaggaacaggtaaatactgccaatctgattatttattaagtgctttaattttcaatttattgaacaatatactttgtgactaagccgatatgatttggttgcttttgatccagtcaacgtactggctaaccttacagtagacacccggatagggagccacggtgcagggcttaatgctccacgacacgatgcccacttgctggccattgtagatgaggggtccgcccgaatctccactgcactgtccctttcctccttcgtctactcctccgcatatgtgatatttgggatccgtttggccattgtgccggctggtgcactcttcatccgagtaaatcttcagggaaacctcctgtagggtgtcctgcacacttccataagtctagaaaagatcacactatgaaataatcctatttaaaatcatattttccaatcgaaacccacatcattgagaccccaaccgatgagcactccttcgactccagcatccgattgaggcacagcaaaagccagagctggcagttccaccggggccacagagacgccatcgaactcaaaaggttcctccaccatcagcagcgagatgtcatttgcattttggcgagtgggatcaaagtcttcgtgctggattatcttctttatgcccaccacattcggacccatggcactaatattggtcactccaaactgaattgatagggtatccgcaggtcgaccattggtgcaatgagcagcggtcatcacaaaatgttttgaaataatagaaccaccgcaggaatgcgagccatcgtagctccttagggatacctacgatttggaacagaaaatatagtatcttgacattattaattaaatataaataatatttaatccgaaaataccagaaatccgttgattaagtaattgtcctcatttgggacacttccggtatattttaatcatatatcctatttgtatactttttttaaggattatatttcacttaacattttcttaccacgaaaggatatttcagcacactggagtccgtaccattgaccacccttgatatggaaggcgcggcctgaccaaccgtagttacggccaggataacgattaaactcagactgagatcttgattcgacaacatatttggccaataaatggcaccccctggttggctaccgcttttataagctcgccgaatatgcaagattaatattatttacgactttagataggcggttattgaatctgtcgtcattgatataaaatggtaagcttcaggctcccaaaaaccattttaaaaaagaaagccacaatgcgcaaaataatatggttttcccaacgaactttgtggctaaaaataatgaacgaagctatcggacataagtttatatttgtaaataaaacgaaaattaccaaatgccatttgagattaaagctaatttaaatacatgttaattaaccaacttaattgttctacaattggttttttaattggaaagaattgaaggtcgactttaaattcacatagtaacttatattaatctctggcttaaatgattttaaatcaaattattgattaaattctattataggaaatgggatcttaacccaatattagtatgatactccttatcaaagaaacaggcaaatcccaactaactcacttgacaccgatttatggcttaagaaggcaccaatttaatcattcaatatcaattttatttattgcacgcatagcccatacactattcactcagataatgcgatgactaggccaagatgatctggctcttcttgatccagtcaacatactggctgaccttgcagtaaacacccggatagggtgccacggtgcagggcttgatgctccacgacacgatgcccacctgctggccattgtagatgaggggtccacccgaatctccgctgcactgtcccttgccaccctcgtccacccctccgcagatgtggtacctgggatcggtgcgaccgccatggcgttcggtgcactcctcgtctgagtagaccttcaattccacctcctgcagtgtggattggatgtatccgccagtctaaagatattaacgcccggattagatccttgaacacaaaatataagatgaatgaaaaccaaccgcatt

SEQ ID NO: 29567 - DNA, 798 bp, DROSOPHILA
atgttgtcgaatcaagatctcagtctgagtttaatcgttatcctggccgtaactacggttggtcaggccgcgccttccatatcaagggtggtcaatggtacggactccagtgtgctgaaatatcctttcgtggtatccctaaggagctacgatggctcgcattcctgcggtggttctattatttcaaaacattttgtgatgaccgctgctcattgcaccaatggtcgacctgcggataccctatcaattcagtttggagtgaccaatattagtgccatgggtccgaatgtggtgggcataaagaagataatccagcacgaagactttgatcccactcgccaaaatgcaaatgacatctcgctgctgatggtggaggaaccttttgagttcgatggcgtctctgtggccccggtggaactgccagctctggcttttgctgtgcctcaatcggatgctggagtcgaaggagtgctcatcggttggggtctcaatgatacttatggaagtgtgcaggacaccctacaggaggtttccctgaagatttactcggatgaagagtgcaccagccggcacaatggccaaacggatcccaaatatcacatatgcggaggagtagacgaaggaggaaagggacagtgcagtggagattcgggcggacccctcatctacaatggccagcaagtgggcatcgtgtcgtggagcattaagccctgcaccgtggctccctatccgggtgtctactgtaaggttagccagtacgttgactggatcaaaagcaaccaaatcatatcggcttag

SEQ ID NO: 29568 - protein, 265 aa, DROSOPHILA
MLSNQDLSLSLIVILAVTTVGQAAPSISRVVNGTDSSVLKYPFVVSLRSYDGSHSCGGSIISKHFVMTAAHCTNGRPADTLSIQFGVTNISAMGPNVVGIKKIIQHEDFDPTRQNANDISLLMVEEPFEFDGVSVAPVELPALAFAVPQSDAGVEGVLIGWGLNDTYGSVQDTLQEVSLKIYSDEECTSRHNGQTDPKYHICGGVDEGGKGQCSGDSGGPLIYNGQQVGIVSWSIKPCTVAPYPGVYCKVSQYVDWIKSNQIISA

SEQ ID NO: 29569 - DNA, 2706 bp, DROSOPHILA
tatatgttttaagagatccattttagttcttaactaaaatcttttttaattaattattttagttactttaaattaactgaatacatttgtgtatacgttgggaagtgtcagaaaccagtttatataatttattcagtttgaatttcacaacatattgcaaaacgattaaggtacaagggagtgcgtactttgaactgcgccataaaaagatgtatcgttcagtgtatctctcggatttcgcccataactctctcttactttgtttttgatggatgtgcagctcggcacgtcgacttttcgactttgagaaagtaaactgatcgcgataaatcgatactggccaggtattttctgttaaatcgatcgacataaacaattggatacttggggaatatatatggcactagtttgaaccgttaggtgtgactgctttatattcattaagcataaaaccaaactcgtttagcttactacctcttactacggctcgttctcagcttgctggcgaaactggtttaggcccgactttgttccctctctcgcagatgaacctatagtgtgtatatctgtgtgcgatatgcttgacagccttgaagagagcgagcggataaatgaaaaacaacatagtgtttacttgttatgtggtttctgctgttgttgctaaattttttatacagcatacatttgtattttgtgtgtgtgattgtgggtcttgtttttattgaacgtattgcaatgcaatttagtgcgacatagttgcagatcatcaatatgaaacaacataatccattttaattgtttccatatgaggaaactcataagcaataatcaatagatgatactaaaatactatatttcaaatgatgatatttccatgcaccactctgaagcttttattagcatcgtgcagattatggatttctgaaaattgaaaaattacattatgctatgataaaccttttacaaggagaatttactaattttgccctatctttattcgttttacagctcgtactctggattatttacggcagtcacgaagcaaaaaacataagcgcagcctaataattggacgaactgattaaacaacagttaaaacaaggcccgcaaaaacaacggcggatcaacagttgctagtcgcaagttgcaaatcgctagttgcacgttgccaatttgaaattgcacgcttccacgactgagagcaggaaggaaaggaatcgctgccgcagcaggaagcagacgaaacttcgctgggcgaaagtaaaagcagggttgggaaataaagcaaatcaaacaaacaagaaatcgaccgcacagacccacaaaggcgctttagccagccatggaacgtgaatctaacccaatgcaacccatgtgccgctccggttgcggcttctatggtaatccagccacagatggtctctgctccgtatgctataaggtgattattttcgttaagatccagcaaatgaacgcaaatattaatccttgttgccttgtctatccctcaggactcgcttagaaaaaagcaacagccacctgtgagcagcacacctgtctccgttccaagcccacaacctagccccacattcagtccggccatcgcaatcaccaacaccgcacagcccacagtcaccagtttacaacagccacacaacgatgtcaaagaggtgagcagagttacggagatgtttgcagaggagtagttccagtttccactatcaagattagttgtaatttcaaatttaaaaacgtctttcagtcttctttaaaagctatattttgtactcctgaaaagcggtcctcttagcttagtaagcgtttcttgaaattagaaactggaactagtctagtagaatagtaactaagatccttgcatgttacatacttatggaactttttcaaatgatgatacttccatgcaccactctgaagcttttattagcattgtgcagattatggatttctgaataatgaaaaatttcataatttaatacatgactgctttgatttgcacgaaaaccacataggctcggcgttttgtgccctgtttagtatatttttacattcagtcagtgataattacttttgactttcggacataaattcagtgtaatcttaagtgaaattgttgaaacaatttgttgtttgtgcaaatgaacattaggggaaatcaagaagttggcttgcggtgtcgatttagtgatctctgtaacttttgtgtccgtgtggatgagtttactatcctgatgatcctgccaccaattactccgccgcatttgtaaataaggtaaagtgtccacggtctctatccgccagtgaccactccaagaagctgccgcttcagttatacaataatcttagaacgacttagagcggggattctgagatttcgtttcagttttaaagtagagtaccattttcctttgatcttgttcgataattgcgctattttcttcttagttaatgtttgatctgtaagcgatctcagaagcccttattcctgcaagaaatcgttcggtttaatgtcacttatttgtcaattccattcggtttcagtttggcagtagcttctgctcggaatcaaaattttcctatatttcggcccttatttcaaaattaaaagtctttccaaattgttaatatggtagttaccattgttgcctctccgcataaaaaaactggtcgtgtggtacctcccaaaag

SEQ ID NO: 29570 - DNA, 636 bp, DROSOPHILA
ttttacagctcgtactctggattatttacggcagtcacgaagcaaaaaacataagcgcagcctaataattggacgaactgattaaacaacagttaaaacaaggcccgcaaaaacaacggcggatcaacagttgctagtcgcaagttgcaaatcgctagttgcacgttgccaatttgaaattgcacgcttccacgactgagagcaggaaggaaaggaatcgctgccgcagcaggaagcagacgaaacttcgctgggcgaaagtaaaagcagggttgggaaataaagcaaatcaaacaaacaagaaatcgaccgcacagacccacaaaggcgctttagccagccatggaacgtgaatctaacccaatgcaacccatgtgccgctccggttgcggcttctatggtaatccagccacagatggtctctgctccgtatgctataaggactcgcttagaaaaaagcaacagccacctgtgagcagcacacctgtctccgttccaagcccacaacctagccccacattcagtccggccatcgcaatcaccaacaccgcacagcccacagtcaccagtttacaacagccacacaacgatgtcaaagaggtgagcagagttacggagatgtttgcagaggagtag

SEQ ID NO: 29571 - protein, 97 aa, DROSOPHILA
MERESNPMQPMCRSGCGFYGNPATDGLCSVCYKDSLRKKQQPPVSSTPVSVPSPQPSPTFSPAIAITNTAQPTVTSLQQPHNDVKEVSRVTEMFAEE

SEQ ID NO: 29572 - DNA, 2868 bp, DROSOPHILA
cctgcttgctgcctcccagaagtccagcgactcggttctgtttgtccagaccacggagaaggacgtggcagcatcgcgtgccaagcgtgataccattgccgcttccaccaccaatccctacaacctggccgtctactacggcagcgactacccggtgatcttcaacatcatcctgtggttcatggtcgtcttcggactgtctctgctggctatctgctacgccatcgctgccatggatcccggcagggactccatcatttaccgcatgacctctacccgcatcaagaaggacaactaaggaggagcaggaggagttgagaagcgagaggagcaggaggagcgagaggagcttgcgttacgctttgttatttcgtcccccttttaagttgaaatttgccaacttctacttcaatccaacagcggataaattgtgtgtttgtgtgtgtgcggacagctgtcgcagtagttggttttattatctataaataagtattaaaaaacttttcagttttcaatgcagttgcgggcgtcgcaacaattccatagaaatttgttacattttcctgttttgttgtactttttaggtttatatatatatacgaatatgcacaacatactcgccaagtcagtcagttcttcaaacgattcatcatatgtaaattatcaaaatgtgaagtgttgaaaagtaaagttaaatatatatagcctaaaaagacaaagttgcgcctggttttgttatctagtttttggggcaaatgataattgaaatcatacgtggtattcttgataatttatttaattattgcacttataaaaaggttaacatgataaactaatataaaatgaaagctatttcaatttttttcttctcaaaatcgtaaagtatggaccttaacttttataggttcatggaatgactttggcaaattgcggatataatataacacaagttttaaattgaatatttaaatgaattccctttgatattcgttaattcaagttacgctccccaatgatcgttgccattatcataaggtgaactacttccgccgctccaggcacagcatccattgccattttgacccacggagctctcccgcagcatggcctgcaggtgattaatgtagttgatggcaatcctgggtaggcaaagatcatataaatatattacagagctctaccgcagatactttcacttacctcaaactctcgattttggagtactttttcccatttggcttggatatgggtagcttggagcgcagtaagtcaaaggctcggttcatgtcccgcatcctggttctttcccgatcgcaggcggtgcgtctatagtccttctccatttgcagcgccttctcccgccaggcgggattgtgctctttggcgatgtccacctcagtgctattggctatactaccgccgctatagctcatatacatgggcggaggtaccagctcactgggtttgttgcattccaagcccactggcgaaccggtggccacctggccagcatgccacatcgacaccggctgaggtataacgctatatgtgggtggcaacagacccatattgtgcgcttccttctcgtagccacccatcacgctgggtgagtagctatgcggatgagttggcgcatatgccagcaagcctgctccatccgcggttagggtgtagttgagactaactgccggacaactggacgattgaggggcaccgagctctagaagaacgggctgttccgatgattccgcctcgccctcggatccaccgctcaaatagggtccaccggtggtggctgatacgggcaccaaaactggcggtggatcacccggtacgccggccgtggagctcagcagttgatccgtcatcgcttaagccgcttttcgaatgaccgatcaagagttctggccggactgcagcaggtttacctggactcggttggtttttttttttttagcttgtacctttttgttttgcttacttttagttgcattagagacgactctggcgatcgtgatgaatggctcaccatcgatccatcgattcgagacgtgactactcatccggggttgatgagggccacatctcgtctagtttaagaggccaccgctttgtacgtgtgtcaacaggtgatctataggggaccaacttgtcgtcgagggtccttttgtcccatccaatcgctgtgcaaacaaagcggcttaatttcctcgctattgtccgatcgatccgactccgacggctgcgaatggtgatcgaggcgcgtgtggcaggctggagttgcgtccgacttatgtcggatccctctctgggatcagcgatcgacgatcgtcgccacaacttcagtttgagtttttctttttgatcgtcgctatgtacaaacacccacactggaactcagcccatatgaaagagtgtattttcgacgcatgtaaacacaagtgttttgacttaattaaaaaatacacacatatgcatatagctagttatgaatataggttcgtctatatgaaggtaagaaacctaagcttggccaatctagctccaaacttcgcccaattctaatttcaaactaatttggtttctctctagtcaatgaaaaaccgtgatcgccagctaagtgctcttataatcctattaaaaattatattacatattctatacctatttttatgatttttcttaattgaaatagatacttgcttaaaagactgagatattgagcacagtttccattattactacatatcttctttaattaatagtaattaactagcaaattatttttttcttccgaaaattcagaattcctgaaactataaaccgcaaggaaaaaactagaagaatatctactgatagcccgcgaaa

SEQ ID NO: 29573 - DNA, 807 bp, DROSOPHILA
atgacggatcaactgctgagctccacggccggcgtaccgggtgatccaccgccagttttggtgcccgtatcagccaccaccggtggaccctatttgagcggtggatccgagggcgaggcggaatcatcggaacagcccgttcttctagagctcggtgcccctcaatcgtccagttgtccggcagttagtctcaactacaccctaaccgcggatggagcaggcttgctggcatatgcgccaactcatccgcatagctactcacccagcgtgatgggtggctacgagaaggaagcgcacaatatgggtctgttgccacccacatatagcgttatacctcagccggtgtcgatgtggcatgctggccaggtggccaccggttcgccagtgggcttggaatgcaacaaacccagtgagctggtacctccgcccatgtatatgagctatagcggcggtagtatagccaatagcactgaggtggacatcgccaaagagcacaatcccgcctggcgggagaaggcgctgcaaatggagaaggactatagacgcaccgcctgcgatcgggaaagaaccaggatgcgggacatgaaccgagcctttgacttactgcgctccaagctacccatatccaagccaaatgggaaaaagtactccaaaatcgagagtttgaggattgccatcaactacattaatcacctgcaggccatgctgcgggagagctccgtgggtcaaaatggcaatggatgctgtgcctggagcggcggaagtagttcaccttatgataatggcaacgatcattggggagcgtaa

SEQ ID NO: 29574 - protein, 268 aa, DROSOPHILA
MTDQLLSSTAGVPGDPPPVLVPVSATTGGPYLSGGSEGEAESSEQPVLLELGAPQSSSCPAVSLNYTLTADGAGLLAYAPTHPHSYSPSVMGGYEKEAHNMGLLPPTYSVIPQPVSMWHAGQVATGSPVGLECNKPSELVPPPMYMSYSGGSIANSTEVDIAKEHNPAWREKALQMEKDYRRTACDRERTRMRDMNRAFDLLRSKLPISKPNGKKYSKIESLRIAINYINHLQAMLRESSVGQNGNGCCAWSGGSSSPYDNGNDHWGA

SEQ ID NO: 29575 - DNA, 2954 bp, DROSOPHILA
tcttaatgtgcgcgaatgctatgatactatctacaagcaacttggggtcaagatcttctcagtgatgttaaaatttagcgtacgtgttagaccactttagcgccaagaccttcaatgaaacacttcatccttcaggactccaaggacattcaggaactgaacgtgcacagtgtgatctatgaccatgccctcaaggatgtctacaacatggactcaattgaagccatcgaatctgtttggaactgcctgtatttctgtcttgatcactttgtagatctagatgctttcacggtgtgtaccttgaaacttactctagttactgaacataaatatgatggcaactttagtggaaccaatgcgacgacatgctggaacgcctcattcagaacgtgacaatggcctccagcccaaaagttttaatctgcctgctgcagtatatcatccgattaggatactacttcaccatcaatcgcagcgatgtgaaaactgctttggccatggatatatgcgaaccagataaattggtagcgtgtcgggacgtatgccttgctctaaatgttagcaccagctatcgttgggccaaggccatcctacaaatgcttgtcctggagtcgagcaagctgctccaaggtgtcgaggtatgcactgctttactggatcaactgctaagatgctatctggtttgcatcatgcctattcctctgcaagctttgcatccgcacctgccggagttttacgggaagtttgtggctgtgttaatggaatgtttggtggcccacgagaaggcacctccagttctaaaagtatgttattatgtctatatatatttctggttacatctaacagatcaattttttcccagctcgtttcgcggttcatcgaagtctttagcttccaactggaaaacgggataaccgaaacaatgcccgcccaactatcagaattcaaggaggctctgtcaattgtgcaccacaagatttgtgaataaatatgggggtctttatgttatatagcgatctagtaagaagcgatatacaaacgttgccaaaacagtatgtgggataagggccattagtgccggtttccatccaaaaaagaagcccttgtagccatgttttcggataattttccgatacagatatggataggaagtgcggccatagtgtgaggattcgtttaacgttagagtagccaacgcatccactggtgtcataatgactgtgataatactgcctgttagcgccatagttatgagatcgctaagccacggctcgtcgagtctgtggaaccatgatatcactgtatggaccttatcactaataggagtatacagcacggccacggctgtgctactaatcgagtttattttccaaccggtaaataggtaagtaaatcctcccttcgcgtacatacatttgagtcctctccagaaatttcgatagctacaaaaaagggttaactttcatagctttggaagattaaacgatacacatatagatatttgctggtttcaaaattaaaccggaaaatgcctatttatgtttattcggccatattcttacttgcgcctctcgtaggatccgcgcgtaagatcagcttgccgaatgaccgccagcttggcgaacggtgttgccaatacgccgccccaaaatccggttatacccaggaccatgctagtgttatacggctgcagcattaggacgtacttgttatcctgtaagttgtagaacaacgtgtacgttgacatcgtgtgaacagtacagcgtagacaagcagccacaatgccgtaataaaatccgggtaatccatgacgggccatcagccggaacatatggtttatgcttaaacggctatggtggattacgttcgcctgcatattcacacgaactagctccatgggatgcgacaacagttgggccgtagtcttaatcagcaggccgacgtagacgggcatctttataaattgttcaatcgaactccccgcatcactattattcattatctaaataaatttgtatattctcaagaaatttaaaatgtagtgtacttaaaaagcttaggctactcgcattcagcacgcagtttggcgatctccagctgtgtctttttcgcctccaacaaggtgacggtgcgtttcagttcggatatctcgttcatcttggtaaagtactcggatttgaccaccagatactccgtttccgccttgatcagatccttctgcagtcgattggcgtcggatgacgggatcaccagttgatccagatcggtcaagtagctcaccaagttggattcctgattgcgtgcactgctatcatcctcgtcgatcagtttgtccagtagaatattcgaagtgaagtcaattgtggagccggaagagctctgttctgccggagcggcgtccgtagcctccaccttaataccgaattcagcggttagatcctcccggaacttgagacatgacttcctgtatccacatacatacattttacggactgtacttgcaaatgagcgggaaaaattataatacatacctatggataatcagcctgtctatgctggtgtttgattggcatttccgacagtgggtgcacagcgctcggtacttcttcggctccccatccttgccgcccttgaacgcgggtagaaagcccagtttcttccaagtttcatccttcgaaaggcccgagggtcgcttggccttttttgcttgcgacatttttacatacggtttgtgttaaattacgtgacagtgttgctgctgtaaattcaaccgatgtatcgataacatgccatcgaattctatcgatggtcgcttgcatttgaatattaattatatttttacttttgaatcatctgtgaaatgactgaattgtaaaaaatgactttgtctgggtcataaataacaaatttttgaaaagaataagtttaatatttagctttgtatatttaacgat

SEQ ID NO: 29576 - DNA, 834 bp, DROSOPHILA
atgcccgtctacgtcggcctgctgattaagactacggcccaactgttgtcgcatcccatggagctagttcgtgtgaatatgcaggcgaacgtaatccaccatagccgtttaagcataaaccatatgttccggctgatggcccgtcatggattacccggattttattacggcattgtggctgcttgtctacgctgtactgttcacacgatgtcaacgtacacgttgttctacaacttacaggataacaagtacgtcctaatgctgcagccgtataacactagcatggtcctgggtataaccggattttggggcggcgtattggcaacaccgttcgccaagctggcggtcattcggcaagctgatcttacgcgcggatcctacgagaggcgcaactatcgaaatttctggagaggactcaaatgtatgtacgcgaagggaggatttacttacctatttaccggttggaaaataaactcgattagtagcacagccgtggccgtgctgtatactcctattagtgataaggtccatacagtgatatcatggttccacagactcgacgagccgtggcttagcgatctcataactatggcgctaacaggcagtattatcacagtcattatgacaccagtggatgcgttggctactctaacgttaaacgaatcctcacactatggccgcacttcctatccatatctgtatcggaaaattatccgaaaacatggctacaagggcttcttttttggatggaaaccggcactaatggcccttatcccacatactgttttggcaacgtttgtatatcgcttcttactagatcgctatataacataa

SEQ ID NO: 29577 - protein, 277 aa, DROSOPHILA
MPVYVGLLIKTTAQLLSHPMELVRVNMQANVIHHSRLSINHMFRLMARHGLPGFYYGIVAACLRCTVHTMSTYTLFYNLQDNKYVLMLQPYNTSMVLGITGFWGGVLATPFAKLAVIRQADLTRGSYERRNYRNFWRGLKCMYAKGGFTYLFTGWKINSISSTAVAVLYTPISDKVHTVISWFHRLDEPWLSDLITMALTGSIITVIMTPVDALATLTLNESSHYGRTSYPYLYRKIIRKHGYKGFFFGWKPALMALIPHTVLATFVYRFLLDRYIT

SEQ ID NO: 29578 - DNA, 3556 bp, DROSOPHILA
caagagataagggtgcaaagaattataaagcatcccaaatgctgtaacgcggcactcttaatcctcgagcaatcattcgaactgaacgatcatattaatgtgatatgtctacctgaccaagaagctgctccaccacccacctcattgtgctatgccaatggatggggagagaatgcattcggtaactcgggccaatacacaaccataatgaaacggatgccactgcgcattgtggatactggcaagtgtcgcgatcacttgctatcaatatttggagcttttaactaagcacatccatactatgcgctgcaggccagccaggcgtagaaatagcctacgacgatgttggtggaccgctggcctgtccccttggaaatccctcggaaaatcgttaccagcttagtggcattgtggtgttcagattcttcaagggaccaacccgcatgaccaacgtatcatcgattcgaaattggattgaccaggaaatgactgccaatggttatgataagtcttactatatcgcctgattaggccaattagaaaaatattataactgtttaaaaaaataaaaacaaaacatatgttctttttgtagagaaaataataaaaaaaaataataagttataattatacaaatgatatataatttcagtttaattattaaagagggtgccactgattctgtatttccttttcctctaatacttgtgaaaataaaatgaattttttcatgttcgtcaacaacataaaactaaaatgttttctttttaaaaataagtattgtgacgaagtcatttctactaacattttcacatctgttaaaagttatctaaaaaattctgttaaatcgatagttgccgagtgttatcggatttggccggcttttctgtttacgttttggatgctacataatttaaaagagattttcgaaaacaaaatgacttgcgatgataccaccgaagcgctcgccactcacatgtgtgagctgttggagttttatatgctgccggagctgaaggaggacctggacaacattcagctggagacgtcgcaattcgacagctaccattccctacttatccaggatctgccaaagctctacgatttggtgcaggaattcctcctgaaaagtggtgatgcaggacacgaagaggttgtgctttgcaaacactcaattccacgactacaatctagttaactttcagctaagattcaagctcctcctgctgatttgcgaattgacagcttcgcctacaatttaccaactaaaggacgactctggtaatctcctgaagtatgctaatgatttggctagtaagctgtcttcccattggtgggagtcgacggatgatcaattcctgaaatactacgagaagaaactgcacagggattgctggaagagacaactaggagctgtgcatggtttcggcagatatctagaggtatacactaacagacaaatatttatccagatagtccagtttgttcacttactttatcccgcagcttcgttacggaaagaaatccgcaatgtccacccaaatgttggcttttgcactatccgtgggtcttaatgtgcgcgaatgctatgatactatctacaagcaacttggggtcaagatcttctcagtgatgttaaaatttagcgtacgtgttagaccactttagcgccaagaccttcaatgaaacacttcatccttcaggactccaaggacattcaggaactgaacgtgcacagtgtgatctatgaccatgccctcaaggatgtctacaacatggactcaattgaagccatcgaatctgtttggaactgcctgtatttctgtcttgatcactttgtagatctagatgctttcacggtgtgtaccttgaaacttactctagttactgaacataaatatgatggcaactttagtggaaccaatgcgacgacatgctggaacgcctcattcagaacgtgacaatggcctccagcccaaaagttttaatctgcctgctgcagtatatcatccgattaggatactacttcaccatcaatcgcagcgatgtgaaaactgctttggccatggatatatgcgaaccagataaattggtagcgtgtcgggacgtatgccttgctctaaatgttagcaccagctatcgttgggccaaggccatcctacaaatgcttgtcctggagtcgagcaagctgctccaaggtgtcgaggtatgcactgctttactggatcaactgctaagatgctatctggtttgcatcatgcctattcctctgcaagctttgcatccgcacctgccggagttttacgggaagtttgtggctgtgttaatggaatgtttggtggcccacgagaaggcacctccagttctaaaagtatgttattatgtctatatatatttctggttacatctaacagatcaattttttcccagctcgtttcgcggttcatcgaagtctttagcttccaactggaaaacgggataaccgaaacaatgcccgcccaactatcagaattcaaggaggctctgtcaattgtgcaccacaagatttgtgaataaatatgggggtctttatgttatatagcgatctagtaagaagcgatatacaaacgttgccaaaacagtatgtgggataagggccattagtgccggtttccatccaaaaaagaagcccttgtagccatgttttcggataattttccgatacagatatggataggaagtgcggccatagtgtgaggattcgtttaacgttagagtagccaacgcatccactggtgtcataatgactgtgataatactgcctgttagcgccatagttatgagatcgctaagccacggctcgtcgagtctgtggaaccatgatatcactgtatggaccttatcactaataggagtatacagcacggccacggctgtgctactaatcgagtttattttccaaccggtaaataggtaagtaaatcctcccttcgcgtacatacatttgagtcctctccagaaatttcgatagctacaaaaaagggttaactttcatagctttggaagattaaacgatacacatatagatatttgctggtttcaaaattaaaccggaaaatgcctatttatgtttattcggccatattcttacttgcgcctctcgtaggatccgcgcgtaagatcagcttgccgaatgaccgccagcttggcgaacggtgttgccaatacgccgccccaaaatccggttatacccaggaccatgctagtgttatacggctgcagcattaggacgtacttgttatcctgtaagttgtagaacaacgtgtacgttgacatcgtgtgaacagtacagcgtagacaagcagccacaatgccgtaataaaatccgggtaatccatgacgggccatcagccggaacatatggtttatgcttaaacggctatggtggattacgttcgcctgcatattcacacgaactagctccatgggatgcgacaacagttgggccgtagtcttaatcagcaggccgacgtagacgggcatctttataaattgttcaatcgaactccccgcatca

SEQ ID NO: 29579 - DNA, 1272 bp, DROSOPHILA
atgctgccggagctgaaggaggacctggacaacattcagctggagacgtcgcaattcgacagctaccattccctacttatccaggatctgccaaagctctacgatttggtgcaggaattcctcctgaaaagtggtgatgcaggacacgaagaggttctaagattcaagctcctcctgctgatttgcgaattgacagcttcgcctacaatttaccaactaaaggacgactctggtaatctcctgaagtatgctaatgatttggctagtaagctgtcttcccattggtgggagtcgacggatgatcaattcctgaaatactacgagaagaaactgcacagggattgctggaagagacaactaggagctgtgcatggtttcggcagatatctagagcttcgttacggaaagaaatccgcaatgtccacccaaatgttggcttttgcactatccgtgggtcttaatgtgcgcgaatgctatgatactatctacaagcaacttggggtcaagatcttctcagtgatgttaaaatttagcgactccaaggacattcaggaactgaacgtgcacagtgtgatctatgaccatgccctcaaggatgtctacaacatggactcaattgaagccatcgaatctgtttggaactgcctgtatttctgtcttgatcactttgtagatctagatgctttcacgtggaaccaatgcgacgacatgctggaacgcctcattcagaacgtgacaatggcctccagcccaaaagttttaatctgcctgctgcagtatatcatccgattaggatactacttcaccatcaatcgcagcgatgtgaaaactgctttggccatggatatatgcgaaccagataaattggtagcgtgtcgggacgtatgccttgctctaaatgttagcaccagctatcgttgggccaaggccatcctacaaatgcttgtcctggagtcgagcaagctgctccaaggtgtcgaggtatgcactgctttactggatcaactgctaagatgctatctggtttgcatcatgcctattcctctgcaagctttgcatccgcacctgccggagttttacgggaagtttgtggctgtgttaatggaatgtttggtggcccacgagaaggcacctccagttctaaaactcgtttcgcggttcatcgaagtctttagcttccaactggaaaacgggataaccgaaacaatgcccgcccaactatcagaattcaaggaggctctgtcaattgtgcaccacaagatttgtgaataa

SEQ ID NO: 29580 - protein, 423 aa, DROSOPHILA
MLPELKEDLDNIQLETSQFDSYHSLLIQDLPKLYDLVQEFLLKSGDAGHEEVLRFKLLLLICELTASPTIYQLKDDSGNLLKYANDLASKLSSHWWESTDDQFLKYYEKKLHRDCWKRQLGAVHGFGRYLELRYGKKSAMSTQMLAFALSVGLNVRECYDTIYKQLGVKIFSVMLKFSDSKDIQELNVHSVIYDHALKDVYNMDSIEAIESVWNCLYFCLDHFVDLDAFTWNQCDDMLERLIQNVTMASSPKVLICLLQYIIRLGYYFTINRSDVKTALAMDICEPDKLVACRDVCLALNVSTSYRWAKAILQMLVLESSKLLQGVEVCTALLDQLLRCYLVCIMPIPLQALHPHLPEFYGKFVAVLMECLVAHEKAPPVLKLVSRFIEVFSFQLENGITETMPAQLSEFKEALSIVHHKICE

SEQ ID NO: 29581 - DNA, 3311 bp, DROSOPHILA
cttggctgcattttctgtttagctgcgtttagcttagaaagtatttttggcactttaccaaggttaagtaagactttcccccaccaacgcacacaaaacaaaagccaaactgaatccggtaaaaataagtgataaagcgtggggaggaaaagaggtcataaaagtggatcgttggttgcttaacattcaattcaaggacttcatggtataagtcgttaaagtgccgaataactatctcgggacagtgtaagaacaacctttaagaaattgcattatttcgcaaacttaaatgagctggattttggcatgaaaaatgtataatgttctttattttatcatatgaaagactggttttcttttcttttctatttgagcatttttccggcttcataaaaagtcaaaccacacaaggaaaagaccgaatgagacagacagaaagagatggcaaacaaccaaaaaaaaaaagagacagcataaacgaaatgaagtcagcgagcaaagtgcgtaaacaaaaacaaacagctgcaaactgaaattgaaaacgttacgcatgcgcgccgcttcaccaaccgaatttgactggggctttccatggaaatccgcatgtactccactttttttttgccttttaccatgtctgtgtcgcttgactttcaaacctatcgaatatcaaagatagagagagagcaagagagatattgaaggaagccagtgagagacagcctcacaaaattggaagctgcaaggctggcaaatgaaaatcgcaattggaaacgtgaggttaagatgcaccgcccctttgcatcccatcaagtcatcacctcatcacccccaaccatccacattcaacatccacgcatcttttccgttcagtgagcatcgcatccgctgccgatgaaattgaatctgctccgccagcaaggcaataaaagtgggcgacaaaccagggagatgcgtcacaagtcggtcgacagccagcgcacacataagttatggagccatggatctgtatatcctgaatcagcactcgtccagctttcccaggatcgccatctgggccacatgtggcctgttgctattaagctaccaaggatgtcaagcgatacctggcggaagcagcggagagcggtaggttatagaacggatgctaaaggatatatttttcaaggttgtaatcccgcctagcgtccacatacgtctccatatgccggaggtggtgcgtcagcatacgcatttccacaatgtctacaagttaccgaggaaagttcacccagttccagcgccaccacccacaacgattgcatcaatgcatccgcatttcgtgggaaaaccccatgttcaacttttgggctatacaacggcagtgggaaattcgggaccaatggcttccaatataatgcagttgatgggaacggcgaccacgcccactatgatggcaacgccaaccaatttaatgcccaactatggtccggcattattcgataattacaatcaggagtcggctttgagtgccacaactaccacaacgacaatgagacctcagatcttgaaagcctccaagcagcaacaattgctgcaacaaattttcacacctcaaataaatggagatgaggatacctcagcggaggataatcaagtggagagcaactcattactcaataataatttccttgaggcactgcaaagggaatattttgcaaagttcggcggacgacgcaaacgcaaaaaatcaagttcaaagttaaggaatcccaacaaggaatatttgaatagctatagaaataagccctactactatcaggatgaggatttgtccgagaactttgaagattatccagaagaacagccacatcatgaggattacgaggaagtgatggtgatgagtggtccccataaatatggacgttattatccatcagaatcggaggaaacagatcaggatcacgcacatggttatgatagtgctgtggccttcagtggtcaggataatagcatttcatcctccatgccaacaatggaggaatttcttcatgatgcaaacaacccggcatctggttatggtgtaggtggaaactttgaaccttacagcaactcaaatgatatgtattcccaaccctggcagccatcctcaacgagtgccacaatgagcaatagttggtcgagacccactgccaattcctttaacaattcctcaaaagggccaaaatcaagacctgcaatatcaaggggtcgaactaaagttcggtatgtcaagttgatcactaggaaaaaacgcaaaagtcacattcgtacaaaaagatatcgaccataatctgagatggcatttgtaaaagggtaaatgactcactcttttatagtttattttaattatttataaatgataccaaaaatttaccatgtggcctgattttcaaacgttaaacagttgatagagtatcttatttcttaaaatttaaaactatttaagtcttaccccttatatataatctttaatatcatcaattgatttgcggctcttacctgaaatgagaaataataaaagattgttaattaaaaaaacattcaagtacaaaggagtatacttaaaagcaagtttagatgctattattgtcaaaactgcaatacaaggcaagttaattataaataagtaatagagaaatggcctcctttcacaggcttctttgatttccgttctgcgggctttctggccaaaacaaactctcattagatgcgcacacaagtcgtaatggaagcgaactgagggaacggcaaactaccctataaacagaaaccagaaaccgatccaccatcctatcctgtgtcacttccccatccgaagcaaataaagtgtacaattaaatggccagttgacgggcaaaaagggattcgggcgggctgagcaaataataagtacaaatgctaataaaattcaattaaaggccacaaaattacaataaaagtgggacccaggaaggaaactaactctgccttttggacaaagtcgaagagggtatctcggctcatgaaaagtcgaaattaatgactcatttggtcaaattgaagtcgtaaactagaaaagcagcgtaagaaagagaaattcaggtcttctcttattactcatcctgagtatacgtatgaattcaaacgaatatataatacctcttattaaaaccaggccaataaaaaaagaaacatacattgttcattaaatatttttaaatactcatgatgatgaagaattatatattatatttaaaatcaatatagccttgtattcaacaactactgggtacatatttaatatgcatagt

SEQ ID NO: 29582 - DNA, 1254 bp, DROSOPHILA
atggatctgtatatcctgaatcagcactcgtccagctttcccaggatcgccatctgggccacatgtggcctgttgctattaagctaccaaggatgtcaagcgatacctggcggaagcagcggagagcgcgtccacatacgtctccatatgccggaggtggtgcgtcagcatacgcatttccacaatgtctacaagttaccgaggaaagttcacccagttccagcgccaccacccacaacgattgcatcaatgcatccgcatttcgtgggaaaaccccatgttcaacttttgggctatacaacggcagtgggaaattcgggaccaatggcttccaatataatgcagttgatgggaacggcgaccacgcccactatgatggcaacgccaaccaatttaatgcccaactatggtccggcattattcgataattacaatcaggagtcggctttgagtgccacaactaccacaacgacaatgagacctcagatcttgaaagcctccaagcagcaacaattgctgcaacaaattttcacacctcaaataaatggagatgaggatacctcagcggaggataatcaagtggagagcaactcattactcaataataatttccttgaggcactgcaaagggaatattttgcaaagttcggcggacgacgcaaacgcaaaaaatcaagttcaaagttaaggaatcccaacaaggaatatttgaatagctatagaaataagccctactactatcaggatgaggatttgtccgagaactttgaagattatccagaagaacagccacatcatgaggattacgaggaagtgatggtgatgagtggtccccataaatatggacgttattatccatcagaatcggaggaaacagatcaggatcacgcacatggttatgatagtgctgtggccttcagtggtcaggataatagcatttcatcctccatgccaacaatggaggaatttcttcatgatgcaaacaacccggcatctggttatggtgtaggtggaaactttgaaccttacagcaactcaaatgatatgtattcccaaccctggcagccatcctcaacgagtgccacaatgagcaatagttggtcgagacccactgccaattcctttaacaattcctcaaaagggccaaaatcaagacctgcaatatcaaggggtcgaactaaagttcggtatgtcaagttgatcactaggaaaaaacgcaaaagtcacattcgtacaaaaagatatcgaccataa

SEQ ID NO: 29583 - protein, 417 aa, DROSOPHILA
MDLYILNQHSSSFPRIAIWATCGLLLLSYQGCQAIPGGSSGERVHIRLHMPEVVRQHTHFHNVYKLPRKVHPVPAPPPTTIASMHPHFVGKPHVQLLGYTTAVGNSGPMASNIMQLMGTATTPTMMATPTNLMPNYGPALFDNYNQESALSATTTTTTMRPQILKASKQQQLLQQIFTPQINGDEDTSAEDNQVESNSLLNNNFLEALQREYFAKFGGRRKRKKSSSKLRNPNKEYLNSYRNKPYYYQDEDLSENFEDYPEEQPHHEDYEEVMVMSGPHKYGRYYPSESEETDQDHAHGYDSAVAFSGQDNSISSSMPTMEEFLHDANNPASGYGVGGNFEPYSNSNDMYSQPWQPSSTSATMSNSWSRPTANSFNNSSKGPKSRPAISRGRTKVRYVKLITRKKRKSHIRTKRYRP

SEQ ID NO: 29584 - DNA, 5626 bp, DROSOPHILA
atgctccaacagtcgcttgactcccagcggcgtggccggaatattggcctccatgtccagagccgtgcgtccgatgttgacctcattgaagccatccacatccttgtccacatcgacggcattgcagatggtgcgctcattgatgtgctcgggtaccggcagctgcaccagtatccccgtgacctggggatccttgttcagatcggcaatcagttgcagcagctcctcctgcgtggtagaggcgggcaatctcttggtctcactggagatgcccacctcccggcaggcgaccatcttgttagccacatacttctcgctagccggatcctcgcccacaatgacggccgtgagatggggcttcggatagccagcagcctccattcccttgagctcgtgtgctagttgggtgcgcacctcctgggctatggccttgccatcgataatttgagccatgttgctggaatgcgatcataatattatttaattgaatgagattacactgtactattccttaaaacattatttagttgcgatattcttgaaaaaatatagcaggaaaggtcataaaccgggaatgataagggctgtcggtaaatccccgcctgtcactgcagttacgcaacagtaattcccccacaacacacacttaggcgcataagtacatgtatgattcacccacttgtttaccaagcggcgtgcgcgagcggcaatgaaaaattagtgattccccattcttagaatgtactttttaatgccgagctatcgatggatccccttttgctagtgatctcatgcagggcgccgatggtaattgtttgagggaacaagtttagattgcttatagaactattctaaagaatagattccatggaataataaaggaaactaaataaatgctaataaaggaaaataaattaatgctctgatatttaaaaataaagcttgctatcccaggcatcctagtttcgcgtatttttcattccacaagagaatagtatttgtaaaactaaggtactttattgatcaacattcaatacataatcaagttgggttaaccagtagggcgtaagcctgtggatccactgcctgcagggcacgagcaaatgtggaaaactctacagaggctccttttcttttcacgtgatccaacagatcctccgcgcccagccatataaaggcgaactgcttcagatgcgtctggcgggctagttgcatccatttccgatcttggggatcggacccatgtcccaaaggctgattcagcagcgaacagagccggtcgtaaatgaatttgtttttgagcagcaactgcaatttgttgttgtccatttcggtgtctctactggattcatctttctgtcttcttggaccactacttaggtccaactccacggaatcctcgtcctttgtttcgatgtccatctcctcggacttgatctccagctgaccagcatcgctactttcgtccgacgatgaatcgatctcctccttgaccttacatggaatccaggtcatggccagttctcccttctccggatacacattcttcagcagctggaccacccggtcatttgccttgcgttcggccaattccaagggagtatggccggctgcattttgtgcctgcaggatgtcggtaaggttttcattttgggcatccagaatgagcaccaatagctccacactttgctccagaactgccatgtggagtgcattattaccatccattgtgttggccacgctaatcgaggtccgatcatagctgatcagtttcttggccacatcgtacttgttctgtcgaatggccatgtgcaaaggcgtcagaccatcgtcgttcgttagcgagaggtccaattgtacggttggcactccattaaggaagctttccacgcagcttaagtgctcctccttgacggccacatgcagtggggtatttccggcattattcttcagatttggattgcatcccatacccagcaaaggtcgtatgtagtgcgctcggtcttgctggcacgccacatgcagggcactatcaccgtccgcattcaaagtgctattgaccacatctttcagattgaagtagttcatcacctgtatcgtctggatggccagcttcagtttgtcctttttgtggctgatcacttcgtgcaggagcgtgtctctattgtagttattcagagcatgctcgataaaccacttctccactttgtggtgcgagatttttattggcgatatgcggtcctgtttgtaaatttcgaataagtcatccaagcatttaattgtacgatttcgatgcgatggcacttccgcccggttatgaccatcgtgctgcaactctcccatgtctaactggcagatcttctcgagatcagaagagttgtgctcgataagtttgcggaaatcttcggaagcaataaattcatttagatgcttttcgcgtccgaactcctcacttatagtctgatcatgctgtgaaaggtttggcaagccatttggtggctgcgccaagcccagcgttttgggcagatccagcgagttattagagctttctgttcccgaactgctgctattggcagaggacccggttcgtcggcgtttcctcgacacaattacgctccgtggcttgtagcggaagggcagcgccgggaatgagcgctcatcgtcggagggacgaatgagctcgatgtacacgttgacctcgcggtccacgtccttatctttgtacggaggcgtctggcacacaatggcatattggtggtgtacatccgattcgcggaactttgcgtatgcctcccacacggtttccccgtcctcatcctcctcgaagaacctcactttaatgttcttcttgctgaccttttccaccagtagaataagctcatcgttgcccatcaccccgccagtgggtttgctcaggcggacgatgcgaagctctccagtttgtgccgacttgcggttattgattgcattgctgtatacaggcggtgcaagtggaacccatgcgccgttgtcctcaattttaaaggcctcaaagcagagccgcacctaaagttggtgttacttttttagtgagttctttgttgcttttcagtaagttaattgcttcgatgttatattgctcagttattttagcagagaaatttatataattcgagctaaacgagtagatactttacagactgcttaaataaaaagattaaaaggtagcaaatgcaacctataattaattgactaaagcattctaaagtgagcaattaaacgtgtgaataataaatgcaaacgtgcatattcacctcatcgaagcaagcaactcgatattgtttacgcgctggtttacccacctggttcaagttcatgtccttggcctcacgctctgtctcctgatgcagttcctgtagctgtttgtgggacaactcgcggcggttcatctgaaagaccaggcgatcctgcttcttcttgcacagttcctcgaatatgtacttcttggcggtgtgtatgatgcccatgttgataaattgcgccacatagccgcgctccttggacacgtgcaaatcatgcggatcgcacacatcccgatcgtccttgcgcacgaccagctgatgggaatgtgggctgtccaagttagtttggaacaaactgcaccggatgacggcgggtccatcgtagttgcacagtgtaacctccgggaaggttttgggcgtccgcttcgaattggcgccatttagcgatccatgtgttccatgcatctcgctcttgtaccgaaagcggaacttctccaccggttgctcaacgatccgcagctgcggcacgtgtttgatatcgccgtcagatgccaggccattttgatggtatccaaagttttgggacggtggcacagtggccggagcgggcacaaagtactggtgatccatgtacatgttgccaaaactggtgacattagcaacgccgaaactaacgccagtggagtttattaaattggtagcacccaattggcaaattccgccgttgttcaacagctgattctggtatggtgagtttgccattggcggctggtgtggtgaattgccgccgggcaaattaagattggcgaagtccgtttgcagttccatggttttcggggagtgggctggtgaaaaggatcggttggtggagttgggtgatgtactgctgctatagccactggtgctggatgcatcgttcataaacatcacatttttcccattgtccaggtcgtagtactgattcatgttcatagtccgtatcaatccaatatttctgatcaatagcgtcttaacaactcaaaagtgatccgctgccttcgccgatcggaacgctaatgatcgaaacgagctccgccgatggctgaccattcgttttaggtacttccccgatgttcggcggatgggaaattatctgcggcggccacgtcgagatgactcacgggtttttctggcgcaccactcagtgtgatttttttgatcggctatactataagcatgtacggaattctggattcgcggttgttgtttacagagcgaaatcacactgtttatatgtattccacccaactaatacatatatgcaaatttatggaaaaacgacgcagcgaatcggggaactttagtgcgccactgctggaacgaaaatgaacgaagcactgcgcgaacacaagtagtatcgctcacgagttgcgagcaaaacgctcgctgccctgataacaggtttaagctatttgcgccgagctttcgggtcagcttttcacggaaactacggttcaaattcatttatttgaatacctgatttcaacacaccgcgcacactaaaataaaaacaaggcagagctgccaccggcagataaaacgagttgggtggcaacgccccaatcagatgttctacaaatctagggatggaagcgtacgcgattgtttgttcccattattcttgattaatttttataaatataatttaacctatttcgacaaaaagatataaaggtatataatacaaaatattaatataaataatacaacacttatataaatataaagatataaggaattttaatacaaatttataatgagaaccggcgtaacaacttataactgtgttataaaataataataattatgcaatgcaagtaccgaatattagtattattaataatatatttttacgctttccattggcttttcccttaattcactttcgtcacgcactcatctctagcgcacgctttgtttttcttcgtatgatattacgttttatttcggacccgattcactttcttatgagcatacacacctgaagttagactttccggcgtaattccgggaagccaagaccgaaatggatcctatagaacgtcgcaacatggttggaaaatttaaaacaccggaatgttcttttatcctaagacacttgtgctaaatgataaaaaaaaactacataagcatgcgccactgaactaatttgcaattcagtcggtttccactcccactggacccgcgcacacacacacgcacactcacgcagaaacagctgatctgttgccaggctgcacttagagtatatatgtatgtatttacgatccctttgcactttttgatgtgttaatcaatcttctcac

SEQ ID NO: 29585 - DNA, 3330 bp, DROSOPHILA
cactaaagttccccgattcgctgcgtcgtttttccataaatttgcatatatgtattagttgggtggaatacatataaacagtgtgatttcgctctgtaaacaacaaccgcgaatccagaattccgtacatgcttatagtatagccgatcaaaaaaatcacactgagtggtgcgccagaaaaacccgtgagtcatctcgacgtggccgccgcagataatttcccatccgccgaacatcggggaagtacctaaaacgaatggtcagccatcggcggagctcgtttcgatcattagcgttccgatcggcgaaggcagcggatcacttttgagttgttaagacgctattgatcagaaatattggattgatacggactatgaacatgaatcagtactacgacctggacaatgggaaaaatgtgatgtttatgaacgatgcatccagcaccagtggctatagcagcagtacatcacccaactccaccaaccgatccttttcaccagcccactccccgaaaaccatggaactgcaaacggacttcgccaatcttaatttgcccggcggcaattcaccacaccagccgccaatggcaaactcaccataccagaatcagctgttgaacaacggcggaatttgccaattgggtgctaccaatttaataaactccactggcgttagtttcggcgttgctaatgtcaccagttttggcaacatgtacatggatcaccagtactttgtgcccgctccggccactgtgccaccgtcccaaaactttggataccatcaaaatggcctggcatctgacggcgatatcaaacacgtgccgcagctgcggatcgttgagcaaccggtggagaagttccgctttcggtacaagagcgagatgcatggaacacatggatcgctaaatggcgccaattcgaagcggacgcccaaaaccttcccggaggttacactgtgcaactacgatggacccgccgtcatccggtgcagtttgttccaaactaacttggacagcccacattcccatcagctggtcgtgcgcaaggacgatcgggatgtgtgcgatccgcatgatttgcacgtgtccaaggagcgcggctatgtggcgcaatttatcaacatgggcatcatacacaccgccaagaagtacatattcgaggaactgtgcaagaagaagcaggatcgcctggtctttcagatgaaccgccgcgagttgtcccacaaacagctacaggaactgcatcaggagacagagcgtgaggccaaggacatgaacttgaaccaggtgcggctctgctttgaggcctttaaaattgaggacaacggcgcatgggttccacttgcaccgcctgtatacagcaatgcaatcaataaccgcaagtcggcacaaactggagagcttcgcatcgtccgcctgagcaaacccactggcggggtgatgggcaacgatgagcttattctactggtggaaaaggtcagcaagaagaacattaaagtgaggttcttcgaggaggatgaggacggggaaaccgtgtgggaggcatacgcaaagttccgcgaatcggatgtacaccaccaatatgccattgtgtgccagacgcctccgtacaaagataaggacgtggaccgcgaggtcaacgtgtacatcgagctcattcgtccctccgacgatgagcgctcattcccggcgctgcccttccgctacaagccacggagcgtaattgtgtcgaggaaacgccgacgaaccgggtcctctgccaatagcagcagttcgggaacagaaagctctaataactcgctggatctgcccaaaacgctgggcttggcgcagccaccaaatggcttgccaaacctttcacagcatgatcagactataagtgaggagttcggacgcgaaaagcatctaaatgaatttattgcttccgaagatttccgcaaacttatcgagcacaactcttctgatctcgagaagatctgccagttagacatgggagagttgcagcacgatggtcataaccgggcggaagtgccatcgcatcgaaatcgtacaattaaatgcttggatgacttattcgaaatttacaaacaggaccgcatatcgccaataaaaatctcgcaccacaaagtggagaagtggtttatcgagcatgctctgaataactacaatagagacacgctcctgcacgaagtgatcagccacaaaaaggacaaactgaagctggccatccagacgatacaggtgatgaactacttcaatctgaaagatgtggtcaatagcactttgaatgcggacggtgatagtgccctgcatgtggcgtgccagcaagaccgagcgcactacatacgacctttgctgggtatgggatgcaatccaaatctgaagaataatgccggaaataccccactgcatgtggccgtcaaggaggagcacttaagctgcgtggaaagcttccttaatggagtgccaaccgtacaattggacctctcgctaacgaacgacgatggtctgacgcctttgcacatggccattcgacagaacaagtacgatgtggccaagaaactgatcagctatgatcggacctcgattagcgtggccaacacaatggatggtaataatgcactccacatggcagttctggagcaaagtgtggagctattggtgctcattctggatgcccaaaatgaaaaccttaccgacatcctgcaggcacaaaatgcagccggccatactcccttggaattggccgaacgcaaggcaaatgaccgggtggtccagctgctgaagaatgtgtatccggagaagggagaactggccatgacctggattccatgtaaggtcaaggaggagatcgattcatcgtcggacgaaagtagcgatgctggtcagctggagatcaagtccgaggagatggacatcgaaacaaaggacgaggattccgtggagttggacctaagtagtggtccaagaagacagaaagatgaatccagtagagacaccgaaatggacaacaacaaattgcagttgctgctcaaaaacaaattcatttacgaccggctctgttcgctgctgaatcagcctttgggacatgggtccgatccccaagatcggaaatggatgcaactagcccgccagacgcatctgaagcagttcgcctttatatggctgggcgcggaggatctgttggatcacgtgaaaagaaaaggagcctctgtagagttttccacatttgctcgtgccctgcaggcagtggatccacaggcttacgccctactggttaacccaacttgattatgtattgaatgttgatcaataaagtaccttagttttac

SEQ ID NO: 29586 - protein, 969 aa, DROSOPHILA
MNQYYDLDNGKNVMFMNDASSTSGYSSSTSPNSTNRSFSPAHSPKTMELQTDFANLNLPGGNSPHQPPMANSPYQNQLLNNGGICQLGATNLINSTGVSFGVANVTSFGNMYMDHQYFVPAPATVPPSQNFGYHQNGLASDGDIKHVPQLRIVEQPVEKFRFRYKSEMHGTHGSLNGANSKRTPKTFPEVTLCNYDGPAVIRCSLFQTNLDSPHSHQLVVRKDDRDVCDPHDLHVSKERGYVAQFINMGIIHTAKKYIFEELCKKKQDRLVFQMNRRELSHKQLQELHQETEREAKDMNLNQVRLCFEAFKIEDNGAWVPLAPPVYSNAINNRKSAQTGELRIVRLSKPTGGVMGNDELILLVEKVSKKNIKVRFFEEDEDGETVWEAYAKFRESDVHHQYAIVCQTPPYKDKDVDREVNVYIELIRPSDDERSFPALPFRYKPRSVIVSRKRRRTGSSANSSSSGTESSNNSLDLPKTLGLAQPPNGLPNLSQHDQTISEEFGREKHLNEFIASEDFRKLIEHNSSDLEKICQLDMGELQHDGHNRAEVPSHRNRTIKCLDDLFEIYKQDRISPIKISHHKVEKWFIEHALNNYNRDTLLHEVISHKKDKLKLAIQTIQVMNYFNLKDVVNSTLNADGDSALHVACQQDRAHYIRPLLGMGCNPNLKNNAGNTPLHVAVKEEHLSCVESFLNGVPTVQLDLSLTNDDGLTPLHMAIRQNKYDVAKKLISYDRTSISVANTMDGNNALHMAVLEQSVELLVLILDAQNENLTDILQAQNAAGHTPLELAERKANDRVVQLLKNVYPEKGELAMTWIPCKVKEEIDSSSDESSDAGQLEIKSEEMDIETKDEDSVELDLSSGPRRQKDESSRDTEMDNNKLQLLLKNKFIYDRLCSLLNQPLGHGSDPQDRKWMQLARQTHLKQFAFIWLGAEDLLDHVKRKGASVEFSTFARALQAVDPQAYALLVNPT

SEQ ID NO: 29587 - DNA, 15366 bp, DROSOPHILA
catagatcaccctgcccgagtcgcaggataccacgaacaggaaaccatcggccgcctccaggataagatgcttaagctcctggtcggtcaggaaggagggcttgtaagtgccatcgctgctggtatttcctgtgccacgcagtgccttcatgtgagccactgccatgcggagaatggtgagcttgtccggtttgcgggccagggcactgcaggtgggcaccatgtccgagagttccgtgatgtaggccgtcatcttgttgcggcgacgtcgttcaatctcgcaatggttctcgcggctggcgaaccgctccttgtcctgtatgttcgcctcgtccatgcttggaatgcgtaattagaaaacgttcgtcgtaatttgggtcgcctgtgctctgtggaaaaaggttcgtggaattgagagaggggcggggtaggggtaggggttagtattttgtctacgtcgtgcttgtgtgtgtacacttgctggctggccagtaaccttatttccctcgctttttttacccttctactcaccaatggggggtgtacagaggtacttggtttatccaggcaattttattcggctggtcttatgcgcttttaccattaattctgtacttttcttctacactacacgataaaatctctgtttactgcgcgaagtgtgaccgtagtgtggactaacaaatatgccgatgcagtgtatagcaaatcgataacaatgcgctaggtggcaacacaggtgcgttgaatcaagaccaagtggcattactataaaactagaacgttacattttaaaattttcatcctaaaaaataaacacaaatatacaataaaattttaatttaatattgacttttttaaggcccagctatctgttggctaattaagtaaatcaatttaccgcttgtcgtgtggtgaaaatgtttttatctttcaaaaacatacaagatcggcgtccatttaaaaaatcgcttttcccagaaaataaataaaaccatcattgtttctgatattgttgtcagtatttaatggtattacagcattgcgttttcttacatatatcaaatataatttcataaatacatttaaatgtttagtcataactaggcgcagtatcgtaattttacgaactatgattctttaaaaaattaaaagtttattattagtggcaataacatgtcttcatttactcctatccggatgcattcttataacaaaatagtaagcttgcgctttattccatttcgcatatttctttgtgttctttgcttattacattttttcagttttaatacaatcttaggtaaagttttatccgctttgcttgtccttcatgttaaatctgcttggtattgttaattaattattggcaattttctaactgcatggtttatttagatgggcattccattttccatatttcattcaagctgttggtacaacatacaagtcttttgttctatgtttatagttaaatatatttaagtctccattaaaatacgtgcactacttaagtgtaatttaaaatgcggcttcattaaaatagcttagcgtgcttaatacgtcttttttgtggtgtctttgttggatgaagtccggtttagatttaacttcagcataattcgttgactagaaattaacttaagtacttagggctagactaatattaactttaaacaaacacgctcttgcagttttctattttggtttacgtgcataagtgttttctgatcaatctttgttcattaatttgtgctgcaaacttatttgagttgcgtcgatatccatttccttgctggaaagtagtcaatatttgcttcttgtgatttcatatcaaattaaggtcattcgtagttgctgcaagcttaaacataacttttcaaatccgttaacaattttattttgcctttcaaaacatttagcaccaaaatgattaatcgccaaataaagaatccttgtagtttgtgtttgttaattttgcacatcgtttggaatttagacatagagaaaaactaagtaaatttgcaacaactttcaattaattccaatttaaattcaaaatactataaactcctatacaatactttggtttttcagtatacaacgcacaaatgggcgattcaaggtttgaaaaaaattgaaaaaacgaagatatctttgttggattgaacaatacatagttttggctctggggcgcacttacttataacatcacaaaaaaattaaacatacgtgtgataaattagttgatagtttcatacactaatctagctgcgtaaactatctaatctttagtctgcaaaaataatgcctatctctccaatataatattctttgcgctcaattgcgtttaaaatgcaacaacttgtgtgtatggtataatgtgtagctttagtaggtttgattgcgagtaaatgttgcttggctaggaaacgcccgcgacctttctacgtggtgtaggtgcggatgacgtcccggatcaccgcccggcacagtgggcactggccaccacccactccgcgccactgctcgatggcgcagtcgtagcacatgcacatgtgtccgcacatgtacagcaccgagtcgatgggattctcgtagcagatggtgcattcggcactcgaatcggtgctctgctggtcgctcaggctgtccttccacttgttggccgcattatttgtgctattggcaatgggctgctgataaagtaggcattagtatatgtctagggagtatttcacaaagctttgacactcacctcgatgtactggctgctggtggtgctgataagggtgccgctggagcaggctccggccagaacaccgctggaggttaccgtggccgttggcctggccgcgagttggccgtttatatcgtgcgagctgctagcaggtggcaggttgaccaccagaacggtgccaccaccattcggctggatctggagaatatctccgttggagggcatgctgatcatgcggctgccattgactccgccagctgaggccaaagtgctcgtactctgggctacgctcagctgcgagggatgatgcaacagcttggcagtggctccggcattcagactgctcatcgactcggtcatgggcagcatgcgggacgtggaggcagcgttgcaggcggacgagctgctggcattcacattgacctgcggctgcgatggatacgcaaccatgttgggtaactgctggcggaacatcctcagagactgcgtcgagccgtagacatccaggaaggcccacagctggagggactggtccacatgcatcaccaccacagctggtccgttgttcttgctgatgctcacttcaccgttgggcgccacgaagaaggcaatctcatcgccgcgctgaggagcagctgcaatatccttgctcaccacccagtactcggggcgatcgagcaggaaatccgaatcattgggcaaatcattgggctgcaacatggccggattgcaggaggtcagacccaaagccaaggcacccacgtacatctgttccgttttcaggacctgcacaatcagcttctcaccaatgcgaatgggacgggcagtgaacacatatccctggcagaagtcagattccgtacgagaagccacaaagcgatcctgcgagagccgcacattccggcccttggtgttgtggaagggcactggaatcagtcgtccgttggcattgtagcgcagaggaggcagtccattggccaaatcatgagcaatggccgcctgttctacgctagccacgcttccaccgtttcctgccaagtgcagggattgcagggacggcatcacatggcgctccagatcgtgctcgatggccgcagtgtgtcctggcagggatctcctcgactgctgatgcgggtgatgggaattcagggcggaggaggcattggcagctggctggggcatttgctgttgctgggcgggcacagtggccattggtatagccgctggctgctgctggtacatgtaaatgcgagaatcgagaaactcaatgcccgtgcagttgccatagatatcgatcaccgtccacagcaggcttctcgtatcgatgccggtcagtatcacacccttctcctcgttgtttataccatagatcacatcgccagctccattgacatagtagtaaagtatgttgtccttctcgcagtactgctcgtgcagagccttggcccagaagccaggcctgttggtcagatccggacaggcgtacttgggcagcgttccctccagcgttacaggatcgttgctggtgaatccaaagcgaattccaccgttccagttgttcgagatctcagcaaacttcacgcagatcctctcgttgatgcgaaccggacgcgctgaaaaggtgatggccctgcagaagctctcaaagcgacgggccagggttccgtcccttgaaattcggatgttgtcgccatgtacggagtggaattgcagcggaggcaggttgttggggccaggacatgaagagggtgagcggcgaactgaaatggtatatgtgaaagttgagttagttaggatttttttatatagtattatatttcatttaaatttcttgcaatacgaacatgatttaagctgttagttttatcccacaaatcatttggaaaccttgaatatactttcgcattcacgaaatgctgccttcccacaatccatttatctattagttacatcttctgccacattgttttaaaatctttttcccaacgccagttccccgtatcaaattacgcatcttcagaaagatgtctccaggtagccgaacattcaaccatgtgctagcgatcgaattacgcagaagcccaaactgatcttcctgggtgagtcaataacccccaacccaagacccaaatttagttggtattcaagcacagggcacgtgactgtattgaagactattgaaccattgggttttggggatttgttgccttgggaaaaaacgcggactcaaaaggatttaccatggtcatcgccagctgctggcccattttcttggaaaatcaaagtcacatacgtgtgaagtacaagaattacttgaggaatagataaatattggtgtaggttaggctagagaattcttacaattttcaagcgatttcaaattcctagatatatatttgaattgttatttttgttactaactcgttatactggataggcgtttttttattaccaatgaatagcttgttgctatcgggcttatggtaaattctttgcaattatatagggaagcacttcaatggcagaggaatactttaggaatcccttaaacatattcccgaaattgacttaattattgcaccttgcaaatctacgtatatcagcagctgctgacaattaccacaaaagactaagtcagggcagaaaaacctataaccgatccatatggccatacatataaataattacttgaggacgaggagtctttggatggcgacaggtttctgctcaggtcgctggaatatgcccaacatcagacgattccggcggcatgtcaacagttgcagtaaaaaaatatataaactcagtttataagaaagccatggcgaaggacctgaagcagatgaggctgatgttgctggtgattaccatgttgatatgcggcgcgtggcactgaagatcaatgtgtttgctttggagcggcatgtggcagctgtcctttttcccttcttctcgattccttttgcagcctttgttgtgcggaggaagaaataggaaggtcagaagaaagcagctgtacggttggaacaggtaaaacaacccctatggagagcgagagtctgtccccgtttttcgagggtagttttcaacgttttcgatcgcttaggggttgctgcagtttcacagtctgcagctgttcaaatttcgaaaaaaaaatactgcaagacagatacaagatacaaatgcttgggtatctgaaagattcccctggcttggcagtgtctttggggttgaaatttaatcctaagccagggccaatgacttgcacacgaaatctgtactgtctgcttcccgaaaaaatccaatcctcaagtgcttccgctgcacgaagtggaaagggagcaccagcttccggtggctcccattctaaaggaaacatcgcgcctttggagattcgccatggaggaggaggagaaccaaggtggagtagaaagccggcccaaagacttctactacgagtgcaataccccaaccatccatatttatgaagtgaccgcgacgaggaagtaggaaatcacgtactacgcacatacgtgtactggattggggcctattagctgcaggatgttgtcgtctcactagcctggccaactggcgacgcctactttttatcggcccagacagtcgtcagtcaatggatggaattgcagcggcgatcactagcattcgctggcatcaatgaatgaatgaatgagttaaatacgcgcctcgcatttttccttaaactcgcagtcccagaaacggtgcttcatagacgcgttgatactttcaattagccaggccacaattaattaagtgcagcgaggctttaatgataccctccaccccatgataactaattgcattaaatgtataaacgatagacttgtcggttgggcagcaaacagtggcggctcgaaagcgttcaatacgctttcagagtaggaaattattaaatgaataccttacggtagggctggctttccggcactcttaactatgattaaggatacataaagataatacttgtgaaacaagccagtagcgatgaagaccaagaaattatccatttcccaggccatccaatcatcatccagtttcgacacaatatttgccaaataacaacagaagatgaaaagttcaaactttcggtggtggtcatggtgcgtttggagtttgccgctctgccgcagcaaaggttcccaaacgccgattcccgaactggcaaaacgaagaccctggcacatccgatcgactgcaaacgatctggcggtggctgctgcagttgcaggcaaattttcgttgctttgccaaaatggaaaacctgatttaccgttcggcgcggatcgggaacgtctttggattcgccaccagcaagcgaagcaaaacatttcccacgctgagcactgggcaaaaatcaaacacaaactccgtagagacaattcccacgactccaaatttgtatatataggagatatatagtaaatttgcggctgccgaacatcgaaaacctgtaacaagccgcggtaattgcgagaagagagtgcgcagttcgcagttcggatcttcccgaatcttttggcgaactagagaagaagctgcagctgggtgatcgagcgggtggaaaatgtgaaaatcatgcaggtgtcataaaacaaaaccccgcttcaatggaaaaaaaaggaaaccaaaaccagtgaggcaattgtgcggccatcgttaggcgaaatcattttaacgatctgatgaagatctccaaacattcaaaatcccattgagcgcagacatcattagatttcgattggcactcgtgagtcgagtttggcgatcattaaaggcagattacgatgatgtctgaatgaaggctaacaaggggatacgatgtgaagctaagcatcaacttattgaaacgatcggttctagcaaatcgcatcaaagttaattagttcggtagcattcaggctgtgggaaatcattggatcgctttaatatcaaaatctttactataaaataaactaattttcaaagtatgggtatacaaagcattatcttgacataaacaaccaaccattgctgactgcaacattgttcccgctgccacccacttgaactccctacccgtttgcaccgattgaggtcacaggtcacgtgctgccccgccccctgcgccgtgcctgttgttgtcagcccacgtgcgtgtgtcagaagacgtgtgcggacaattaacacgccccaggccgtttaattgcaccggaagtgtcccataaaagccggggctttcgttcaaatgccggcttggcatgccgaggtggagcaatggatcatttatacaaattgtatcaattggtcaagcatttggcataaattatcggcattttgcagcgccgcaatcagtcagatcgagtgggtgaatgagccggattgagttggacctaagcattttgacttccacgggcttgtcaatggatcgacccacgccgataaataacttataagcgtatctatggccagccactccgcatagtgtgcttatttttctacattttccttttcgacatatcagtgaaattagttgaggaaacagtgtgtgggtcgtttgttagttagtcagagacttgatctgtgggcagaaaagccaagcgttggtcgcagcttaagagctgaacaattgtccatcgaatggcttgtaaaacaattctcacagcaataaaagcaatgctaaattcttgtcttaaatatacgtaaatgagcctaatgaatgttaattaatcgctcgcaaacaaacaatttgcatggggcgggaaaatatgaaagttttcctcacaacagatgaaattttgttttgttttgtttgtcggcgtttttaagttttcctttctaaccacaaaataccaagcatttcatcccaatcaattttccagtttgttttttttttttttttttgatttggtgctaaatgcacttagcaaagaagttcgactgaatcgaaaaacccaaccattgagttgatgcgaaaaccacttccgttctgcttgagccgctgaccagtacagcggaaattgcactgagatccactcattgcgagctgctggagcgggaaactctctcttgcggtgtggattcccccaccggtttggcccctcctggcagcgcatgtaactctagaagcttagcaagaatggacgcaacatagactctctgcaaatataataaaaataattacacaacggaaaaggggccgactggtggcggcggctggcggcgttgacagcaatgaaaccagaggtcaaactatgccaagttgctgcaaccagttgttattgtgtctgagcagctttacttcttcccaagtacattgcacttttcatgcgattaagcgaaatctgatactgcacgccatgtgaactaaaaatcaaagaaatcacagcagcagcaactctaagtatatcaaccatttagataaagactcttcaatgaaactatcgataatacagaaaaaagtgactaatcaatgaaagtgcatcaggaaatttcccacaggaagttcgaagtaatcagggaagaccataaagataatcggttatcttacatgaagaaattagtgttcaaaatgcttggttttgcacttgcttaagaaatccaccttacatattgatcacacctctctcaatgggttcaatgactcccaatgacttttctccccgttcggcataaattttccgactttccacgcacatacacacaaattagttataaacacccggatgaggaggcgcagctccccttctaatataattagccaccgaaagggagagatatagaaaagcatatatatagagagagagagacggagaagcgctgaagggtgggtggccaaatcaaatttacatgtttatttttacaagcctacagaaagcaactcagtggaatgggagcacctctctatcgatgcacatgatatatccgcgtatatgtatatagtataaatatctatggttgttttttttttatttgggcactgaagcatgcaggaggccccagccaagaagaactcaactttttcagctccgaatagacataaaaccgatctaaatatacacgcgtagatataaggaagcaaaagggaaccataaaacgcacaataaacaacattgtctcttaaagtgttgacggtttctgcagaataaatcgtatggatgaaatatgaaatgaaatagttggacttctctttagttgaagcaacttaattattaaggaagcaattaataccgcgtttcgttgcagtactgtactttcgagagctcagatacgataagcccggctttcttccgctacgttttgttgcgctttgtaggcttgctgtttatcgaagcgttgcaattactgcaaagggccagtggtggggtctacataaatgtacagaaaaacatatatacgagtacaatatagaaaagttgatagttactaccatacaacttgcatttcctcgcacttgactgcacaagacacccacccccgcgattctctacagtctgccaactctttgtgtaattaaatcactcgagcgttgagggggagcccacaataacagcttgaagttgcgctgagtggaatggaatggactcgaagagtcgtcttgtgataggaacacatcattattacattataacgctgttattacaatggctgacacagacaattcaagtgttttggactgcggaattcgatagtttttgatgccaccggttgcattgttatcggccatctcattaaaacttagtgttatagccaaaccatgcaaatttcgaagattttaacatattaaataccccgaacagatgcaaagctaaaaccaatctagttttggttcctcccaaaataggtgtacatattaattacattaaagttctgcccgaatttcgggccacaaacgctaaaggccaaaaaccaaaatccaaaaaactcgatctggccaagttgctagcgatggatagccgaacagctgctgctgctggacatagaggcaggcatagattaaatacccgtaggtgttcgaaccgagtagatataccgacggtgatttatgcctagcaaccagcacatcgcccgccctaacccgtctggaaaacacgccctcccgaaaggcctacaaaattgacccaaagatgcctttggatatcttttcgtctcactttgcgtgagttaattgcagctgatttcttggccaggtatatactatgtgctatgtggtattgctatattatatgtttctacctgtagctacctgaactccaccttttgtcttgcgtcagttgcaacaccctgcggtgtagcgtatctacttagattttttctttatctatggggtggtgtgcgtttttatctttcggcacagacaaaatgttaacaattttgtactacacatttgggtcgtgaggagaactaaggcgatacagacaatggttataatatacttttcattttcaattttcatttagttatacactaggttagaattgtgagataaatcgaaaagatttgttaaccgatgttcactgtactcgtcttcaagctaccaacttagttcaataactgataagcgaaagatgtgggaggcactaaataggtcacaagatagctagctctttagaaaaaagctagcaaagttagcacaagcatctttgtgtatatccccaatagttaacaactggtatttatagttaatcagttgcaaaacgtttacacttgtagagataacatttcgcagtgtccgttatcaaagcgcgaaattaagcagtgcttcatatcagctatatgaactatactatactacaataactatacgcaaacttcagaatgacacatcgagatgatgacctcatgagggggagaaaaataagtgaaaaaataacgaaggggatgcatgaaagtggaaaaatatagcaacagatgtatgtagcgaaaatgctcagcatacaactgtgctcaacagaaaatggcttactgggaaatcaacaataatatgttaatattgaagcaatattagcaaaatgtctcttaaacattatgtttacagaaatttgtttttaagcggcgacttacatattttgaacttaatagaataacattttaggtctcagaagttaatgtatgtatatttatggtgaccaacattgtacttagatatgtacttatatgtacaaacttccttggggggtgcgtaccgtcattaacaattgactatttacttttggccaacaatcgaaggtcgggcgacaatttgtatttgtgtgtcccataatcggggtctcaaagacgagttggcagtgctcagttgcaagcacacgcacggccaagcaaaccatttcgaaaagtaaaccgtgagaagctaagtaaaagccaagagcagataaactttttagccaaagcaaacgtggcatgccaacacacaataataataacaacaacaaacaaggtacgaaatgtaatagaaaatgcaggtacaaaaaagcaaaagcagctgacgccgagcaaaacaacaacaaagcaatttcattgattaccgataggcaacgcacgttcaaaacaaacggactggagccgccgcataaaacataaaccattgcgggcttaagcgctcagcagaaaaataaaaactccaaacacactcaagcttcaaagccacgcctcttcctcttctcatcccgctagtccatggctcttctcttcttctcctgccgtggatcgtttgcttttctgttgttgctacctttgtttttgcttttgccgatggcggcaacggcgcttcgcgtacaattccccgaaaggcaacagcaacaacaacaagcaatactgaatgaggcagatgcaaaaacagtggtggcgggaaaaatggaatctcttaaatacagtacaatattttgcatagccacttttgacaaataaaactattccagtgctgaaggactaaattaataacttttttttattattcatattgcgtcgttcgttgatattcgactgctagttgtgcgaccacaattgttcgtaggaggccagtaaaaataaaaaaaaaaggggtagaagcttagcctatgcgtcactggctttgctttgcttttgcttcgcctgctttggccaaaaaagagagcattgaagccgagaatgcaattgagccaaagtcaaaaaaaaaaggtgatttgttgtttttacttctttttttttgtctttccttagctcagctgcttgcaaccaaaacaaaaacagcgcaacaaattccccagcccagataatcgttatgataaacataatcgctccttgggaaaattgcttttggtggtattttcttcaactcaagatccctccgatctggtcttctcgatcaatttgcggttacttgggtgcgattgaaaaattcagttttcgagaactgacatttccggcgaaaaagtcggagtgtcgatgttaaattctgccgaaaaagccttgagagaatttcacatttaagattttttcgcgcttcttttgtgtctatctagtcggaaaaaaacaattactattataatcgcaaactgggcgtgttctgggtgagcatttattcattagctttttgttttaaactaactcaaactttttcggtttttgctcttatctttcgttatttgttattgttcttgagacgtaaaatgctaatgtatgcataaatgattgcggctggctgtgtttctcgcttatttatcttgccgctttaattaaccgaatgaatgaaagagcgataggtcagaccacatgctaatattatgtgggaatatcgctggagataaaaatacgattcccagatcgatgaataatgtatttaaggcattttcgcacgcggtaattacatttgcttcaagactttaatggtcagatatcacgaaggaagttttatattgttaaaatgtactacatctactttagaacccaatcacactgattttaaaaattattcctggatattccgagaattgtacgtcctttgaaaaacgacttggaaattaactgaatattcttgttaatatatccatcgatatccttagcccgattcttagcctggtactaatgcgactactaacccaatccaaagcgcttcttgatcttcttgagcaagtgcattttcttcttgctagagagcttgtccttggtgctcatgagcagctcgttggactccatggccaggacctgggcggcctgctgggcgggagtgggcatggcgttgtgcagctgctgcatctgttgcagatgctgcaagtgctgctgattctggtggtgctgctgctgcggatggagagttaggtgcggatggctgccctgcatatagttggctggtatatccgatagacccatggtagtggattatttcttatttcgttatttaaattaaaacagacgaactaaacgaacacgcgtaatgctaatgaaaatgcacaagctgcttgcgtattttatttggcattaaattaagcgatagagttcttcttcgaatttgaatgttttccgttaaaacattttgaatttggttggttgtttgtctgcgcgcaacgggaacaaacgaaacgaaacgatacgaaacacaaagaccgacgacgacaacttcgagacaacctttcgctgagttttttttcaacaaataaacggtggtgcagccttttatagcttcgcaccagcgcgacgtcgctgacgcagctcagctggagagtaacggatagtactggcgcgcagaaattctcccgtcagatttggctttttttagtatatgttttcaagatatttagaagtttaggtatgccagtaagacatatttggaaatttaagttttttataattactattaacgtttagtgacaatttgggctgtagatttgaataacatttcctgttttacaatttaattaaaatcaagaaacggtaactaaattacattaaaaatgcttcaatttatttaaacttataatttgtaagcaatctattcaaataatttaaaatttatccattttctggctaagggctgtcagccctgagcgtggatggagcgaaaaagagagctcaagagagaaaattatgagacgccatcgctctctttctctctctggcagctgtttcttatttactatggtttcgctttgtgcctgctattcgcgtgtatagagcctcccttataatttacctttatgcctctaactctgcaccttgatcagggattcctccacatcttctcctgctgttgctcttcctgcttcttgttgttgttgctctaggcctgcatttgggattttggccatagtgctctgatcttcactaacagttattctcctcaccttagtgtgtgtgtagttcagccaggttcaaagcaattctttttctttttcgcagggtttacaaggtctggctcatataactagaaaactatttcaattgccctaatgcttttgatcgtgaactttgtgggccaaatatcacacgtacatacatatgtgtgtatgtatgtactcagttggagtatgtatggagtaattccatgggaattaaaaaaaattcccaaacgtttcttgataataataataaatttcttcttttcccaattgttttcggcacatttaattgtccat

SEQ ID NO: 29588 - DNA, 3974 bp, DROSOPHILA
aaaggttgtctcgaagttgtcgtcgtcggtctttgtgtttcgtatcgtttcgtttcgtttgttcccgttgcgcgcagacaaacaaccaaccaaattcaaaatgttttaacggaaaacattcaaattcgaagaagaactctatcgcttaatttaatgccaaataaaatacgcaagcagcttgtgcattttcattagcattacgcgtgttcgtttagttcgtctgttttaatttaaataacgaaataagaaataatccactaccatgggtctatcggatataccagccaactatatgcagggcagccatccgcacctaactctccatccgcagcagcagcaccaccagaatcagcagcacttgcagcatctgcaacagatgcagcagctgcacaacgccatgcccactcccgcccagcaggccgcccaggtcctggccatggagtccaacgagctgctcatgagcaccaaggacaagctctctagcaagaagaaaatgcacttgctcaagaagatcaagaagcgctttggattggttcgccgctcaccctcttcatgtcctggccccaacaacctgcctccgctgcaattccactccgtacatggcgacaacatccgaatttcaagggacggaaccctggcccgtcgctttgagagcttctgcagggccatcaccttttcagcgcgtccggttcgcatcaacgagaggatctgcgtgaagtttgctgagatctcgaacaactggaacggtggaattcgctttggattcaccagcaacgatcctgtaacgctggagggaacgctgcccaagtacgcctgtccggatctgaccaacaggcctggcttctgggccaaggctctgcacgagcagtactgcgagaaggacaacatactttactactatgtcaatggagctggcgatgtgatctatggtataaacaacgaggagaagggtgtgatactgaccggcatcgatacgagaagcctgctgtggacggtgatcgatatctatggcaactgcacgggcattgagtttctcgattctcgcatttacatgtaccagcagcagccagcggctataccaatggccactgtgcccgcccagcaacagcaaatgccccagccagctgccaatgcctcctccgccctgaattcccatcacccgcatcagcagtcgaggagatccctgccaggacacactgcggccatcgagcacgatctggagcgccatgtgatgccgtccctgcaatccctgcacttggcaggaaacggtggaagcgtggctagcgtagaacaggcggccattgctcatgatttggccaatggactgcctcctctgcgctacaatgccaacggacgactgattccagtgcccttccacaacaccaagggccggaatgtgcggctctcgcaggatcgctttgtggcttctcgtacggaatctgacttctgccagggatatgtgttcactgcccgtcccattcgcattggtgagaagctgattgtgcaggtcctgaaaacggaacagatgtacgtgggtgccttggctttgggtctgacctcctgcaatccggccatgttgcagcccaatgatttgcccaatgattcggatttcctgctcgatcgccccgagtactgggtggtgagcaaggatattgcagctgctcctcagcgcggcgatgagattgccttcttcgtggcgcccaacggtgaagtgagcatcagcaagaacaacggaccagctgtggtggtgatgcatgtggaccagtccctccagctgtgggccttcctggatgtctacggctcgacgcagtctctgaggatgttccgccagcagttacccaacatggttgcgtatccatcgcagccgcaggtcaatgtgaatgccagcagctcgtccgcctgcaacgctgcctccacgtcccgcatgctgcccatgaccgagtcgatgagcagtctgaatgccggagccactgccaagctgttgcatcatccctcgcagctgagcgtagcccagagtacgagcactttggcctcagctggcggagtcaatggcagccgcatgatcagcatgccctccaacggagatattctccagatccagccgaatggtggtggcaccgttctggtggtcaacctgccacctgctagcagctcgcacgatataaacggccaactcgcggccaggccaacggccacggtaacctccagcggtgttctggccggagcctgctccagcggcacccttatcagcaccaccagcagccagtacatcgagcagcccattgccaatagcacaaataatgcggccaacaagtggaaggacagcctgagcgaccagcagagcaccgattcgagtgccgaatgcaccatctgctacgagaatcccatcgactcggtgctgtacatgtgcggacacatgtgcatgtgctacgactgcgccatcgagcagtggcgcggagtgggtggtggccagtgcccactgtgccgggcggtgatccgggacgtcatccgcacctacaccacgtagaaaggtcgcgggcgtttcctagccaagcaacatttactcgcaatcaaacctactaaagctacacattataccatacacacaagttgttgcattttaaacgcaattgagcgcaaagaatattatattggagagataggcattatttttgcagactaaagattagatagtttacgcagctagattagtgtatgaaactatcaactaatttatcacacgtatgtttaatttttttgtgatgttataagtaagtgcgccccagagccaaaactatgtattgttcaatccaacaaagatatcttcgttttttcaatttttttcaaaccttgaatcgcccatttgtgcgttgtatactgaaaaaccaaagtattgtataggagtttatagtattttgaatttaaattggaattaattgaaagttgttgcaaatttacttagtttttctctatgtctaaattccaaacgatgtgcaaaattaacaaacacaaactacaaggattctttatttggcgattaatcattttggtgctaaatgttttgaaaggcaaaataaaattgttaacggatttgaaaagttatgtttaagcttgcagcaactacgaatgaccttaatttgatatgaaatcacaagaagcaaatattgactactttccagcaaggaaatggatatcgacgcaactcaaataagtttgcagcacaaattaatgaacaaagattgatcagaaaacacttatgcacgtaaaccaaaatagaaaactgcaagagcgtgtttgtttaaagttaatattagtctagccctaagtacttaagttaatttctagtcaacgaattatgctgaagttaaatctaaaccggacttcatccaacaaagacaccacaaaaaagacgtattaagcacgctaagctattttaatgaagccgcattttaaattacacttaagtagtgcacgtattttaatggagacttaaatatatttaactataaacatagaacaaaagacttgtatgttgtaccaacagcttgaatgaaatatggaaaatggaatgcccatctaaataaaccatgcagttagaaaattgccaataattaattaacaataccaagcagatttaacatgaaggacaagcaaagcggataaaactttacctaagattgtattaaaactgaaaaaatgtaataagcaaagaacacaaagaaatatgcgaaatggaataaagcgcaagcttactattttgttataagaatgcatccggataggagtaaatgaagacatgttattgccactaataataaacttttaattttttaaagaatcatagttcgtaaaattacgatactgcgcctagttatgactaaacatttaaatgtatttatgaaattatatttgatatatgtaagaaaacgcaatgctgtaataccattaaatactgacaacaatatcagaaacaa

SEQ ID NO: 29589 - protein, 754 aa, DROSOPHILA
MGLSDIPANYMQGSHPHLTLHPQQQHHQNQQHLQHLQQMQQLHNAMPTPAQQAAQVLAMESNELLMSTKDKLSSKKKMHLLKKIKKRFGLVRRSPSSCPGPNNLPPLQFHSVHGDNIRISRDGTLARRFESFCRAITFSARPVRINERICVKFAEISNNWNGGIRFGFTSNDPVTLEGTLPKYACPDLTNRPGFWAKALHEQYCEKDNILYYYVNGAGDVIYGINNEEKGVILTGIDTRSLLWTVIDIYGNCTGIEFLDSRIYMYQQQPAAIPMATVPAQQQQMPQPAANASSALNSHHPHQQSRRSLPGHTAAIEHDLERHVMPSLQSLHLAGNGGSVASVEQAAIAHDLANGLPPLRYNANGRLIPVPFHNTKGRNVRLSQDRFVASRTESDFCQGYVFTARPIRIGEKLIVQVLKTEQMYVGALALGLTSCNPAMLQPNDLPNDSDFLLDRPEYWVVSKDIAAAPQRGDEIAFFVAPNGEVSISKNNGPAVVVMHVDQSLQLWAFLDVYGSTQSLRMFRQQLPNMVAYPSQPQVNVNASSSSACNAASTSRMLPMTESMSSLNAGATAKLLHHPSQLSVAQSTSTLASAGGVNGSRMISMPSNGDILQIQPNGGGTVLVVNLPPASSSHDINGQLAARPTATVTSSGVLAGACSSGTLISTTSSQYIEQPIANSTNNAANKWKDSLSDQQSTDSSAECTICYENPIDSVLYMCGHMCMCYDCAIEQWRGVGGGQCPLCRAVIRDVIRTYTT

SEQ ID NO: 29590 - DNA, 5207 bp, DROSOPHILA
agacgccgaggatcaagagtgcgcccgcgtggtaacgcccatgatgtggggcatgattcccttttggcacaagggtgactatcggcggcatggccttaccaccaacaattgccgtctggaacacctgatggactccaagctctatcgcggtcccttcaagcgaggtcagcggtgtgtagttatttgcgaaggattctatgagtggcagacggctggacctgcgaagaagccatcggagcgtgaggcttacctggtattcgtaccccaggcggcggatgtgaagatctacgacaagaatacatggtcgccccaggatgtgaagcttttgcgaatggctggactttttgacgtctgggaggatgaaagtggcgacaagatgtacagctacagtattatcaccttccagtccagcaaaattatgtcctggatgcactaccgcatgccagcgatcctggaaaccgagcagcagatgaatgtgagtaaagcatttgttaatccttcgttaatccaggtccaatttacccatcctcgcatattctaggattggctggactttaagcgagttagcgacaaggaggccttggctacattgcgtccggctaccgaactgcagtggcatcgtgttaccaagctggtaaacaactcgcgaaacaaaagcgaggagtgcaacaagccgatcgaattggcggctaagcccgcaaagccaccgatgaacaaaacgatgatgtcttggctgaatgcccgtaagaagcgggaagatcaaatcaaagcaaaacagagcgacgatgaggatcaggaaaaagaagctacgaccatgggagggacctccgctgacggctcacccgtagagaggcccgccaagcgacccagattcagggactttaagaggaatcgtacggcagctcccccgcagagcagcggcagctagatgaaatcgggcaaaagataaacctcatcagtaactaaagttccatagtttgtagtacattaagtttattttcagtaaaaaccaaaatttttattctcaataaccaaagttttaagcattatcatcgttgtggtgagcttacttacaaatgttgggacttagcgactaaaaagttgtttagaatttgttctctcgaagtgaggttaactaactaatgttatgtttgaacttgacgtaattaattaaatggtctcatttctgcgagtgcgattcaattttgagcgccactgtattgagcttggaagtttttgttgtcgcggcataaaatgcaattaaaacaaaatgaaaagctgcacataaagcatgtaaagtgtacatatcgaccgtatattgtttgctcgtctacgtctgattgccttggcgaaaaatgagcgaaaattaatgggaaatggtgtcaatgttgttcgcgggaaaagcgtggaagtggtacacttgctgagttgcttacaactatcaatttgtggtatattaggctacgaattgtttaattatttatatatttatacgttgtatgaactttaaaatgctcaatgacaaatacaaatgaatactctgcacacagcgtgtccacatatgaacttaatcctatataatcgatgagaaagtttagaattcatgggctatatagcggtgtaaacacattgcctttagttacgaacaatcgtaaggccttaattgtaaatacttttgcacggccaatgagcgggttaagtggaggcggtggcgggcgggctaatggatacgggaggtggaagtgaagaagacgtagcacacaaaaataaagatatctgaatcgtgtacgtgactacccctatgtacttaaaatgctatttacgagattacaatttgcatgcgtttggctgaattatttcaacaatgtaagatggattgcacttgagaagtggttaagagagacacagattaagttgcgggacgggggaagagtgggaatcgaaagaaatggtgtgggtattactcgaacggcgtgctgaacatattgatattcagatcctcaaacgtggtcggcgtgtgatccaacatctgcagcatatctgagaactcctgaccctgtggctgtcctgctcctgctggtccaccgggatgagcgtgcggatggtgcggatgcgccgttgggtgcggcggatgcgggtgtcctccagcctgctgccagtcccacattcccggcgcattgggtggcggtggtggtcccgcctgatatgctcctggctgcgcttgctggcgatttccgtttccggcactcaattgtgtataggttggaccgctcggcgacctggccggactcgtctgctgatactgatagccttcggtcacgggctgctgctgctgttgttgctgctggggacgcagtgctgcccaggagttgggtgccaccggcgtgggtgaggtgccagacttgggtatcttagccaacggtgatggtccgccagcactgtacggcgagtgtgtggtgtcgtaggtatatccgactggtgtggtttgcgccgatcctggccgttgctgttgttgctgctgctgttggggcgtaggagcctgcatggccagcatgtgcgtctggtacatgccatcattcgtggcgctgcccactggagttaactcgcggcgcgcatagtccactcctggggcagcctgaacataaacgtgttgctcctgctgctgttgttgttgcacttgctcgggcgtatgagcagccgccgcatccaggggagcaccgtgcatggtcttcccagaactgttggtgcacactatatattccacttcgtcggtatatggattcagaaaggcataggcctgtgtgcggagccaaacgtactccgaattcttagctctggctctgtacaaaagcgagaacatctgtcccttttgcttgagcacctggtcaaagctctccttcatgtggctctggtcctcgggatgaaagaaatcgtagcagatcttccccagcagctcagtaggagtatatcccaatatgttaaggacacgctgatccacaaacgtgaacttgccatccatcgcatgacgtgtgatgaactcactctgattgttcgatccactcatatcgttggctgccgtggaggtgacctgcagacggccgatggccaccaggcagcagtgcgagctcatgtcgtccacatcgcgctccatgtgcatgttggggaacatatcggtgggcggccagtttttgatataacccgtgcagtgaaccacggcgtagttggtgccatcccttgaaggtccgagggagtttcgttgcttgagacgattcaagtgccccgagaccatggactccgggtttacattgcccacccgcatgcgacagatgaaaccacgacgagcacccatgctcaaacgcatgctggactggtgaccctcctttttcacagttcccgactttagatccaggatgcggccggcattctgcgattcctgggttgataattgctcgcggatcttctcgcgatcatcgggatgaatgtgctcatacaggctagtgccataccaatcgctttgggtgtagttcagcacgggagtcaccgaatccgatacatagatcaccctgcccgagtcgcaggataccacgaacaggaaaccatcggccgcctccaggataagatgcttaagctcctggtcggtcaggaaggagggcttgtaagtgccatcgctgctggtatttcctgtgccacgcagtgccttcatgtgagccactgccatgcggagaatggtgagcttgtccggtttgcgggccagggcactgcaggtgggcaccatgtccgagagttccgtgatgtaggccgtcatcttgttgcggcgacgtcgttcaatctcgcaatggttctcgcggctggcgaaccgctccttgtcctgtatgttcgcctcgtccatgcttggaatgcgtaattagaaaacgttcgtcgtaatttgggtcgcctgtgctctgtggaaaaaggttcgtggaattgagagaggggcggggtaggggtaggggttagtattttgtctacgtcgtgcttgtgtgtgtacacttgctggctggccagtaaccttatttccctcgctttttttacccttctactcaccaatggggggtgtacagaggtacttggtttatccaggcaattttattcggctggtcttatgcgcttttaccattaattctgtacttttcttctacactacacgataaaatctctgtttactgcgcgaagtgtgaccgtagtgtggactaacaaatatgccgatgcagtgtatagcaaatcgataacaatgcgctaggtggcaacacaggtgcgttgaatcaagaccaagtggcattactataaaactagaacgttacattttaaaattttcatcctaaaaaataaacacaaatatacaataaaattttaatttaatattgacttttttaaggcccagctatctgttggctaattaagtaaatcaatttaccgcttgtcgtgtggtgaaaatgtttttatctttcaaaaacatacaagatcggcgtccatttaaaaaatcgcttttcccagaaaataaataaaaccatcattgtttctgatattgttgtcagtatttaatggtattacagcattgcgttttcttacatatatcaaatataatttcataaatacatttaaatgtttagtcataactaggcgcagtatcgtaattttacgaactatgattctttaaaaaattaaaagtttattattagtggcaataacatgtcttcatttactcctatccggatgcattcttataacaaaatagtaagcttgcgctttattccatttcgcatatttctttgtgttctttgcttattacattttttcagttttaatacaatcttaggtaaagttttatccgctttgcttgtccttcatgttaaatctgcttggtattgttaattaattattggcaattttctaactgcatggtttatttagatgggcattccattttccatatttcattcaagctgttggtacaacatacaagtcttttgttctatgtttatagttaaatatatttaagtctccattaaaatacgtgcactacttaagtgtaatttaaaatgcggcttcattaaaatagcttagcgtgcttaatacgtcttttttgtggtgtctttgttggatgaagtccggtttagatttaacttcagcataattcgttgactagaaattaacttaagtacttaggg

SEQ ID NO: 29591 - DNA, 3065 bp, DROSOPHILA
cgcagtaaacagagattttatcgtgtagtgtagaagaaaagtacagaattaatggtaaaagcgcataagaccagccgaataaaattgcctggataaaccaagtacctctgtacaccccccattgagcacaggcgacccaaattacgacgaacgttttctaattacgcattccaagcatggacgaggcgaacatacaggacaaggagcggttcgccagccgcgagaaccattgcgagattgaacgacgtcgccgcaacaagatgacggcctacatcacggaactctcggacatggtgcccacctgcagtgccctggcccgcaaaccggacaagctcaccattctccgcatggcagtggctcacatgaaggcactgcgtggcacaggaaataccagcagcgatggcacttacaagccctccttcctgaccgaccaggagcttaagcatcttatcctggaggcggccgatggtttcctgttcgtggtatcctgcgactcgggcagggtgatctatgtatcggattcggtgactcccgtgctgaactacacccaaagcgattggtatggcactagcctgtatgagcacattcatcccgatgatcgcgagaagatccgcgagcaattatcaacccaggaatcgcagaatgccggccgcatcctggatctaaagtcgggaactgtgaaaaaggagggtcaccagtccagcatgcgtttgagcatgggtgctcgtcgtggtttcatctgtcgcatgcgggtgggcaatgtaaacccggagtccatggtctcggggcacttgaatcgtctcaagcaacgaaactccctcggaccttcaagggatggcaccaactacgccgtggttcactgcacgggttatatcaaaaactggccgcccaccgatatgttccccaacatgcacatggagcgcgatgtggacgacatgagctcgcactgctgcctggtggccatcggccgtctgcaggtcacctccacggcagccaacgatatgagtggatcgaacaatcagagtgagttcatcacacgtcatgcgatggatggcaagttcacgtttgtggatcagcgtgtccttaacatattgggatatactcctactgagctgctggggaagatctgctacgatttctttcatcccgaggaccagagccacatgaaggagagctttgaccaggtgctcaagcaaaagggacagatgttctcgcttttgtacagagccagagctaagaattcggagtacgtttggctccgcacacaggcctatgcctttctgaatccatataccgacgaagtggaatatatagtgtgcaccaacagttctgggaagaccatgcacggtgctcccctggatgcggcggctgctcatacgcccgagcaagtgcaacaacaacagcagcaggagcaacacgtttatgttcaggctgccccaggagtggactatgcgcgccgcgagttaactccagtgggcagcgccacgaatgatggcatgtaccagacgcacatgctggccatgcaggctcctacgccccaacagcagcagcaacaacagcaacggccaggatcggcgcaaaccacaccagtcggatatacctacgacaccacacactcgccgtacagtgctggcggaccatcaccgttggctaagatacccaagtctggcacctcacccacgccggtggcacccaactcctgggcagcactgcgtccccagcagcaacaacagcagcagcagcccgtgaccgaaggctatcagtatcagcagacgagtccggccaggtcgccgagcggtccaacctatacacaattgagtgccggaaacggaaatcgccagcaagcgcagccaggagcatatcaggcgggaccaccaccgccacccaatgcgccgggaatgtgggactggcagcaggctggaggacacccgcatccgccgcacccaacggcgcatccgcaccatccgcacgctcatcccggtggaccagcaggagcaggacagccacagggtcaggagttctcagatatgctgcagatgttggatcacacgccgaccacgtttgaggatctgaatatcaatatgttcagcacgccgttcgagtaatacccacaccatttctttcgattcccactcttcccccgtcccgcaacttaatctgtgtctctcttaaccacttctcaagtgcaatccatcttacattgttgaaataattcagccaaacgcatgcaaattgtaatctcgtaaatagcattttaagtacataggggtagtcacgtacacgattcagatatctttatttttgtgtgctacgtcttcttcacttccacctcccgtatccattagcccgcccgccaccgcctccacttaacccgctcattggccgtgcaaaagtatttacaattaaggccttacgattgttcgtaactaaaggcaatgtgtttacaccgctatatagcccatgaattctaaactttctcatcgattatataggattaagttcatatgtggacacgctgtgtgcagagtattcatttgtatttgtcattgagcattttaaagttcatacaacgtataaatatataaataattaaacaattcgtagcctaatataccacaaattgatagttgtaagcaactcagcaagtgtaccacttccacgcttttcccgcgaacaacattgacaccatttcccattaattttcgctcatttttcgccaaggcaatcagacgtagacgagcaaacaatatacggtcgatatgtacactttacatgctttatgtgcagcttttcattttgttttaattgcattttatgccgcgacaacaaaaacttccaagctcaatacagtggcgctcaaaattgaatcgcactcgcagaaatgagaccatttaattaattacgtcaagttcaaacataacattagttagttaacctcacttcgagagaacaaattctaaacaactttttagtcgctaagtcccaacatttgtaagtaagctcaccacaacgatgataatgcttaaaactttggttattgagaataaaaattttggtttttactg

SEQ ID NO: 29592 - protein, 642 aa, DROSOPHILA
MDEANIQDKERFASRENHCEIERRRRNKMTAYITELSDMVPTCSALARKPDKLTILRMAVAHMKALRGTGNTSSDGTYKPSFLTDQELKHLILEAADGFLFVVSCDSGRVIYVSDSVTPVLNYTQSDWYGTSLYEHIHPDDREKIREQLSTQESQNAGRILDLKSGTVKKEGHQSSMRLSMGARRGFICRMRVGNVNPESMVSGHLNRLKQRNSLGPSRDGTNYAVVHCTGYIKNWPPTDMFPNMHMERDVDDMSSHCCLVAIGRLQVTSTAANDMSGSNNQSEFITRHAMDGKFTFVDQRVLNILGYTPTELLGKICYDFFHPEDQSHMKESFDQVLKQKGQMFSLLYRARAKNSEYVWLRTQAYAFLNPYTDEVEYIVCTNSSGKTMHGAPLDAAAAHTPEQVQQQQQQEQHVYVQAAPGVDYARRELTPVGSATNDGMYQTHMLAMQAPTPQQQQQQQQRPGSAQTTPVGYTYDTTHSPYSAGGPSPLAKIPKSGTSPTPVAPNSWAALRPQQQQQQQQPVTEGYQYQQTSPARSPSGPTYTQLSAGNGNRQQAQPGAYQAGPPPPPNAPGMWDWQQAGGHPHPPHPTAHPHHPHAHPGGPAGAGQPQGQEFSDMLQMLDHTPTTFEDLNINMFSTPFE

SEQ ID NO: 29593 - DNA, 2258 bp, DROSOPHILA
cgaaaacctcttctcctggccctgctcccgaaaagcaaagcgcagatatgcgcgagtgttgccgtatttactgagggtctcagttagcaattgctcattattatttcgtgttattattattacagctattgtttataaacatttgcatccacttcacacacacggggaattatgcagacttttcgcgttaatcatgtcatgagcactcagttggtgaattacgctttttctcacatacatctggcaacgccgccagtcatggcacagtggcggccgtacaaatagacgcggtccccatttggttaagaagagcttttgcaagaactttgggcagacaggctgatttgggcagctgggaaataacagtaggtctgttttagttttgtcactatttatatgctaatgcgttgtctgtatcttgctcttgtttttcggcacattgttcatcggcgcgcaattttcgtacacccatcttgacatatacacaagcattttgcactggtgtgctatgtgtctatgtgcagacaccaatatgtgtattctgttctacgcaattgcaaattgcgcctgggatctgatctcttttgttcgccgcgatatttcgcacaagatgctccgctcgcgatgtgttattgttgttgtggggctgctgtattgcagttttaccgttttgcttcacaccgatttcgttagggatttgataagttattgattcgttctattttggggataacacgacaacgtactttactttggtgcggcattggctactttacgataactttataacactagacctcgaaaatgaacaattgaaacgaaaataagttatattatatcgagtgaaaagcttttcctgacctgcagtgcgaccgtttgccgcttgagcgcaaaataccgaatgtcgataactacagaagttggaatttatccgaaaatccacccttggaaaattacattgtcttgtcaattattttctttattattaaaatagtttttcttaatcctctagcttttctggtggtggcccacatggctgcagcattcgctccatcagattaaatcgcactcgtgccttcgattcattttccgctatggcaaagtagttgagaatatcgtagtgacccatgtagctggccaaggagtcgcgatgttgatttgttagccactcgaactttgtggtatccgcgtgtcctgttccgatgtacttgctttgtagatgctccagctggctgtggatattgtagcgttcacccattttgcttaagttgtttcagtattaggcgaggaatagttaatgtgcagtgtgttattttgttgtttgcgtcttggtgtggccagaaattttgtatgttggtatttttattactttagtacatgacactttggtattttagtacacaggcggcaaacttggtatttaaaatcgtaatatttgtttacatttcgctgtcatttataaattattcatttatcaagtactttgataagcaatgtgtggacgcacctgtctgtaggtatataattttttctttcaccatttctattaaacgcctcttcagaactctagaccctgatcaggtaatttgtgcctgtaaatatccaaaaaaatctactcgaaaggagccggatttcaaagagaaagatgatatgaaagatggggaaggatccgaaatggagactcccgagtggagggcggaatacaacctgggtagacgctaccaggcctcctacaacatagcccctactgatattacgcccgtgatcgtgtccgcagctcatttttcagacgccgaggatcaagagtgcgcccgcgtggtaacgcccatgatgtggggcatgattcccttttggcacaagggtgactatcggcggcatggccttaccaccaacaattgccgtctggaacacctgatggactccaagctctatcgcggtcccttcaagcgaggtcagcggtgtgtagttatttgcgaaggattctatgagtggcagacggctggacctgcgaagaagccatcggagcgtgaggcttacctggtattcgtaccccaggcggcggatgtgaagatctacgacaagaatacatggtcgccccaggatgtgaagcttttgcgaatggctggactttttgacgtctgggaggatgaaagtggcgacaagatgtacagctacagtattatcaccttccagtccagcaaaattatgtcctggatgcactaccgcatgccagcgatcctggaaaccgagcagcagat

SEQ ID NO: 29594 - DNA, 258 bp, DROSOPHILA
atgggtgaacgctacaatatccacagccagctggagcatctacaaagcaagtacatcggaacaggacacgcggataccacaaagttcgagtggctaacaaatcaacatcgcgactccttggccagctacatgggtcactacgatattctcaactactttgccatagcggaaaatgaatcgaaggcacgagtgcgatttaatctgatggagcgaatgctgcagccatgtgggccaccaccagaaaagctagaggattaa

SEQ ID NO: 29595 - protein, 85 aa, DROSOPHILA
MGERYNIHSQLEHLQSKYIGTGHADTTKFEWLTNQHRDSLASYMGHYDILNYFAIAENESKARVRFNLMERMLQPCGPPPEKLED

SEQ ID NO: 29596 - DNA, 6598 bp, DROSOPHILA
aatcaagaatctctctactccgaaaccgaagatgctgtggcccaggagttggccatgttgtttggagaagagcctactgatcttaatcatatattcggcatcgaaccaactgctgttactgacgatccgcagatctcggccatactaaaggaaatagcgaatgcggaactacctgaaaaaattgagcatccacccacatccccaaccgccacaccaccaactgggcatcacagcgaggtggatcttcgccagagtcgctggccttgcgaactctacgcccagaggaggcgtctcaatgcctgtttagttcgcttactggaagcggattggcggtgcgaggaccgcttgagatataagtttcacctgatttttggcgaagacagcgatgatgagttcgcaaaccagttatccagcccgtcaattgatttagtggacgaagttctgctggccagctgcttgcttcgtattcgcccatggattgtacgtcatttgatgtctcccctggaggagggccttatcgccaatcgatttctgttcaagaagctagccaagatgctggcgcactccattgtcatggtcaatccatattgctccgagctggagatcaagcaggctgttgagcacttgttctgccttagacctagaggaatccagagcgcatatgatctggacaatctgccacccttggaggtctcaaaattcgaagtttaaggacaatttaccgattttcagttttaaaatatcaatatagttattaagatgcgagaaactatgaccctcaggataatactagtatttacgaatgattctaagcaatgagacaatgattttcgattgaacctacaacgaatttagtgaaagcaaaatggaatatgttcttcagtttaatactcaaatataaaactctgtaaaagtaagttatatacatacatgaatgcttccatgtccatacgctaaaagttgtgtgtcgaataaagccaaagcacaaagactacgttttgtggtttctttaaattataattaattcaatgattacaataatttttcttgctgcacatcttcctcatctttttataattatataaattttaatatatttaataaacgatacataatatagttttcctttcgacgacattgctgcggcggttgcgtcggcaactgcttaagacgattcggattcctccagagcagcagctatcccccactccggttgttactttaacggctgtgttggttttagttccatctgtttcgctttctgcttcccttgctgttgcggtgtttagtggtggtgacagatttcttgtggctgctgcagctacattgggtgtggttgctgttactgttgttgttgatgcaatttgtggtgatcatcatcatcagaggcactacctagtgtcgggaatttgatttgtgtttcccgccgccgtcgctgcactagcgttctgtttgtatttttgctgagacgctgccggattagccgtggactgctgctgctgttgtggctgctgcgagcccgtggccatctctcctggcggcggacgtccgctgcgcctctcgatgcctctatcagctgttggcttagtgccagctccactagcaccaccaccaggggctgcagttgctccagctccccccaatccgccagtaccgctcgtttgtgttgtgttggcctttttgtttttatagcgatactcgtcgcacacaaagtcctctggcgaggtttgttgcatttgattcacctgtcgcaccatcgccggctgtagctgttgctgctgctgctgctgctccacatctgcattgttgttcaacagcgtttccgcttgcgcctcggcctcggcatcctcttgctgctgctgttgccccttatttacattatcactcttggccaggctctcgtcggaggcattcaaatccagtgcctcagtgcagagcatcgatagcatcagcgactgcacaaacatggagctaaaagtaaatgcattaaggttaatggtcaatggcttacattgtggttccaggaaaataacacatctctatatcaataggttgttatttagccatgtggaaacactcaccgatctgctcgcatactctccacgaccgcccactcggcctcggtaaaggtgggctgcatgaattgggccaacaagaatgactcgccagctgccgcaccaccctggcctcctccctgtccagctcctccggctccagttgccacaccggatgaacctgctccaccgttgccgttggccgttccgccgacgcccacgctgatgcccaggacattgctgcctgcactgctgctcgttccgatcgcctgcagaacaagacatgggagattagtggacatttgactcaagatatgctggccaacgggatgaactacttctctggcattgaggctgttggcggccagactcgactgagtttgcgaatgattgctggccgatgtcgagaagctggctgtcaccggccactcagtggtgcgcaggttgggcggagcagttgccccgctgccgcctccactgccgcttccaactgcgccactgcctccactgccgcccgctccgccgctgatcacctcggccatggcggcattcgagttcgatgttgagactatgggatgcgcacgccttggcagccgatcgatttggcgcgatgcctaaaataatgcaagcgcaaaaccaagacaacgaaagtcgcagtttccttatacacacaaatataatatatatggggtggaggactctcccttaccgtcacctgctggcgatccaactgcatctgcatctgtagctgctgcagctgagatgtgggcggtccgcccctccgcacgccggaaagctgcgataacagttccgcaatgggatccaccgattcccgtcccgaaggcgacaaggctgatagaccgctagacgaactgaagtgcatgttggaccgacgcgtccgtggtccaccgagggtgcgtcctgggatgcgacgcactccaccgccatgacggatggccgagggttcatcgtattgtctacaggttaaggcaaccaagtgattggatttatacttataactagctgaaatattgatacaaaaatgccttcagctgcatcgcaaatttttcaaggcatttcattgcacgaaaattgctcgttacaggctagtcaataaaatttaagactgtttattgcgacagtctaaataaataaacggtgtataatttccaaagtattcaaaaatgtgtaaaccaaactaaaccgaattcaactgcttgttattcgcaacaccagacaaaataaaccacacttgcgcaaatgatctaataatatgactaataatgcgttgcgagtgctctgaatttttatgctgtcgcattttcatttttgagcataattcacgcacggaagtcagctttttgcaaaaacaatttcgaagtagttttctgattttacagccacgagcgattttgaaaataccaagaacaagccttttgtatggatgcagttgggcattgcgcgcaattaatgtatgatgtgtctgtttgaaaaaggatatcagaaaggaaatcagctcgcgcggtccctggcgatgctccagggtgaggtgaccggcaaagtcatctgtgactagattcggctcgccgcccggcagaccggcacatacggggcagaccacctctagactggtctccgtgtgctcggcggagacatgctccagcagggtggcgtcgctgaagcccatcttcttgcagtagggacaggtgaagctctgcggctggtcggaggctagcatctcgccgccaaagtacagctcgatatcggagcgggtgaggatgcactgcatgggatgctcgaccaaatggcgcgtggaggtgacgccatcctcgtagcaatcggcacacagatcgtagtcatagcagatcaagcacttgtagcgccgtccgttgaagttgctcttgagacatgaatcgcagctgacacctgggatgggataaatggttactatcagggtttctgcaagcttcaaggactcaccttcatgtcgactcattattcggcagcggcagtaggcttggcttcaacttccaagcgatcaggagagcgtctcccgcttaagattgacttgcttttaacttccagctgtgctggttttatgtgggttccttgcggggcttcggaggattccagtttttgaatttagattgagaggatctacaagaaagcagtggcgacaattattcatcagttgttatactcctcacattagaaaggaaaagtaaagcggataaaaaggatactgaaattgcagggcaaaaattgcagggagaaggacatggcatttccttcttttgttttccctgctctttcctagttctcttcttttgtattgcccgcgattacggttctttcttttcgccattccgtttgcccagcaaaaggctagagaagagaggcgcacataaagagaggggctccctgcactcggcccccgccacaaccctcttcaatgaggcaacgaattattcaatacaatcgtacgcgagccatcgaataattacacttagcaataggacttcagcggggcgtcgaggggttaattgcgattttccccgcagcagcgataccgctgcacagtaaacatttatttttaactttttcggtttcgcgaaaattttcaactcgacgatgtcgtgggctttttgtgcaaccgcctctgccccctcaccgaaaacctcttctcctggccctgctcccgaaaagcaaagcgcagatatgcgcgagtgttgccgtatttactgagggtctcagttagcaattgctcattattatttcgtgttattattattacagctattgtttataaacatttgcatccacttcacacacacggggaattatgcagacttttcgcgttaatcatgtcatgagcactcagttggtgaattacgctttttctcacatacatctggcaacgccgccagtcatggcacagtggcggccgtacaaatagacgcggtccccatttggttaagaagagcttttgcaagaactttgggcagacaggctgatttgggcagctgggaaataacagtaggtctgttttagttttgtcactatttatatgctaatgcgttgtctgtatcttgctcttgtttttcggcacattgttcatcggcgcgcaattttcgtacacccatcttgacatatacacaagcattttgcactggtgtgctatgtgtctatgtgcagacaccaatatgtgtattctgttctacgcaattgcaaattgcgcctgggatctgatctcttttgttcgccgcgatatttcgcacaagatgctccgctcgcgatgtgttattgttgttgtggggctgctgtattgcagttttaccgttttgcttcacaccgatttcgttagggatttgataagttattgattcgttctattttggggataacacgacaacgtactttactttggtgcggcattggctactttacgataactttataacactagacctcgaaaatgaacaattgaaacgaaaataagttatattatatcgagtgaaaagcttttcctgacctgcagtgcgaccgtttgccgcttgagcgcaaaataccgaatgtcgataactacagaagttggaatttatccgaaaatccacccttggaaaattacattgtcttgtcaattattttctttattattaaaatagtttttcttaatcctctagcttttctggtggtggcccacatggctgcagcattcgctccatcagattaaatcgcactcgtgccttcgattcattttccgctatggcaaagtagttgagaatatcgtagtgacccatgtagctggccaaggagtcgcgatgttgatttgttagccactcgaactttgtggtatccgcgtgtcctgttccgatgtacttgctttgtagatgctccagctggctgtggatattgtagcgttcacccattttgcttaagttgtttcagtattaggcgaggaatagttaatgtgcagtgtgttattttgttgtttgcgtcttggtgtggccagaaattttgtatgttggtatttttattactttagtacatgacactttggtattttagtacacaggcggcaaacttggtatttaaaatcgtaatatttgtttacatttcgctgtcatttataaattattcatttatcaagtactttgataagcaatgtgtggacgcacctgtctgtaggtatataattttttctttcaccatttctattaaacgcctcttcagaactctagaccctgatcaggtaatttgtgcctgtaaatatccaaaaaaatctactcgaaaggagccggatttcaaagagaaagatgatatgaaagatggggaaggatccgaaatggagactcccgagtggagggcggaatacaacctgggtagacgctaccaggcctcctacaacatagcccctactgatattacgcccgtgatcgtgtccgcagctcatttttcagacgccgaggatcaagagtgcgcccgcgtggtaacgcccatgatgtggggcatgattcccttttggcacaagggtgactatcggc

SEQ ID NO: 29597 - DNA, 2680 bp, DROSOPHILA
gtcgcactgcaggtcaggaaaagcttttcactcgatataatataacttattttcgtttcaattgttcattttcgaggtctagtgttataaagttatcgtaaagtagccaatgccgcaccaaagtaaaatcctctcaatctaaattcaaaaactggaatcctccgaagccccgcaaggaacccacataaaaccagcacagctggaagttaaaagcaagtcaatcttaagcgggagacgctctcctgatcgcttggaagttgaagccaagcctactgccgctgccgaataatgagtcgacatgaaggtgtcagctgcgattcatgtctcaagagcaacttcaacggacggcgctacaagtgcttgatctgctatgactacgatctgtgtgccgattgctacgaggatggcgtcacctccacgcgccatttggtcgagcatcccatgcagtgcatcctcacccgctccgatatcgagctgtactttggcggcgagatgctagcctccgaccagccgcagagcttcacctgtccctactgcaagaagatgggcttcagcgacgccaccctgctggagcatgtctccgccgagcacacggagaccagtctagaggtggtctgccccgtatgtgccggtctgccgggcggcgagccgaatctagtcacagatgactttgccggtcacctcaccctggagcatcgccagggaccgcgcgagctgatttcctttctgatatcctttttcaaacagacacatcatacattaattgcgcgcaatgcccaactgcatccatacaaaaggcttgttcttgctagttataagtataaatccaatcacttggttgccttaacctgtagacaatacgatgaaccctcggccatccgtcatggcggtggagtgcgtcgcatcccaggacgcaccctcggtggaccacggacgcgtcggtccaacatgcacttcagttcgtctagcggtctatcagccttgtcgccttcgggacgggaatcggtggatcccattgcggaactgttatcgcagctttccggcgtgcggaggggcggaccgcccacatctcagctgcagcagctacagatgcagatgcagttggatcgccagcaggtgacggcatcgcgccaaatcgatcggctgccaaggcgtgcgcatcccatagtctcaacatcgaactcgaatgccgccatggccgaggtgatcagcggcggagcgggcggcagtggaggcagtggcgcagttggaagcggcagtggaggcggcagcggggcaactgctccgcccaacctgcgcaccactgagtggccggtgacagccagcttctcgacatcggccagcaatcattcgcaaactcagtcgagtctggccgccaacagcctcaatgccagagaagtagttcatcccgttggccagcatatcttgagtcaaatgtccactaatctcccatgtcttgttctgcaggcgatcggaacgagcagcagtgcaggcagcaatgtcctgggcatcagcgtgggcgtcggcggaacggccaacggcaacggtggagcaggttcatccggtgtggcaactggagccggaggagctggacagggaggaggccagggtggtgcggcagctggcgagtcattcttgttggcccaattcatgcagcccacctttaccgaggccgagtgggcggtcgtggagagtatgcgagcagatcgctccatgtttgtgcagtcgctgatgctatcgatgctctgcactgaggcactggatttgaatgcctccgacgagagcctggccaagagtgataatgtaaataaggggcaacagcagcagcaagaggatgccgaggccgaggcgcaagcggaaacgctgttgaacaacaatgcagatgtggagcagcagcagcagcagcaacagctacagccggcgatggtgcgacaggtgaatcaaatgcaacaaacctcgccagaggactttgtgtgcgacgagtatcgctataaaaacaaaaaggccaacacaacacaaacgagcggtactggcggattggggggagctggagcaactgcagcccctggtggtggtgctagtggagctggcactaagccaacagctgatagaggcatcgagaggcgcagcggacgtccgccgccaggagagatggccacgggctcgcagcagccacaacagcagcagcagtccacggctaatccggcagcgtctcagcaaaaatacaaacagaacgctagtgcagcgacggcggcgggaaacacaaatcaaattcccgacactaggtagtgcctctgatgatgatgatcaccacaaattgcatcaacaacaacagtaacagcaaccacacccaatgtagctgcagcagccacaagaaatctgtcaccaccactaaacaccgcaacagcaagggaagcagaaagcgaaacagatggaactaaaaccaacacagccgttaaagtaacaaccggagtgggggatagctgctgctctggaggaatccgaatcgtcttaagcagttgccgacgcaaccgccgcagcaatgtcgtcgaaaggaaaactatattatgtatcgtttattaaatatattaaaatttatataattataaaaagatgaggaagatgtgcagcaagaaaaattattgtaatcattgaattaattataatttaaagaaaccac

SEQ ID NO: 29598 - protein, 666 aa, DROSOPHILA; identical to SEQ ID NO: 26889

SEQ ID NO: 29599 - DNA, 2850 bp, DROSOPHILA
tcaccaccaaataaccttcaaggagacttttagttccgttcgcccagatgtaagcgaggactacaacgttgtcaggtgaattcgtggtgttagcgtaaatgaacccgtataatccaatgtaatcccctccaggctaagcagtgctggactggtctactgtcactatggcgagcgtgttatacagagcatcctgcagcgcgaaaagggaattaaactctcaccggaaaacctgcaaacggcctttattcagatctataggaattttatcaacgaactggacgcaattgataatggagtgcccatgttcgagggcgttgagcctatatacaaaatctccactcatctatctgcccgcattgccaaactgaatccgtcctggcaggaaactggcgtagacatcgaagaccgattcagacaggcgatggatactgcaggtcgtgagtttgtggacaacgttgtggaggtatcatgttcctggattccagcccgggatcacgtacgagaggctcttaaaaatgccaagaacgtccatcccaccggcgagattcttgtgttgaagaatttctgcccctggaagtctcatctgttcgatcttgaaaaggagtacaaggtggagggtgtgcccaagctggtcgtcttcaacagcggcaatagttggcgagtggccggagttccagtgacgcctggcagctatctgggccgcaaatttctgcccactccttggcgcggactgatggacgatgaactatgcgataaggcgagcatcaaagatctcgaattcatccatcacacaggatttattggcggggcaaaaaccgaggaggctgccatgttgttggccaagaaatccaccgagtggacagaagagcaataatataatacgacttaaagttatgcttttgaaattgaaaaacaataattagatcgcatttaattctggtgttattacgcatttaattctggtgttattacgttatacggaaaagaaatacgcacatgttgtacctaaacaaattttatttgtatgtgtatttcggttaatgtatacaaaatcaccaagggaacctctaacatcatctagtccatgcgggtcttcagtgtgcgctccgtgatcttgtccttctcgataatgtagacggtggcaccccaaccgctcatggcgtcgcgatcgaatgcgttcacaatggactgggcgatgacctcaaacagctggtccggctcgagatcgggtttccacagggtttcgcacatgccatacaattgctccgcacaggtgccggccacaacgaagtcatcgggtgcgttggggcagccgatcaggtccatgttgcagataaaaggctccatggtcttgggatccaggccagcaacgaccggctcaatgaagtacgggccaaagcggtgctcgtacagaaagctggacatcatggccgagaagggcttgggacacatttcacggttttcgcgtgtctcgtacagattcttgcggaacatcaggcgatcgcgaacagtaaggatgtccgtctgcaggcctgtgagcccgaggaacatccgtgggccgatgtggaacaccttcttgaagtccgtggagatcgtctgagcctgaatgccgaatcggtgatccgtggcaatcgccacgcagtcctttccgcgcatggccactacacatcctccgttgtaggctagaatcgacatggtgtcgttgctattcgcttagctcaatttaatcagcagaaaaatggaaattttgcaaaatgctaaaagccgcctgggaagatgactttttgtttctgctctgcgttgccagactgcgagtgtaagatgggctaatactgactggctgtatagaactggcaacgcctactaaagagatttcaaaaagaatcgcgttttttaagtattttttaagtattagtatttttaaacacaagttaaagttataaaatgtttaaaaatgcaaaaatatctccgcgaatgttaaaacgcatttttcttatcatttggatccttttgaagtaataaaagatccaaatgttaatatgccagtattagctttcagtgtgaccaggccgcgtcaatcagttgggatttattctcctctgcggcaaaggccactttgtaaggggcccttatttatagaaaaattaaattctatcccttaaactcccaattgttccgactgaacccaatgaccgggtaaagctaggcgcgtgtaccttgtcctcctcttgtcacatcaacgtctacagccgcaagcagcctacatcatcggaaggcgacagtcttgcacaatcgtcagtggagccgttgcccaggaaataaagaacctaccgcaggatggcagaggcaatggttgtggaggaccgccccgcggaagccaagcgattcttctgccacatgtgcaacgtggagatcaacattcccaactcagacttcacctgtccgctgtgcgccaacggtttcgtggaggagctgccggcaaatgcgccggagatggattcttcgacggctggagcatccggcagtgccagatccggaagcagcggtagtggctcttctggctcacacgacaccctgagcagaggcagctcatcgagcggatctcaggtgaatgttgagtcgctgcgtaacgatattgtgtcgctgctaaacatgcggaatgtgcccaacttggaaattaccatcgagccaaacagacggcacagcaacgtgctgcatctaggcggctttggtggtccctcgggtagtgactctgcccgcggcctgaccgccggcggacgagtgcgtccggcaaatttggaccgactggacaatgttctctttgattttctgcagagcctgccactggcc

SEQ ID NO: 29600 - DNA, 850 bp, DROSOPHILA
ttctatacagccagtcagtattagcccatcttacactcgcagtctggcaacgcagagcagaaacaaaaagtcatcttcccaggcggcttttagcattttgcaaaatttccatttttctgctgattaaattgagctaagcgaatagcaacgacaccatgtcgattctagcctacaacggaggatgtgtagtggccatgcgcggaaaggactgcgtggcgattgccacggatcaccgattcggcattcaggctcagacgatctccacggacttcaagaaggtgttccacatcggcccacggatgttcctcgggctcacaggcctgcagacggacatccttactgttcgcgatcgcctgatgttccgcaagaatctgtacgagacacgcgaaaaccgtgaaatgtgtcccaagcccttctcggccatgatgtccagctttctgtacgagcaccgctttggcccgtacttcattgagccggtcgttgctggcctggatcccaagaccatggagccttttatctgcaacatggacctgatcggctgccccaacgcacccgatgacttcgttgtggccggcacctgtgcggagcaattgtatggcatgtgcgaaaccctgtggaaacccgatctcgagccggaccagctgtttgaggtcatcgcccagtccattgtgaacgcattcgatcgcgacgccatgagcggttggggtgccaccgtctacattatcgagaaggacaagatcacggagcgcacactgaagacccgcatggactagatgatgttagaggttcccttggtgattttgtatacattaaccgaaatacacatacaaataaaatttgtttaggtaca

SEQ ID NO: 29601 - protein, 205 aa, DROSOPHILA
MSILAYNGGCVVAMRGKDCVAIATDHRFGIQAQTISTDFKKVFHIGPRMFLGLTGLQTDILTVRDRLMFRKNLYETRENREMCPKPFSAMMSSFLYEHRFGPYFIEPVVAGLDPKTMEPFICNMDLIGCPNAPDDFVVAGTCAEQLYGMCETLWKPDLEPDQLFEVIAQSIVNAFDRDAMSGWGATVYIIEKDKITERTLKTRMD

SEQ ID NO: 29602 - DNA, 3189 bp, DROSOPHILA
gatagtcccagctatcatatatatggggttagttaaatactcttccagtggtctacgaaatgcggtagaaatcacgagggcgtcaggatgagcgattatcgctatgatatcgtgaggaatgtgaacaactttcgacggaagttggaatggggcctggggaatctgcccagagcggtcaaatttaagaacatcaagtgggacgatgagctgtcggtgatggcgatgcgggtctctaatcaatgcttgcagcacactttctcaccctgcgtgaatacgttcctctacaaggatgtgggcgagtcctcagatttcgtcaaggtgcagaacacttccaagggcttcaacgtgatcagcttcctgaatatgtggttcgaataccacaagatgatgaagcccagctatgtgaacaactttcccaatatagcccctcaggatcggctcattatcttcgccaatctgatctacgagaagaacaagaaaatgggctgcggaatggtgaagtcggggcaggggcgcttcctgacctgcctcttcgataagaaaatcaagccaaaccagaagctttacaccactcggttgaatgatccatttcgcacaaatcggaaaacaaacgaaacagaatcgatccaatcgaatagtagtagcacagaagcaattgtaaatttgaacacagcgtataaatagtatttgcattgaatccaattcaattactaaaagccagagtcagctgatgtattccacgaaatatttttgctttttttacctgcaaaccgataaaataagccacttgtaagatgtttagtcataatagctatgattccaaataactttgcggtttcaaaagcttggcgttaaaattcgcaaagtgtcgagaaaagtgatcccccctttcgatgggaaaaatgccaattaatagttaaacaaagagtttggcgaggagtggggatgtgggctctccgttcacacgtgagcggtaaaaacctagtacgagttctagcaatcagtgtggttgggattcacttaccggcgcctccattaatccgccaccgagaccagccaagcataaagccgcatacagatgctccgtgcgcgtcgcaaagtgaaacatcagccaggcggccagaatcggcaggttgacaaactgcaaaagccaaaggaagtgggtgggtgagttggtattggaatggattggattggattggatcggcaccagtgggtgaacataattgcataagcaacacaatgtcacgcagctcgattccagatcagtgtgtcagtattccgatcggtgcgatctgtaatcggaggagcacccgatgagccgcagatgattgcggctaagtgggcaaggctgtgcaatttgtgtctttacaggtgtgtgccaaaaaaaattacacccttagctaaggcttaaattgctcaatttggttaacacttaatacggttcattttgttggcatatcacccaatatatttgtctaacctgcatggctcttcgtttgcccagtggctgcgtcaaaagtccagaaaagaggcaacccaggggtacacatatcaggttaatggaactgaaccaggagatctcgtccttgttgagaagtatatcgccactggtctcgctgcgtccctcgccgccctgaatggcgggtatcacgatggtggggaagcccaaggtcatgccatatccttgaaaaaacacaacacacgatatagaacccgatatgagttaagttaatactattgattccatgttaggggagtgaaatcgaagttaaaaagcttggcaaaagtcaagaaatgttaattgataatacagcagcattatttggaagttaggagaacagacttcattaatattgtttaatttcttaattttatttagtgttgagctgctaactcaatatcaatatgattaatcttctaagcaatagaggttggttaatgttcgattaataggcacgaatgaaatgcaaatttttacgaggatataaaatctatgagctaagtttcctgaatttcaatcccctgggaatcatctgggtagcttggtcagctggaagatgtgtgtgttatttaccgaatagcaatatgttcttaatactaacagctaaaaactgtgggagggcgcgtcggaagttgctgacttccacatcgctggtcgcaatgcgtccgccgttgccattttgcataaacaatggccgatcgttcagcgagctgcaacggaaaagtgtgttttttcattcgattagttttgagctggcaattaactatggtttattgtctgagcgagaactgtgtggtgcacattatgcgattttacccgtttttctcagctgttgcgccagctgtggcggccttgccattggacatcgctgcgtatacttgatgcgcggcgtatacttaatgcacctttctgtttgctcaagtggctgctgctagtccctgttttgtgcgcaaggttcacgtatttcgatcgaactgtggctcttttcactcagttggtaatcatttggccattgttattgacaattatcattatttatcgatggtttcgacggtgagtgctaagtggcaaaacctttcaaagtcacagacaaacaaaaatcttataattggacatttattggtcttcttgtttcgaccgctttctttaggtttgcttattatgcgattgggagtgctaaagtttttgacacaattgaatgttacgtgtttatatgtacgcaattcgaaaataatttctttttataccctaacgcggagcattttcacattgtgaatgggtaaagttaaatacactttaaatttatttgaatagtcacactgttttgattccacttcagatatacatccgagaaatctcttagcacttaataagcaaatctaaacgatttattcgaacattcgcttgcaatttatgcatatgagcaaagtagtccgaagtcttgaggcgtccaaaacaaagagaagagccgagccttgagcattgaaaccagctcaaccgcgatgcaaaagggttagagatgagattgagtggtacgatgtctttgggattggtaataaatcgaaattttggtcacgggacccagcgaaaccggttgaaaatatattttcaagatgagccgaaagacgtctataacgacccaccgtttaatgtggcgcaccacaaatgaatgattccaaaaatgt

SEQ ID NO: 29603 - DNA, 456 bp, DROSOPHILA
atgcaaaatggcaacggcggacgcattgcgaccagcgatgtggaagtcagcaacttccgacgcgccctcccacagtttttagctgttagtattaagaacatattgctattcggatatggcatgaccttgggcttccccaccatcgtgatacccgccattcagggcggcgagggacgcagcgagaccagtggcgatatacttctcaacaaggacgagatctcctggttcagttccattaacctgatatgtgtacccctgggttgcctcttttctggacttttgacgcagccactgggcaaacgaagagccatgcagtttgtcaacctgccgattctggccgcctggctgatgtttcactttgcgacgcgcacggagcatctgtatgcggctttatgcttggctggtctcggtggcggattaatggaggcgccggtaagtgaatcccaaccacactga

SEQ ID NO: 29604 - protein, 151 aa, DROSOPHILA
MQNGNGGRIATSDVEVSNFRRALPQFLAVSIKNILLFGYGMTLGFPTIVIPAIQGGEGRSETSGDILLNKDEISWFSSINLICVPLGCLFSGLLTQPLGKRRAMQFVNLPILAAWLMFHFATRTEHLYAALCLAGLGGGLMEAPVSESQPH

SEQ ID NO: 29605 - DNA, 4141 bp, DROSOPHILA
caagccccgtgaatcctcgctgcccataatacccaagtatttctcgagccagtggagttttgtcaagttttcaataccccagggacctcgatgtgtatgtgcctttggcgccgatcctaattcggttgtgggtaagttggaaatggagtggatccttccctgagatttctttaatcgacatttgttctcttatacagccatttgtgcagacggccactattataaattcctatttaacaataaaggcgagtgcagtcgagacatctgcacacaattccttgagctgcaagacgatgagacctagaaacaaatccgattgttgcgaacgcctttgatgcatctatacaattatatatctccatggaaatgtgttatacaatattacttataagcatgctttaaaatacgttaaaagtcgagttcacataaatgtagttataccttgagacatgattgtggatattttatattttatttgaaacataaaccgataatccaacatgctcatttaattttactttagccttcattttatgcattgttacgccaattgtaactttaaaagctgaaaaaggtttttgttttatttccccactgagaaattaagatttacttattaattttaaatgaacttgagcttatcgtttttgttggcactacatttttttataattttaagggacattactcattttcattaccattgccgtcggtaatagtgcatagttttttctgataagtaaacctttgcaagaaatgctattattgttatccacgaacgtttaaaggtttttagatagaggttggtagtgaatcattacaaagactacttgaacctaaaaataaaatagacgaaacccatttcgaattaaacatgttacataaaaaccacgtcatatacataaaactaaattgttaagtttatttctcagaaatatcactggaatgttaagcacttttaaagaatgtttaggtgatgacacagtccactcgcagcccctcacaaatgtgtggtgttactctcctcgaaggcaggattggacaacccaactcctgctgttcttccgttctgtgaacgcggcgtaaaatcgctctgttgcaaatggatgatctttgtctgctgcgtcgatgtgatgggcacttggaagttaccttgcatattaatagtattcccggggaattgtgcctcatccttgatgggtaacttgttgctgggctgcttgcgaagcagattcacatcggatttcttggagaaatgagcttcgatttcctaaaatatatagttaagtaacttaagtaaaaaatgaaaaagtagtgtatacttacacccagtgtgcgaccttctgtctctggaagcgtaaagtacaggacaacggttccaaagaatgccacactggcataaaaagcgaaagttcctggcagagttagggcactcagcatcagcaggaagagtttgtttgccaggaagccaaatatataacccacaccaccggcaaaacccgatgcagaattacgaatctccgccggaaacacctccccaatgagaatccatggtaacattcgtatacccagatgagagaagaaggcggagagcagtaggaggatgagtggcacccaaaccaggtagttgtgctcctgtttcggcaccaccaacagaagttcctctacaagtggtggctttacggaagtcgatggtggtgccagcgatgaagatgctatgggttccggactgctcgatggctctggccacatggttgtgtccattggtgcatcggtggtcatcatttcaaccacatcccttcgactgcgattatagatttcctgatcgaagagtgtagttgtttcaatgtcgggtagttgggtagtaaaacgctccgtttcctgcctgatggcctgttgttctgtctcgaagatcttggatatattttgctgagaaagaatgccctccttgggcataatcgaggaggcgttaaccactacgttgttgacggtgaatcccggcacttcactcaagaaatgggcataagttgctgtgccaaaaaaacacagaccggtgcccaccgttgaaaccagaaccagaggtctctttccggtaaagtgaattaggacaacgcccaagatggtggccagcatctcagccactcccagaagaatggtggcgtggtacttgttcatcggagccttgagggtgtggaaaatctgaacggcatatgtttgcagcggtgtctttccggaaaagtgacccgtgaaaaaggaaaacgaaaccaggaggaatggcaccaggaagctgcgtttccgccacatcctcagccgttgacccaatgttcgtcgttggcccggcggagggattccatccgcagacagttcgatggccttctgggtgatcagttcatcatagagctgattgaactccgcctcgatcatgtgctccggaacccagccacgtagccattgcagagacttcacggcctcgcggaaacgctgttcccggatcaaccaaaccggactctcgggcacaaagcatagcattattatggtgatcaccggaaaggccgagctcaccgccgccacactccgccagtccatcagagatcccaggatgaattgtataaaaacaccggtgatgacacatgttgtgcccaaagcggacagtattccgcggtatttgggctccgtaatttccgccacataggtgagcacctgcaataaatcagtaagtttagtcgttagtggaatagcagagttaaccctcagcgttcgattttttgtttatttcaaatatctaacatcagttgtttgcaagttaacccactataatcgtttaatagtttagttaaaagtaatggtttaaagagaaaagctagtttttaaaaagaaatacatcagtgatacgaaaaacgtcataaatcattcgttttaacgattacctatatacttatacttagtttcttatagggttaatagttaaatgccagcagcttgtggcaagtggcaagacaagtgaagttctcaaggagtttggccaaggtgaacaattgttccaagagaagtatgtgggtcagagtctgcagtcatggaaacaatcgacaattgacataaacaaactgaactttgcaatcgcagatgcttcttagtggccatgtgtgatgagcttctatgcagaacgattagatttggggttaatatgtgatgataacatatcacctcatcaaaacaatgatcaaaatcagtggtaatgagtattttgtagttcccacgaaaatcgacacaatcagtgtaatcttgtaatttaagcatacaaattgcaatcgaccgcaacaaatagtttttcaatatgaatagcatcactttgagtttggacaccgcgaaagatgaatcttttgtgggctatagtgattgtggccgaactgaaatgtcatacgggccatactgtattccgaactcgatggcccacatatgtacagaaaaaacactataatattccagtaaaggtagggcatactttgtatataaaggtattttcttgaatctggaaaaatctcgttatttaaagccacccgattactgcaatgcagacatttgtccggccaacaagaagcacatcacctgcggcttcaaatttgtgagtatctgcatggatagtcccagctatcatatatatggggttagttaaatactcttccagtggtctacgaaatgcggtagaaatcacgagggcgtcaggatgagcgattatcgctatgatatcgtgaggaatgtgaacaactttcgacggaagttggaatggggcctggggaatctgcccagagcggtcaaatttaagaacatcaagtgggacgatgagctgtcggtgatggcgatgcgggtctctaatcaatgcttgcagcacactttctcaccctgcgtgaatacgttcctctacaaggatgtgggcgagtcctcagatttcgtcaaggtgcagaacacttccaagggcttcaacgtgatcagcttcctgaatatgtggttcgaataccacaagatgatgaagcccagctatgtgaacaactttcccaatatagcccctcaggatcggctcattatcttcgccaatctgatctacgagaagaacaagaaaatgggctgcggaatggtgaagtcg

SEQ ID NO: 29606 - DNA, 1680 bp, DROSOPHILA
atggccactaagaagcatctgcgattgcaaagttcagtgctcacctatgtggcggaaattacggagcccaaataccgcggaatactgtccgctttgggcacaacatgtgtcatcaccggtgtttttatacaattcatcctgggatctctgatggactggcggagtgtggcggcggtgagctcggcctttccggtgatcaccataataatgctatgctttgtgcccgagagtccggtttggttgatccgggaacagcgtttccgcgaggccgtgaagtctctgcaatggctacgtggctgggttccggagcacatgatcgaggcggagttcaatcagctctatgatgaactgatcacccagaaggccatcgaactgtctgcggatggaatccctccgccgggccaacgacgaacattgggtcaacggctgaggatgtggcggaaacgcagcttcctggtgccattcctcctggtttcgttttcctttttcacgggtcacttttccggaaagacaccgctgcaaacatatgccgttcagattttccacaccctcaaggctccgatgaacaagtaccacgccaccattcttctgggagtggctgagatgctggccaccatcttgggcgttgtcctaattcactttaccggaaagagacctctggttctggtttcaacggtgggcaccggtctgtgtttttttggcacagcaacttatgcccatttcttgagtgaagtgccgggattcaccgtcaacaacgtagtggttaacgcctcctcgattatgcccaaggagggcattctttctcagcaaaatatatccaagatcttcgagacagaacaacaggccatcaggcaggaaacggagcgttttactacccaactacccgacattgaaacaactacactcttcgatcaggaaatctataatcgcagtcgaagggatgtggttgaaatgatgaccaccgatgcaccaatggacacaaccatgtggccagagccatcgagcagtccggaacccatagcatcttcatcgctggcaccaccatcgacttccgtaaagccaccacttgtagaggaacttctgttggtggtgccgaaacaggagcacaactacctggtttgggtgccactcatcctcctactgctctccgccttcttctctcatctgggtatacgaatgttaccatggattctcattggggaggtgtttccggcggagattcgtaattctgcatcgggttttgccggtggtgtgggttatatatttggcttcctggcaaacaaactcttcctgctgatgctgagtgccctaactctgccaggaactttcgctttttatgccagtgtggcattctttggaaccgttgtcctgtactttacgcttccagagacagaaggtcgcacactgggtgaaatcgaagctcatttctccaagaaatccgatgtgaatctgcttcgcaagcagcccagcaacaagttacccatcaaggatgaggcacaattccccgggaatactattaatatgcaaggtaacttccaagtgcccatcacatcgacgcagcagacaaagatcatccatttgcaacagagcgattttacgccgcgttcacagaacggaagaacagcaggagttgggttgtccaatcctgccttcgaggagagtaacaccacacatttgtga

SEQ ID NO: 29607 - protein, 559 aa, DROSOPHILA
MATKKHLRLQSSVLTYVAEITEPKYRGILSALGTTCVITGVFIQFILGSLMDWRSVAAVSSAFPVITIIMLCFVPESPVWLIREQRFREAVKSLQWLRGWVPEHMIEAEFNQLYDELITQKAIELSADGIPPPGQRRTLGQRLRMWRKRSFLVPFLLVSFSFFTGHFSGKTPLQTYAVQIFHTLKAPMNKYHATILLGVAEMLATILGVVLIHFTGKRPLVLVSTVGTGLCFFGTATYAHFLSEVPGFTVNNVVVNASSIMPKEGILSQQNISKIFETEQQAIRQETERFTTQLPDIETTTLFDQEIYNRSRRDVVEMMTTDAPMDTTMWPEPSSSPEPIASSSLAPPSTSVKPPLVEELLLVVPKQEHNYLVWVPLILLLLSAFFSHLGIRMLPWILIGEVFPAEIRNSASGFAGGVGYIFGFLANKLFLLMLSALTLPGTFAFYASVAFFGTVVLYFTLPETEGRTLGEIEAHFSKKSDVNLLRKQPSNKLPIKDEAQFPGNTINMQGNFQVPITSTQQTKIIHLQQSDFTPRSQNGRTAGVGLSNPAFEESNTTHL

SEQ ID NO: 29608 - DNA, 4257 bp, DROSOPHILA
ctaccacaacgacgacaacagcagttgcatcagcggcagtgggaagcggcagtggagcaggtggaactgtagttgcgggaacgggagcgactaatgctgccgggcgaacaactcagaatattgtgattggaggtcagacagtgaagcttcagggagcggtaagttatttggggagattttaggcgaatagtattatttataaattcaatgttaaattttcagatttccgctcgaggtgccggcgcacccgttcagactgtcattatgggcaaccaactgttgcgattagccagtagcaccagtaatagtggaactacttccaccagcggcataacgacggcacccaaaacgctgctaataggaccgcgcttggccaagaacgtactggtggccaacaagcaaatcactagtacagcaaacagcagcgttgtaaacagctccacgacagcatctccagctgcgacagcgacggcaacgcctagcaacaatctcgttttcgccgtgcaaggcaacggcggacagctcttcttctcaccgggactgcagggcatgaacctaaagccactgtccagcttaaaagtgatacccatggctgcagcatcggcaagtggggcagcggtaggaggaaaaatctctgtgaccacggcagccggcgaaacaggagcaaaaacgctgactacaaaactaataccggctacggttctcaagacggccacagggagtggcaactaggaggctcaggagcggagaggcttggtaaccacgttgaatatccttaccggttacactttcttcgattttgtttaaacaacacttgtaatttatctatgtaagcagaaagatcgcaaatattgctttgtactaagtaaatataatggacaacgataagatgtcccatccagcaaccaattttatggaacagtttataaaaaataatatatatatatatatatacagacccaataaaactcagatgaaaccagaagggccatgtttatttgcaatacaaaaaccaatgtgctttgcatttttccaactctgtatggataaaaggcaaatgcaaaatggtttctattttattaaacattaaaattcgaatgtaagtacttcgccaaccaattatataaaaataagaaaatttaaataacaaatttcaacgtttgcatttggcaggccagtggaaaatgataagatgcacaatactcttacatttttagaaaaatgaaattaatatggaataatggctatacgctagaaacgatactaacccttatgctgcttaagatgtctgttaagcttaatttttaagtcaaaggatctgccgcaaatgtagcacgagatgtacgctttttctggcacctgttggacaggagagctgtcattagaggtcgctgaagtcctgctctcctgctgggcagtgctatctaattgagaagaagactctaggacgactctttctttggactcgatggtttgcttcttggttatctttgcaatgggcgacgtaggtatttcctgcgtggtctttctcactaatgactggttgtctgaagagcgacgcctctttcttgtctgtgtgtgagtggccagcacatgagcctgcagctgctgggccttctcgaatgtgtcgctgcaatatgagcacttagtgacactttcagttggctcggttgacggtgaagctacatctgctacatcaggaacttctccgtttgcaggtgggcccattggacattgaatgtccgcatgattggaagtctctattgaaggaacactggagttttcggttacattagaatcttcaggaacagtggattccccaggaatatttgagccctcagaagccgtggtgacttcggcgacactgctttccagtgaagataaatgttgagattgaaggttaactggaagctgctccaattttttcagttgctgggcaagttcggcttcaccctctgggcattaagtgtaaagttataaacaaataaaaccgttgtaattcttcttactgaccttctaagtgctttttcaaatgtgcgtgtagagtggcgtttttcacagctgcaaaggtaaatgtgattaatccgataaattagttttataagtgagaatattgaactcactttttccacagtatgtgcactttgtgcgtacgtgcactgcctgcttgtgctccttgagagtctccttggagctgcagatgaacccgcaaacgggacacttaacgtgccgctgtagcttgtgatacttgatgtgaaacttgatgcgcgattcttgggcatttgtgaactttttgccgcaaatatggcattcccagtccttgaggagatgggtgcggcgcatgtgctccatatgcgcatcctggtcgggggattcgtaaaagcatagcttacaacacacaaccggcgagtaaagcgggggcggaagcggggctgccgcatcgttgtcatcatcgtatgtaaatctgactatctcctcctcctcctcctcctcatcttcggtgccatcgtcgaccgtcccggagagatcctcaatagacggtcctaacatgccggacgttaacgcatcgttgtctatcatgtcgaatctggagtcgactggcgacgcaaaatttttgggttcgggtggctgaaacttgtcactgttctgtaatggcactcgggccatgtgttcctccttaatgggcacatgcggtatgtcgaagacggcacacacgcgtctactaccgtcctcgtcgctgttatcctcctcgtcggtatccagatatataaatccgcagaatttctcttcctccggctcaatttcccgtttaataacgatgccattatgttcgcgctggtactcgagctcgccgaactgctcctgtgtctccacacagctgcgcttgaatttaatcagccggtgaaactcggcaatgcaagcgatgcacatgtactgcggtcgtccgtcttccctcgcaacctttgggacataagttaggtacacatagtacgattccactactaccaacctttatgttccaatcattcatttgctcgagaatctccgccatatctgcgacggcggcgtcatccgaaccgaaaatgggcttcacaatcgcctggtccatgtccattcccatggtaaagtaaattccgcaagtccggcagggttcgatggagtcctcattgaagccattcagatccgcactgaactccatggtgcgctagcatatattcaatttttacaggaatccgttccacaaagcgaccattttcctttttgttattctgtgaaattggaggtggagcatcttggacagtgttgcaaaattatacccgtcggtcgatagtgaaggattgtgggtggtagtgatgctggcagtatctaattatctagatactaccgataatagctagatctttagctttaaaaaaaaccttatccaaaacagcattgcagattatttataatgtttctttgtgttacgtaactactcaaaaactcatagcaagaagttcttaaacccaaaaatatcccgatttagcggatcgtctttcctcattgaaagttatcgattcaccgcccggccacttttcgacgatactcaacactgtgtcattgtttttatacgaaaaaacacaatcatccgccgtccgagcaattgttttcctgcctgcccagcaactgtattgaaaatcaccagagcccgggcttccagcatccccggagagtgcaatgaacctcacagagcaaaacccatatggaaacgggctgctctacgcagccttcaatcaagaccaaggtacgtacatatgtgcggatgtgtgttatttacatatacacgatacaccttatcggtataatataactggccttttgcgttgcaggatgcttcgcgtgcgcgacggacaccggattccgggtctacaactgtgatccgctgaaggagaaggagcgccaatactttccagagggtatgattgtcaaaaaaagagtgcgggagactcccacggcctaaaacaaattccattgtctacaattccgattcaggtggtctcagccatgtggagatgctgtttcgttgcaattacttagccctggttggaggcggcatccggccgctgtacccgcccaacaaggtgatcgtgtgggatgacctgaagaagtccccggccatatcgctggacttcaatcagcccgtgcgggcggtacgactgcgtcgggatcgcatcgtggtcgtgttggagggcgtgattaaggtgttcaccttcactc

SEQ ID NO: 29609 - DNA, 2088 bp, DROSOPHILA
gaaaatggtcgctttgtggaacggattcctgtaaaaattgaatatatgctagcgcaccatggagttcagtgcggatctgaatggcttcaatgaggactccatcgaaccctgccggacttgcggaatttactttaccatgggaatggacatggaccaggcgattgtgaagcccattttcggttcggatgacgccgccgtcgcagatatggcggagattctcgagcaaatgaatgattggaacataaaggttgcgagggaagacggacgaccgcagtacatgtgcatcgcttgcattgccgagtttcaccggctgattaaattcaagcgcagctgtgtggagacacaggagcagttcggcgagctcgagtaccagcgcgaacataatggcatcgttattaaacgggaaattgagccggaggaagagaaattctgcggatttatatatctggataccgacgaggaggataacagcgacgaggacggtagtagacgcgtgtgtgccgtcttcgacataccgcatgtgcccattaaggaggaacacatggcccgagtgccattacagaacagtgacaagtttcagccacccgaacccaaaaattttgcgtcgccagtcgactccagattcgacatgatagacaacgatgcgttaacgtccggcatgttaggaccgtctattgaggatctctccgggacggtcgacgatggcaccgaagatgaggaggaggaggaggaggagatagtcagatttacatacgatgatgacaacgatgcggcagccccgcttccgcccccgctttactcgccggttgtgtgttgtaagctatgcttttacgaatcccccgaccaggatgcgcatatggagcacatgcgccgcacccatctcctcaaggactgggaatgccatatttgcggcaaaaagttcacaaatgcccaagaatcgcgcatcaagtttcacatcaagtatcacaagctacagcggcacgttaagtgtcccgtttgcgggttcatctgcagctccaaggagactctcaaggagcacaagcaggcagtgcacgtacgcacaaagtgcacatactgtggaaaaactgtgaaaaacgccactctacacgcacatttgaaaaagcacttagaagagggtgaagccgaacttgcccagcaactgaaaaaattggagcagcttccagttaaccttcaatctcaacatttatcttcactggaaagcagtgtcgccgaagtcaccacggcttctgagggctcaaatattcctggggaatccactgttcctgaagattctaatgtaaccgaaaactccagtgttccttcaatagagacttccaatcatgcggacattcaatgtccaatgggcccacctgcaaacggagaagttcctgatgtagcagatgtagcttcaccgtcaaccgagccaactgaaagtgtcactaagtgctcatattgcagcgacacattcgagaaggcccagcagctgcaggctcatgtgctggccactcacacacagacaagaaagaggcgtcgctcttcagacaaccagtcattagtgagaaagaccacgcaggaaatacctacgtcgcccattgcaaagataaccaagaagcaaaccatcgagtccaaagaaagagtcgtcctagagtcttcttctcaattagatagcactgcccagcaggagagcaggacttcagcgacctctaatgacagctctcctgtccaacaggtgccagaaaaagcgtacatctcgtgctacatttgcggcagatcctttgacttaaaaattaagcttaacagacatcttaagcagcataagggttagtatcgtttctagcgtatagccattattccatattaatttcatttttctaaaaatgtaagagtattgtgcatcttatcattttccactggcctgccaaatgcaaacgttgaaatttgttatttaaattttcttatttttatataattggttggcgaagtacttacattcgaattttaatgtttaataaaatagaaaccattttgcatttgccttttatccatacagagttggaaaaatgcaaagcacattggtttttgtattgc

SEQ ID NO: 29610 - protein, 588 aa, DROSOPHILA
MEFSADLNGFNEDSIEPCRTCGIYFTMGMDMDQAIVKPIFGSDDAAVADMAEILEQMNDWNIKVAREDGRPQYMCIACIAEFHRLIKFKRSCVETQEQFGELEYQREHNGIVIKREIEPEEEKFCGFIYLDTDEEDNSDEDGSRRVCAVFDIPHVPIKEEHMARVPLQNSDKFQPPEPKNFASPVDSRFDMIDNDALTSGMLGPSIEDLSGTVDDGTEDEEEEEEEIVRFTYDDDNDAAAPLPPPLYSPVVCCKLCFYESPDQDAHMEHMRRTHLLKDWECHICGKKFTNAQESRIKFHIKYHKLQRHVKCPVCGFICSSKETLKEHKQAVHVRTKCTYCGKTVKNATLHAHLKKHLEEGEAELAQQLKKLEQLPVNLQSQHLSSLESSVAEVTTASEGSNIPGESTVPEDSNVTENSSVPSIETSNHADIQCPMGPPANGEVPDVADVASPSTEPTESVTKCSYCSDTFEKAQQLQAHVLATHTQTRKRRRSSDNQSLVRKTTQEIPTSPIAKITKKQTIESKERVVLESSSQLDSTAQQESRTSATSNDSSPVQQVPEKAYISCYICGRSFDLKIKLNRHLKQHKG

SEQ ID NO: 29611 - DNA, 3179 bp, DROSOPHILA
ctgcaaggcaatgaaccttttgtaccaactgagagatcctgatttcgcttctaaggtacttgggaaagtcaatggtattttcggtccagataagcaacaatcgactaaataacatttctccaccagcttaaccgacgcctctcaccattgcgatcttggctgtgcacccatgccaacaccagcttggagaggttccaggaatggcgcgacgctggcatgaaagatccactgattttctcttcggagactccgctacgtcgctttgtggcctacatcgatgaggagcagaaatttgccttggaggacaaattatcccagatcaacacactgcagcaaatgtccaacattgcctcgtacggcttcctcaaggctcgcctagaatcccacgatcttcacattcatgctctttggttcgatatctacaccggtgacatctattacttcagccgcggagccaaacgttttctgcctgttgatgaagacaccgtggatcgattgtccgaggaggtcagaagattctattcgtaggcgaaacatgccaagaggaccaaatggattatctgtgatatgtgggccttataccgcgatcggcatttacaatttaccaatacttaggattgtttttcgtatttataagtgtgtaattgtttttgtatataaacttaaggcctacaaaggtttaaacttacaaatctacgaaaaatcaacgaaggagatggctatccatcgctcactcactacgaccttcacaactcaagaaagctattatgtatgtgggactgccatatttacaattacaccattaactattatggcagtcatgaaggaagtgagcgataaaaaacatatatacgtatttatagttacgggaagctgtaagactttggggcggcaccttgggcgcttcgatgtttgcaaaacaacagacggtattcatgtctttttgaacggagaacggcaaatggagttatggaaaacaacaattctcgtttgactatcatcaatggtacctttggccatgatggttaatggcactgttgcttggattttccagctcctcaaagtacttccgagcgttccttatgttgactagcgtagcctccgagggcagcgtgggatccgacatgaccaccatcacgtaggtgttgctggtgaaggtgtcaatgaaagcggcaaatgcgctattgcgcacctccatcgattggaacttagcgcccaacttcgaacagctcagcttgaactgcttgatgatgttggacaccttttcaaagcggtgcgagtcgcggttcttcttgctctggcaatgggagatcaccaaaaaggtagccttttcgaacaacagcacctcgtccgcctcaattacatttccgaaatgtgtcacagagttctccagggcggcaacatttggtatcagcatcgtgacaatggaagaccaggctctaaaagcagttagaagttgaattttaaataaattcggttgaaaacttcgtgtttactaacttgtataatgtttcatcccaaatgctggtacggaaacaggtgacatttccgggctttgataattttatgagatcctccatgcgctcagtaaacacactctcgcgcaagccttccggcaccaggtccattttgtgcaccagacagaatatcttggcctcaggcgaattctgcagcagtgcctccaggcagctctggtagtaatggatgtcgcgctctatctcctggctctccacatcaaacacataaatcagcacttccacattacgaaagatgttgtctcgctgctgggcaaagtactgcttcatgaagccctcctgaccgccacagtcccagagattaagcaccaggttgcccagaaaccgcacatgggagtgctccacatcgactaagggtgcatggtgaaatcagttcctgccctttccgactatatagcattactcacttgttgctccgaggcgtgtcgtatcacgggcgatatagttagcaaagataatggagcgcatgctggtctttccggatccgctcttccccatcagtaacacctggtaatacgaatatattttacttccagcgcttaagcggtacaaacaaaaaccacacctttttcttcattgtgccgctggttttttagatctccaggaaaataatcaacaataaaaacaaataataggctgggttagtgatgatacactttcgatgacaccatcaaaagtaacgcgaagttagataaattgttatcgaattagttcgtaccgtctgataaaatataaataagaaattaatgttttttttttaaacatagcacctcatctttgcggttttttaaatatttgtgcataaattaaacataaactgcaattgagcttaatggtaaagggtctaggtttatacttaataaacataaaaacggctaactacttacaggatttagaaaacaatgtaaaaatatttgagttgttaataagttaagttatttttagttttatactacttgtattcattttatttacggtttatttttcaaatgaatgccgataagctgcagtcaccaagaacgcgaacaactcaaggccgctttattgtttcatctctagcgaaagactttattttgtcactttcttgacgtttaactgtaccgttcaaatgaaacataattattcaacgaacctaaccccgaaaactctacgcaaatgcgagaaataacccccaaaatgaagacgagcgcttttttcaaaccgcaaatttggaacaaccaccgccgccatagtgtgccatctctagcgtgcacgcgtttcgcgatgaatggtgagaaatcgcagagaaaacatgcttaacaataaaaaaagaagaaaaccagcagctaacgctggctgattgatataacgaggaaggacagcggcgtaagagacaaaaattataaattagtgtagagaaaaaatcgctcttcgcgaagaaaaatctggtgacaaatcgttggcgatccgatgagcaacataaacgtaaacacagtgcccaggtcgagtccaaatgccaatgggaatccaaatgcgaatccaaatcgcagtgtggcctccgaggaggaggagggcgatggccggatgagcgacagcgggagcaactcggccagcagccagctgagtcgcacgtcgagcagcagctcctcggactcggcgagtggt

SEQ ID NO: 29612 - DNA, 1003 bp, DROSOPHILA
taacccagcctattatttgtttttattgttgattattttcctggagatctaaaaaaccagcggcacaatgaagaaaaaggtgttactgatggggaagagcggatccggaaagaccagcatgcgctccattatctttgctaactatatcgcccgtgatacgacacgcctcggagcaacaatcgatgtggagcactcccatgtgcggtttctgggcaacctggtgcttaatctctgggactgtggcggtcaggagggcttcatgaagcagtactttgcccagcagcgagacaacatctttcgtaatgtggaagtgctgatttatgtgtttgatgtggagagccaggagatagagcgcgacatccattactaccagagctgcctggaggcactgctgcagaattcgcctgaggccaagatattctgtctggtgcacaaaatggacctggtgccggaaggcttgcgcgagagtgtgtttactgagcgcatggaggatctcataaaattatcaaagcccggaaatgtcacctgtttccgtaccagcatttgggatgaaacattatacaaagcctggtcttccattgtcacgatgctgataccaaatgttgccgccctggagaactctgtgacacatttcggaaatgtaattgaggcggacgaggtgctgttgttcgaaaaggctacctttttggtgatctcccattgccagagcaagaagaaccgcgactcgcaccgctttgaaaaggtgtccaacatcatcaagcagttcaagctgagctgttcgaagttgggcgctaagttccaatcgatggaggtgcgcaatagcgcatttgccgctttcattgacaccttcaccagcaacacctacgtgatggtggtcatgtcggatcccacgctgccctcggaggctacgctagtcaacataaggaacgctcggaagtactttgaggagctggaaaatccaagcaacagtgccattaaccatcatggccaaaggtaccattga

SEQ ID NO: 29613 - protein, 311 aa, DROSOPHILA
MKKKVLLMGKSGSGKTSMRSIIFANYIARDTTRLGATIDVEHSHVRFLGNLVLNLWDCGGQEGFMKQYFAQQRDNIFRNVEVLIYVFDVESQEIERDIHYYQSCLEALLQNSPEAKIFCLVHKMDLVPEGLRESVFTERMEDLIKLSKPGNVTCFRTSIWDETLYKAWSSIVTMLIPNVAALENSVTHFGNVIEADEVLLFEKATFLVISHCQSKKNRDSHRFEKVSNIIKQFKLSCSKLGAKFQSMEVRNSAFAAFIDTFTSNTYVMVVMSDPTLPSEATLVNIRNARKYFEELENPSNSAINHHGQRYH

SEQ ID NO: 29614 - DNA, 3764 bp, DROSOPHILA
acaattggacgcttcgttgttcttacattgcttgtggtctcttgggattttcgctaattctgaaactaaaactcctaattatctgaaaaatttcacattttctctataagaggtagtaggttgatttcaagctaaactgcactagagatgctattggaatttaaaatgggcaatgtctgtattgaacgcaaatatcaaatatactagctataaaatttgttataagcaaagtgtcctttgaagtttttactttggagtttctttttttctttctaaatttaaattttcactaactacgaataagcgaagagatcaaaagcaaccaacaacaacgaatatcaaaaagtgtgtgtatgtcactgcgtgacctattaagtgtttctctatatatatattaatatatagactggaaaatctccgggttctgaacgatactcggacattatcctggcccagcactgacacacacacacatatatatatatagagaacgcagggagaaaccattcgacagactatttagatccttggagaaaccaaattgcagaaaaacataagttactaattaacaagaattttcatatcacttgaaaacaatatttaaggcttttagtgatttcaaatcacttgaaaagctgcaaagtatgtatatatagcattccatacacttaggcacattttcaagagtttttaaatcctagagaattttgtggctttcaccacttttgaaacccgaccttattgtttttagatctacaatgatttctggcattattgctgattgaaattggcgattttggtaagtataatgcacctttcaaaaagtccacaatgtccaactatttgggtagaaaatgtgtgatttctgaaagctgattatacccgttccagtttcggccaaatcagtatatgatcttattttttctgtgctgggaatggaatttctccctgggagatgctactggttgttcggctataacataaagctcgtggaggagcgtcagtcacgcccaattctcttgtgtatctgttgatgtttgagcaggtgcgccttctggcgaaaggccttggcgcagacatcgcaccggaagggcttctcgcccgtgtgggtgcgcaagtgcaccttgatgttggacttgttgaggaatccgcgattgcagatgctgcaccgatgcacgggcttctccttgccgagcagaccactcagatcgctggcactgaagccgctgggcgaaatggcgctcatttggggcgtggtgggttgtccaccgccatcgccctgctgctgttgttgctgttgctgctgctgctgttgctggttggacttcttttgggatcgggatctcttggccttgggcgctccagttcgcatctccgaacccgtcgtgctggctgttgtcgtatgcggatagttacccaggagatccggcgagcaaaggccattatccttgagggagagacccgatgcttgcatggaatagccaccctgctggtgaagattccccgtcgcctgattgttggtcggattactcaagtagcgcggattgatcatcagaccatttggattgtccgtggtgctaaccactgaaccgggtggactgcaactgctgctggtggccgccgccagttcattgcagtacgaggtagatgtgggcgcctggggatctcccttgatccccgctccttgattcgctcctcctccgccgcccgaggaattgccgttgggcggaccattctggaggcgattctgcagcaggggcatgtagccgtggctcagtaaactctggagcgtggaactactggcatgcatgggcagtggactgtgtggcaggataaagtcacccaaagaatcctgctgcgagaccagtaccttggctgactcctgctgtatgcaattgccgtcgatccaggcatccagatccatccagctgtcccgcgtatcgttattgtcatccttgtccagttgattgggcaccgtggtgtccgcaatagcggaacctatgatggcggctatatcatcaatggagttcatgtccacatactccgtcagatctttgtagatacggacgccggaattgtgcagggaatcggccacctggtcgatgggcgttaatgtggctatgctgggaccggatccattgccattagctgcggatcccgaaccggatccgttcatcacacagctatcggccacggagtaaagcttagaatctagttgactatcggcgaagagcttcacgtccgccaggcaggcatcgttgccacctcctcctccgccgctcccgctgagtacactttctggtaagcaggtggaggaggatactatgttgtgctcattggagttgttggagttgctattgctgcccccattcgattgcgtggtggatgtgggattcgattggttctgcgggtgataggcactctgcatgtagttgttgttgctctcatccggcagtctctgggcaatggcatgataatggtggccggagatcccattgatggacaggtggcccgtgtagcctgtgaagggcggcagtggctttagatccgacagcgcattcagcgacgatccattcagcagcagattgtccagcacgtccagcgagtttttctgatccgcatcacttggcagggagtccaggtcatgctccagcaacagcttgtgtccatcgagcagatactgatcctgggcggaggtctggggcggtccccagcacggactcatcagcaggctctcaacttccgattcacttgggccgttcatgctgcaaaacttcattgtcagtggacccaggcgatcgaggcaaatattccggcgatccgagtgttatcagatcctacgctatccaaggtccaattttttactggaaagaggttagatagcaaataaaatctttaaattatgtgcgggctaagaagtagttttctcgtattattactacatttataagaaatagttaggaaatagttagaaatgagttgccaaattcggtctacaaaacataacaatgttattcttttcaaaaaatacgaacataattataaaaatgaagcattaactttaaatgaacccattatattgaacatattcttaattacagttgtatcccaaattcctctgactagcctttcaagtggaacttcattcatcaaaattaagcttggcccactgatccattcttagataaaacatttaccaaatttctttaagacagagaataatctttgataataattaagcttatactagctttccactgtgctgaccccacctcaacatgtataattaatatcaggttcctgccgacccaccttaccgccctgcacttgctgacaacctgacccatcgattccgacccactgatagccctcactaatgattctttaatatgaaaatattaaacaaaagttgggcccgcccgttgaccaaaaatatatctttccacggggcttttccactcccgcttctttcagccaaatagagattaagttaagacattcgataagccttaatgtccgtaaacgaaaagaagcagtcacatgggatggatgcataggaaacgaagaagaaacgaaaatcgataccagaatcggccaataataatttccaaccggtatttgggtcaaaacattaataatcagttaaattagcatataaattggtggcgagcgagtgagatggctataacgagcgggaaagagaccgcatttggctacgaatgcgcgatcgtagtcgatatttgtatttcgatggtgcacgcttg

SEQ ID NO: 29615 - DNA, 1764 bp, DROSOPHILA
atgaacggcccaagtgaatcggaagttgagagcctgctgatgagtccgtgctggggaccgccccagacctccgcccaggatcagtatctgctcgatggacacaagctgttgctggagcatgacctggactccctgccaagtgatgcggatcagaaaaactcgctggacgtgctggacaatctgctgctgaatggatcgtcgctgaatgcgctgtcggatctaaagccactgccgcccttcacaggctacacgggccacctgtccatcaatgggatctccggccaccattatcatgccattgcccagagactgccggatgagagcaacaacaactacatgcagagtgcctatcacccgcagaaccaatcgaatcccacatccaccacgcaatcgaatgggggcagcaatagcaactccaacaactccaatgagcacaacatagtatcctcctccacctgcttaccagaaagtgtactcagcgggagcggcggaggaggaggtggcaacgatgcctgcctggcggacgtgaagctcttcgccgatagtcaactagattctaagctttactccgtggccgatagctgtgtgatgaacggatccggttcgggatccgcagctaatggcaatggatccggtcccagcatagccacattaacgcccatcgaccaggtggccgattccctgcacaattccggcgtccgtatctacaaagatctgacggagtatgtggacatgaactccattgatgatatagccgccatcataggttccgctattgcggacaccacggtgcccaatcaactggacaaggatgacaataacgatacgcgggacagctggatggatctggatgcctggatcgacggcaattgcatacagcaggagtcagccaaggtactggtctcgcagcaggattctttgggtgactttatcctgccacacagtccactgcccatgcatgccagtagttccacgctccagagtttactgagccacggctacatgcccctgctgcagaatcgcctccagaatggtccgcccaacggcaattcctcgggcggcggaggaggagcgaatcaaggagcggggatcaagggagatccccaggcgcccacatctacctcgtactgcaatgaactggcggcggccaccagcagcagttgcagtccacccggttcagtggttagcaccacggacaatccaaatggtctgatgatcaatccgcgctacttgagtaatccgaccaacaatcaggcgacggggaatcttcaccagcagggtggctattccatgcaagcatcgggtctctccctcaaggataatggcctttgctcgccggatctcctgggtaactatccgcatacgacaacagccagcacgacgggttcggagatgcgaactggagcgcccaaggccaagagatcccgatcccaaaagaagtccaaccagcaacagcagcagcagcaacagcaacaacagcagcagggcgatggcggtggacaacccaccacgccccaaatgagcgccatttcgcccagcggcttcagtgccagcgatctgagtggtctgctcggcaaggagaagcccgtgcatcggtgcagcatctgcaatcgcggattcctcaacaagtccaacatcaaggtgcacttgcgcacccacacgggcgagaagcccttccggtgcgatgtctgcgccaaggcctttcgccagaaggcgcacctgctcaaacatcaacagatacacaagagaattgggcgtgactga

SEQ ID NO: 29616 - protein, 587 aa, DROSOPHILA
MNGPSESEVESLLMSPCWGPPQTSAQDQYLLDGHKLLLEHDLDSLPSDADQKNSLDVLDNLLLNGSSLNALSDLKPLPPFTGYTGHLSINGISGHHYHAIAQRLPDESNNNYMQSAYHPQNQSNPTSTTQSNGGSNSNSNNSNEHNIVSSSTCLPESVLSGSGGGGGGNDACLADVKLFADSQLDSKLYSVADSCVMNGSGSGSAANGNGSGPSIATLTPIDQVADSLHNSGVRIYKDLTEYVDMNSIDDIAAIIGSAIADTTVPNQLDKDDNNDTRDSWMDLDAWIDGNCIQQESAKVLVSQQDSLGDFILPHSPLPMHASSSTLQSLLSHGYMPLLQNRLQNGPPNGNSSGGGGGANQGAGIKGDPQAPTSTSYCNELAAATSSSCSPPGSVVSTTDNPNGLMINPRYLSNPTNNQATGNLHQQGGYSMQASGLSLKDNGLCSPDLLGNYPHTTTASTTGSEMRTGAPKAKRSRSQKKSNQQQQQQQQQQQQQGDGGGQPTTPQMSAISPSGFSASDLSGLLGKEKPVHRCSICNRGFLNKSNIKVHLRTHTGEKPFRCDVCAKAFRQKAHLLKHQQIHKRIGRD

SEQ ID NO: 29617 - DNA, 3929 bp, DROSOPHILA
ccgatgcccaaaagtagatagctccatcagttaccggctaagtcaacactcataagcacacgcagacacaaaatgaaagtcgacaaaaaagtagaaccaaaaccaaacatttactctagccacacgtaaactactcaatgaaactatgccatcggttcgtagttagagcattatgtattcgtaacgatcggtcgaacaattgatgaattaattttgcaaaaatgttaagtttaaagctgtttaaagtcctaaggatatgtcatagataattcgaataatcgagcaagttgagtgttctctttgcacctaaacaatttctatattgtatcttaaatagtcaacaacattaattgcacgtgaataatagaaaatggaaatgaaaatacgttttaattgtgatttttgcaaaagttcatttaaattttatttattgaaatgtgaccctgcttttaaagcagatccatcatcttgtgtattatcctatttagtttgctttaaattaaaacaccaaacaatcatacaccgaacctggcttttgcgttattcaaagactgcttaaaacagtgcgttttagttcatttttaaatagagtcttactaactttaatcactgcaccttaggggcaagggcgattgcaagaaagatcaaaaacagcccgacagtaaaggtggcaagaagtcggagaagaaagatgacaagaaatctgattgcacaaaaaaagaggaaaagaaaaaggaagaaaagaaagacatttgcgaaaagaaaggtaaaaagtaaagggatacaaattttgtaataaacaatgcaggatcgagccggatgtgtttgagacttacaccatcaaaaagaaggaagccattgtttaaattcaaaatccaaatttgccacaaaagtttcattgttcaaaattttaatctcaaatttcagatgtaaacttctgacccgccacatttttaaagattttcataatatttatgttttgtttattgtgtgttgagccttagaaacgatcgactagagataatatgtggttctgctcctgttcccgccagtcggtgtcgccatcgcccaggttgccagcgtattctgtgaatgaatttgaaatttgaacatctaagttttactgggcattccatttgtggtttacccctcattatgctgcgaatggtcttcatggaagcgccgcgcaagttaaggatctgcagtacacgctgcttgacggtgtcgccagtggcactgacctccagcaggatgtagtcgatgcgctgcagcgtgaacagcccgccggtcagtcgttttatatagttattctccgcctcctcgtcctcatcaatggtgggatcctatgccatgatattggttttcaattgattagtttatggttacacataaaacttcatttcgtaccttagcctgctgatcgatctccttgtctatggcttccaccttggccagatacttgaggtgcagctccagcaggcgatccaccttctcgtgatcattctccgtgaacttggccaacattcgctggcggtgtgtgcccttgcagtttcgcaacattgatgcgattacggaggtcacatgctcctcatgctcatcggcggagattaggcgctgcttgttgcgcttgggggttttcataaagagtgggaagatggtgcgcaagccgagaatttcgacaaacttgttgcagttgtctctgccatcctggccagccatggcatgatccaacaccttgagcgatccatttctagacatcttcttctcgcgcagcattaggttcatcagctgcagaccctcgccgctgagaaaacgatcgcgattctcgcgggccatcagagcggaacaaaggcaattgaagaggttctgcatgtactcctgctcctcgttgctagcgggatcgtgtctcttgtagacagccagctgctggagcagcacatccacgccatccagagaacccagcagtaatcggttctcgttctccgtttgtataagtatggaaagtatctcgctgcagtagagtttgttgggatcgaagggcgacttgccgcgcagccgtttcagcagccaggcgagcagtccctgttcagcggcttccttcacgaattccgaatcgatttcggtaagattttccactatggccagcgtattatgcacgccatcggcttcctccttaacctgttcgttcagtcgctccagattctggacaagcagagcacagatttgctcttttctcagtgcttcaatcaaggattcggcaccctcttgactttcgcccaggatatcaacatcggtcacttcttgcagcagatctaccacggccacggctatgtctgtgttctgatgtgccagcagttcgagcaaactgtgcaggccgtgcagatccacgagaattggatacagatcgggcaccgtggccacgcccttcagctcctggattaccgtgtgcagctccacctcggagtccatgaacttctcgggactgtcggcaaacttgatgcgcatctcctggttcttcaagttacgcttctcgaacaccagtatcagtttcttcaggctctgctcatccagaacatcgccatcggcctcctcgttctccacgtacttcaggatgttcaggcgttcctcctctgtcagttccggatcgaattcaaaggcggaagtgccactgccaccggtggctcctccactttgcttgacatagtgtgcggactccttggcatcggcgatgcgccgcatgcgtttggttttctcatcgacaccgccccgttttccgtgcgagctcgccaaatcgaattcatcgtcctcgtcgtcgtgcggacgctttggcgtctgttccggctacagtttggaatggtccaggtgcatgaatatcattggtattatccatatatttaccttaaacgccagcagttcgccgatgtccatttttgcgggccttaaaaaacaattagtgctggaacgttaggcgattcttcagcgatactatcgaacgtgaaccgcacgtgaatgaagataggttcagaaccatgataagcatgacttagcggagactcaagccctttaacccttagaaggtgacatcattattttgtttgaatcatatttaacttcaaattaattcataattctgatttcaatttgtgatttaaatttgttattacctacattttatataaatcaaaaattaattcaaattttaattcgctattatatattgcttttcgatatttgtgctcttcaaatgttacttgaattataagattttgtttaaataaatatataataataataattactaggcaattttacaacattttataaagcaaagctaacaatcctaaaagagctttaataagtttaaaaacctagaatatggtttataatttctgtattctttaaataattaatacttttaatatgaaatttaaaactagcaacttgaacccattaaacatttctttcgcccacccagcctcccaaaaaggggcctttggctgttttagcccagcgcctgcgactttgacgacgagtttacataaattcctaaaggccaagccccaaaaataaatttacaactgctttaagctctggcaattcaacaagttgttcgcgtctatgagtgtatgtgtgtgtgagtgagtgtgcgctagtgtgtgtgctttcttcgagccagtctttttttttcaagtcagttcgtcagcgtgatttggcgttgttgttgctgcctgtgcagttgccattggtagtggtattggtattagtattgttgctgtggctcctgccgcttttttacttttttctggcttgtttcatgctgacccacttttagtggcaatacgtgagcccgaacagtggggcaaaaccttagtgaaagcttcgctgtaaaagagctttaaaaatagaaaatatatgggaattttaaagtg

SEQ ID NO: 29618 - DNA, 1747 bp, DROSOPHILA
aatggacatcggcgaactgctggcgtttaagccggaacagacgccaaagcgtccgcacgacgacgaggacgatgaattcgatttggcgagctcgcacggaaaacggggcggtgtcgatgagaaaaccaaacgcatgcggcgcatcgccgatgccaaggagtccgcacactatgtcaagcaaagtggaggagccaccggtggcagtggcacttccgcctttgaattcgatccggaactgacagaggaggaacgcctgaacatcctgaagtacgtggagaacgaggaggccgatggcgatgttctggatgagcagagcctgaagaaactgatactggtgttcgagaagcgtaacttgaagaaccaggagatgcgcatcaagtttgccgacagtcccgagaagttcatggactccgaggtggagctgcacacggtaatccaggagctgaagggcgtggccacggtgcccgatctgtatccaattctcgtggatctgcacggcctgcacagtttgctcgaactgctggcacatcagaacacagacatagccgtggccgtggtagatctgctgcaagaagtgaccgatgttgatatcctgggcgaaagtcaagagggtgccgaatccttgattgaagcactgagaaaagagcaaatctgtgctctgcttgtccagaatctggagcgactgaacgaacaggttaaggaggaagccgatggcgtgcataatacgctggccatagtggaaaatcttaccgaaatcgattcggaattcgtgaaggaagccgctgaacagggactgctcgcctggctgctgaaacggctgcgcggcaagtcgcccttcgatcccaacaaactctactgcagcgagatactttccatacttatacaaacggagaacgagaaccgattactgctgggttctctggatggcgtggatgtgctgctccagcagctggctgtctacaagagacacgatcccgctagcaacgaggagcaggagtacatgcagaacctcttcaattgcctttgttccgctctgatggcccgcgagaatcgcgatcgttttctcagcggcgagggtctgcagctgatgaacctaatgctgcgcgagaagaagatgtctagaaatggatcgctcaaggtgttggatcatgccatggctggccaggatggcagagacaactgcaacaagtttgtcgaaattctcggcttgcgcaccatcttcccactctttatgaaaacccccaagcgcaacaagcagcgcctaatctccgccgatgagcatgaggagcatgtgacctccgtaatcgcatcaatgttgcgaaactgcaagggcacacaccgccagcgaatgttggccaagttcacggagaatgatcacgagaaggtggatcgcctgctggagctgcacctcaagtatctggccaaggtggaagccatagacaaggagatcgatcagcaggctaaggatcccaccattgatgaggacgaggaggcggagaataactatataaaacgactgaccggcgggctgttcacgctgcagcgcatcgactacatcctgctggaggtcagtgccactggcgacaccgtcaagcagcgtgtactgcagatccttaacttgcgcggcgcttccatgaagaccattcgcagcataatgagggaatacgctggcaacctgggcgatggcgacaccgactggcgggaacaggagcagaaccacatattatctctagtcgatcgtttctaa

SEQ ID NO: 29619 - protein, 581 aa, DROSOPHILA
MDIGELLAFKPEQTPKRPHDDEDDEFDLASSHGKRGGVDEKTKRMRRIADAKESAHYVKQSGGATGGSGTSAFEFDPELTEEERLNILKYVENEEADGDVLDEQSLKKLILVFEKRNLKNQEMRIKFADSPEKFMDSEVELHTVIQELKGVATVPDLYPILVDLHGLHSLLELLAHQNTDIAVAVVDLLQEVTDVDILGESQEGAESLIEALRKEQICALLVQNLERLNEQVKEEADGVHNTLAIVENLTEIDSEFVKEAAEQGLLAWLLKRLRGKSPFDPNKLYCSEILSILIQTENENRLLLGSLDGVDVLLQQLAVYKRHDPASNEEQEYMQNLFNCLCSALMARENRDRFLSGEGLQLMNLMLREKKMSRNGSLKVLDHAMAGQDGRDNCNKFVEILGLRTIFPLFMKTPKRNKQRLISADEHEEHVTSVIASMLRNCKGTHRQRMLAKFTENDHEKVDRLLELHLKYLAKVEAIDKEIDQQAKDPTIDEDEEAENNYIKRLTGGLFTLQRIDYILLEVSATGDTVKQRVLQILNLRGASMKTIRSIMREYAGNLGDGDTDWREQEQNHILSLVDRF

SEQ ID NO: 29620 - DNA, 2558 bp, DROSOPHILA
aagtatacatcaaattgaagacgatgatattgtagaaacaaatggatgaaatgtaagaagagaagattatctgctccctcatcctcatccattggctgtacttctttttgatcaccacttagtttttttttttttttttttttgacaaaaagcaaacaagaattttcttatcagacagaaacataaaaaaaaacgtcttgaattgcttgtctttcagttgttgattctccaggcagtcttttatttgaatttctaacacatcagctagcgtgtcactttcgataagagttttttcacagaaatatggtgtgaagttccaagtatagaacgtttataaagtgcgatatcgtttggaaaacgcttgaaatggcacctgccatctcataaaaagtatttgcataaatattaaaactccgtaatcagcgttataatctcaaataatgctaattattattaacgcgccactgtaaatggttgctaccccgcccactcgcacaccttctagacaaacgcccacgtactcatggtaaaaagcttcaacgacgaaaagaaactcgaagaactaaacagtgatcactccaaaattgtacatatttttcttgctttgcaaaaataatttcttttcactatcaaacatattttccctcccaaattattatttcttttcttccctgttaaattaaaatgttaaaattatacttaacgagtgctccctgtgcaggaaaaccaattagcagagatgagaaattcgagagccgatcgcaaacaattacgtgaataatttacagctgagatatgggctactaaagctgccaacgcattgtgggatcaggtagatcatacagaaccggttaagagaaggtgttttcgtgtatttaaatcgaaaggtggtttctacaaccgaaaaatactatatattgctgatatttaccaagaatagtagtaaattccgatagaaacaaatacccatgcttgtgatattttctccccgtgtacgagattaagccaggtacttaccggtcttgaggcgatcgttaattagatcctcgatgagctgcggacactcgcactcgatggcgtagcagaactgcttgaacttctcgaatccgttcttggcaatgatatcgatcagattggagcactggactcgcagaatttcggcgtcgtttagcccagaacatggtcccccgccagagggcgttagtgagcgactgtcgcaattggcgtctccgtttacgctggcgcacctggaggagccactgcctccgctgccggcactccccccgctggccgtactcccactactggccacggcactcagtttccgcttggtgagcgagggtgcactaccgggaggctccacagtggcagaggcggcagcagaaggcgtgggcgtaactgcgttgtagggcttcaataggagatcctcttccgattgactaagcaccgagttcttaaccagaaccgctaacagatcggtgctccccaggtccagcataatccgctcctggtgacgggagagcagtgagcgcacctcttcctcttcctcgcgcgtcatcttggcttgctccgttgtttactgttacttcttactgttatttattgcactctccagctacacaaacaaatcacattgccactttttcggcattttcttgtgagacttaaaatttatacgaattgaattcacttttatatttcctttttatagcttttctgttaattatttcaaagggttttacggttattcgagcactagtagtttacataggtttagctaaataatttcttcactgccttgcactttatttgctttattttgccaaacaaaaaacagtagtactggtttcctaaatagttatattttaatcgttattagtttacgctttgtttaatcctttttattagaaattttctcacttttgggcgagtaacacgtaaaatcgcgcgccatttattttctttcgatttttattacacagcacttcgatagctgaaaattccttaattcgtgtgtgctggtcaaaaattatttatgtttccgagatcaaacatttaaacttttaccggctctttcgcattcgtatttgtttgtttatgttttaaaacgcctgtatagatttcaagttcacgactcggccatttcaactcgtccgctccgcacaaccgcacaagcgcgataatctgaaccgactgagaaccaaattcgagcgaagcagctgcaaaggaaacgcaagtgtcagagatgcgtcgttgcggcgaaaaacctgtttctggcggggaaatgtgcaagcagtatagctaaaaattgatgaactgcgtgaaactgacctatgtttggttaaggtttggtgatgtgttttgtttttattttttatatctgttgttgaatatttttttgtcgtccttggatgggccattaataaattcacttcgtctgtctatttggatttcgttctagcctttaagctcttaactgctaacgaatcgccattactagcgagtaacaacaaaatggttcatcaataagttatcgataacttaagtcgcacatccgt

SEQ ID NO: 29621 - DNA, 558 bp, DROSOPHILA
atgacgcgcgaggaagaggaagaggtgcgctcactgctctcccgtcaccaggagcggattatgctggacctggggagcaccgatctgttagcggttctggttaagaactcggtgcttagtcaatcggaagaggatctcctattgaagccctacaacgcagttacgcccacgccttctgctgccgcctctgccactgtggagcctcccggtagtgcaccctcgctcaccaagcggaaactgagtgccgtggccagtagtgggagtacggccagcggggggagtgccggcagcggaggcagtggctcctccaggtgcgccagcgtaaacggagacgccaattgcgacagtcgctcactaacgccctctggcgggggaccatgttctgggctaaacgacgccgaaattctgcgagtccagtgctccaatctgatcgatatcattgccaagaacggattcgagaagttcaagcagttctgctacgccatcgagtgcgagtgtccgcagctcatcgaggatctaattaacgatcgcctcaagaccggtaagtacctggcttaa

SEQ ID NO: 29622 - protein, 185 aa, DROSOPHILA
MTREEEEEVRSLLSRHQERIMLDLGSTDLLAVLVKNSVLSQSEEDLLLKPYNAVTPTPSAAASATVEPPGSAPSLTKRKLSAVASSGSTASGGSAGSGGSGSSRCASVNGDANCDSRSLTPSGGGPCSGLNDAEILRVQCSNLIDIIAKNGFEKFKQFCYAIECECPQLIEDLINDRLKTGKYLA

SEQ ID NO: 29623 - DNA, 3014 bp, DROSOPHILA
cattgcggggaacttctttcgaacgccttgcctgcactagattgtaaatattgcgcgctagtgcaccattgattgcattaatatcctccgactcgcggcgttccgcttccaattgctcagcggcggcagctgcttcggcgagcttttcccttgccacagcggcggcaatctcctcctcttccgcttccttcgagtgcagctcggagcgcactttttgcagaagggcgtaatcaagacccttcaccaaatgcgtatgctggatgtctccacccaagaacttggactcctgaatgatacgtcttcttcgctcctgggcatcgattccggatttcatatctggcgctacagctcgatacgcattggtgctgcttccgtgtcccggcgtgctcacgttcacgtaatctggattggcaccatcgcgtcgttctcgtgctcggtccctgtacttctcggacagctcttgcagcttcacatcctcctgcttcttgagcgccgcatagaagttctttttcttgcgacgcagatcattccgctcgctgctgctctgacccttcttcttttcgccactcaatcctgtcgtgccgggggcggtggagggcgtggcaaaggtagcagtggccagagatcctccagcggaggtgctgctcgtcccggagccaggaggaggagctcggggcgtcgctagcagcttgcggaagtcatcgttggttagtcgcaccgaaggcggtgcttccaagtgggcatccgacatggcgaagaaaattcgaagaaaactcgcagagaaaatctatatttacaaattgtgcttcttcttggttttgcctgccagggttggctgtgtttttgatttttctccgtactgtaatcgataacatgtttacagtgatggaagattagcgtttttagcgttttttccgaataattacgaatatttgaaaatcgattccacatttagcatcactgtttctcataatgtattgttattattgttaaactacaaatggagcagtttcttaaaggtctgcccaaagtagagctccatgctcacctcaacggttccttgggcatcaaaagcctatgtgatcttggcgagcgattgtatggaacctcttgtaaagatttcctgaagttgtgcgcgcacttcagccgatttgaaaaggatatggatgcatgcttcgagaagtttgcatttgtgcacgagttgacctccacccgggagggtctgcgatttgccacggagttggcgattcgagatttcgctgaggacaacgtccagtatgtggaaatgaggaccactcctaaggcaaacgagaactattcacgcagggactacctgcagatcgtgatcgatgcaattaaggcagctagcgaaacgtatccagagataacagtcaagctactgccctccatcaatcgagcggaaccagtggacgtggctgaggaaacagtttccctggctgtggagttggcacgggctcatccaaatcttatcttaggcatcgatcttagcggtaatccagggaaggggcggttttccgactttgctcctattcttgcacaggcccgggataagggtctgaagttagctatacactgcgccgagatcgagaatccatcggaggtaaaggaaatgctgcactttggaatgtcccgctgtggacatggaacttttcttactcccgaggacattgggcagcttaaacaacgaaatattgccattgaatgctgcctcactagtaatgttaagtcgggaacagtgcccagcttggaggagcaccacttgaaaagaatcatggaggcagatgcacccaaggttatctgcacggacgacagtggcgtttttgataccactttgacaaaggagtttctgattgctgcggaaactttcggtctaacccgtgaacaatgcatcgatttgaccttggaggcagtgcatcattcattcgccagcgaacaggagcaaatacagatggcggatagggtggggaactacgcagacatattggtcaaataaaaaaactgtcactgccctaattgaaataaataagtttttgtatgtaacaccatatatgtaccaacctgattcttatttgtcaaaaattttaccttttaatatcattctttttattcaatatgtagaagtatttagttacaagtttgttcattagttatgttcatccttcgtacgtacatatgtggctaataagtttttatgtttttctcatttaatatcattcataattgaattcaagttttctgttcattactttatgttctcgtttctgccgttctgtgtggcttagtttgggggtaggcattcaaaatacaatggagtacaagctttggtcaatagtgggctcttaaactgcaccaagtgaagtggacgatcgaaatctaaggaaaccaaagtaagacttaaatgatcgaaatctgtagtttaatagcacattttgaaacaaactttttgggtgaagacatctttatagtcggaccctccacctacccaagcctgcagattagctttcagttgaagtggtttgcctgcctggtattccctatatacagtttatctatattttatacttttagtttggttttagcttactgctgtgtttctacatgagttttactactttatccagttcattccaaatgtcgagcttcaagaaacgaccgacttgggagtttatttatattgtatagaagtgtttttacctcaactagagagttcaattacaaatctatatatttatataaaggtttacatttctacactttggaaaaattctactagttgaaaatggtatggtatggattttgctgttgtattcgactttatttaggagttcgggcatagggttttagtattcttgcttttaagtatgtataattttttttaaaatgtacggcctggtaaaagtttagcttgccaaggcttataaaaaaatatgtcttgtttacttactggctcatttataaaagtcgaccatttttgggtaatatcatatagacag

SEQ ID NO: 29624 - DNA, 1014 bp, DROSOPHILA
atggagcagtttcttaaaggtctgcccaaagtagagctccatgctcacctcaacggttccttgggcatcaaaagcctatgtgatcttggcgagcgattgtatggaacctcttgtaaagatttcctgaagttgtgcgcgcacttcagccgatttgaaaaggatatggatgcatgcttcgagaagtttgcatttgtgcacgagttgacctccacccgggagggtctgcgatttgccacggagttggcgattcgagatttcgctgaggacaacgtccagtatgtggaaatgaggaccactcctaaggcaaacgagaactattcacgcagggactacctgcagatcgtgatcgatgcaattaaggcagctagcgaaacgtatccagagataacagtcaagctactgccctccatcaatcgagcggaaccagtggacgtggctgaggaaacagtttccctggctgtggagttggcacgggctcatccaaatcttatcttaggcatcgatcttagcggtaatccagggaaggggcggttttccgactttgctcctattcttgcacaggcccgggataagggtctgaagttagctatacactgcgccgagatcgagaatccatcggaggtaaaggaaatgctgcactttggaatgtcccgctgtggacatggaacttttcttactcccgaggacattgggcagcttaaacaacgaaatattgccattgaatgctgcctcactagtaatgttaagtcgggaacagtgcccagcttggaggagcaccacttgaaaagaatcatggaggcagatgcacccaaggttatctgcacggacgacagtggcgtttttgataccactttgacaaaggagtttctgattgctgcggaaactttcggtctaacccgtgaacaatgcatcgatttgaccttggaggcagtgcatcattcattcgccagcgaacaggagcaaatacagatggcggatagggtggggaactacgcagacatattggtcaaataa

SEQ ID NO: 29625 - protein, 337 aa, DROSOPHILA
MEQFLKGLPKVELHAHLNGSLGIKSLCDLGERLYGTSCKDFLKLCAHFSRFEKDMDACFEKFAFVHELTSTREGLRFATELAIRDFAEDNVQYVEMRTTPKANENYSRRDYLQIVIDAIKAASETYPEITVKLLPSINRAEPVDVAEETVSLAVELARAHPNLILGIDLSGNPGKGRFSDFAPILAQARDKGLKLAIHCAEIENPSEVKEMLHFGMSRCGHGTFLTPEDIGQLKQRNIAIECCLTSNVKSGTVPSLEEHHLKRIMEADAPKVICTDDSGVFDTTLTKEFLIAAETFGLTREQCIDLTLEAVHHSFASEQEQIQMADRVGNYADILVK

SEQ ID NO: 29626 - DNA, 2892 bp, DROSOPHILA
aattgatgcacaaacgcctggtaactggcgatttttgtttttagccagaggaaaaacaatgcaggcgtcattaacaatgttgttcgcggacgatgattgctcccgttttgggttgaaaaacatgttattttcgaacggagataacccccgtggaaagtgcgagtgggctgcccaatgggagtcatgctttaacaagcttgtttaatttacaactggaatatttcgacgagcattttactttctctggtcgttacaaatttgtgtcccaaggatgcgtgatagaaaattattgtgaatttattgtcaaaattgttttaagctatagaactattttcgaagttttcagaaagaaaatgttttgtcctttatttttcattgtaactcatgttttcaaaacaataattaagaactaaaaatgcttgtaggagaagcacatggcataattaatatatagctatattcgatgaataatggagatgtaacaaagtacggatttcaaaaactcaccttgtgaatcgcattttgaatcgagttcttttaataactgaaaacgtttgatctgttgaataatatctgatgtcctattagagtttattgcactaatatacttttaagctcgttaaatattgcaacactttttgtttaaagtattctataaaagaacttggtttcacacttgtcgctttggaatatttaaaagaagcgcgttgcagccctttttatggctcttaaaacgggtattttttagtacctttctagttcgaaatttcgaaattggccttagattaaaatatttcaggggtagacaaattgcagatttctcaataaccaagaataaaacgaagataatgctgcgcacgtacaattttatctgtatgaataatctgatactgttgtaaattcaacgcttaacgtttgagtgtgtcttagcagtgcaagtgtgatgcatcttttttggtttatttatgccaacgccatctggccacactgcagtgaaaaggaaaacaagaagtcgcaaatccaatctccattgcaattttgaacaccattcctttgcataactattgcccacgcaactgcatctctgatgcccacagactggcgatgaagccccagagcaagcggaaatcattcccattcaatgcgcctcctccgggcggtatcatggacttcggattcgggagctgcagcaccttcggcaattcggtggagaatgatctggtaaaatggcagcataagcgaaaatccgagcagccggcaccggcagtgctgtaagctatatcctcaacacaacatccacataaaatactaaccacagaactcattgcagaccacccaaaatgcttataaccgaggagaggatcacccagcatttcagcggtctatcgctggatccgaagatcaatgtcgccgccacggccgttgttagcaacaacaacagcgtggccagcgttacgggcggactggccacggatgatataccatccaccagcaccgggaagacccaccaccccaatcccgcctatcaaatggcggccatggaactggagcagaaactgcgcaatgccaatcgcatcgtaatttgtgatggccttaagccaggatcgggtcccggttccgctccacctgtaataccaccggagtggctaatcaagtccataccacgtccctgcaccgccttggtcccttggcagccttcgccactgcagatgccgatgccgatgccggaagtcaagatggtgtcgccccaaatagtggcacccatggctgcggcaccggcggtccaggagctggatgactacgatgacgatctggagttcttcgagaacaacaacacgtgcagcgtgaatcttaacaagtctgagcaggagcacatggacgaagacctgtagcgatagccatataaaaccctaaaccataagcattaaagtgtagatttgtatgtccgtaaccgtaagaacccagttgatagcatgcaagaatactccgcctccttatttttttattactattgaaaatagatagatgtatgtgattcaatctggaatgttccggaatattcgttatttgaagcaagtgagtcgagaacagataactttcgagagacgcaacggcggacgtcaaacgaacacctgacttaagaaaagtttttctaagatgaactaattcattttactttttacatcaatttataagcactttttacagtatatgagtttctgcagtaaagtggatcgaacgagctgaatctaccatattgtttaaaatatactttacattgcgtttttggaatcgacctttctttgctggctactaaaattagaaagatacgtattttttgcaattgataaagaataaagaataaaactgtaagcaaaactttgtatgatcttatatatataacaaataacgcaaaatgttaaatagacataaaattatgaatgcttaagtccgatattgtaagaacctctttgcatttataacatttatatattttttaattttgccgagctagttttccgttaaattaactggttgattgtttaaatgactgtttaaaatgatttaatattgaactttggtatttggtatttttggacagggcggtcccactgaaacattggtgttggccaactgccgtcatattgaaaaaaccagcagagaggtcggatcgcagcgctgctggatttttcagcgattcgcgtacggaaaaaatcgagtacgtccgagtgcggattgcccagaaatccgtttaaataagtgtttatttggtaattattatttaaaatacacacttgtataagagtgtgtgcgtttttggtgctgtgaaaagtttagtgaacggcccccacattgacagcgtatgaattataattataatttacttcatgg

SEQ ID NO: 29627 - DNA, 833 bp, DROSOPHILA
gaaaacaagaagtcgcaaatccaatctccattgcaattttgaacaccattcctttgcataactattgcccacgcaactgcatctctgatgcccacagactggcgatgaagccccagagcaagcggaaatcattcccattcaatgcgcctcctccgggcggtatcatggacttcggattcgggagctgcagcaccttcggcaattcggtggagaatgatctggtaaaatggcagcataagcgaaaatccgagcagccggcaccggcagtgctaccacccaaaatgcttataaccgaggagaggatcacccagcatttcagcggtctatcgctggatccgaagatcaatgtcgccgccacggccgttgttagcaacaacaacagcgtggccagcgttacgggcggactggccacggatgatataccatccaccagcaccgggaagacccaccaccccaatcccgcctatcaaatggcggccatggaactggagcagaaactgcgcaatgccaatcgcatcgtaatttgtgatggccttaagccaggatcgggtcccggttccgctccacctgtaataccaccggagtggctaatcaagtccataccacgtccctgcaccgccttggtcccttggcagccttcgccactgcagatgccgatgccgatgccggaagtcaagatggtgtcgccccaaatagtggcacccatggctgcggcaccggcggtccaggagctggatgactacgatgacgatctggagttcttcgagaacaacaacacgtgcagcgtgaatcttaacaagtctgagcaggagcacatggacgaagacctgtag

SEQ ID NO: 29628 - protein, 242 aa, DROSOPHILA
MKPQSKRKSFPFNAPPPGGIMDFGFGSCSTFGNSVENDLVKWQHKRKSEQPAPAVLPPKMLITEERITQHFSGLSLDPKINVAATAVVSNNNSVASVTGGLATDDIPSTSTGKTHHPNPAYQMAAMELEQKLRNANRIVICDGLKPGSGPGSAPPVIPPEWLIKSIPRPCTALVPWQPSPLQMPMPMPEVKMVSPQIVAPMAAAPAVQELDDYDDDLEFFENNNTCSVNLNKSEQEHMDEDL

SEQ ID NO: 29629 - DNA, 4154 bp, DROSOPHILA
atcccaacagaaataatgttatagttaaaatcaggttttacacctgtaagattaaaatcaagtaacaaaaactatcgacactaacgcgaaaccagcgagtgtcatcgctaagggggatcagctgtttgccaacatgtgagtgtgtgggtggtgggaaggtcacaaacctattggaatgcccatagttttttaattcatattcaagcggggcttataactgtaatacactttactataactttaggattccattttaaatagaaactttaccaacttatggcgattcggcttatttgttgtaaggtgacagacaagctaaatcctccttacgcgacatcccatgttaaatcaagccttgtttacttacctattttaccagccgactgacccattgcttaattaaaatcacaaattgcgtgtttcgcttcccgaaaggcacaagaaacaacagccacaacaactaggacacacacagcttctttggcattgaattttcacgtagaccagccctcgcataagctcgatattatgtgcaccgtgagccgatcgtgtgctattggcaggctagctcacttccggaatcataggcgttaaatgcgatgcattttaaagctttgcctaattgttatttggatggagctgccggtcgcaaggcttttttttagtgtgaccgcgttagtatttaaacatgacagtccagctttgccatctgccacacaagaatataccatacaatatttataaataaacaaatcactagacgcgctagaaaagtcatttacttcgtttattaatgatgccaattcctgaagatgtgaagtgttctaaagagttgtcgttgtataacgtgccattaagaaaactaattgttaacaaatcacaggatacgaaaagccgtgacttagtgcgatattttttaaagacgaaacttcagcgatttataccaaatgagaagcgatgcactctctatgatatttggtatttttcaccccgcctacggtcacactccacgcaacctctggcaaaaaactaaaaatatgccataaaaagcgagaatcgaagttgtttatatatctttcgcggattacaaagtgcgtagccgccgcgcgccttccagagcgacaccgaccacacacgcccgccgcccgaaaacacacagaaaaccggcagaaaaatggcagatccgctcagcctgcttcggcagtacaacataaacaaaaaggagattgtcgagcgagacagccagattatcttcggcgagttctcctggccgaagagcgtgaagaccaactatctcaaatatgggtaagtgcggtcaggacgacctgtgggacaactaggattagccactaactcttacacttttctcccgtcgattagatccggtaagaagggcgctccacgtgagtactacacgctggagtgcctgctgtacctgctcaagaatgtgatgctgcaacactcggtctacgtgcgacagtgcgccgccgaggatatacccgctgtgaatcggccggatcgtaaagagctcctggcctatctgaatggcgagacgccaacgtgtgccagcatcgacaagagtgccccgctggaaatccccactcaggtgaagcgtgccgccgagggtgaaccttccagcgttgaggtggctgccaagaaggcccgcttcgaggagactcaagtgcagaaggtgcgcgagcaattggccgcccgatgggatgtcaaccagaaggagaccgctgtcaacatggacaacatcaagtcgctgtccgagacgatgtccgttgagaagatcgccgccatcaaggcaaagcgtctggccaacaagcgaacgaccattaaaaggacggacaatgacgaggccatgggaactgatttgcgtgccatcctggactatgatgtggactccacaaaggacattatcagcagagaacggcagtggcgcacgcgaacttcgattctgcaaagcacgggcaagatctttgccaagaacatctttgctatgcttcagggcatcaaggcgcgcgaggagggacgcaatcgtccacaggtgcccaatcccattaagatgccggagccggctcgaatagccaaaccacaaccgcagctctcgcaatacaaccgttacgaccaggagcgcttcaatcggcaaaaggaggagaccgagggctttaagatcgacacgctcggcacataccacggtatgtcgctgaaatccgtgacggagggctcactggctcagcgtaaggcgcaggctaacaacctaccgggagcaccgggtgtaatagcgggagcagccgccgggcggcccaaggaattgctacctgcggcccaagctcggcaactgcccgccaatggtccatcgaagcgaacatctcgcacccccattattatcataccgtctgccaacacaagcctcattaccatgctcaacgcgaaggatatcctgcaggaactgcgcttcatgtccacctcggataaaaagctgcagggctgccagcgcgaatgcgaagtgctgttacaggtgcgatttaatgtaacgaattctcttccaaatggtttatataccaaaaggttttacagcatttgtttccgaagatgtattcaatttcctattaaaatattaaagataagagttggcatacaccagtgctaatttattttcccttttattcacacatagcgaaaacgcaacaatcagactgtgtcttaccgggtgatagataatcccaccaagctctcgcaacaggagtggcaacgggtggtggccgtcttcgttatgggaccccagtggcagttcaagggctggccttgggaaggcaatcccgtcgatatattctcaaaaagttagttaacatcatgcccagctctctaagtttaattcactaagtctcattttcttacctactgcagtttgcgcttttcatttgtgctttagcgaaatgaaattggactcaaacgtggagcgctggtcagtgacgctactccgactatcgcaaaacaagcgtcatatggatcgggcagtgctcagcaaattttgggaaactttggacaagtaagtgcttatataaaaatccaccatttcgttacaaaagatttacaatgcaatctttttagatatatagccaagtacaagcccgatttacgatattaaccctcaccgcattcttaaacgttctgctgaaacacgacacctgctgttttcaatcccactcccaagtagttaccattattatagacaggctgtactacattatgcaacaaacgacgcaaatagtatgttacagtgtgcgcccaacttccgtaggaaagacaccaagccgaatctggggcatttggccagttccagtgcgagtttccgattagagcccgaccaggattatctcgcttttggcaacagcattataagtcgcaggcctgcgatcgtgcaaataggcccaaatacgcagttagtagttaagataaagtttttcgttcaaattgtacaatgtaaactacaaaacacaaacatctgagagcaagtatcctttgtatttttagtgataataaacagttaaaagccattctgtttcggttattcaaacagaaggtaacataattggaatttatttggctgtcatcaagtatattttctcaattatttaaccttttcaaagatcatatattggaactttttcatacctcccatcgttaaagtcataaatcaaacgaaatagtagtatttcattatttctgtttatatagcaaaatatgtgggtttatgtcatgttagcttgtggtcagtaactttactatctaatataggtttaggggattaaataaaaatactatttctcggccagcgaagcacgatagttactggtgaatcttcaggaggacttgcgatcatcgaactgcttcctggctgccttcagcgtgttgtgcatcagcatggccaccgtcatgggaccaactccgccgggcacaggagtgatgtggccggcgacctggcgaacttctgcaaagtgatgaggaaatgaatcaatcttgttggtctttagtgatttaatagatcagccacacaccttcaaagtccacgtctccgaccagcttaaactggccagtgctctcatccttgatgcggttgatgcccacgtcgatgacacaggctccgg

SEQ ID NO: 29630 - DNA, 1791 bp, DROSOPHILA
tcacactccacgcaacctctggcaaaaaactaaaaatatgccataaaaagcgagaatcgaagttgtttatatatctttcgcggattacaaagtgcgtagccgccgcgcgccttccagagcgacaccgaccacacacgcccgccgcccgaaaacacacagaaaaccggcagaaaaatggcagatccgctcagcctgcttcggcagtacaacataaacaaaaaggagattgtcgagcgagacagccagattatcttcggcgagttctcctggccgaagagcgtgaagaccaactatctcaaatatggatccggtaagaagggcgctccacgtgagtactacacgctggagtgcctgctgtacctgctcaagaatgtgatgctgcaacactcggtctacgtgcgacagtgcgccgccgaggatatacccgctgtgaatcggccggatcgtaaagagctcctggcctatctgaatggcgagacgccaacgtgtgccagcatcgacaagagtgccccgctggaaatccccactcaggtgaagcgtgccgccgagggtgaaccttccagcgttgaggtggctgccaagaaggcccgcttcgaggagactcaagtgcagaaggtgcgcgagcaattggccgcccgatgggatgtcaaccagaaggagaccgctgtcaacatggacaacatcaagtcgctgtccgagacgatgtccgttgagaagatcgccgccatcaaggcaaagcgtctggccaacaagcgaacgaccattaaaaggacggacaatgacgaggccatgggaactgatttgcgtgccatcctggactatgatgtggactccacaaaggacattatcagcagagaacggcagtggcgcacgcgaacttcgattctgcaaagcacgggcaagatctttgccaagaacatctttgctatgcttcagggcatcaaggcgcgcgaggagggacgcaatcgtccacaggtgcccaatcccattaagatgccggagccggctcgaatagccaaaccacaaccgcagctctcgcaatacaaccgttacgaccaggagcgcttcaatcggcaaaaggaggagaccgagggctttaagatcgacacgctcggcacataccacggtatgtcgctgaaatccgtgacggagggctcactggctcagcgtaaggcgcaggctaacaacctaccgggagcaccgggtgtaatagcgggagcagccgccgggcggcccaaggaattgctacctgcggcccaagctcggcaactgcccgccaatggtccatcgaagcgaacatctcgcacccccattattatcataccgtctgccaacacaagcctcattaccatgctcaacgcgaaggatatcctgcaggaactgcgcttcatgtccacctcggataaaaagctgcagggctgccagcgcgaatgcgaagtgctgttacagcgaaaacgcaacaatcagactgtgtcttaccgggtgatagataatcccaccaagctctcgcaacaggagtggcaacgggtggtggccgtcttcgttatgggaccccagtggcagttcaagggctggccttgggaaggcaatcccgtcgatatattctcaaaaatttgcgcttttcatttgtgctttagcgaaatgaaattggactcaaacgtggagcgctggtcagtgacgctactccgactatcgcaaaacaagcgtcatatggatcgggcagtgctcagcaaattttgggaaactttggacaaatatatagccaagtacaagcccgatttacgatattaa

SEQ ID NO: 29631 - protein, 538 aa, DROSOPHILA
MADPLSLLRQYNINKKEIVERDSQIIFGEFSWPKSVKTNYLKYGSGKKGAPREYYTLECLLYLLKNVMLQHSVYVRQCAAEDIPAVNRPDRKELLAYLNGETPTCASIDKSAPLEIPTQVKRAAEGEPSSVEVAAKKARFEETQVQKVREQLAARWDVNQKETAVNMDNIKSLSETMSVEKIAAIKAKRLANKRTTIKRTDNDEAMGTDLRAILDYDVDSTKDIISRERQWRTRTSILQSTGKIFAKNIFAMLQGIKAREEGRNRPQVPNPIKMPEPARIAKPQPQLSQYNRYDQERFNRQKEETEGFKIDTLGTYHGMSLKSVTEGSLAQRKAQANNLPGAPGVIAGAAAGRPKELLPAAQARQLPANGPSKRTSRTPIIIIPSANTSLITMLNAKDILQELRFMSTSDKKLQGCQRECEVLLQRKRNNQTVSYRVIDNPTKLSQQEWQRVVAVFVMGPQWQFKGWPWEGNPVDIFSKICAFHLCFSEMKLDSNVERWSVTLLRLSQNKRHMDRAVLSKFWETLDKYIAKYKPDLRY

SEQ ID NO: 29632 - DNA, 3332 bp, DROSOPHILA
tacacaagcattttgcactggtgtgctatgtgtctatgtgcagacaccaatatgtgtattctgttctacgcaattgcaaattgcgcctgggatctgatctcttttgttcgccgcgatatttcgcacaagatgctccgctcgcgatgtgttattgttgttgtggggctgctgtattgcagttttaccgttttgcttcacaccgatttcgttagggatttgataagttattgattcgttctattttggggataacacgacaacgtactttactttggtgcggcattggctactttacgataactttataacactagacctcgaaaatgaacaattgaaacgaaaataagttatattatatcgagtgaaaagcttttcctgacctgcagtgcgaccgtttgccgcttgagcgcaaaataccgaatgtcgataactacagaagttggaatttatccgaaaatccacccttggaaaattacattgtcttgtcaattattttctttattattaaaatagtttttcttaatcctctagcttttctggtggtggcccacatggctgcagcattcgctccatcagattaaatcgcactcgtgccttcgattcattttccgctatggcaaagtagttgagaatatcgtagtgacccatgtagctggccaaggagtcgcgatgttgatttgttagccactcgaactttgtggtatccgcgtgtcctgttccgatgtacttgctttgtagatgctccagctggctgtggatattgtagcgttcacccattttgcttaagttgtttcagtattaggcgaggaatagttaatgtgcagtgtgttattttgttgtttgcgtcttggtgtggccagaaattttgtatgttggtatttttattactttagtacatgacactttggtattttagtacacaggcggcaaacttggtatttaaaatcgtaatatttgtttacatttcgctgtcatttataaattattcatttatcaagtactttgataagcaatgtgtggacgcacctgtctgtaggtatataattttttctttcaccatttctattaaacgcctcttcagaactctagaccctgatcaggtaatttgtgcctgtaaatatccaaaaaaatctactcgaaaggagccggatttcaaagagaaagatgatatgaaagatggggaaggatccgaaatggagactcccgagtggagggcggaatacaacctgggtagacgctaccaggcctcctacaacatagcccctactgatattacgcccgtgatcgtgtccgcagctcatttttcagacgccgaggatcaagagtgcgcccgcgtggtaacgcccatgatgtggggcatgattcccttttggcacaagggtgactatcggcggcatggccttaccaccaacaattgccgtctggaacacctgatggactccaagctctatcgcggtcccttcaagcgaggtcagcggtgtgtagttatttgcgaaggattctatgagtggcagacggctggacctgcgaagaagccatcggagcgtgaggcttacctggtattcgtaccccaggcggcggatgtgaagatctacgacaagaatacatggtcgccccaggatgtgaagcttttgcgaatggctggactttttgacgtctgggaggatgaaagtggcgacaagatgtacagctacagtattatcaccttccagtccagcaaaattatgtcctggatgcactaccgcatgccagcgatcctggaaaccgagcagcagatgaatgtgagtaaagcatttgttaatccttcgttaatccaggtccaatttacccatcctcgcatattctaggattggctggactttaagcgagttagcgacaaggaggccttggctacattgcgtccggctaccgaactgcagtggcatcgtgttaccaagctggtaaacaactcgcgaaacaaaagcgaggagtgcaacaagccgatcgaattggcggctaagcccgcaaagccaccgatgaacaaaacgatgatgtcttggctgaatgcccgtaagaagcgggaagatcaaatcaaagcaaaacagagcgacgatgaggatcaggaaaaagaagctacgaccatgggagggacctccgctgacggctcacccgtagagaggcccgccaagcgacccagattcagggactttaagaggaatcgtacggcagctcccccgcagagcagcggcagctagatgaaatcgggcaaaagataaacctcatcagtaactaaagttccatagtttgtagtacattaagtttattttcagtaaaaaccaaaatttttattctcaataaccaaagttttaagcattatcatcgttgtggtgagcttacttacaaatgttgggacttagcgactaaaaagttgtttagaatttgttctctcgaagtgaggttaactaactaatgttatgtttgaacttgacgtaattaattaaatggtctcatttctgcgagtgcgattcaattttgagcgccactgtattgagcttggaagtttttgttgtcgcggcataaaatgcaattaaaacaaaatgaaaagctgcacataaagcatgtaaagtgtacatatcgaccgtatattgtttgctcgtctacgtctgattgccttggcgaaaaatgagcgaaaattaatgggaaatggtgtcaatgttgttcgcgggaaaagcgtggaagtggtacacttgctgagttgcttacaactatcaatttgtggtatattaggctacgaattgtttaattatttatatatttatacgttgtatgaactttaaaatgctcaatgacaaatacaaatgaatactctgcacacagcgtgtccacatatgaacttaatcctatataatcgatgagaaagtttagaattcatgggctatatagcggtgtaaacacattgcctttagttacgaacaatcgtaaggccttaattgtaaatacttttgcacggccaatgagcgggttaagtggaggcggtggcgggcgggctaatggatacgggaggtggaagtgaagaagacgtagcacacaaaaataaagatatctgaatcgtgtacgtgactacccctatgtacttaaaatgctatttacgagattacaatttgcatgcgtttggctgaattatttcaacaatgtaagatggattgcacttgagaagtggttaagagagacacagattaagttgcgggacgggggaagagtgggaatcgaaagaaatggtgtgggtattactcgaacggcgtgctgaacatattgatattcagatcctcaaacgtggtcggcgtgtgatccaa

SEQ ID NO: 29633 - DNA, 1217 bp, DROSOPHILA
ctttgataagcaatgtgtggacgcacctgtctaactctagaccctgatcaggtaatttgtgcctgtaaatatccaaaaaaatctactcgaaaggagccggatttcaaagagaaagatgatatgaaagatggggaaggatccgaaatggagactcccgagtggagggcggaatacaacctgggtagacgctaccaggcctcctacaacatagcccctactgatattacgcccgtgatcgtgtccgcagctcatttttcagacgccgaggatcaagagtgcgcccgcgtggtaacgcccatgatgtggggcatgattcccttttggcacaagggtgactatcggcggcatggccttaccaccaacaattgccgtctggaacacctgatggactccaagctctatcgcggtcccttcaagcgaggtcagcggtgtgtagttatttgcgaaggattctatgagtggcagacggctggacctgcgaagaagccatcggagcgtgaggcttacctggtattcgtaccccaggcggcggatgtgaagatctacgacaagaatacatggtcgccccaggatgtgaagcttttgcgaatggctggactttttgacgtctgggaggatgaaagtggcgacaagatgtacagctacagtattatcaccttccagtccagcaaaattatgtcctggatgcactaccgcatgccagcgatcctggaaaccgagcagcagatgaatgattggctggactttaagcgagttagcgacaaggaggccttggctacattgcgtccggctaccgaactgcagtggcatcgtgttaccaagctggtaaacaactcgcgaaacaaaagcgaggagtgcaacaagccgatcgaattggcggctaagcccgcaaagccaccgatgaacaaaacgatgatgtcttggctgaatgcccgtaagaagcgggaagatcaaatcaaagcaaaacagagcgacgatgaggatcaggaaaaagaagctacgaccatgggagggacctccgctgacggctcacccgtagagaggcccgccaagcgacccagattcagggactttaagaggaatcgtacggcagctcccccgcagagcagcggcagctagatgaaatcgggcaaaagataaacctcatcagtaactaaagttccatagtttgtagtacattaagtttattttcagtaaaaaccaaaatttttattctc

SEQ ID NO: 29634 - protein, 324 aa, DROSOPHILA
METPEWRAEYNLGRRYQASYNIAPTDITPVIVSAAHFSDAEDQECARVVTPMMWGMIPFWHKGDYRRHGLTTNNCRLEHLMDSKLYRGPFKRGQRCVVICEGFYEWQTAGPAKKPSEREAYLVFVPQAADVKIYDKNTWSPQDVKLLRMAGLFDVWEDESGDKMYSYSIITFQSSKIMSWMHYRMPAILETEQQMNDWLDFKRVSDKEALATLRPATELQWHRVTKLVNNSRNKSEECNKPIELAAKPAKPPMNKTMMSWLNARKKREDQIKAKQSDDEDQEKEATTMGGTSADGSPVERPAKRPRFRDFKRNRTAAPPQSSGS

SEQ ID NO: 29635 - DNA, 3558 bp, DROSOPHILA
agatcaatgccgaggaggtaaaccgcaagatccagtgctctatatgctgggacgacttcaagattgacgagacggtacgcaagctgccctgctcgcacctgtatcacgagaactgcatcgtgccttggctaaacctgcacagcacctgccccatatgccgcaagtcactggcagacgatggcaacgatgcggacgacgaatttgtcatgctcgatgccttcggaccagagatggcggccgatggcagtaattccgaaaggagatcggccagcaccgccacaggaacggacaatccctcgccggctaataatcccagtcaggcagcggcggaaggcggccgaacacgtccggatgctaatcccgcccaggcagcacgcaacaacatctttacctttgacgacgacaacatgtttctggactagctggtagggcgatgctaaatcgaagtggagcgatgatcgattgatattcaaaattaagccaaatattggccgcatatatatttataatagtttctcctcacgcttaattttgttgttgttcaaaataacgatttgtaataaacaaaacgggacatacgattccgttggctctgcaaaaatcaactctcgtttatcgtatcgcgtagttgcttatttttctttgtaatggaacttgtattgtacatatatgcgtgtcgtgtatatttacataatcaaaataggaactgactctgtgcttgcctcaagaaattcctttaatgaattatttcaataacatgcagctcgaacgtgtaaaattaaaatactttctaaaataaacatctattgtagtctagacttcaaacttgatattattcttaaactttattgacaacaagtaaacggtgtttttgtttttcaggtggatacacttcaatttttattgtttatttttttactgtctcgtctgatcctggttgtaaacttcgaaaagttctaaaggaagcttattggctcacacggtctggtcatactattccgggaagcatatgttcctcacagggtggcagctccgtcaaattgtttaaattcccatttgactgaaaatctgacttaaccgtttaagaactccgccaaaatgcgtaaagtcaattgaagtgaagaatataacgccgtgaccaacgaaataatatgacacacgaaggaagtaacgattttgtggtgctcaccgacgtggtatgtcttagcaagccaactatgtaatatttgttggggaagacttttgtttatttccgaacttttttgtttattttgcgtaggtgcgcaagcaatatgtgctctatttggagcgccagctgcaggagaatgtctgcgcctgggccaaccaatcccgtaatcgccacaagcccacagcctgggcgtgcattcccgcgagcttggagcaactggagaacaaggcgaagaaggcttccatggcggcacagatctaccaaagagccatggtcaaaacggtacaaggttcccagatacatatattatgccatgttcatataagttgtataccgacagatagctgcggtacgtaggaacactcaggaatgccgtttggccaacattctatttgaacaaatgcagcatgcagctggagaggatgctgtgcccgtaaaaacagaccaccgtctggtggataaggccacacaaacaaccgtcatagaagcccagaatggccacataactcctacggaggactacgatgatgatagctatgagctgcgtagaaaaatcgatatgtttcaggctagtctcgaacggtcggaagttcagaacgaaacgcattgcccacattgccgtagtaagatcatgaccccagagaataagcccctagccaatcaagaatctctctactccgaaaccgaagatgctgtggcccaggagttggccatgttgtttggagaagagcctactgatcttaatcatatattcggcatcgaaccaactgctgttactgacgatccgcagatctcggccatactaaaggaaatagcgaatgcggaactacctgaaaaaattgagcatccacccacatccccaaccgccacaccaccaactgggcatcacagcgaggtggatcttcgccagagtcgctggccttgcgaactctacgcccagaggaggcgtctcaatgcctgtttagttcgcttactggaagcggattggcggtgcgaggaccgcttgagatataagtttcacctgatttttggcgaagacagcgatgatgagttcgcaaaccagttatccagcccgtcaattgatttagtggacgaagttctgctggccagctgcttgcttcgtattcgcccatggattgtacgtcatttgatgtctcccctggaggagggccttatcgccaatcgatttctgttcaagaagctagccaagatgctggcgcactccattgtcatggtcaatccatattgctccgagctggagatcaagcaggctgttgagcacttgttctgccttagacctagaggaatccagagcgcatatgatctggacaatctgccacccttggaggtctcaaaattcgaagtttaaggacaatttaccgattttcagttttaaaatatcaatatagttattaagatgcgagaaactatgaccctcaggataatactagtatttacgaatgattctaagcaatgagacaatgattttcgattgaacctacaacgaatttagtgaaagcaaaatggaatatgttcttcagtttaatactcaaatataaaactctgtaaaagtaagttatatacatacatgaatgcttccatgtccatacgctaaaagttgtgtgtcgaataaagccaaagcacaaagactacgttttgtggtttctttaaattataattaattcaatgattacaataatttttcttgctgcacatcttcctcatctttttataattatataaattttaatatatttaataaacgatacataatatagttttcctttcgacgacattgctgcggcggttgcgtcggcaactgcttaagacgattcggattcctccagagcagcagctatcccccactccggttgttactttaacggctgtgttggttttagttccatctgtttcgctttctgcttcccttgctgttgcggtgtttagtggtggtgacagatttcttgtggctgctgcagctacattgggtgtggttgctgttactgttgttgttgatgcaatttgtggtgatcatcatcatcagaggcactacctagtgtcgggaatttgatttgtgtttcccgccgccgtcgctgcactagcgttctgtttgtatttttgctgagacgctgccggattagccgtggactgctgctgctgttgtggctgctgcgagcccgtggccatctctcctggcggcggacgtccgctgcgcctctcgatgcctctatcagctgttggcttagtgccagctccactagcaccaccaccaggggctgcagttgctccagctccccccaatccgccagtaccgctcgtttgtgttgtgttggcctttttgtttttatagcgatactcgtcgcacacaa

SEQ ID NO: 29636 - DNA, 1417 bp, DROSOPHILA
gggaagcatatgttcctcacagggtggcagctccgtcaaattgtttaaattcccatttgactgaaaatctgacttaaccgtttaagaactccgccaaaatgcgtaaagtcaattgaagtgaagaatataacgccgtgaccaacgaaataatatgacacacgaaggaagtaacgattttgtggtgctcaccgacgtggtgcgcaagcaatatgtgctctatttggagcgccagctgcaggagaatgtctgcgcctgggccaaccaatcccgtaatcgccacaagcccacagcctgggcgtgcattcccgcgagcttggagcaactggagaacaaggcgaagaaggcttccatggcggcacagatctaccaaagagccatggtcaaaacgatagctgcggtacgtaggaacactcaggaatgccgtttggccaacattctatttgaacaaatgcagcatgcagctggagaggatgctgtgcccgtaaaaacagaccaccgtctggtggataaggccacacaaacaaccgtcatagaagcccagaatggccacataactcctacggaggactacgatgatgatagctatgagctgcgtagaaaaatcgatatgtttcaggctagtctcgaacggtcggaagttcagaacgaaacgcattgcccacattgccgtagtaagatcatgaccccagagaataagcccctagccaatcaagaatctctctactccgaaaccgaagatgctgtggcccaggagttggccatgttgtttggagaagagcctactgatcttaatcatatattcggcatcgaaccaactgctgttactgacgatccgcagatctcggccatactaaaggaaatagcgaatgcggaactacctgaaaaaattgagcatccacccacatccccaaccgccacaccaccaactgggcatcacagcgaggtggatcttcgccagagtcgctggccttgcgaactctacgcccagaggaggcgtctcaatgcctgtttagttcgcttactggaagcggattggcggtgcgaggaccgcttgagatataagtttcacctgatttttggcgaagacagcgatgatgagttcgcaaaccagttatccagcccgtcaattgatttagtggacgaagttctgctggccagctgcttgcttcgtattcgcccatggattgtacgtcatttgatgtctcccctggaggagggccttatcgccaatcgatttctgttcaagaagctagccaagatgctggcgcactccattgtcatggtcaatccatattgctccgagctggagatcaagcaggctgttgagcacttgttctgccttagacctagaggaatccagagcgcatatgatctggacaatctgccacccttggaggtctcaaaattcgaagtttaa

SEQ ID NO: 29637 - protein, 421 aa, DROSOPHILA
MTHEGSNDFVVLTDVVRKQYVLYLERQLQENVCAWANQSRNRHKPTAWACIPASLEQLENKAKKASMAAQIYQRAMVKTIAAVRRNTQECRLANILFEQMQHAAGEDAVPVKTDHRLVDKATQTTVIEAQNGHITPTEDYDDDSYELRRKIDMFQASLERSEVQNETHCPHCRSKIMTPENKPLANQESLYSETEDAVAQELAMLFGEEPTDLNHIFGIEPTAVTDDPQISAILKEIANAELPEKIEHPPTSPTATPPTGHHSEVDLRQSRWPCELYAQRRRLNACLVRLLEADWRCEDRLRYKFHLIFGEDSDDEFANQLSSPSIDLVDEVLLASCLLRIRPWIVRHLMSPLEEGLIANRFLFKKLAKMLAHSIVMVNPYCSELEIKQAVEHLFCLRPRGIQSAYDLDNLPPLEVSKFEV

SEQ ID NO: 29638 - DNA, 3378 bp, DROSOPHILA
cgctccgtgatcttgtccttctcgataatgtagacggtggcaccccaaccgctcatggcgtcgcgatcgaatgcgttcacaatggactgggcgatgacctcaaacagctggtccggctcgagatcgggtttccacagggtttcgcacatgccatacaattgctccgcacaggtgccggccacaacgaagtcatcgggtgcgttggggcagccgatcaggtccatgttgcagataaaaggctccatggtcttgggatccaggccagcaacgaccggctcaatgaagtacgggccaaagcggtgctcgtacagaaagctggacatcatggccgagaagggcttgggacacatttcacggttttcgcgtgtctcgtacagattcttgcggaacatcaggcgatcgcgaacagtaaggatgtccgtctgcaggcctgtgagcccgaggaacatccgtgggccgatgtggaacaccttcttgaagtccgtggagatcgtctgagcctgaatgccgaatcggtgatccgtggcaatcgccacgcagtcctttccgcgcatggccactacacatcctccgttgtaggctagaatcgacatggtgtcgttgctattcgcttagctcaatttaatcagcagaaaaatggaaattttgcaaaatgctaaaagccgcctgggaagatgactttttgtttctgctctgcgttgccagactgcgagtgtaagatgggctaatactgactggctgtatagaactggcaacgcctactaaagagatttcaaaaagaatcgcgttttttaagtattttttaagtattagtatttttaaacacaagttaaagttataaaatgtttaaaaatgcaaaaatatctccgcgaatgttaaaacgcatttttcttatcatttggatccttttgaagtaataaaagatccaaatgttaatatgccagtattagctttcagtgtgaccaggccgcgtcaatcagttgggatttattctcctctgcggcaaaggccactttgtaaggggcccttatttatagaaaaattaaattctatcccttaaactcccaattgttccgactgaacccaatgaccgggtaaagctaggcgcgtgtaccttgtcctcctcttgtcacatcaacgtctacagccgcaagcagcctacatcatcggaaggcgacagtcttgcacaatcgtcagtggagccgttgcccaggaaataaagaacctaccgcaggatggcagaggcaatggttgtggaggaccgccccgcggaagccaagcgattcttctgccacatgtgcaacgtggagatcaacattcccaactcagacttcacctgtccgctgtgcgccaacggtttcgtggaggagctgccggcaaatgcgccggagatggattcttcgacggctggagcatccggcagtgccagatccggaagcagcggtagtggctcttctggctcacacgacaccctgagcagaggcagctcatcgagcggatctcaggtgaatgttgagtcgctgcgtaacgatattgtgtcgctgctaaacatgcggaatgtgcccaacttggaaattaccatcgagccaaacagacggcacagcaacgtgctgcatctaggcggctttggtggtccctcgggtagtgactctgcccgcggcctgaccgccggcggacgagtgcgtccggcaaatttggaccgactggacaatgttctctttgattttctgcagagcctgccactggccggcgccacggccgaaatagtaactggacccggtggaggaggtgtaggcggcggcggtaactcgcacatgttcttcatgggaaacccgggagattatgcgtggggccgagagggactagacaccattgtcacccaaatgctcaaccaaatggaaacttcaggaccgccgccattgtcggcgcagcgcataaacgagatacccaatgtgcagatcaatgccgaggaggtaaaccgcaagatccagtgctctatatgctgggacgacttcaagattgacgagacggtacgcaagctgccctgctcgcacctgtatcacgagaactgcatcgtgccttggctaaacctgcacagcacctgccccatatgccgcaagtcactggcagacgatggcaacgatgcggacgacgaatttgtcatgctcgatgccttcggaccagagatggcggccgatggcagtaattccgaaaggagatcggccagcaccgccacaggaacggacaatccctcgccggctaataatcccagtcaggcagcggcggaaggcggccgaacacgtccggatgctaatcccgcccaggcagcacgcaacaacatctttacctttgacgacgacaacatgtttctggactagctggtagggcgatgctaaatcgaagtggagcgatgatcgattgatattcaaaattaagccaaatattggccgcatatatatttataatagtttctcctcacgcttaattttgttgttgttcaaaataacgatttgtaataaacaaaacgggacatacgattccgttggctctgcaaaaatcaactctcgtttatcgtatcgcgtagttgcttatttttctttgtaatggaacttgtattgtacatatatgcgtgtcgtgtatatttacataatcaaaataggaactgactctgtgcttgcctcaagaaattcctttaatgaattatttcaataacatgcagctcgaacgtgtaaaattaaaatactttctaaaataaacatctattgtagtctagacttcaaacttgatattattcttaaactttattgacaacaagtaaacggtgtttttgtttttcaggtggatacacttcaatttttattgtttatttttttactgtctcgtctgatcctggttgtaaacttcgaaaagttctaaaggaagcttattggctcacacggtctggtcatactattccgggaagcatatgttcctcacagggtggcagctccgtcaaattgtttaaattcccatttgactgaaaatctgacttaaccgtttaagaactccgccaaaatgcgtaaagtcaattgaagtgaagaatataacgccgtgaccaacgaaataatatgacacacgaaggaagtaacgattttgtggtgctcaccgacgtggtatgtcttagcaagccaactatgtaatatttgttggggaagacttttgtttatttccgaacttttttgtttattttgcgtaggtgcgcaagcaatatgtgctctatttggagcgccagctgcaggagaatgtctgcgcctgggccaaccaatcccgtaatcgccacaagcccacagcctgggcgtgcattcccgcgagcttggagcaactggagaacaaggcgaa

SEQ ID NO: 29639 - DNA, 1378 bp, DROSOPHILA
cggcaaaggccactttgtaaggggcccttatttatagaaaaattaaattctatcccttaaactcccaattgttccgactgaacccaatgaccgggtaaagctaggcgcgtgtaccttgtcctcctcttgtcacatcaacgtctacagccgcaagcagcctacatcatcggaaggcgacagtcttgcacaatcgtcagtggagccgttgcccaggaaataaagaacctaccgcaggatggcagaggcaatggttgtggaggaccgccccgcggaagccaagcgattcttctgccacatgtgcaacgtggagatcaacattcccaactcagacttcacctgtccgctgtgcgccaacggtttcgtggaggagctgccggcaaatgcgccggagatggattcttcgacggctggagcatccggcagtgccagatccggaagcagcggtagtggctcttctggctcacacgacaccctgagcagaggcagctcatcgagcggatctcaggtgaatgttgagtcgctgcgtaacgatattgtgtcgctgctaaacatgcggaatgtgcccaacttggaaattaccatcgagccaaacagacggcacagcaacgtgctgcatctaggcggctttggtggtccctcgggtagtgactctgcccgcggcctgaccgccggcggacgagtgcgtccggcaaatttggaccgactggacaatgttctctttgattttctgcagagcctgccactggccggcgccacggccgaaatagtaactggacccggtggaggaggtgtaggcggcggcggtaactcgcacatgttcttcatgggaaacccgggagattatgcgtggggccgagagggactagacaccattgtcacccaaatgctcaaccaaatggaaacttcaggaccgccgccattgtcggcgcagcgcataaacgagatacccaatgtgcagatcaatgccgaggaggtaaaccgcaagatccagtgctctatatgctgggacgacttcaagattgacgagacggtacgcaagctgccctgctcgcacctgtatcacgagaactgcatcgtgccttggctaaacctgcacagcacctgccccatatgccgcaagtcactggcagacgatggcaacgatgcggacgacgaatttgtcatgctcgatgccttcggaccagagatggcggccgatggcagtaattccgaaaggagatcggccagcaccgccacaggaacggacaatccctcgccggctaataatcccagtcaggcagcggcggaaggcggccgaacacgtccggatgctaatcccgcccaggcagcacgcaacaacatctttacctttgacgacgacaacatgtttctggactag

SEQ ID NO: 29640 - protein, 380 aa, DROSOPHILA
MAEAMVVEDRPAEAKRFFCHMCNVEINIPNSDFTCPLCANGFVEELPANAPEMDSSTAGASGSARSGSSGSGSSGSHDTLSRGSSSSGSQVNVESLRNDIVSLLNMRNVPNLEITIEPNRRHSNVLHLGGFGGPSGSDSARGLTAGGRVRPANLDRLDNVLFDFLQSLPLAGATAEIVTGPGGGGVGGGGNSHMFFMGNPGDYAWGREGLDTIVTQMLNQMETSGPPPLSAQRINEIPNVQINAEEVNRKIQCSICWDDFKIDETVRKLPCSHLYHENCIVPWLNLHSTCPICRKSLADDGNDADDEFVMLDAFGPEMAADGSNSERRSASTATGTDNPSPANNPSQAAAEGGRTRPDANPAQAARNNIFTFDDDNMFLD

SEQ ID NO: 29641 - DNA, 3232 bp, DROSOPHILA
gggcaaattgaactttaattcgagctgaatttcgcattccaattggagatagtgaagtgtgttttccaaacgagtttcgtttacacaggcacttccttttccactcaatttccgagcttagcatcttttcgaaggtcatgggatgctgacaacgggaaaaatgcctgtgtaacaatttgaatttaacgttttgttcgcgctcatacacgtgatcattgttgtcggcggtgatttatgttttaaacgcatacatagaccgtttgcctactatttcggttttaattattgttcgtcagtttcagcgcacaattaacggaaatgtaaaatttaaataacttataacgattatataagcaatgccacgcagtgggtcagtaatgtatttttaagctttccgattcccgcgcgtttttaatgatcttttaaactaatcactcttacattgcgggtacttgccgacttatatttcggcgcaaacgggcttctgccattttggtaaatccttgtggttagtcaattttatccaatgtatccattcgtgggtcttgagttccaaaggcttactaaaattttcagccaataattctctactaagcagccaaaaaattgatgtggtccctatgagttgttgttttacaaattagcaagcgaatgctaatttattggataagcacaaacgcccatgcaatcgattggtgtggggcgaagttctttgataagctggcagtgcttggtacagatttcactgaattttcatatattattatattaaaatccaacttgcctataaaacgtatttaattaaaatgttgttaattgtttgcggcttaaaaaaccgttaccagtgctgccacgctgcagtttttatatatttaagctgaacgcgtgttgccatatcaagttataaaaacttgtgatatcgatattaaatggaggaaaagaccgtcgctaatgttccgattgttacctcgttttcgtaagtttttggttacaatccgaaattaattgaaatatctgggcttaactgaatgttttgaagcaggaaaactatctataatgactggagttaccccaccaaaacgctctcccctttggatcggcacacacagcggcacttttcactgcgacgagttggtcgcatgttttatgctcaagcaattggatgagtacaaaaacgcagagattttccgcagtcgggacaacaaggctttgaaggagaagtgcgatataattgtcgacgtgggcggcgtttatgatcatgccaagaaattgtacgatcaccaccaaataaccttcaaggagacttttagttccgttcgcccagatgtaagcgaggactacaacgttgtcaggtgaattcgtggtgttagcgtaaatgaacccgtataatccaatgtaatcccctccaggctaagcagtgctggactggtctactgtcactatggcgagcgtgttatacagagcatcctgcagcgcgaaaagggaattaaactctcaccggaaaacctgcaaacggcctttattcagatctataggaattttatcaacgaactggacgcaattgataatggagtgcccatgttcgagggcgttgagcctatatacaaaatctccactcatctatctgcccgcattgccaaactgaatccgtcctggcaggaaactggcgtagacatcgaagaccgattcagacaggcgatggatactgcaggtcgtgagtttgtggacaacgttgtggaggtatcatgttcctggattccagcccgggatcacgtacgagaggctcttaaaaatgccaagaacgtccatcccaccggcgagattcttgtgttgaagaatttctgcccctggaagtctcatctgttcgatcttgaaaaggagtacaaggtggagggtgtgcccaagctggtcgtcttcaacagcggcaatagttggcgagtggccggagttccagtgacgcctggcagctatctgggccgcaaatttctgcccactccttggcgcggactgatggacgatgaactatgcgataaggcgagcatcaaagatctcgaattcatccatcacacaggatttattggcggggcaaaaaccgaggaggctgccatgttgttggccaagaaatccaccgagtggacagaagagcaataatataatacgacttaaagttatgcttttgaaattgaaaaacaataattagatcgcatttaattctggtgttattacgcatttaattctggtgttattacgttatacggaaaagaaatacgcacatgttgtacctaaacaaattttatttgtatgtgtatttcggttaatgtatacaaaatcaccaagggaacctctaacatcatctagtccatgcgggtcttcagtgtgcgctccgtgatcttgtccttctcgataatgtagacggtggcaccccaaccgctcatggcgtcgcgatcgaatgcgttcacaatggactgggcgatgacctcaaacagctggtccggctcgagatcgggtttccacagggtttcgcacatgccatacaattgctccgcacaggtgccggccacaacgaagtcatcgggtgcgttggggcagccgatcaggtccatgttgcagataaaaggctccatggtcttgggatccaggccagcaacgaccggctcaatgaagtacgggccaaagcggtgctcgtacagaaagctggacatcatggccgagaagggcttgggacacatttcacggttttcgcgtgtctcgtacagattcttgcggaacatcaggcgatcgcgaacagtaaggatgtccgtctgcaggcctgtgagcccgaggaacatccgtgggccgatgtggaacaccttcttgaagtccgtggagatcgtctgagcctgaatgccgaatcggtgatccgtggcaatcgccacgcagtcctttccgcgcatggccactacacatcctccgttgtaggctagaatcgacatggtgtcgttgctattcgcttagctcaatttaatcagcagaaaaatggaaattttgcaaaatgctaaaagccgcctgggaagatgactttttgtttctgctctgcgttgccagactgcgagtgtaagatgggctaatactgactggctgtatagaactggcaacgcctactaaagagatttcaaaaagaatcgcgttttttaagtattttttaagtattagtatttttaaacacaagttaaagttataaaatgtttaaaaa

SEQ ID NO: 29642 - DNA, 1175 bp, DROSOPHILA
attaattgaaatatctgggcttaactgaatgttttgaagcaggaaaactatctataatgactggagttaccccaccaaaacgctctcccctttggatcggcacacacagcggcacttttcactgcgacgagttggtcgcatgttttatgctcaagcaattggatgagtacaaaaacgcagagattttccgcagtcgggacaacaaggctttgaaggagaagtgcgatataattgtcgacgtgggcggcgtttatgatcatgccaagaaattgtacgatcaccaccaaataaccttcaaggagacttttagttccgttcgcccagatgtaagcgaggactacaacgttgtcaggctaagcagtgctggactggtctactgtcactatggcgagcgtgttatacagagcatcctgcagcgcgaaaagggaattaaactctcaccggaaaacctgcaaacggcctttattcagatctataggaattttatcaacgaactggacgcaattgataatggagtgcccatgttcgagggcgttgagcctatatacaaaatctccactcatctatctgcccgcattgccaaactgaatccgtcctggcaggaaactggcgtagacatcgaagaccgattcagacaggcgatggatactgcaggtcgtgagtttgtggacaacgttgtggaggtatcatgttcctggattccagcccgggatcacgtacgagaggctcttaaaaatgccaagaacgtccatcccaccggcgagattcttgtgttgaagaatttctgcccctggaagtctcatctgttcgatcttgaaaaggagtacaaggtggagggtgtgcccaagctggtcgtcttcaacagcggcaatagttggcgagtggccggagttccagtgacgcctggcagctatctgggccgcaaatttctgcccactccttggcgcggactgatggacgatgaactatgcgataaggcgagcatcaaagatctcgaattcatccatcacacaggatttattggcggggcaaaaaccgaggaggctgccatgttgttggccaagaaatccaccgagtggacagaagagcaataatataatacgacttaaagttatgcttttgaaattgaaaaacaataattagatcgcatttaattctggtgttattacgcattt

SEQ ID NO: 29643 - protein, 315 aa, DROSOPHILA
MLKQLDEYKNAEIFRSRDNKALKEKCDIIVDVGGVYDHAKKLYDHHQITFKETFSSVRPDVSEDYNVVRLSSAGLVYCHYGERVIQSILQREKGIKLSPENLQTAFIQIYRNFINELDAIDNGVPMFEGVEPIYKISTHLSARIAKLNPSWQETGVDIEDRFRQAMDTAGREFVDNVVEVSCSWIPARDHVREALKNAKNVHPTGEILVLKNFCPWKSHLFDLEKEYKVEGVPKLVVFNSGNSWRVAGVPVTPGSYLGRKFLPTPWRGLMDDELCDKASIKDLEFIHHTGFIGGAKTEEAAMLLAKKSTEWTEEQ

SEQ ID NO: 29644 - DNA, 2597 bp, DROSOPHILA
cgttagtggaatagcagagttaaccctcagcgttcgattttttgtttatttcaaatatctaacatcagttgtttgcaagttaacccactataatcgtttaatagtttagttaaaagtaatggtttaaagagaaaagctagtttttaaaaagaaatacatcagtgatacgaaaaacgtcataaatcattcgttttaacgattacctatatacttatacttagtttcttatagggttaatagttaaatgccagcagcttgtggcaagtggcaagacaagtgaagttctcaaggagtttggccaaggtgaacaattgttccaagagaagtatgtgggtcagagtctgcagtcatggaaacaatcgacaattgacataaacaaactgaactttgcaatcgcagatgcttcttagtggccatgtgtgatgagcttctatgcagaacgattagatttggggttaatatgtgatgataacatatcacctcatcaaaacaatgatcaaaatcagtggtaatgagtattttgtagttcccacgaaaatcgacacaatcagtgtaatcttgtaatttaagcatacaaattgcaatcgaccgcaacaaatagtttttcaatatgaatagcatcactttgagtttggacaccgcgaaagatgaatcttttgtgggctatagtgattgtggccgaactgaaatgtcatacgggccatactgtattccgaactcgatggcccacatatgtacagaaaaaacactataatattccagtaaaggtagggcatactttgtatataaaggtattttcttgaatctggaaaaatctcgttatttaaagccacccgattactgcaatgcagacatttgtccggccaacaagaagcacatcacctgcggcttcaaatttgtgagtatctgcatggatagtcccagctatcatatatatggggttagttaaatactcttccagtggtctacgaaatgcggtagaaatcacgagggcgtcaggatgagcgattatcgctatgatatcgtgaggaatgtgaacaactttcgacggaagttggaatggggcctggggaatctgcccagagcggtcaaatttaagaacatcaagtgggacgatgagctgtcggtgatggcgatgcgggtctctaatcaatgcttgcagcacactttctcaccctgcgtgaatacgttcctctacaaggatgtgggcgagtcctcagatttcgtcaaggtgcagaacacttccaagggcttcaacgtgatcagcttcctgaatatgtggttcgaataccacaagatgatgaagcccagctatgtgaacaactttcccaatatagcccctcaggatcggctcattatcttcgccaatctgatctacgagaagaacaagaaaatgggctgcggaatggtgaagtcggggcaggggcgcttcctgacctgcctcttcgataagaaaatcaagccaaaccagaagctttacaccactcggttgaatgatccatttcgcacaaatcggaaaacaaacgaaacagaatcgatccaatcgaatagtagtagcacagaagcaattgtaaatttgaacacagcgtataaatagtatttgcattgaatccaattcaattactaaaagccagagtcagctgatgtattccacgaaatatttttgctttttttacctgcaaaccgataaaataagccacttgtaagatgtttagtcataatagctatgattccaaataactttgcggtttcaaaagcttggcgttaaaattcgcaaagtgtcgagaaaagtgatcccccctttcgatgggaaaaatgccaattaatagttaaacaaagagtttggcgaggagtggggatgtgggctctccgttcacacgtgagcggtaaaaacctagtacgagttctagcaatcagtgtggttgggattcacttaccggcgcctccattaatccgccaccgagaccagccaagcataaagccgcatacagatgctccgtgcgcgtcgcaaagtgaaacatcagccaggcggccagaatcggcaggttgacaaactgcaaaagccaaaggaagtgggtgggtgagttggtattggaatggattggattggattggatcggcaccagtgggtgaacataattgcataagcaacacaatgtcacgcagctcgattccagatcagtgtgtcagtattccgatcggtgcgatctgtaatcggaggagcacccgatgagccgcagatgattgcggctaagtgggcaaggctgtgcaatttgtgtctttacaggtgtgtgccaaaaaaaattacacccttagctaaggcttaaattgctcaatttggttaacacttaatacggttcattttgttggcatatcacccaatatatttgtctaacctgcatggctcttcgtttgcccagtggctgcgtcaaaagtccagaaaagaggcaacccaggggtacacatatcaggttaatggaactgaaccaggagatctcgtccttgttgagaagtatatcgccactggtctcgctgcgtccctcgccgccctgaatggcgggtatcacgatggtggggaagcccaaggtcatgccata

SEQ ID NO: 29645 - DNA, 597 bp, DROSOPHILA
atgagcgattatcgctatgatatcgtgaggaatgtgaacaactttcgacggaagttggaatggggcctggggaatctgcccagagcggtcaaatttaagaacatcaagtgggacgatgagctgtcggtgatggcgatgcgggtctctaatcaatgcttgcagcacactttctcaccctgcgtgaatacgttcctctacaaggatgtgggcgagtcctcagatttcgtcaaggtgcagaacacttccaagggcttcaacgtgatcagcttcctgaatatgtggttcgaataccacaagatgatgaagcccagctatgtgaacaactttcccaatatagcccctcaggatcggctcattatcttcgccaatctgatctacgagaagaacaagaaaatgggctgcggaatggtgaagtcggggcaggggcgcttcctgacctgcctcttcgataagaaaatcaagccaaaccagaagctttacaccactcggttgaatgatccatttcgcacaaatcggaaaacaaacgaaacagaatcgatccaatcgaatagtagtagcacagaagcaattgtaaatttgaacacagcgtataaatag

SEQ ID NO: 29646 - protein, 198 aa, DROSOPHILA
MSDYRYDIVRNVNNFRRKLEWGLGNLPRAVKFKNIKWDDELSVMAMRVSNQCLQHTFSPCVNTFLYKDVGESSDFVKVQNTSKGFNVISFLNMWFEYHKMMKPSYVNNFPNIAPQDRLIIFANLIYEKNKKMGCGMVKSGQGRFLTCLFDKKIKPNQKLYTTRLNDPFRTNRKTNETESIQSNSSSTEAIVNLNTAYK

SEQ ID NO: 29647 - DNA, 3354 bp, DROSOPHILA
tttgggttcgggtggctgaaacttgtcactgttctgtaatggcactcgggccatgtgttcctccttaatgggcacatgcggtatgtcgaagacggcacacacgcgtctactaccgtcctcgtcgctgttatcctcctcgtcggtatccagatatataaatccgcagaatttctcttcctccggctcaatttcccgtttaataacgatgccattatgttcgcgctggtactcgagctcgccgaactgctcctgtgtctccacacagctgcgcttgaatttaatcagccggtgaaactcggcaatgcaagcgatgcacatgtactgcggtcgtccgtcttccctcgcaacctttgggacataagttaggtacacatagtacgattccactactaccaacctttatgttccaatcattcatttgctcgagaatctccgccatatctgcgacggcggcgtcatccgaaccgaaaatgggcttcacaatcgcctggtccatgtccattcccatggtaaagtaaattccgcaagtccggcagggttcgatggagtcctcattgaagccattcagatccgcactgaactccatggtgcgctagcatatattcaatttttacaggaatccgttccacaaagcgaccattttcctttttgttattctgtgaaattggaggtggagcatcttggacagtgttgcaaaattatacccgtcggtcgatagtgaaggattgtgggtggtagtgatgctggcagtatctaattatctagatactaccgataatagctagatctttagctttaaaaaaaaccttatccaaaacagcattgcagattatttataatgtttctttgtgttacgtaactactcaaaaactcatagcaagaagttcttaaacccaaaaatatcccgatttagcggatcgtctttcctcattgaaagttatcgattcaccgcccggccacttttcgacgatactcaacactgtgtcattgtttttatacgaaaaaacacaatcatccgccgtccgagcaattgttttcctgcctgcccagcaactgtattgaaaatcaccagagcccgggcttccagcatccccggagagtgcaatgaacctcacagagcaaaacccatatggaaacgggctgctctacgcagccttcaatcaagaccaaggtacgtacatatgtgcggatgtgtgttatttacatatacacgatacaccttatcggtataatataactggccttttgcgttgcaggatgcttcgcgtgcgcgacggacaccggattccgggtctacaactgtgatccgctgaaggagaaggagcgccaatactttccagagggtatgattgtcaaaaaaagagtgcgggagactcccacggcctaaaacaaattccattgtctacaattccgattcaggtggtctcagccatgtggagatgctgtttcgttgcaattacttagccctggttggaggcggcatccggccgctgtacccgcccaacaaggtgatcgtgtgggatgacctgaagaagtccccggccatatcgctggacttcaatcagcccgtgcgggcggtacgactgcgtcgggatcgcatcgtggtcgtgttggagggcgtgattaaggtgttcaccttcactcagcaaccacagcagctgcacgtctttgagaccagctcaaatcccaacgggctgtgtgtgctgtgcccgcacagcaataagagcctcctcgcattccccggccgtcgaactggccacgttcaaattgttgatctggccaacacagagcgggcgccgcttgaggtgatcgcccacgaggctggtatcagctgtattgcccttaatctgcaaggcacgcgactagccaccgccggggaaaagggcaccctcatccgtatcttcgatacggaaagtggcaagaaggtatcagagctgaggcgcggaagcaaccacgccaacatattctgcatcaactttaaccaccagtccacaatggtggtcgtcgcctccgatcatggcaccatacacgtcttcaacctggaggacaacaagccccgtgaatcctcgctgcccataatacccaagtatttctcgagccagtggagttttgtcaagttttcaataccccagggacctcgatgtgtatgtgcctttggcgccgatcctaattcggttgtgggtaagttggaaatggagtggatccttccctgagatttctttaatcgacatttgttctcttatacagccatttgtgcagacggccactattataaattcctatttaacaataaaggcgagtgcagtcgagacatctgcacacaattccttgagctgcaagacgatgagacctagaaacaaatccgattgttgcgaacgcctttgatgcatctatacaattatatatctccatggaaatgtgttatacaatattacttataagcatgctttaaaatacgttaaaagtcgagttcacataaatgtagttataccttgagacatgattgtggatattttatattttatttgaaacataaaccgataatccaacatgctcatttaattttactttagccttcattttatgcattgttacgccaattgtaactttaaaagctgaaaaaggtttttgttttatttccccactgagaaattaagatttacttattaattttaaatgaacttgagcttatcgtttttgttggcactacatttttttataattttaagggacattactcattttcattaccattgccgtcggtaatagtgcatagttttttctgataagtaaacctttgcaagaaatgctattattgttatccacgaacgtttaaaggtttttagatagaggttggtagtgaatcattacaaagactacttgaacctaaaaataaaatagacgaaacccatttcgaattaaacatgttacataaaaaccacgtcatatacataaaactaaattgttaagtttatttctcagaaatatcactggaatgttaagcacttttaaagaatgtttaggtgatgacacagtccactcgcagcccctcacaaatgtgtggtgttactctcctcgaaggcaggattggacaacccaactcctgctgttcttccgttctgtgaacgcggcgtaaaatcgctctgttgcaaatggatgatctttgtctgctgcgtcgatgtgatgggcacttggaagttaccttgcatattaatagtattcccggggaattgtgcctcatccttgatgggtaacttgttgctgggctgcttgcgaagcagattcacatcggatttcttggagaaatgagcttcgatttcctaaaatatatagttaagtaacttaagtaaaaaa

SEQ ID NO: 29648 - DNA, 1127 bp, DROSOPHILA
aaaaaacacaatcatccgccgtccgagcaattgttttcctgcctgcccagcaactgtattgaaaatcaccagagcccgggcttccagcatccccggagagtgcaatgaacctcacagagcaaaacccatatggaaacgggctgctctacgcagccttcaatcaagaccaaggatgcttcgcgtgcgcgacggacaccggattccgggtctacaactgtgatccgctgaaggagaaggagcgccaatactttccagagggtggtctcagccatgtggagatgctgtttcgttgcaattacttagccctggttggaggcggcatccggccgctgtacccgcccaacaaggtgatcgtgtgggatgacctgaagaagtccccggccatatcgctggacttcaatcagcccgtgcgggcggtacgactgcgtcgggatcgcatcgtggtcgtgttggagggcgtgattaaggtgttcaccttcactcagcaaccacagcagctgcacgtctttgagaccagctcaaatcccaacgggctgtgtgtgctgtgcccgcacagcaataagagcctcctcgcattccccggccgtcgaactggccacgttcaaattgttgatctggccaacacagagcgggcgccgcttgaggtgatcgcccacgaggctggtatcagctgtattgcccttaatctgcaaggcacgcgactagccaccgccggggaaaagggcaccctcatccgtatcttcgatacggaaagtggcaagaaggtatcagagctgaggcgcggaagcaaccacgccaacatattctgcatcaactttaaccaccagtccacaatggtggtcgtcgcctccgatcatggcaccatacacgtcttcaacctggaggacaacaagccccgtgaatcctcgctgcccataatacccaagtatttctcgagccagtggagttttgtcaagttttcaataccccagggacctcgatgtgtatgtgcctttggcgccgatcctaattcggttgtggccatttgtgcagacggccactattataaattcctatttaacaataaaggcgagtgcagtcgagacatctgcacacaattccttgagctgcaagacgatgagacctag

SEQ ID NO: 29649 - protein, 340 aa, DROSOPHILA
MNLTEQNPYGNGLLYAAFNQDQGCFACATDTGFRVYNCDPLKEKERQYFPEGGLSHVEMLFRCNYLALVGGGIRPLYPPNKVIVWDDLKKSPAISLDFNQPVRAVRLRRDRIVVVLEGVIKVFTFTQQPQQLHVFETSSNPNGLCVLCPHSNKSLLAFPGRRTGHVQIVDLANTERAPLEVIAHEAGISCIALNLQGTRLATAGEKGTLIRIFDTESGKKVSELRRGSNHANIFCINFNHQSTMVVVASDHGTIHVFNLEDNKPRESSLPIIPKYFSSQWSFVKFSIPQGPRCVCAFGADPNSVVAICADGHYYKFLFNNKGECSRDICTQFLELQDDET

SEQ ID NO: 29650 - DNA, 7718 bp, DROSOPHILA
cgccacagtcccagagattaagcaccaggttgcccagaaaccgcacatgggagtgctccacatcgactaagggtgcatggtgaaatcagttcctgccctttccgactatatagcattactcacttgttgctccgaggcgtgtcgtatcacgggcgatatagttagcaaagataatggagcgcatgctggtctttccggatccgctcttccccatcagtaacacctggtaatacgaatatattttacttccagcgcttaagcggtacaaacaaaaaccacacctttttcttcattgtgccgctggttttttagatctccaggaaaataatcaacaataaaaacaaataataggctgggttagtgatgatacactttcgatgacaccatcaaaagtaacgcgaagttagataaattgttatcgaattagttcgtaccgtctgataaaatataaataagaaattaatgttttttttttaaacatagcacctcatctttgcggttttttaaatatttgtgcataaattaaacataaactgcaattgagcttaatggtaaagggtctaggtttatacttaataaacataaaaacggctaactacttacaggatttagaaaacaatgtaaaaatatttgagttgttaataagttaagttatttttagttttatactacttgtattcattttatttacggtttatttttcaaatgaatgccgataagctgcagtcaccaagaacgcgaacaactcaaggccgctttattgtttcatctctagcgaaagactttattttgtcactttcttgacgtttaactgtaccgttcaaatgaaacataattattcaacgaacctaaccccgaaaactctacgcaaatgcgagaaataacccccaaaatgaagacgagcgcttttttcaaaccgcaaatttggaacaaccaccgccgccatagtgtgccatctctagcgtgcacgcgtttcgcgatgaatggtgagaaatcgcagagaaaacatgcttaacaataaaaaaagaagaaaaccagcagctaacgctggctgattgatataacgaggaaggacagcggcgtaagagacaaaaattataaattagtgtagagaaaaaatcgctcttcgcgaagaaaaatctggtgacaaatcgttggcgatccgatgagcaacataaacgtaaacacagtgcccaggtcgagtccaaatgccaatgggaatccaaatgcgaatccaaatcgcagtgtggcctccgaggaggaggagggcgatggccggatgagcgacagcgggagcaactcggccagcagccagctgagtcgcacgtcgagcagcagctcctcggactcggcgagtggttcactggaggatgacccggatggcgaggacgaggatatgtccgcccaggacgcgggcagcgcctcggaaacggaagacgacacctccacctgccagtcggatgaactggagctggcgcagctcactggtcgggatatctttcggttgccgcgcggcttgtgcgaaaatgcagctatttttcatgaattcttctctcttgagacctggcaacagctgccccatcacctccaggcccgactacagccgatgcttccggacttctcccgtttggtatccggacaggcacaggcctgtgcggaacagcaacgtacactggtgcagctatttaatggcggtctacagcgtttcgggcaatcaccactgcttcagctacaacgccaacttgaggaaggaaacctgcgtcccgatgtccttcagttgcggaggagcatacagcattcgggcagaagggaatttcgtttccagcaggctgagcgcctaagtctgctagccaaggagctctttatgtcaagggaacagctactccagcatgcctacacctctgctccaccttctgatggtgcttttggtaaaaatctgccaaggccacgttcccgtaagagaaagccgcccacactgtcgatagagaacaaattttgttcgcagcgtgccaagaaacgctatgcccaagagcttctggaactaataggctcgctagaggcgaaacccggcgacatcagtgcggaggaggaggaagaggacgaggaatgccgacagcttatggaccgtttggccaaaggcccacaggaattcgaattggaggagaccaaggctccggagccggcaggtcctggcaggccctcgaatgcggcagataagaaatgcatttacaacaccttcttcaagcggcgacctggtgtagacgatgaccttgtgctgcgttccatgcaggcggaaaaaattcccaagcttaacgacaagaatttccggaagtatctaagagactacaagcgccggaaattagaacaaccggtaagtcattggtctgttgtgttaatacagttgcgatctatgtccacaatatgctaattggcaccaggtattgttgattgcttaaattcacgtttgttttattaattataacgtagaacatttatgtatttaaatttgccgacaatttgccacaagagtttctaattgagaaacaattaaaattccaggaaagtcccgagttcgatacatcggaggtacggctgcgcgacatatgcactcgagcacagtttgtcggaagctttaagccaggtcggaaaccgaaagcgctcatggcacgcctcaatcccgatccaccggctctggtgccgattggagtaacgcccacgaaaaacgagtttgtagatgaggagcccatgctactggatgaaccgcaacaactatacggccgccgagcaccggaagaccatccggaagaggacctgccgcacaaggaacccccgcctatgccaaagaaagtaatgcccgctccagttgttcttccacaacccgtgcccaagctggaacctttgaatggacccataacaaatcccaaggcgagtcccacgacaccaaatcactcgaacaatcccattactgtttctgcaactgctggacatatcactggcagtcccacacgggaagtgcagattcgtccgccagcctcaccacgacccgcctgctttttctctctgctgagggatctatttgtatccacaccgcagcacaggctaacatacggtgaactgcaaattttgttgtccagctggagggaaatcaactcagatgcctcaatacctatcggggaatggccacgattccggccggattggtctaagctgttgcaatcggcaatcaactttttatcgggcgatttttcttccgttcctgccgattatgttccctatatagaacacaaaactcaattgggaatctatcagtggataggagccggtcgggactcggatgctagactcctcagcctgtgtcagttttggttgcgaacgcaaagggagaaacagtctcaactcagcccggttttgatttcgggtgttcatctaaactcattggtcgatgcttcaccaacaccacctccaagatgtcccaccacctggactgtgcggtcggcaacgcaggcggagatacttgaattccagagccaagagagaatacgctttgagtatccgcatcggccgtttacctatcgtctcaatgggtatgagagtgttgtaggtccagtcaaaggaatctatacacaaggtctgccactgaacaaagcaaggggtcacgcagttatggttgatgaccgacctccatttgtaactatcctgactctagttcgagatgctaccgcacggcttcccaatggagagggaacacgctctgagatctccgaactgcttaagtgctcccagtacatcagtcaacaagctgcggataatgtgttacagaccatcgtcagtggagccttggatcgaatgcacggtggtccggatccctgcgtgaagtatgatgccaggcgaaagatctggatttatttgcatcgaaatcgcagcgaggcggaattcgagaaaatgcatcgacataaccagtccttggtaaaacagaaacagcagcaaaggaagcagctgaacaggcctaagataccagatgacagatctggtttagctgcggatcaccagcaggagcaagtacccgccttggttccagcagttgcctcaccggttccagtttcagtgcaacaaccagtagttgcttctctgcagatgaagaaaccactcgcggttaagtgtccgccagtgccgcccttaaaatatcatgtaccaccaggtacgccaattggaggaacgattatatcagcctcatcgaatataaatgcaaatcaaatccccatgcagcagatacagaaatctctgttaaagcctgtggtagtgcccaattccgctccatcccccgtacaacggcaattggcaactggtaaatctggcacctttgcgatctccaagatcagtcccacgagaaataccacgcccatattggtttccactcccagtggcttgcaaacagtgcatgttgcaaccactccaaatcaagcaggaggatccgcttcccccacggttgccaaaaagctgaccatcaagaagcccgttcctaataacaaaataggaaactttataatacccctggatcaacagcaaagcgggccgcagcaacagcagccgacgcaacagggacagcatgtgaaggtgcaaccgattgctggaaaacccaaggcactcactatcaccccgcgtccccaaatgccgaagaacattattcgtctgttgcccgctggaggagccaccgtaaccgggaactcagtgataggtggcaccaagccaaactctgttcagatccttggtccccgcgtagttccgcaaatccagacagtgcgtccggctcagcagaagatcggagctgtttccattgtggccaacaaaccagttacaagtgtggccgctacagaaactgcaagtcctgtgacaatgagcactatcagttctcctgtccctgggggcggaacgatagtaaaaatgtcgcctcaagcatttgccaatcttcagcagcagcagcaacagctgaaacagaaggttaacaatgccagtcctgccctgaactcaccgcagcaaaggatcattgtgggtgagtacggctgtttgtgtatttaagtaattgtactacaggttgtaatctataatcccatttgtttttataggcaatacggcaatttcctcgaacaagaaaatcgtattccagtcgctgggaaaagcagcacccaaaatactcaccacatcgccaagtggctcggtaaccaaagcaacgacaaatttgtcaccacagcagcagagaattgtgctgcagaactttaagcaaccggtaatagctaccaatcaatccgggaccctaacggcagtgggaggaaatgcaacgcgcgttattcgagctactccagccacatctgtaggaactggaggaatagtgggagcgggaaacccccaaacagctgggcaaatcattaccctggatagtttgctacaaaagcaacctgctggagggaaactgctcacaaccgctggcaacaacatcttccagttggccacttcctcggcgggaaatgtgattacacttagtcccaaccagacgaccaagcagttacccacgatgacacgaattgtgagtgccaccagtactactccggcaactggaaacgcgtcgactgtggtgcccaaaattattggaaaaactactgtgcttccgggaaaaccactactactccacgccaaaacattaaaacagattggcggtagtagtgtgcccacaacccagactaccacaacgacgacaacagcagttgcatcagcggcagtgggaagcggcagtggagcaggtggaactgtagttgcgggaacgggagcgactaatgctgccgggcgaacaactcagaatattgtgattggaggtcagacagtgaagcttcagggagcggtaagttatttggggagattttaggcgaatagtattatttataaattcaatgttaaattttcagatttccgctcgaggtgccggcgcacccgttcagactgtcattatgggcaaccaactgttgcgattagccagtagcaccagtaatagtggaactacttccaccagcggcataacgacggcacccaaaacgctgctaataggaccgcgcttggccaagaacgtactggtggccaacaagcaaatcactagtacagcaaacagcagcgttgtaaacagctccacgacagcatctccagctgcgacagcgacggcaacgcctagcaacaatctcgttttcgccgtgcaaggcaacggcggacagctcttcttctcaccgggactgcagggcatgaacctaaagccactgtccagcttaaaagtgatacccatggctgcagcatcggcaagtggggcagcggtaggaggaaaaatctctgtgaccacggcagccggcgaaacaggagcaaaaacgctgactacaaaactaataccggctacggttctcaagacggccacagggagtggcaactaggaggctcaggagcggagaggcttggtaaccacgttgaatatccttaccggttacactttcttcgattttgtttaaacaacacttgtaatttatctatgtaagcagaaagatcgcaaatattgctttgtactaagtaaatataatggacaacgataagatgtcccatccagcaaccaattttatggaacagtttataaaaaataatatatatatatatatatacagacccaataaaactcagatgaaaccagaagggccatgtttatttgcaatacaaaaaccaatgtgctttgcatttttccaactctgtatggataaaaggcaaatgcaaaatggtttctattttattaaacattaaaattcgaatgtaagtacttcgccaaccaattatataaaaataagaaaatttaaataacaaatttcaacgtttgcatttggcaggccagtggaaaatgataagatgcacaatactcttacatttttagaaaaatgaaattaatatggaataatggctatacgctagaaacgatactaacccttatgctgcttaagatgtctgttaagcttaatttttaagtcaaaggatctgccgcaaatgtagcacgagatgtacgctttttctggcacctgttggacaggagagctgtcattagaggtcgctgaagtcctgctctcctgctgggcagtgctatctaattgagaagaagactctaggacgactctttctttggactcgatggtttgcttcttggttatctttgcaatgggcgacgtaggtatttcctgcgtggtctttctcactaatgactggttgtctgaagagcgacgcctctttcttgtctgtgtgtgagtggccagcacatgagcctgcagctgctgggccttctcgaatgtgtcgctgcaatatgagcacttagtgacactttcagttggctcggttgacggtgaagctacatctgctacatcaggaacttctccgtttgcaggtgggcccattggacattgaatgtccgcatgattggaagtctctattgaaggaacactggagttttcggttacattagaatcttcaggaacagtggattccccaggaatatttgagccctcagaagccgtggtgacttcggcgacactgctttccagtgaagataaatgttgagattgaaggttaactggaagctgctccaattttttcagttgctgggcaagttcggcttcaccctctgggcattaagtgtaaagttataaaca

SEQ ID NO: 29651 - DNA, 5393 bp, DROSOPHILA
agaaaacatgcttaacaataaaaaaagaagaaaaccagcagctaacgctggctgattgatataacgaggaaggacagcggcgtaagagacaaaaattataaattagtgtagagaaaaaatcgctcttcgcgaagaaaaatctggtgacaaatcgttggcgatccgatgagcaacataaacgtaaacacagtgcccaggtcgagtccaaatgccaatgggaatccaaatgcgaatccaaatcgcagtgtggcctccgaggaggaggagggcgatggccggatgagcgacagcgggagcaactcggccagcagccagctgagtcgcacgtcgagcagcagctcctcggactcggcgagtggttcactggaggatgacccggatggcgaggacgaggatatgtccgcccaggacgcgggcagcgcctcggaaacggaagacgacacctccacctgccagtcggatgaactggagctggcgcagctcactggtcgggatatctttcggttgccgcgcggcttgtgcgaaaatgcagctatttttcatgaattcttctctcttgagacctggcaacagctgccccatcacctccaggcccgactacagccgatgcttccggacttctcccgtttggtatccggacaggcacaggcctgtgcggaacagcaacgtacactggtgcagctatttaatggcggtctacagcgtttcgggcaatcaccactgcttcagctacaacgccaacttgaggaaggaaacctgcgtcccgatgtccttcagttgcggaggagcatacagcattcgggcagaagggaatttcgtttccagcaggctgagcgcctaagtctgctagccaaggagctctttatgtcaagggaacagctactccagcatgcctacacctctgctccaccttctgatggtgcttttggtaaaaatctgccaaggccacgttcccgtaagagaaagccgcccacactgtcgatagagaacaaattttgttcgcagcgtgccaagaaacgctatgcccaagagcttctggaactaataggctcgctagaggcgaaacccggcgacatcagtgcggaggaggaggaagaggacgaggaatgccgacagcttatggaccgtttggccaaaggcccacaggaattcgaattggaggagaccaaggctccggagccggcaggtcctggcaggccctcgaatgcggcagataagaaatgcatttacaacaccttcttcaagcggcgacctggtgtagacgatgaccttgtgctgcgttccatgcaggcggaaaaaattcccaagcttaacgacaagaatttccggaagtatctaagagactacaagcgccggaaattagaacaaccggaaagtcccgagttcgatacatcggaggtacggctgcgcgacatatgcactcgagcacagtttgtcggaagctttaagccaggtcggaaaccgaaagcgctcatggcacgcctcaatcccgatccaccggctctggtgccgattggagtaacgcccacgaaaaacgagtttgtagatgaggagcccatgctactggatgaaccgcaacaactatacggccgccgagcaccggaagaccatccggaagaggacctgccgcacaaggaacccccgcctatgccaaagaaagtaatgcccgctccagttgttcttccacaacccgtgcccaagctggaacctttgaatggacccataacaaatcccaaggcgagtcccacgacaccaaatcactcgaacaatcccattactgtttctgcaactgctggacatatcactggcagtcccacacgggaagtgcagattcgtccgccagcctcaccacgacccgcctgctttttctctctgctgagggatctatttgtatccacaccgcagcacaggctaacatacggtgaactgcaaattttgttgtccagctggagggaaatcaactcagatgcctcaatacctatcggggaatggccacgattccggccggattggtctaagctgttgcaatcggcaatcaactttttatcgggcgatttttcttccgttcctgccgattatgttccctatatagaacacaaaactcaattgggaatctatcagtggataggagccggtcgggactcggatgctagactcctcagcctgtgtcagttttggttgcgaacgcaaagggagaaacagtctcaactcagcccggttttgatttcgggtgttcatctaaactcattggtcgatgcttcaccaacaccacctccaagatgtcccaccacctggactgtgcggtcggcaacgcaggcggagatacttgaattccagagccaagagagaatacgctttgagtatccgcatcggccgtttacctatcgtctcaatgggtatgagagtgttgtaggtccagtcaaaggaatctatacacaaggtctgccactgaacaaagcaaggggtcacgcagttatggttgatgaccgacctccatttgtaactatcctgactctagttcgagatgctaccgcacggcttcccaatggagagggaacacgctctgagatctccgaactgcttaagtgctcccagtacatcagtcaacaagctgcggataatgtgttacagaccatcgtcagtggagccttggatcgaatgcacggtggtccggatccctgcgtgaagtatgatgccaggcgaaagatctggatttatttgcatcgaaatcgcagcgaggcggaattcgagaaaatgcatcgacataaccagtccttggtaaaacagaaacagcagcaaaggaagcagctgaacaggcctaagataccagatgacagatctggtttagctgcggatcaccagcaggagcaagtacccgccttggttccagcagttgcctcaccggttccagtttcagtgcaacaaccagtagttgcttctctgcagatgaagaaaccactcgcggttaagtgtccgccagtgccgcccttaaaatatcatgtaccaccaggtacgccaattggaggaacgattatatcagcctcatcgaatataaatgcaaatcaaatccccatgcagcagatacagaaatctctgttaaagcctgtggtagtgcccaattccgctccatcccccgtacaacggcaattggcaactggtaaatctggcacctttgcgatctccaagatcagtcccacgagaaataccacgcccatattggtttccactcccagtggcttgcaaacagtgcatgttgcaaccactccaaatcaagcaggaggatccgcttcccccacggttgccaaaaagctgaccatcaagaagcccgttcctaataacaaaataggaaactttataatacccctggatcaacagcaaagcgggccgcagcaacagcagccgacgcaacagggacagcatgtgaaggtgcaaccgattgctggaaaacccaaggcactcactatcaccccgcgtccccaaatgccgaagaacattattcgtctgttgcccgctggaggagccaccgtaaccgggaactcagtgataggtggcaccaagccaaactctgttcagatccttggtccccgcgtagttccgcaaatccagacagtgcgtccggctcagcagaagatcggagctgtttccattgtggccaacaaaccagttacaagtgtggccgctacagaaactgcaagtcctgtgacaatgagcactatcagttctcctgtccctgggggcggaacgatagtaaaaatgtcgcctcaagcatttgccaatcttcagcagcagcagcaacagctgaaacagaaggttaacaatgccagtcctgccctgaactcaccgcagcaaaggatcattgtgggcaatacggcaatttcctcgaacaagaaaatcgtattccagtcgctgggaaaagcagcacccaaaatactcaccacatcgccaagtggctcggtaaccaaagcaacgacaaatttgtcaccacagcagcagagaattgtgctgcagaactttaagcaaccggtaatagctaccaatcaatccgggaccctaacggcagtgggaggaaatgcaacgcgcgttattcgagctactccagccacatctgtaggaactggaggaatagtgggagcgggaaacccccaaacagctgggcaaatcattaccctggatagtttgctacaaaagcaacctgctggagggaaactgctcacaaccgctggcaacaacatcttccagttggccacttcctcggcgggaaatgtgattacacttagtcccaaccagacgaccaagcagttacccacgatgacacgaattgtgagtgccaccagtactactccggcaactggaaacgcgtcgactgtggtgcccaaaattattggaaaaactactgtgcttccgggaaaaccactactactccacgccaaaacattaaaacagattggcggtagtagtgtgcccacaacccagactaccacaacgacgacaacagcagttgcatcagcggcagtgggaagcggcagtggagcaggtggaactgtagttgcgggaacgggagcgactaatgctgccgggcgaacaactcagaatattgtgattggaggtcagacagtgaagcttcagggagcgatttccgctcgaggtgccggcgcacccgttcagactgtcattatgggcaaccaactgttgcgattagccagtagcaccagtaatagtggaactacttccaccagcggcataacgacggcacccaaaacgctgctaataggaccgcgcttggccaagaacgtactggtggccaacaagcaaatcactagtacagcaaacagcagcgttgtaaacagctccacgacagcatctccagctgcgacagcgacggcaacgcctagcaacaatctcgttttcgccgtgcaaggcaacggcggacagctcttcttctcaccgggactgcagggcatgaacctaaagccactgtccagcttaaaagtgatacccatggctgcagcatcggcaagtggggcagcggtaggaggaaaaatctctgtgaccacggcagccggcgaaacaggagcaaaaacgctgactacaaaactaataccggctacggttctcaagacggccacagggagtggcaactaggaggctcaggagcggagaggcttggtaaccacgttgaatatccttaccggttacactttcttcgattttgtttaaacaacacttgtaatttatctatgtaagcagaaagatcgcaaatattgctttgtactaagtaaatataatggacaacgataagatgtcccatccagcaaccaattttatggaacagtttataaaaaataatatatatatatatatatacagacccaataaaactcagatgaaaccag

SEQ ID NO: 29652 - protein, 1658 aa, DROSOPHILA
MSNINVNTVPRSSPNANGNPNANPNRSVASEEEEGDGRMSDSGSNSASSQLSRTSSSSSSDSASGSLEDDPDGEDEDMSAQDAGSASETEDDTSTCQSDELELAQLTGRDIFRLPRGLCENAAIFHEFFSLETWQQLPHHLQARLQPMLPDFSRLVSGQAQACAEQQRTLVQLFNGGLQRFGQSPLLQLQRQLEEGNLRPDVLQLRRSIQHSGRREFRFQQAERLSLLAKELFMSREQLLQHAYTSAPPSDGAFGKNLPRPRSRKRKPPTLSIENKFCSQRAKKRYAQELLELIGSLEAKPGDISAEEEEEDEECRQLMDRLAKGPQEFELEETKAPEPAGPGRPSNAADKKCIYNTFFKRRPGVDDDLVLRSMQAEKIPKLNDKNFRKYLRDYKRRKLEQPESPEFDTSEVRLRDICTRAQFVGSFKPGRKPKALMARLNPDPPALVPIGVTPTKNEFVDEEPMLLDEPQQLYGRRAPEDHPEEDLPHKEPPPMPKKVMPAPVVLPQPVPKLEPLNGPITNPKASPTTPNHSNNPITVSATAGHITGSPTREVQIRPPASPRPACFFSLLRDLFVSTPQHRLTYGELQILLSSWREINSDASIPIGEWPRFRPDWSKLLQSAINFLSGDFSSVPADYVPYIEHKTQLGIYQWIGAGRDSDARLLSLCQFWLRTQREKQSQLSPVLISGVHLNSLVDASPTPPPRCPTTWTVRSATQAEILEFQSQERIRFEYPHRPFTYRLNGYESVVGPVKGIYTQGLPLNKARGHAVMVDDRPPFVTILTLVRDATARLPNGEGTRSEISELLKCSQYISQQAADNVLQTIVSGALDRMHGGPDPCVKYDARRKIWIYLHRNRSEAEFEKMHRHNQSLVKQKQQQRKQLNRPKIPDDRSGLAADHQQEQVPALVPAVASPVPVSVQQPVVASLQMKKPLAVKCPPVPPLKYHVPPGTPIGGTIISASSNINANQIPMQQIQKSLLKPVVVPNSAPSPVQRQLATGKSGTFAISKISPTRNTTPILVSTPSGLQTVHVATTPNQAGGSASPTVAKKLTIKKPVPNNKIGNFIIPLDQQQSGPQQQQPTQQGQHVKVQPIAGKPKALTITPRPQMPKNIIRLLPAGGATVTGNSVIGGTKPNSVQILGPRVVPQIQTVRPAQQKIGAVSIVANKPVTSVAATETASPVTMSTISSPVPGGGTIVKMSPQAFANLQQQQQQLKQKVNNASPALNSPQQRIIVGNTAISSNKKIVFQSLGKAAPKILTTSPSGSVTKATTNLSPQQQRIVLQNFKQPVIATNQSGTLTAVGGNATRVIRATPATSVGTGGIVGAGNPQTAGQIITLDSLLQKQPAGGKLLTTAGNNIFQLATSSAGNVITLSPNQTTKQLPTMTRIVSATSTTPATGNASTVVPKIIGKTTVLPGKPLLLHAKTLKQIGGSSVPTTQTTTTTTTAVASAAVGSGSGAGGTVVAGTGATNAAGRTTQNIVIGGQTVKLQGAISARGAGAPVQTVIMGNQLLRLASSTSNSGTTSTSGITTAPKTLLIGPRLAKNVLVANKQITSTANSSVVNSSTTASPAATATATPSNNLVFAVQGNGGQLFFSPGLQGMNLKPLSSLKVIPMAAASASGAAVGGKISVTTAAGETGAKTLTTKLIPATVLKTATGSGN

SEQ ID NO: 29653 - DNA, 3911 bp, DROSOPHILA
caaaataaacttcgtggtatttttgattaatataatttaatttgaagaacaaatgaattcatggaatgagatgtagaattcaataattacgcagtaagtagcgccaccattggccaaaattggaacttgtgcgcaccatgtagaaacaatgtagataatatttattggcggactttttaaaatgggaaagtcagaaacaaatggtaacctttcacaattttaataatattttgcagtggttgcaccaaaagaaaggacaaacaattttttttcccgcttctttaaaattgagtagctatgtacagaaataaaacaaattaaactgatcttgacttccagagatcaggaagtcatcagaaagttccatcgaaatattgattaggaaaggctacagcaaaataaatacaaaacgtggaagccataatatcaacatcatcagctcttcgagtcgtttcccactctgctccactgataagccgtctggcgaataagttgactttagtcgttgctcgacgattgtctggaacttgccagagatgttagcacacagagaaattccattaagccatcgatttgcgctacccacaacaatatttactgggtgaacattttgggaggggagtgcctttaattgtgggtgggcaatattatattatttctcttgtttctgcgatgacagcaaacgagtctctttatagacataaattgaatatgagaacattctatctatgtacatacataggtatcataagtgttaaagttcttgcctttcttgtatttataaatggaaataattagcacctttaaactatccccaatactgctctcttacattttcccttaatgtctcctcaagagagtggggagcacgctcccccagagagacgacaacagctgctcgctaaatacatcgcgtgttttggaagcaacaattccgcttcaaatgctccaccgccgtcaacagagctccaacgtattttttgttaggcgcgagtgcgtcattattatacacaaatcaaggaaaatcaattgtggtgccaaagtgcgtgcaattaaagtgtcaaattaagtttaagaagccccagacaagcacgaaatggagcgtattttgaggggaatcatgcggtacagaaatacgacaagggagcaaatggtcaaggagttccagaaagtccgcgacaatccagaagtgagcaatacttgagtttataggtcaagatttcggaatagaactatttcacacttacaaaaaaaaaataacttggagcatgcgtttgccttgtggggaacgaattgcccgtgttttatatcattatcacattttttcgacttgtctgtcgcaaacttggcgctctcccccatttcgctctttatctcggctctcttttgagttctatttggtaaacaaacaacaaaggcaaaccggttgaccaccaaattatttcaatttacccccttttgtttgcttaatattaaattagattttcatatacttagctgattgctttttggcttacttgaatgtcgtgcacctttgcttattatcaactttatataattctaattggaaatatttaaacacaaatgaaaagaattattacagatatacaaagaacaaaaatataaaaaaaaaggataccaaatcttgtttgtttaattaaattacaacttgtataagaaattaattgccgaaatttatatttctatagaaaacatgggcagaggcttcctccaagatatgttcgtccgtcaatagtttcaatatatgtatttgaatttccctgttgtacagccttgaactcattgacgcattggccatttgccaagtatgtcataactttgggtggctatattcggtggccgatagctaggtattctaacatttaatattgataaactttatcatttagcccaaggccgtcttcttcacctgcatggacagtagaatgattcccacccggtacaccgacactcacgtgggcgatatgtttgtgggtgagtaaatccagtcgagctgatagtttatggcttaacattcctgccgattcccacggataagtgcgaaatgctggcaatctgattccccatgcccagcacttccaggacgagtacttcagctgcgaaccggcagctctggagctcggatgcgtggtgaacgacattagacacataatagtttgcggacacagcgactgcaaggcaatgaaccttttgtaccaactgagagatcctgatttcgcttctaaggtacttgggaaagtcaatggtattttcggtccagataagcaacaatcgactaaataacatttctccaccagcttaaccgacgcctctcaccattgcgatcttggctgtgcacccatgccaacaccagcttggagaggttccaggaatggcgcgacgctggcatgaaagatccactgattttctcttcggagactccgctacgtcgctttgtggcctacatcgatgaggagcagaaatttgccttggaggacaaattatcccagatcaacacactgcagcaaatgtccaacattgcctcgtacggcttcctcaaggctcgcctagaatcccacgatcttcacattcatgctctttggttcgatatctacaccggtgacatctattacttcagccgcggagccaaacgttttctgcctgttgatgaagacaccgtggatcgattgtccgaggaggtcagaagattctattcgtaggcgaaacatgccaagaggaccaaatggattatctgtgatatgtgggccttataccgcgatcggcatttacaatttaccaatacttaggattgtttttcgtatttataagtgtgtaattgtttttgtatataaacttaaggcctacaaaggtttaaacttacaaatctacgaaaaatcaacgaaggagatggctatccatcgctcactcactacgaccttcacaactcaagaaagctattatgtatgtgggactgccatatttacaattacaccattaactattatggcagtcatgaaggaagtgagcgataaaaaacatatatacgtatttatagttacgggaagctgtaagactttggggcggcaccttgggcgcttcgatgtttgcaaaacaacagacggtattcatgtctttttgaacggagaacggcaaatggagttatggaaaacaacaattctcgtttgactatcatcaatggtacctttggccatgatggttaatggcactgttgcttggattttccagctcctcaaagtacttccgagcgttccttatgttgactagcgtagcctccgagggcagcgtgggatccgacatgaccaccatcacgtaggtgttgctggtgaaggtgtcaatgaaagcggcaaatgcgctattgcgcacctccatcgattggaacttagcgcccaacttcgaacagctcagcttgaactgcttgatgatgttggacaccttttcaaagcggtgcgagtcgcggttcttcttgctctggcaatgggagatcaccaaaaaggtagccttttcgaacaacagcacctcgtccgcctcaattacatttccgaaatgtgtcacagagttctccagggcggcaacatttggtatcagcatcgtgacaatggaagaccaggctctaaaagcagttagaagttgaattttaaataaattcggttgaaaacttcgtgtttactaacttgtataatgtttcatcccaaatgctggtacggaaacaggtgacatttccgggctttgataattttatgagatcctccatgcgctcagtaaacacactctcgcgcaagccttccggcaccaggtccattttgtgcaccagacagaatatcttggcctcaggcgaattctgcagcagtgcctccaggcagctctggtagtaatggatgtcgcgctctatc

SEQ ID NO: 29654 - DNA, 1055 bp, DROSOPHILA
attattatacacaaatcaaggaaaatcaattgtggtgccaaagtgcgtgcaattaaagtgtcaaattaagtttaagaagccccagacaagcacgaaatggagcgtattttgaggggaatcatgcggtacagaaatacgacaagggagcaaatggtcaaggagttccagaaagtccgcgacaatccagaacccaaggccgtcttcttcacctgcatggacagtagaatgattcccacccggtacaccgacactcacgtgggcgatatgtttgtggtgcgaaatgctggcaatctgattccccatgcccagcacttccaggacgagtacttcagctgcgaaccggcagctctggagctcggatgcgtggtgaacgacattagacacataatagtttgcggacacagcgactgcaaggcaatgaaccttttgtaccaactgagagatcctgatttcgcttctaagcttaaccgacgcctctcaccattgcgatcttggctgtgcacccatgccaacaccagcttggagaggttccaggaatggcgcgacgctggcatgaaagatccactgattttctcttcggagactccgctacgtcgctttgtggcctacatcgatgaggagcagaaatttgccttggaggacaaattatcccagatcaacacactgcagcaaatgtccaacattgcctcgtacggcttcctcaaggctcgcctagaatcccacgatcttcacattcatgctctttggttcgatatctacaccggtgacatctattacttcagccgcggagccaaacgttttctgcctgttgatgaagacaccgtggatcgattgtccgaggaggtcagaagattctattcgtaggcgaaacatgccaagaggaccaaatggattatctgtgatatgtgggccttataccgcgatcggcatttacaatttaccaatacttaggattgtttttcgtatttataagtgtgtaattgtttttgtatataaacttaaggcctacaaaggtttaaacttacaaatctacgaaaaatcaacgaaggagatgg

SEQ ID NO: 29655 - protein, 255 aa, DROSOPHILA
MERILRGIMRYRNTTREQMVKEFQKVRDNPEPKAVFFTCMDSRMIPTRYTDTHVGDMFVVRNAGNLIPHAQHFQDEYFSCEPAALELGCVVNDIRHIIVCGHSDCKAMNLLYQLRDPDFASKLNRRLSPLRSWLCTHANTSLERFQEWRDAGMKDPLIFSSETPLRRFVAYIDEEQKFALEDKLSQINTLQQMSNIASYGFLKARLESHDLHIHALWFDIYTGDIYYFSRGAKRFLPVDEDTVDRLSEEVRRFYS

SEQ ID NO: 29656 - DNA, 6330 bp, DROSOPHILA
gtgtaaaataatcaaatgcaaaataagcgcaagcagctgaaaacttctcttcaaacttttccgcttttcccaaaaccattttgctttgaaatctgtttttaccaaatcagattaaactgcaaaatggaacttaaatgcaaatcattgcaatgcttataaactgttttttgttctatatacttttgtgtgggtcaaaattcggcatgctcctgtatcacacaacctgccacttgcccttaaaaagaagggcgcagtgggcgtggtacgtatacatatgagccatgctgcattttggccgtaatgaaaatgcactgctttacttggaaaattcgcttgcacaaaatcaacgccgcggctgatttattattgatgtgctcaagcaaattcaagtgaagcatttgcgcgattttcgtctttctgtttccgtttgcaaaaaagtttataaaatgcttacactctgctgcagacacgccaaccggaagtgcgcactaagcgcttgtttgtagcacagtgtagaattctggcgtaatttacagctctactttaaagtcttctagatagctatctactatttataaacttatttattgtcttgaatgtatgttaattgtatgtattgatggtgatcacgttttttttgtcctataacaagctgcaatgtaaaatccaaaaaaaaaatgaaaaaataaaataaaagggaaatcaatgattttgtttgctctaagctatgttcaaagtaactgggaactaatcgaactaatttcgatttaaaagtggtctagattatattgtgacatttgtgaatatattattatatttgcgaatttattattatcataaaaataacggtagttgaaaaataatttagatggcatgcaatattaaaagttcccgccaaattggcttgaatctttgctaatatattacagtttccaaccttgcattaagttcacgatagtttttcggcattttcgattgtaaaagcataaaaaagtccctgctatcgaagctctaccacctccatcagcaggcgacggcaaaaaaatcttgaaatgtaagcagtaacgtcaaaattcgctttcaaatcgttaaacgtacgttctcattcgatttcagaacaaaatggcttcattcttggcacgaactggcggccccctgatcgaaaccgttaggccagcggccataaaaaaggtgagttcgccaattagtagtcatatttgtgtgtaaaaaatgcgaaaatccgtcgctttacataataaggcgaaaagagagagtgaacacctacgctgtccccttctctgtctctcacttactcacacatgtgaaatgctgatcgtttatcggtacaaaaaaaaaacttaagcgataatttaagttctttgccatttgttaactaattgtttctccagagaaacggggagagtgtgagatttaaagagagtcacgatcaccaaagacacctgacttttttattgtgtcagtgtgacgcaactgtgcgcttttcgtacgcatgtgtgtgtgtggggaccttgaaagccccatttattcccccacttaatttagtttgttttttatcaatgagcagctgacaactgttgcttatcgtttgtggttgttgttgctgttgtcgccgggccctctaattaaattcttaatctgtgaattagtttcggttatcaccgggaaacgccgttagccggacgaacttgctcttaacccagatttcgtttcttttcgccgctttttgtttatgtttttttcacatgaatcaccgaaccagtttttttatgtttaatttttgcttgacaatgacctcgtgactggaattaagatttcatttataagtacaataagtttcgaaatcgtttttattttcatccttttaaatatatttttaattatttttcttgttatctttaattagcatctaattttcgcaaattaacatggcaaaaattccaaccttttcagattcttggcctggctcccatcgccgtccagcagctgaggaacctcaatgtccaggaacacgtttcctacagtctgctcaatgaggccaagatcccaacacctcggtgagtaaacccaatcggaattatcaaaatcgcgggcaaacaaccaacaatttgcgtcaaagtcgcagtccaaagttcaatgaaagtgccgcgttgtcgttgcgtcgtctgtttcctttggcttatgtgcgttttggactttgcctgaacttaataatatgcattgagtatagccgactacggggtaaacaaaccagagaaacgcagccgccgatgataagggtgataacaagttttatactataacacactttgatcggcgtaaagtgacaagggtcagtgacgtgggctttgataagatggaagcggcattagttgacgtctatcataattaaactaactaaatatacataaactttgggtaaagaaaatatattttaatgtttaaaatacctgtaatttaaatttaagcaattgcaaagctagaatattttgatttccatttcgtttgataaattgagattattagaatcaaaagatagtagttgcttttgctattattcaggtaaaatcaggcgactgatttattttctaaatgagggcttgtcatctctcgaatgaccgaataaccttgtctcaactttcaacctttgtggtctactgataacacgatttacgtgaaatgttcctatcaacaatcaatcaggaacatcgtaaagagcgcacccccaaaattatttcgcgtactgagtgattcatttttttgcagtttcgctgttgccaagaacggcaaggaggccaacgatatcgccaccaagctgaagaccgataacctggtgctgaaggctcaggttttggccggaggacgaggcaaaggaacctttaagaatggcctgaagggaggtgtgcgagtggtctacgagtaagttgtgatatatgtctaatatctgtgtggtaaaacataaaaaacaaatcttactccgcagtccccagaccgctgaagaactttcaagcaaaatgatcgatcagcttctggtcaccaagcaaaccggagcagccggtcgcatctgcaaaaaggtgatggttgccgaaaggaagttcccccgccgtgagttctacttcgccgtgatgatggagcgtgcctttaacgtatgtctaataaccatgcattcaaccctgtgaagctataaaagacgattcaatttccagggtcccgtgctgatcgcctccaaggagggtggtgttgatattgaggaggtggctgccagcagtccagatgccattttgtacgaacccatcgatataggcactggcttgaccagtgaacaggccgaaaagatcgtcaagaaggttggtctgggcggcgatggcgaggacacacatgtccagatgctgttgaatctgtatgacctgttcgtcaagaaggatgccctcttggttgagatcaacccctatgccgaggatgccatgtccggctgtaagtttagttatatatgttctcttaagccatgtgttgtggtctaattctaatgtctgtctcatcctaacgaactaactcatttgtgattgtcattgtactggatttgatgttttctgtccaggctgtaagtatatttcaccaataataaccctttccattcattaacctatgtttaaacctaatgatttgtaacaactttcaatgattacctgtagtcttcgcattggatgctaagctgcgatttgatgacaacgccgagtttcgtcagaaggagctgtttgcgctgcgcgattggacccaggaggatcccaaggaagtcgaggctgccaaatacaatctgaactacattgccctggatggcactatcggctgcatggtgaacggcgccggtctggccatggccaccatggatatcattaagttgtatggcggtgaaccggccaatttcctggatgtcggtggtggtgccactgccgaggcggtcaaggccgccttcaagatcatcacttccgatccgaaggtgctttgcattctggtcaacatcttcggtggtattatgcgttgtgatgtcattgccgagggtatcatctccgccaccaaggatctgaatctgaacatgcccgtggttgtgcgtcttcaggtgagttttcatggatgcatttatctgacttgctgagatatgctaaacaaaactggtttgcattgcagggaaccaaagtcaaggaggcccgcgaactgattcgtacatctggactgaagattctggcccgcgatgatctagataaggctgccgatctcgccgtgcacttggcgcaaatcgtcaaactggcccgcgaaatgaagatggacgtgaacttcgagattcccgatgcccaaaagtagatagctccatcagttaccggctaagtcaacactcataagcacacgcagacacaaaatgaaagtcgacaaaaaagtagaaccaaaaccaaacatttactctagccacacgtaaactactcaatgaaactatgccatcggttcgtagttagagcattatgtattcgtaacgatcggtcgaacaattgatgaattaattttgcaaaaatgttaagtttaaagctgtttaaagtcctaaggatatgtcatagataattcgaataatcgagcaagttgagtgttctctttgcacctaaacaatttctatattgtatcttaaatagtcaacaacattaattgcacgtgaataatagaaaatggaaatgaaaatacgttttaattgtgatttttgcaaaagttcatttaaattttatttattgaaatgtgaccctgcttttaaagcagatccatcatcttgtgtattatcctatttagtttgctttaaattaaaacaccaaacaatcatacaccgaacctggcttttgcgttattcaaagactgcttaaaacagtgcgttttagttcatttttaaatagagtcttactaactttaatcactgcaccttaggggcaagggcgattgcaagaaagatcaaaaacagcccgacagtaaaggtggcaagaagtcggagaagaaagatgacaagaaatctgattgcacaaaaaaagaggaaaagaaaaaggaagaaaagaaagacatttgcgaaaagaaaggtaaaaagtaaagggatacaaattttgtaataaacaatgcaggatcgagccggatgtgtttgagacttacaccatcaaaaagaaggaagccattgtttaaattcaaaatccaaatttgccacaaaagtttcattgttcaaaattttaatctcaaatttcagatgtaaacttctgacccgccacatttttaaagattttcataatatttatgttttgtttattgtgtgttgagccttagaaacgatcgactagagataatatgtggttctgctcctgttcccgccagtcggtgtcgccatcgcccaggttgccagcgtattctgtgaatgaatttgaaatttgaacatctaagttttactgggcattccatttgtggtttacccctcattatgctgcgaatggtcttcatggaagcgccgcgcaagttaaggatctgcagtacacgctgcttgacggtgtcgccagtggcactgacctccagcaggatgtagtcgatgcgctgcagcgtgaacagcccgccggtcagtcgttttatatagttattctccgcctcctcgtcctcatcaatggtgggatcctatgccatgatattggttttcaattgattagtttatggttacacataaaacttcatttcgtaccttagcctgctgatcgatctccttgtctatggcttccaccttggccagatacttgaggtgcagctccagcaggcgatccaccttctcgtgatcattctccgtgaacttggccaacattcgctggcggtgtgtgcccttgcagtttcgcaacattgatgcgattacggaggtcacatgctcctcatgctcatcggcggagattaggcgctgcttgttgcgcttgggggttttcataaagagtgggaagatggtgcgcaagccgagaatttcgacaaacttgttgcagttgtctctgccatcctggccagccatggcatgatccaacaccttgagcgatccatttctagacatcttcttctcgcgcagcattaggttcatcagctgcagaccctcgccgctgagaaaacgatcgcgattctcgcgggccatcagagcggaacaaaggcaattgaagaggttctgcatgtactcctgctcctcgttgctagcgggatcgtgtctcttgtagacagccagctgctggagcagcacatccacgccatccagagaacccagcagtaatc

SEQ ID NO: 29657 - DNA, 1698 bp, DROSOPHILA
ctatcgaagctctaccacctccatcagcaggcgacggcaaaaaaatcttgaaataacaaaatggcttcattcttggcacgaactggcggccccctgatcgaaaccgttaggccagcggccataaaaaagattcttggcctggctcccatcgccgtccagcagctgaggaacctcaatgtccaggaacacgtttcctacagtctgctcaatgaggccaagatcccaacacctcgtttcgctgttgccaagaacggcaaggaggccaacgatatcgccaccaagctgaagaccgataacctggtgctgaaggctcaggttttggccggaggacgaggcaaaggaacctttaagaatggcctgaagggaggtgtgcgagtggtctacgatccccagaccgctgaagaactttcaagcaaaatgatcgatcagcttctggtcaccaagcaaaccggagcagccggtcgcatctgcaaaaaggtgatggttgccgaaaggaagttcccccgccgtgagttctacttcgccgtgatgatggagcgtgcctttaacggtcccgtgctgatcgcctccaaggagggtggtgttgatattgaggaggtggctgccagcagtccagatgccattttgtacgaacccatcgatataggcactggcttgaccagtgaacaggccgaaaagatcgtcaagaaggttggtctgggcggcgatggcgaggacacacatgtccagatgctgttgaatctgtatgacctgttcgtcaagaaggatgccctcttggttgagatcaacccctatgccgaggatgccatgtccggcttcttcgcattggatgctaagctgcgatttgatgacaacgccgagtttcgtcagaaggagctgtttgcgctgcgcgattggacccaggaggatcccaaggaagtcgaggctgccaaatacaatctgaactacattgccctggatggcactatcggctgcatggtgaacggcgccggtctggccatggccaccatggatatcattaagttgtatggcggtgaaccggccaatttcctggatgtcggtggtggtgccactgccgaggcggtcaaggccgccttcaagatcatcacttccgatccgaaggtgctttgcattctggtcaacatcttcggtggtattatgcgttgtgatgtcattgccgagggtatcatctccgccaccaaggatctgaatctgaacatgcccgtggttgtgcgtcttcagggaaccaaagtcaaggaggcccgcgaactgattcgtacatctggactgaagattctggcccgcgatgatctagataaggctgccgatctcgccgtgcacttggcgcaaatcgtcaaactggcccgcgaaatgaagatggacgtgaacttcgagattcccgatgcccaaaaggggcaagggcgattgcaagaaagatcaaaaacagcccgacagtaaaggtggcaagaagtcggagaagaaagatgacaagaaatctgattgcacaagatacaaattttgtaataaacaatgcaggatcgagccggatgtgtttgagacttacaccatcaaaaagaaggaagccattgtttaaattcaaaatccaaatttgccacaaaagtttcattgttcaaaattttaatctcaaatttcagatgtaaacttctgacccgccacatttttaaagattttcataat

SEQ ID NO: 29658 - protein, 465 aa, DROSOPHILA
MASFLARTGGPLIETVRPAAIKKILGLAPIAVQQLRNLNVQEHVSYSLLNEAKIPTPRFAVAKNGKEANDIATKLKTDNLVLKAQVLAGGRGKGTFKNGLKGGVRVVYDPQTAEELSSKMIDQLLVTKQTGAAGRICKKVMVAERKFPRREFYFAVMMERAFNGPVLIASKEGGVDIEEVAASSPDAILYEPIDIGTGLTSEQAEKIVKKVGLGGDGEDTHVQMLLNLYDLFVKKDALLVEINPYAEDAMSGFFALDAKLRFDDNAEFRQKELFALRDWTQEDPKEVEAAKYNLNYIALDGTIGCMVNGAGLAMATMDIIKLYGGEPANFLDVGGGATAEAVKAAFKIITSDPKVLCILVNIFGGIMRCDVIAEGIISATKDLNLNMPVVVRLQGTKVKEARELIRTSGLKILARDDLDKAADLAVHLAQIVKLAREMKMDVNFEIPDAQKGQGRLQERSKTARQ

SEQ ID NO: 29659 - DNA, 2817 bp, DROSOPHILA
atagcacctatttatgaattgtatattggccccttttaaaattaatgaaacatcataaatgaaatctcagttgcacaagggatttgaatgctggatgtgagttgggattttcaaaagatccgttttgaaaggcgtaatcaatcctctgcaatgggatctttatctttacatctaaaatatctttcaattcatttgaatattggaaccttattaattgtaaatgacaaacaatttaaattgtaaatgacaaacaatttgtaagtttaaaatataccttcatatccttaattacgacttttatttgttttgtattgaaaagtttgtgaattcttgaataccacgcacacatgtggtctacgcaatttcgtttaattggcatgaattcaaattatggtaaagtgggagggcacaaaatattttattgacaggtaaggtaaccattattgtaataaggttattacaacgctaattatgtgaattagtggtaaaagcgccagcgctcgcaaagaaaaatcaaggtggatagcagccacccacataggagtactgcccaccgcaggcgcaaggaatcgacatctaacgagtgaaatcctaggaagttttccagaagtcgaacatagccagcgcgcattgcatcgttaaaatcggatactacccagtgccgcagaagtcctgcggcctggatccgcatgatgaacatgttcaatgacgactgcaggtggcagtcacttttcatgggatagcctataatcggggagcccaggcatgccgatgagaatctgaagattggcttgaaggcgtattgctgttgtagtgagaagaactcccatctctccagggtgaaggggtaggcatagctccgattgaatcccagaagagcggacacctgctcactggcattcacgcccactaatagttgcgctactccgtccaccaaatctggttccacatgccgtaagaatgtactgacttcgtaatattttacaagtaccttttgctgttactggatgagctgctgcatgctgtccacctgctcgcccactaccaaggtggtgaagaagctgcccaacataatgctgtagaggttggtcaccacaaagcccagaatactaaggtgcaccgaaactataaaatacctcagggatgggttgtaaatcctggagggagagcatatattaattattcggctgatgctatctaggatgttgaggccaatccgctgatcccaggtgcggtgcagcagaccaggctgaatgtagtagagcactccgctgatataaattacagaaccgagcagtagtatccagcttgattggttgagaggcaatagtagatacatgtagcgagatatctcgttcctgaccggaacaataagacaattgctagctattagaaggggataactgttatctcccatattttccggaacgtctacatacggatgcagggagatttctaattggccatccacaatctgattaattatccgacccatattcacgctgctgttgatggcatgctcctgctgagaattactgacatgtaaagaggcattgtagcgatgcaggtactccacaaatgtgcgatatccaaatcctctgatctgcttgcgtccggttttcttgtccttcacgaaaaacactcgcggaatgtcgttttccactggggtagacaccacatagccttggaaatttttggaactgaaagtgccacagtctcttaaacgtgctcattatagctttgctggatgaacttcgtttgtctgatagaatcacaataaggcgaataccacgtaatcgtcgaagtctcttatccatattaaaccaaatcaattcatgggagctttggcaaaacaacaaaccaagcgaattatctgcatttatgttaaagtgacccagagcgttttcgtttttggctgaagtagatgtatccactgtatgacaagttacttccatcgtattttgaagccaactcatcaagttattcaggtcatccgaattacaatgtccgcctaagaagatgggggtatttttccaattctccctgccgcggatgactgtcagcaccgatctcagcaaagtcatgttatgacctcttctatggggttccatctgggcacgagtgaaaagcaataggaacaataccagaacgttgtacatggtggttaactgtgcattggcttcttgaaatccttgcatctgacttataagttaggcaataattgaaataattgtacataatcaagactgattggtcctatcaatgatcaaaagctaggaaaattgttgcaatgcttccttctgaactatgttatacaatttcataattaattacgaacctttttttgtcgagatatataatttatttgatttacttaacttatttgtttggaagtgagcattgaattattgcacatcaagggggacagaaatgataaaacatatacatttagagtttggctgaatacggggaattttacaaacatggaaatttacaaatcactttgaataaattaaaattacttctaacgtgggaaatatccttgaaagaaatctttaaaccgtttaaagtccacaaccttaggaaaataatatttgttaatagggtttagttgcaagaaatatcaataggcaatacttataaaagaagataagatttaaaatttcgttcgcagatttgtctatatatggaatcgataaagaaggatcacttttgttgctgacgttgctttgattgcagaagggcggacaataccaaagcagtatctagctcctgctgattaccaggttcgttgtccaaagatatttcagcagcacg

SEQ ID NO: 29660 - DNA, 630 bp, DROSOPHILA
atggataagagacttcgacgattacgtggctatgtggtgtctaccccagtggaaaacgacattccgcgagtgtttttcgtgaaggacaagaaaaccggacgcaagcagatcagaggatttggatatcgcacatttgtggagtacctgcatcgctacaatgcctctttacatgtcagtaattctcagcaggagcatgccatcaacagcagcgtgaatatgggtcggataattaatcagattgtggatggccaattagaaatctccctgcatccgaacgagatatctcgctacatgtatctactattgcctctcaaccaatcaagctggatactactgctcggttctgtaatttatatcagcggagtgctctactacattcagcctggtctgctgcaccgcacctgggatcagcggattggcctcaacatcctagatagcatcagccgaataattaatatatgctctccctccaggatttacaacccatccctgaggtattttatagtttcggtgcaccttagtattctgggctttgtggtgaccaacctctacagcattatgttgggcagcttcttcaccaccttggtagtgggcgagcaggtggacagcatgcagcagctcatccagtaa

SEQ ID NO: 29661 - protein, 209 aa, DROSOPHILA
MDKRLRRLRGYVVSTPVENDIPRVFFVKDKKTGRKQIRGFGYRTFVEYLHRYNASLHVSNSQQEHAINSSVNMGRIINQIVDGQLEISLHPNEISRYMYLLLPLNQSSWILLLGSVIYISGVLYYIQPGLLHRTWDQRIGLNILDSISRIINICSPSRIYNPSLRYFIVSVHLSILGFVVTNLYSIMLGSFFTTLVVGEQVDSMQQLIQ

SEQ ID NO: 29662 - DNA, 2753 bp, DROSOPHILA
tgacgttttatttaagcaacattaaaataaaaagcaattatttttatttaaagcatcgatgtttaaaacgtcgatgttattcgccaaaaacatcgacatccgccaacatctagtttcatttcaactaacagtcgttttaagcactggtggctgcaaagttaatcgatttattaagagatggttgcttttacacataaaaaaaatatgcctagtttttgaaaaaaaaaacaacttagttcttatcaagataaaataaatatggcaacggcctaaaagaaaaaaaactttttcggtatttttaaaaaaacaagtagtttaatagcaaattggcttccaatacatttccaactgggattaattgtctatcgaaaaaagtgtcatctctacccaaccaaacagctgttccctcatctacatttgttatttaaccattttggtcgccgaaaaacgaaataagaatgaataattgtattaaagtagtgcccattgccctaaggtgccagcagaggaccatcagtacttcatccgtgctggagggcaagcggaacttccgtaaatttaacgcatacaacaagcgcggtacgcgcgtggtaaaggaagcccagaaaacactggccaatccgccggtagccattcacaagcgaggtgtacgagacacgggcatacttgtcgacgggcagtatgtggagattcccgagaaaattccggacatcatagttcccgatttgaccggttgtaagctaaagccatacgtgtcctataaggcgccggacgtcgtccagtcggagttcaccagcttggatctcttcaacgccgtctactcgcagaagattatcgaagatttcaaggcgggaaaactgcagaaggacggcagcgccaaggagccctcggtcaatgagcaactgactccggaggaggccttgcaacgcgctcgaaagacgggcagcgatatattctagacataggtttattgtttcttaaatacagagtctaaactcgactactcctgcatgtacttttggcggtaattgtacagcttgcgcagccacttctcggccttcatatccgggtcgcccaggaactgtcggaattgaaaatcagatactattagcatgtatattcgagcaccaggtaacccactcacgttcggatggaatattacatcttcgtttcggactgcagtggctggcttgctggcgactgtgaccgtttcattgttcagatctatgatcaccttatcggatgtctcctttgaatccctggagctaaaaaatgactccggcttgaaggtgtcctcgtctatagtctcgagtgccttttgcaccttggtgtcgaacagatcgatggccttcacgggagcagctgcgggtgtggttgcggatcgggaattgctttccgaacttggacccctggttttcctctgcgaaatagaccgcgatttgtgatgatccctggttctgcttttgctgtgcgtgctgcgggaactactcctgctgctggaggagctgcgcgaggtgctgcgactgctactgcgactccttctcgagtactttttcgacttcttggcctttttcttcttcggttttgaaacctgccggctgctcctgctgggcgactttgatctgtgtcgtctgtcgcggtctcgctctctgtctctttctcggtcccgatctctatccctctctctgtcgcgatctctgtcacggcggtcgcgatccctcataatgtgtcctttatcggcagttaattatttatttagttttttatttatgttatatttcttgtgtgccggacgtcgctcattcccaaaatacaaaatcgcctgtcaagaaaacgcaacatttttacgaatattccagctggccacactgattgtgtcaacatgtttaccgcctatcgatttttggacttatcgaccgattttaatttaaactaataggcgcgaattttaattatagtaatcactttaaaatatttaacttagaactatgtgtaatattaaatcaattaattctttttaacatattcatttaatatactacatttattgagttttgtccttaccggcttagcatgtcagtttacagactgatgtggggtcttttaatgtccagtttgccgtacgcccaaagcaggaaatactaattgctgattaactcttagcaattatacctaatcagcagttatcaagattataggagaccttatcgctgatgaccactagccattcgttaaatcaactgggatcgaaattcccacacgatctatcagtcttggcgaatcaaaccattttgcaggcaaaaataaacagtcataaattaggcagccaaatctaggaatccttatcaagttcctggggggcatataaaaggcacgggcggccaagtcagcggtcaaagcacctgcacctgtggaatacaaaatgttggtggttcagctaattgcggtttttttaagtctgggcttggctaatgccctgcctgcggatacggggcgcgccagttcggtgacaactgtaagttttaggatgccatgttctttggcacccaaaagtccttactaaccactatattgctctactttccaggtcaccattgttaggggacacggttacgaaatcgaggagcacgaggtgcagacctcggatggttacatcctcacaatgcaccgcataccgtactcgaagaacactgggtacgatgggccacgccctgttgtcttccttatgcacggtctgttgtgttcctcctcgg

SEQ ID NO: 29663 - DNA, 690 bp, DROSOPHILA
aaataattaactgccgataaaggacacattatgagggatcgcgaccgccgtgacagagatcgcgacagagagagggatagagatcgggaccgagaaagagacagagagcgagaccgcgacagacgacacagatcaaagtcgcccagcaggagcagccggcaggtttcaaaaccgaagaagaaaaaggccaagaagtcgaaaaagtactcgagaaggagtcgcagtagcagtcgcagcacctcgcgcagctcctccagcagcaggagtagttcccgcagcacgcacagcaaaagcagaaccagggatcatcacaaatcgcggtctatttcgcagaggaaaaccaggggtccaagttcggaaagcaattcccgatccgcaaccacacccgcagctgctcccgtgaaggccatcgatctgttcgacaccaaggtgcaaaaggcactcgagactatagacgaggacaccttcaagccggagtcattttttagctccagggattcaaaggagacatccgataaggtgatcatagatctgaacaatgaaacggtcacagtcgccagcaagccagccactgcagtccgaaacgaagatgtaatattccatccgaacttcctgggcgacccggatatgaaggccgagaagtggctgcgcaagctgtacaattaccgccaaaagtacatgcaggagtag

SEQ ID NO: 29664 - protein, 219 aa, DROSOPHILA
MRDRDRRDRDRDRERDRDRDRERDRERDRDRRHRSKSPSRSSRQVSKPKKKKAKKSKKYSRRSRSSSRSTSRSSSSSRSSSRSTHSKSRTRDHHKSRSISQRKTRGPSSESNSRSATTPAAAPVKAIDLFDTKVQKALETIDEDTFKPESFFSSRDSKETSDKVIIDLNNETVTVASKPATAVRNEDVIFHPNFLGDPDMKAEKWLRKLYNYRQKYMQE

SEQ ID NO: 29665 - DNA, 2501 bp, DROSOPHILA
tgctgctcgcaggtttccaggtcctgtatgctcttcaattcgatggaatcgtacttggcgacagtgtccgccaaatcctcctcttcagccggtaacgacattgtttaacaaccgtcgaatctaaatcaactttttatagggatcacaagccgatttggggagtttcagctagagatggagaaacatcgatgctagcatggatgtcatcaatgttttcaaaaaatcgcattcatcgatgttttcgaggaatcatcgatgtttttccatctctacatcgcatctgaggagaaaagcgtataaattgtaagtacaaattaattttccatatcttctaatacaattattaataccatattgtggcgtcgtgatagacatggaaaatatctgagaagaaagtttttaacacccgaaaaaggcttgcacatatgaatgcatgtcatatgcacgtctaaatgtatatacatgtatgtatgtaaacgtgcatttgtcttataggagcaattactggaccagcggaggatgaaaaggtggacaccaaatactgacgttttatttaagcaacattaaaataaaaagcaattatttttatttaaagcatcgatgtttaaaacgtcgatgttattcgccaaaaacatcgacatccgccaacatctagtttcatttcaactaacagtcgttttaagcactggtggctgcaaagttaatcgatttattaagagatggttgcttttacacataaaaaaaatatgcctagtttttgaaaaaaaaaacaacttagttcttatcaagataaaataaatatggcaacggcctaaaagaaaaaaaactttttcggtatttttaaaaaaacaagtagtttaatagcaaattggcttccaatacatttccaactgggattaattgtctatcgaaaaaagtgtcatctctacccaaccaaacagctgttccctcatctacatttgttatttaaccattttggtcgccgaaaaacgaaataagaatgaataattgtattaaagtagtgcccattgccctaaggtgccagcagaggaccatcagtacttcatccgtgctggagggcaagcggaacttccgtaaatttaacgcatacaacaagcgcggtacgcgcgtggtaaaggaagcccagaaaacactggccaatccgccggtagccattcacaagcgaggtgtacgagacacgggcatacttgtcgacgggcagtatgtggagattcccgagaaaattccggacatcatagttcccgatttgaccggttgtaagctaaagccatacgtgtcctataaggcgccggacgtcgtccagtcggagttcaccagcttggatctcttcaacgccgtctactcgcagaagattatcgaagatttcaaggcgggaaaactgcagaaggacggcagcgccaaggagccctcggtcaatgagcaactgactccggaggaggccttgcaacgcgctcgaaagacgggcagcgatatattctagacataggtttattgtttcttaaatacagagtctaaactcgactactcctgcatgtacttttggcggtaattgtacagcttgcgcagccacttctcggccttcatatccgggtcgcccaggaactgtcggaattgaaaatcagatactattagcatgtatattcgagcaccaggtaacccactcacgttcggatggaatattacatcttcgtttcggactgcagtggctggcttgctggcgactgtgaccgtttcattgttcagatctatgatcaccttatcggatgtctcctttgaatccctggagctaaaaaatgactccggcttgaaggtgtcctcgtctatagtctcgagtgccttttgcaccttggtgtcgaacagatcgatggccttcacgggagcagctgcgggtgtggttgcggatcgggaattgctttccgaacttggacccctggttttcctctgcgaaatagaccgcgatttgtgatgatccctggttctgcttttgctgtgcgtgctgcgggaactactcctgctgctggaggagctgcgcgaggtgctgcgactgctactgcgactccttctcgagtactttttcgacttcttggcctttttcttcttcggttttgaaacctgccggctgctcctgctgggcgactttgatctgtgtcgtctgtcgcggtctcgctctctgtctctttctcggtcccgatctctatccctctctctgtcgcgatctctgtcacggcggtcgcgatccctcataatgtgtcctttatcggcagttaattatttatttagttttttatttatgttatatttcttgtgtgccggacgtcgctcattcccaaaatacaaaatcgcctgtcaagaaaacgcaacatttttacgaatattccagctggccacactgattgtgtcaacatgtttaccgcctatcgatttttggacttatcgaccgattttaatttaaactaataggcgcgaattttaattatagt

SEQ ID NO: 29666 - DNA, 448 bp, DROSOPHILA
atgaataattgtattaaagtagtgcccattgccctaaggtgccagcagaggaccatcagtacttcatccgtgctggagggcaagcggaacttccgtaaatttaacgcatacaacaagcgcggtacgcgcgtggtaaaggaagcccagaaaacactggccaatccgccggtagccattcacaagcgaggtgtacgagacacgggcatacttgtcgacgggcagtatgtggagattcccgagaaaattccggacatcatagttcccgatttgaccggttttcaccagcttggatctcttcaacgccgtctactcgcagaagattatcgaagatttcaaggcgggaaaactgcagaaggacggcagcgccaaggagccctcggtcaatgagcaactgactccggaggaggccttgcaacgcgctcgaaagacgggcagcgatatattctag

SEQ ID NO: 29667 - protein, 128 aa, DROSOPHILA
MNNCIKVVPIALRCQQRTISTSSVLEGKRNFRKFNAYNKRGTRVVKEAQKTLANPPVAIHKRGVRDTGILVDGQYVEIPEKIPDIIVPDLTGFHQLGSLQRRLLAEDYRRFQGGKTAEGRQRQGALGQ

SEQ ID NO: 29668 - DNA, 2336 bp, DROSOPHILA
cgcggatgcaactccagatgcagatgcagatgcagatgcagttccagacacccagacagagacaatccagacgactccctttgccttttgctgctccgccttcatagcaattgcgatcgacaatgcccgggggctctgtgcaacatagttgccaagtcgcagatcatgttgacgataaacacatatattttgcccggcgtttgcggctgcgcgccgcttggctgctttatagctcgactggatgactggctaaatggctaactgcccatttggccgactccccgacagtcgcaccagtcggatgtcggatgttggcccggtccaaagatgctacccgtcttgcgcattgctgaaatggaatgggaaatgggcatgggtttgtgcatgctgatgggtatggatatggaaatggagtgaggtgaagggacgtggtgcacagcaaaaaaatatgatacgatcagagtaattatctctttatttagttcaacaaatataaaagggatggatatagtatacaataataaaaaatgtggttctatatcgtccgtttataattttcagatctaaaccaaaatattatctttgtgcagtttagtatctcatgataatgcgtggtgtgaactatgcgtcagcttagaaaattgcacttaagacagactgagatacgacaacagatttagttgtgcatatgcatgcatcctattctatcctttcctcttaagtaagccctaaaattgaactttagtcaatattctattaatctcgcccagactactacatatagtatcttcatgacctaatgagccaccgaatgcaccatttgtatatggcccttaaaagttgaaagcttgctctaaaatggccaggcacttctgccgtaatcacagaagcacctgcccaggttctcaggcggccaggacatgcatttcagtgtgcaggagccattaaaccgaaattgccagacataaagctgaaacttaaccgcaggcagccgtcattaatgcgttcgcatcataaactttatattgcagcaggccgcgtgagctgtgcggacatcaagtgtgggccaaaggataactgcctggtggatctgcagacgcgccagccgagatgcgtgacctgtcgctacaagtgtccgcggaagcagcagcgaccggtgtgtacagattttttgtaaataaaacatttcctttcctattatgaattaattttgtaatattaggtacacaaaatatgcggctacaacaaccagacatacaactcgtggtgtgagatgcacaaacactcctgcgaatcccgctacttcatcggcgtcaagtcccagggtagctgctaggagatcggatgcatctctcgaccacatcggcctagggctttatgtagcgtgttcttccgtagctccaacatccaaagattctcgttgtgcgttttcgtgttgtaatcggtggatgggcctgcggctgttgcccaagcctaccgagcttacactacatattatccgatacacttaacatacaggcaaagtattatcaaccttacaacattacgtattgcagcaaatcttatccagcatgtatcgcaagagaaaccacatatcttaagaggcttttgtatttaacattaacattaggctacacgataattaatttaaacgatcggtttgtatgcccattaggctcgcaattagtttagaccaacgtgtgcgaagtcgtatttatttaacattaccttcccctattctttttgtttataagcgaagctaaattaattaattgactgatagcttaaccttatagcaagatttttgaattaatatatacatacatagaatctatgtgtatatacatacatatatatttacatacacttataaatatgtttgagtaattgttaattaaatgtgtttccaacatcattcaaaatgtctttctaatcactatcatccgattgtccaaacatatcactggcgcgctgatatcgcgcctgagtgatcttcaagttggccagcttccgtttgtcaatggttctggagctggacagcactgggtcactgtttcccagaccgctagtgccctcattggctaccacattgatctgcgaacgggttggtattagaagtagtgactagctttataagtctaaaacacttaccggctccaaaagtccagcactggcatttgttttgcccagtttttcgcccttttgccagcccaatttactcagcattttaaaacccttattagagctaccgatttcactaaaaacgaataacacattggtcaaccaattcaagttaagatgtgtaagctgatactcacgtgttcacacaagccacc

SEQ ID NO: 29669 - DNA, 270 bp, DROSOPHILA
atgcgttcgcatcataaactttatattgcagcaggccgcgtgagctgtgcggacatcaagtgtgggccaaaggataactgcctggtggatctgcagacgcgccagccgagatgcgtgacctgtcgctacaagtgtccgcggaagcagcagcgaccggtacacaaaatatgcggctacaacaaccagacatacaactcgtggtgtgagatgcacaaacactcctgcgaatcccgctacttcatcggcgtcaagtcccagggtagctgctag

SEQ ID NO: 29670 - protein, 89 aa, DROSOPHILA
MRSHHKLYIAAGRVSCADIKCGPKDNCLVDLQTRQPRCVTCRYKCPRKQQRPVHKICGYNNQTYNSWCEMHKHSCESRYFIGVKSQGSC

SEQ ID NO: 29671 - DNA, 10712 bp, DROSOPHILA
caacaaacaaacagacaggcagacaggcaaaaaaaaggggcttgcaaaggggtaaggatacagtcaaagaaaagtgttggcattaaagcaaggctgcaaatgttctttcgcaaatcatatggttaggactcctcggtttttacatatatagctgttcagatcgctttgttttcgatgggcctaaaaattaaataattttacttccaagagcatatcgctaataacttctctgagtgcacaaagccagacagacggtgcataatgcgccaaacctacaacacatcggcggcagcagcaacaggttctttatttttagtagtcgcattttgaaaaccgcctgctcaatgtcaactcagcgtttgagacttaattgttgcctcttggccgtcgtttttgtggaaaacattctttgtgcttgactgtggtagccacagttgccgccggttgcatcatgtatcttggcgtgccactccactcgatgctccatccccatcccaatccccatagccatattcagtgccatccccactgctcgttcaccattccagctggagtggcagtgtgctccgtctaattgaatgcagcctgtgctacctttgcggcctcttaactgttacctgttaactcgagtgcgtttgccaaccctttgcctttcgtctatccgcagcagttgctgttgtcatgccgcatcatcaccatcagcatcagccgacgagcagccaaaacaatttgacatttctaaaatcgaattacaaattcaagcgcagagcgatgtcgatggccatccgcgcacttcctgcgaccacgacgccagcggaagcgcgtagagcagaaccaagccaaaacaccgaccaattagcggcaacaatgtcaaagacgtcagcagcaacagcaacacaattggcaagagcaactagccgcgaatgtagaacaattctaggtttatttatagtaagcgcatggagcgctttgcaagagttggccaattgcttacgccaggatgaagatcgctatgttggccatggccgtgacgtcaatgcgtcgtccgatgcctctgatgaggtgtcaatggcacgtgagcaacaacaacaccaacgccagcacagcaaacactcggccagttctagtcccgcaaaaagcatgcgctgcacgagagcaaaagcagcatcagcatcaactggcaccgcagcagcaacagcaacactgggcgcagcagcagcagaaggagcaacttctggccatcagttgggtggacagcctttgatggctctgttaattggattgctgctactgaattttcgcctggcggcgggtaagtagttacttagctgcatgccagccactctggctggtatctttcagatacatctgaatctgtgagactcactcgcgacgcctgcattcggtttgcatatatttttcgccacgataaatgtgtcacattatattcaaatgtgacgcaatttttcacagcccctgtcgcttgtttttgtttatccagaagatcccaaaatctgtttggctctgccaaatcgatttgatcacacaagcggcagatcaaaataatacagaaaccaaataaaaggcaaaataaaaaaaaaaaaagtgggaaaatccacgcaaatttgctcagcccacattaatatttgcaaactgctcgcgcgatttcgattagcagccggctcatcgcattcctgctgaatcttcaaagtaaacaaataagtttgttttgctcagtcaaatacctgcacgtaatttgaccagtacgaaagggtagcttcaactgttttcttccggttagccgaaggaaatgccattttcattttacaccacttgagcatggtcgttttgtttcattttttcatatgaactaagagttataaaatgccaagtcatatttcatttgaatggtatttcattatgcgaatttgaatactgattcaattaggtgtagctcatgttcaagactttaaattcactaagtgcaaagaaagtccttcttataaatcaaaagttacacagttcatttttattttgtcgtatctttggttaaatatcataataaatttttaaaaaatcagctgaagagatttgttttatattcttttttaattggctacccaaaaaagctggcacctgttggcagacgcacctgggcagcggaaagtgtggacaggtcttctccacggacatatcgaggtcggagtgctgcggctccagccagagcttctcctacacagatcgcgagctgagcagcgtggagtacttctttgccacggccattggtggcggcgtggagtgctcgccctgcatgggtgagttacacatagggggcttaagaataatccgaacttattttggagtttaccacattttccagagagctgcaagggcttcaagtgcggcccaaacaagaagtgcgtgaaacgcaagggtcggcccaagtgcgtttgtgcacccgaatgcggagctgccctgcgacgcaggacacatcagcaggagctggagctggagcaggagccggagctggaggaggagcagcaggagatgaagcctccccgcgagtcccgtagtctaagtagcgaaaataccaacttcaatttaggtttagacggcggccaacgccaacgtgctgataaccaaagaaagctgcagcctcgcgagtcgaagcatcgcagacttttgatcatagacagcagcagcaggagcagcagcaatttgccagatcagcccacaagtggcagacgcggccgggtggagatgacgggctatgagaggcgcagacatagaaacaaccatggcaaacacttaacaagatcaatgacgacaggagccaatgactcgttcccggcagacaagacgcctgcgcagtcgcctgccgcagactcaatcttagctcagtctagacttgccaacttggcaaatgctaatgaacccgccaacgacattaatagacagtcgtcgactcgagtcagacatcagcatgccagacgcatcgagcatgctccaaatccagacaatgggctaaggaaaaggcaacataagcagcagcagcagcatcagcatcagcatcaggatcgaatgaatacagaagcccagtcagcgaataccactgtgtctgggtctgggtccggggcaacgaatcatcgtcgaatctctcagttgcaacacggaagtgaaacggctgcgtcatcggacctcgctaatacccatgacttggctcatttgggcggaatctacgcgcccctgccgccggtaagtacacatgtatgtgccgccactgaccattgcctactcctcggggcccagtcggctagctcggatgcttccatttctaaccaaccatcaacactcaacagcagcattcgaatccggtttgcggcaccgacggacgcacctacaacaccgagtgccagctgcgcaagcgcgcctgccgcaccaacaacgcccaactggaggtcgcctatcggggccactgcaagagtgagtgcgccaataccatttaccatagaacatataagccatatccagtgcactgcaagaaaatcctacctaccaactaagaaatcttgccgtagaatcaggaactatatatttttagcagagcattttcgagacttgttatacatatatctatttagtgaatttctgtgttttttggactttttcgagtgtaggtggaccgggttgctcgcgtgccaaaacgcagcagcgccacaattagattagatgacaaattattgcacatttcaattacggccaacaacttgtcgccagtggtgaaatcaactggccaaccagccaaccaccatcagccagactgaagccagaaatgttgtgtaataatttaatgatacaggaagcactcgcaaacatgctcaaatgatcaataaaaacggcgcacaagaacgatgagccaggaacccaaagaactcgttggattagccgcaagcacacgacattctgcagcaagcggccactgcagcaagcagctagcagcaagcaacttgcaacacaagttgcagcagcagcaacaacagccattccagcaatctaacgctggcgcgtgccaatatatccattggaatttccaatcgccaattccgatggcgatctgcggcgaccactcattcgcattcaattgccggcagagaaatgattgcaatatttcgcgagtgtcacagttggcgccaaggcgtttcgccgcatgtccccctgataaatttcgacagtttattgccggccatataagcgcatatgtacatatatccgagagatacatccgactggccggcgagtaggatgtgcgggtacgggctgctaatcatagacattggccaactacttatttataggcccaatcagcacccatgtgcgaacggtattcgctaatgccaagaacatagttgcaggtgcaacatatagggatgattaattgacatgttattttgggaggattcaagtgaagaattcatttccaacaatggttaaaagagcatcttatcttagtttatattacatactttatttaacaaatattaattttaacaatacatattagtataacaaatacatttttctttctttctttctttcttcatcctatcccccagacagctgcagcggagtccattgcttgaacggattgacctgcgtggaggatcagtatctgatgccccactgtatcgcctgccggatcgagtgtccctgggacaacctggatgtggactccagtggctacgacgagcgacaggcggtgtgcggtgtggatgggaagacgtacaggagcgcctgtgatataaatcgaatgatttgcaaaattggacgttccatcgccgtggcatatccgggtccctgtcgaggtatgtattttggctgcagtctgcgggaatcaatcaaactaattggtatggaaagcctagttgcagttggtaaatgcaaaatgttgccactgccgctactgttgctgctgctgctgctgggtagcggcagtgcgattttaacaacaatcaacaaagaaccgcaattttgcatttgattgactcgactgaggtttccacagccagcccaagtcgagttcagttaaggcgaatcgaatggaatggaatggaatcgaatcgaatcaaatcgcgtcgcagccacaagtggttgttgccgtctgcagcttggccatatcaagttgccggctctctcggtgtttgactgaaattgctacatttgcttatacggctccatgattgccagcaatttgattagcccgtcagctctggcctgggttgggttggcttggtctgatctggtctggtctgctccactttgactatgagctcgagtacgggtgcaggcgcatccacaattactgcgaacactcgcgtcgtcggcatcattcatgcttattaattttgcggttgccatccgattgatcgactccgatttccaattaattataatgcttcaagtcggcccacgacagtaaatgcacctggaaaaatgcattagttgcccatcgatgatcgttgatttcgattcttcatgcatattcacatcaccatttatccagtccgcgttcataaatataagctaaatcatttgatattaatagtgatatctatgtgaaaaattgttattaaatgtgtttccaacatcactatcatccgactgcccaaacgaaaaatatgtacatcgattttccatttttaaaaaccgcgtgagtaataaaatgaaactaataaaatctaaaaatttatcaataaaagatctgcatagaatcattcgtcattaaattatcataatttgtaccctacttcaacaaggaaattaatagtaaatagtgtaattcatccatttgcaagtaatcattatgatcagatatttgtgcctttcgtacaacatttttcaaaaatattctggtacatgcatttaaattttaagtttctcaatttgaaggctaaagaagcgaggattagtggaattgtatttatattaaatgtattgaaacgattctattttataccaaaatccacgagaaactaaatttctctagaaacttgaatgaacacaattcgcttataaatcaagacgaagagatcagcaatctgcccgaaaggaaaacaattaaactataaaaatattaaaatcacaaaaagatattaagaaaaataaattccttcaggtggtactacttcaatcagaaatttgcgtgctcactattaaagaattttgttaaaataccgtcacatcgaccagatatttgtgggtttcgtacaacatttttcaaaattattctggtacatgcacttaaattttggttttcttaagttgaaagctagaaaaagcgaagattagtggaattgcatatatttaattgattgaaacgattctattttataccaaaatccacgaacaaactatacttctctagaaatcagatttaaatttgaatgaagaccaggaaaaggatacaattaaatgggtcctcacagaagcgaaactaaaaatattaaaatcacgaaaaattaataaaagaaaattccatcatgtgtaactattacaatcgaaaatttgcatgctcactatttcgttaaaataccgtcacatcgaccagagtttttctccagtgtggcaatcaatggtgctggaaggcgtggtggtgggcgttccgcagtcgcaccaaatccggagacgaatgcgagaacctcagaccacaccggataggagcgacgttggcggagacggacggactgaactagtttagtgtgccatgggggccgaagacaaaagagggctgccgtgctgcaattgcctgttaattgctgtgttttttgccgcaaattacagcttgtagttaatatgaaaacaaaagctgtcaatccagcggcaccagctgccgttgacaaaaattcgctccctccggtcattttgataggcattattatttatcaataatgttgccttagtcgtcctcaattttcataataaggtgttggggttgctgctctccatttcctacttgaattatccttttactgcggtacctttaaattcgcacacatttcacagcaaactacttcggctaaagcaaggacactagattcatcacaacgattcctaatcattggggaggacttttagcttaataatcaattttataacttcacctatttgttgcacctttcattggactttgatgatcctacaatttctaatcgcttgggtggaatattttagtttaaacacttttataacttcacctatttgttgcatatttcattgcaccttgtctcaatattgggattcatcacatcgatgaatcaattaattaaataacttcacctttttgttgcacatttcattggacttcgatgatcctccgatttctaattgcttgggtggaatattttagtttaaacacttataacttcacctatttgttgcatatttcattgcaccttgtctcaatattgggattcatcacatcgattcctaatcgttggggaggacttttagtttaaaattcaatttaataacttcacctttgtgttgcacatttcattggacttcgatgatcctccgatttctaattccttgggtggaatattttagtttaaacacttataacttcacctatttgttgcatatttcattgcaccttgatgatcctcttcaatattggggttcatcacatcgattcctaatcatttggggaggacttagtttaataatcaattttataacttcacctatttgttgcacattgcattggacttcgatgatcctacgatttctaatcgcttgggtggaatattttagtttaaacacttttataacttcacctatttgttgcatatttcattgcaccttgtctcaatattgggattcatcacatcgatgaatcaattaattaaataacttcacctttttgttgcacatttcattggacttcgatgatcctccgatttctaattgcttgggtggaatattttagtttaaacacttataacttcacctatttgttgcatatttcattgcaccttgtctcaatattgggattcatcacctcgattcctaatcgttggggaggacttttagtttaaaattcaatttaataacttcacctttgtgttgcacatttcattggacttcgatgatcctccgatttctaattccttgggtggaatattttagtttaaacacttataacttcacctatttggtgcatatttcattgcaccttgatgatcctcttcaatattgggggtcatcacatcgattcctaatcattggggaggacttagtttaataatcaattttataacttcacctatttggtgcacattgcattggacttcgatgatcctacgatttctaatcgcttgggtggaatattttagtttaaacacttttataacttcacctatttgttgcatatttcattgcaccttgtctcaatattgggattcatcacatcgattcctaatcgttggggaggacttttagtttaaaatttaatttaataacttcacctttttggtgcacatttcattggactttgatgatcctccgatttctaatcgcttgggtggaatattttagtttaaacacttttataacttcacctatttgttgcatatttcattgcaccttgatgatcctcttcaatattggggttcatcacatcgattcctaatcattggggaggacttagtttaataataattttataacttcacctatttgttgcacattgcattggacttcgatgatcctacgatttctaattgcttgggtggaatattttactttaaacactttcataacttcacctatttgttgcatatttcattgcaccttgtctcaatattgggattcatcacatcgactcctaatcgttggggaggacttttagtttaaaattcaatttaataacttcacctttttgttgcacatttcattggactttgatgatcctccgatttctaatcgcttgggtggaataatttagtttaaacacttttataacttcacctatttgttgcatatttcattgcaccttctctcaatattgggattcatcacatcgattcctaatcgtttgggtagactttgttgcacactttcattggaccttaattatcccccaacattgcggacgggaaatctcgaacacatcgaaggtcaatgaacccgaggagatgccaagaacaactttattcgccgactccttttgatagcgccatatacatacattcttatactattttattaatcattctgaccttcaatatacacgcctgtacgcctgttttttgaaaatatttgtttaaatggattttaaaattttgtatgaattttagttttatgagaagttttgataaaaaaaatttgtctaaagatacaccagtgaaaatcgtttttatgtgtgttcacagctcaaagaacagaaaaggaatgaactcttctttacaaagtcttataaatctcgaaacttgtcgaattttttatcacagccgcctgcgggaacttctaaattttacatatgagtgttccttacagtatcatacatttattgaccgatcgcctgtctatctttttcaattgcttgcaacggtagccggttcctaaataaagatcattagccaccattcactcttgcttttagctcagtccccctagcagcaatcacatctcaaaggccaaagacaagtgtgcgtgagtccctgcagtttgttgatcttggatccccatccccatccccatcaccatcccgcccaagtccctctggtgatgagcctgctccttccgcttccctgggttccttcctgcgctgcttaatgtgcgtctggtactcgttatgttccgtggatcgtccgccgataagatagtgctagcgtgcgcgtgagttggttcctgagctttttatcttcatggttagtaagtttatggttctcgggcatttgtttgtttgtctgctttcacataaatattttcagtcgcgatccgggctcaggctcgaaagtattctggctatgatggaggggcacatgggaagggggccaagagagagtgagagaccccgtggcacaagccacgaaaagttgccgttggtcccaagaaatatgactacacgtacaaaccattaaaacgccattttcgcaacgttctgcgtcgacgcaggttctgtgattgcagctctcgaggagtgggcactgcggcggggtgcccatgtcccgagtgaaataaagtccggtctggggtctccggctgtccagctgtccaactgtccacgtcgtcgcgacgtcacttttgtctggtggagcgtctgggccttcttcctctctgtcccggctgtagtttacgatcgtattaaaatcaccttaaacaacacgcaatgccaaaatggcccaatggccaatggccagtccacccggcttggcctggccagtgctggtctgaatgggaacacgcatataccacgaccagaccagacgcatgacccacgacgcatcccatcgcagaccggaccagaccagaccagaccaacagagcccagcccattccagttgagcccatccaatatgatcccatcccattataacccatacaatgttgcaataagttccgccaacggccgccggcgttgattaaaccacgtcgacataacaaattatagttggctcgccttgtgacggcattatcagccataaccagcggtg

SEQ ID NO: 29672 - DNA, 1771 bp, DROSOPHILA
atgaagatcgctatgttggccatggccgtgacgtcaatgcgtcgtccgatgcctctgatgaggtgtcaatggcacgtgagcaacaacaacaccaacgccagcacagcaaacactcggccagttctagtcccgcaaaaagcatgcgctgcacgagagcaaaagcagcatcagcatcaactggcaccgcagcagcaacagcaacactgggcgcagcagcagcagaaggagcaacttctggccatcactggcacctgttggcagacgcacctgggcagcggaaagtgtggacaggtcttctccacggacatatcgaggtcggagtgctgcggctccagccagagcttctcctacacagatcgcgagctgagcagcgtggagtacttctttgccacggccattggtggcggcgtggagtgctcgccctgcatggagagctgcaagggcttcaagtgcggcccaaacaagaagtgcgtgaaacgcaagggtcggcccaagtgcgtttgtgcacccgaatgcggagctgccctgcgacgcaggacacatcagcaggagctggagctggagcaggagccggagctggaggaggagcagcaggagatgaagcctccccgcgagtcccgtagtctaagtagcgaaaataccaacttcaatttaggtttagacggcggccaacgccaacgtgctgataaccaaagaaagctgcagcctcgcgagtcgaagcatcgcagacttttgatcatagacagcagcagcaggagcagcagcaatttgccagatcagcccacaagtggcagacgcggccgggtggagatgacgggctatgagaggcgcagacatagaaacaaccatggcaaacacttaacaagatcaatgacgacaggagccaatgactcgttcccggcagacaagacgcctgcgcagtcgcctgccgcagactcaatcttagctcagtctagacttgccaacttggcaaatgctaatgaacccgccaacgacattaatagacagtcgtcgactcgagtcagacatcagcatgccagacgcatcgagcatgctccaaatccagacaatgggctaaggaaaaggcaacataagcagcagcagcagcatcagcatcagcatcaggatcgaatgaatacagaagcccagtcagcgaataccactgtgtctgggtctgggtccggggcaacgaatcatcgtcgaatctctcagttgcaacacggaagtgaaacggctgcgtcatcggacctcgctaatacccatgacttggctcatttgggcggaatctacgcgcccctgccgccgcagcattcgaatccggtttgcggcaccgacggacgcacctacaacaccgagtgccagctgcgcaagcgcgcctgccgcaccaacaacgcccaactggaggtcgcctatcggggccactgcaagaacagctgcagcggagtccattgcttgaacggattgacctgcgtggaggatcagtatctgatgccccactgtatcgcctgccggatcgagtgtccctgggacaacctggatgtggactccagtggctacgacgagcgacaggcggtgtgcggtgtggatgggaagacgtacaggagcgcctgtgatgtggcaatcaatggtgctggaaggcgtggtggtgggcgttccgcagtcgcaccaaatccggagacgaatgcgagaacctcagaccacaccggataggagcgacctcagtccccctagcagcaatcacatctcaaaggccaaagacaagtgtgcgtga

SEQ ID NO: 29673 - protein, 569 aa, DROSOPHILA
MKIAMLAMAVTSMRRPMPLMRCQWHVSNNNTNASTANTRPVLVPQKACAAREQKQHQHQLAPQQQQQHWAQQQQKEQLLAITGTCWQTHLGSGKCGQVFSTDISRSECCGSSQSFSYTDRELSSVEYFFATAIGGGVECSPCMESCKGFKCGPNKKCVKRKGRPKCVCAPECGAALRRRTHQQELELEQEPELEEEQQEMKPPRESRSLSSENTNFNLGLDGGQRQRADNQRKLQPRESKHRRLLIIDSSSRSSSNLPDQPTSGRRGRVEMTGYERRRHRNNHGKHLTRSMTTGANDSFPADKTPAQSPAADSILAQSRLANLANANEPANDINRQSSTRVRHQHARRIEHAPNPDNGLRKRQHKQQQQHQHQHQDRMNTEAQSANTTVSGSGSGATNHRRISQLQHGSETAASSDLANTHDLAHLGGIYAPLPPQHSNPVCGTDGRTYNTECQLRKRACRTNNAQLEVAYRGHCKNSCSGVHCLNGLTCVEDQYLMPHCIACRIECPWDNLDVDSSGYDERQAVCGVDGKTYRSACDVAINGAGRRGGGRSAVAPNPETNARTSDHTG

SEQ ID NO: 29674 - DNA, 6996 bp, DROSOPHILA
gctagcccctccaattgcgcgattggcagccaatcgcacctcagtcgcgacgaaaaacgacgacgacggcgcgtttacggatacggatacggctgcggaagtacggctacggctacggctacggcactacggctacggctaatttgtcgaacggatcacccaagagcggagctggcgagccgcgttacgtatacgtcgaagtgcaagcacgtgactgactcggagcgaccgttgcacgctgcttttataaacagctacatcgggagatggctcgaatgtctggcaacgcttcgcatgcaattttccgcgcgcgctctctctctctctctctctctcactctctgtctctctcttgctctctctgaagtgacttttccgagccctgttcggcaacagctgattcacttgcaggcccagaggttgaggttacagtcaaaagcctgatggtttttcccaaactcccacgcagtaatagtttgtcacaccagaaaacacagaaaatcgcacagcacacggtgtaattttgactgagtaactctcttgtgaggaccgcaaaaaaaaaacagggacctagcaaatgcaggacaaaatcaagccaaacagccgcactgaccacgcacaagctaatctaccgcaggactaagcgaaaggcgaaggacgaacctgacccacagttggctcctgctggcggctttcagtgctccaaaaagcgagggagatggcgaaacgcttgggtcacatgcgcagtcgccaatcagctgtttgacctacatacgagcgccagttcatctgtactttcaagcgtgcaaacggggggcgtgtcgggcgtcccgaccccgcctaatggaactcattagatctcggccatgaaaagttcacccaaaaagctgtcagcaacaggtctgtggaaagctaagtgaaagcttttccatggcataaacttaacttcgaagtggtttcttttgctgcttttccagctttatcgtggtatattttcccgctaaactttatagcttttcaccccgactaaatcgaaactcacctgagcccttatggccgccaaatggatctgcttggctcgcaggtcgaacttcttcatggacaaatcttcttgaagctcattgaccttgttgtacagctgaccctcgattccacgggtctgcgttcgatttagagcctcgatggagtcctacgagaggaaaagtaaccagtcaaattgattatttaaataaatatttttgtaatagatcttgtaaaagtttacaatttttaagaataaaatgtatttgtaatattatagatctacttgtaaaagaaggctagttaaaagctttcataggcaataccccaaataacatatatttaactatcattaaaagcaatttcctgaaaatgtcttctaatgagaattgccaaggaaatcgccgcatttcggaaaatcagcattggaacaacataaggctcaattgtaaggccctcccaagattgaagagcttcttctactttttcgatttggaaaaaggatgcaggattatagcgggctttgaggctttggtgagcgtaatacagatattcagtatatatcgtttatccaatcaatcagtgccaagttatatgatacctgatcccttttggatcacaaaaatcgatagggaaggaataatcaaaagaatgttgctttatcatacaagtaatcgtttttgcatgggactcggattggttactgttctcaattctctgctgttgctaattggaagcaaatgggtgagagtcaacagatggtattcgaatataaaggctaatacccatactttttcgtcaagggccaccaggtttgcctctttctttggatttatataacggtattcaccactctcatatcgaatataaataataacttaaggaacccaaattttgcacaaacttttctaatagttccatcattgagtaagtgccaaaacgtgaagtcattgcaaaaaaaataaacaatataacctctaacagctctggagggctatttcacattgatagtcgcatctttaatttgtaaattccaagacaagcaagatgagtgtaactcatacaccgaaatgcacacttcagatggcaaagagtgcagttctatcgagaataccgaacagatataagcggttttttaattgtatgactttacatagttttttgtgaaagttaaaggataacagaaaaaaaaaacaattgtgatattggccacccattcaaataaaatctttggaaacataacaaaccattttttttaagtaccgacatggctgcgatatcgtactgtgagcttttatcattttgtgtattattgtggattattcatctcacctgcagctgacgtatttgcaattccaattcgatggcctcccgcttcagcgactccaacgcggagcgttgtgacagtgtggagtgccggtcgaagaccaactcgttccgcaggcagggcgtcatctcctgcggcggacaggtgcccacaaaaacaatcactttagtccgccggacaggtgttatatgcactactactcacgttgtggtcgcccgcctcctcgccgacctctgcttgcggcgatgcaaagagccgtctgggaatcttctgggcctgcgatggttgggccaggagccggacgaagttcactagatcctgttgaggtgagacagctgcgcactggttgctcagactgttgtaccgcttagcttggtcattggcctgcggaaaaattatgatttggacacattattgacacagatgttttggtttcccttaaactgcagttgcatggagacttaacttatctttatctttactttcatattaaattgtgcagttccaatacccttaaattttatagttatctagatccttaagcccttctatattcttctttgtttgaattttattccagtatttattgttgtatattttttcatcgagctacctaccaattcatatatgtttttttccatttcctcataccctacaccggtaaaaaaaagtgtcgcaatcatcaggcaggacctgcccacgcattaggcaaattaccagggcaaattgctacaccgcgcaattataataatcgggtacaaattactgtccaggaaacaaaaggtgctgcagaaattaactcgaattcgaggtgccactgggcgggcaactaccactatcacactataccatgtttatggggtgcgacaaccacctgctgcagtgataaatcactggtcggcggggcactcaccttgccggcaattacttctgcgccctgcatcagcgagtcggacacaatggcgaccaggtcgttgtggatctcctccagctcctgcatctgctggggcagggtgtccgtgtggtaggcctccagcattccatttgtggcatgcagctgctgcacgtacgcattatgggcgtcgatgtattcggtgagcgagtgctggctgggattctgtcggtgggccaggtggcactgcttgtagtccacacggcactgtggatggggagagaatggcaatggcaatggcaatggcaacggcaaccaacaaaagggagggggtaaaggttcacaagggttgggtggtcaatttatgggtaatcacagaaaagggtaaattggcacacgcacaatggacagagcatttgacgggcaattggaccggcccacactgcgtatgcgatattttctgcttgaacagagttttaaggcatcttaaaggcctgttcggtaagattacttttgggacttcaaaaccttgaggactcaacgcttttttgttaattaaactcacctttgacagcttctcttcagtctttgcgataatagtctcaaaagactccctgtgtgtaaatattttacggctttgaactttgcgatgaaaggatttatccagcattggtcgcgacacctaaagaagtgggtaaataaattatgtatggcatatctttcagtcccctgccagttttacgaatgaaaaaagggcaaatcatcgtgaaaaatgaaaattaaatgtgtaagccaagtaaaacaaagcaaacgccgcggcaaaacaacattattcggcactcgaaaaacatatgtcatttcccaaggccccgcagcgccacgcccccactaattaaccataattagagtctgccttttataatgcaaattgggatttttttttgtgctgcctcaaggccccaaaaacacacatatggctagcacatccgatcgatgtggtaactggtacaaataaaaattatcatatattattattagtataaatctggctattgtttcaaagggaaagtaaatcaatgaattcccgcattaagttaattaaaaatattttagggcaagtgcacaacagtcgtccgtaaagttctattttcagtgaaggtaactgaatatttaacgcgacacgataatgccattaacccatttcggtttcggcaactttctcgacgaaaaccgtaatttaagggactctcacctggcgggaaaggacgctggccacgtcgttgcaggcctgtgaatcggtttcgacctcctgcaggaatgtttcccatgcctgaaagatggccaagtggcaggcgggtctgcacgccactcggttgggtttttggcaactgaatttggctgggaaaatcgtttgggccacttacctttctttgcgtaattcggcattcttcttgcgataattggacaccgcaacttggagggcagttgcgtgttcctcgtacagacgggatagtgtttcggagaaatcggatactgtaattgaattaggttgagtgagctttaaggtcaaataaaactaagaggcagtcacgctttatgacgagccacaaagtgcattagacacactgaaagcaccggaaacggatatgccaacaggggagaggtgggcacttccggctaaagtctttgtgcttttctcccaaggcagtgaacaaaaaataccttagacaataaaatgtatttatttatttacttttgaaacatttaaatgttttaaaaactttttacgagtgtgattttttcacatttcccatactttggtttgcctgtaacaaaagtagccagtttatgcgcagtaaagcacaaaaagtcagcctctttaaaaggattgactgtctgttggataatccatcacatttacgattactcaggcatatatgaatatggatgtttggcttttagccacttaagctgccagtttatggcccaatcgttttatggcctgccagatacgcgattatagcgtcacggcaacaggttgtcaaatgtgttgaaactgaaaagtttctgacactgttgtaggcaactttaatttaatcaataattttttattccaacttctctgatttcacatgcagttcacagcaaaaatgttattaaaaactttacaggctacacagaactactggaaactctgatgttcgccagtgccaaaggtgccatccgctgggacaactttctccgacagcgccgtaattcaaagtcaaagttatgtcgaaaagttgcagctgtgtcaggggatgttgttcgttgggtaaacatactcatagttggaatagcgaatttacgaggctttgctggctgaagagcctctgcctgaactgatttatgtctcaatctgacgaaccgacaaagacaatcggcaatcgaaatcaataagccataaaagcgactacggaaacttatcaaataaaatgctgccacataaattgcttttcgttttccctttcagggcgcaaccaacgcccgctgtttgtcacttttttgtgccacctggcgagcgtgtcaggtgtgaaagtctggcacacgtcacgtgtactcccatgtgtcggaatgggataggagttggaaatatattggcttctggtttaactcacctgttttaattaacttaaagttgacattgttctgtgatttgaatgcctcgttcaaactgctgtgactgtaatccttgagcacgccgttgtaggacgccatgctgccgccctgggggctaagggaaccacctcgtggtcccctccacccaaagatcctcctcctacgacttcttcgaccacttgaagattttaccgaagaacctgccgacgacaatatcgttatcactcactggacttacaacaaatgtaatccattttttactcaaaccaaaaattaatcaactcgtaaaaccaaacaattaaataaggaaaacaaacagaacgcagcataaattccaaacaaaacgaaccgaattgaaagcaaacaaatgagaatttccaaacgaaatgtgatttgatttcgggtggtgggagtaaagtatccgtcaggcaatgtcaggaattattttggccacgccatagtaaatacacaagtcggccctccattcccccaaacccctggccaatcaaacagatcgctgccttttgtatttatgcataaataatgagtgaaggcagctccccatttgccccccacggcctttcactttttctatcgctcctattttcgccttgcaccaagacggaaattcgagtatttcagtccaagacagctccttaaacccgagccccattaccaaagtcaacaaaaggactcaaacaacagcgggcaaaatggtggttcacccccttgaatactaagctctaataaatgatttggttagttattggtaatttaagaataaaactttaattttgtatttatcaagcaatggttctcaaaaaggttttacttaaagatagaagtataccatctcgatttaacactaataaaaattagctgtgatgctttttagtcctatatctttaagctttactgtatgtaggttcctctgacttgctggtctttagttcctttttgctctgatgtttggcgccaaagtaaaagccagggaagatggaagtcccctcatttaaaattcaatcaataaatgaagcgtaatttcattgccgcgccgagagtcgagatttcgttagaacacattcgcagctaaaaagac

SEQ ID NO: 29675 - DNA, 1173 bp, DROSOPHILA
atggcgtcctacaacggcgtgctcaaggattacagtcacagcagtttgaacgaggcattcaaatcacagaacaatgtcaactttaagttaattaaaacagtatccgatttctccgaaacactatcccgtctgtacgaggaacacgcaactgccctccaagttgcggtgtccaattatcgcaagaagaatgccgaattacgcaaagaaagacccgcctgccacttggccatctttcaggcatgggaaacattcctgcaggaggtcgaaaccgattcacaggcctgcaacgacgtggccagcgtcctttcccgccaggtgtcgcgaccaatgctggataaatcctttcatcgcaaagttcaaagccgtaaaatatttacacacagggagtcttttgagactattatcgcaaagactgaagagaagctgtcaaagtgccgtgtggactacaagcagtgccacctggcccaccgacagaatcccagccagcactcgctcaccgaatacatcgacgcccataatgcgtacgtgcagcagctgcatgccacaaatggaatgctggaggcctaccacacggacaccctgccccagcagatgcaggagctggaggagatccacaacgacctggtcgccattgtgtccgactcgctgatgcagggcgcagaagtaattgccggcaaggccaatgaccaagctaagcggtacaacagtctgagcaaccagtgcgcagctgtctcacctcaacaggatctagtgaacttcgtccggctcctggcccaaccatcgcaggcccagaagattcccagacggctctttgcatcgccgcaagcagaggtcggcgaggaggcgggcgaccacaacgagatgacgccctgcctgcggaacgagttggtcttcgaccggcactccacactgtcacaacgctccgcgttggagtcgctgaagcgggaggccatcgaattggaattgcaaatacgtcagctgcaggactccatcgaggctctaaatcgaacgcagacccgtggaatcgagggtcagctgtacaacaaggtcaatgagcttcaagaagatttgtccatgaagaagttcgacctgcgagccaagcagatccatttggcggccataagggctcaggtgagtttcgatttagtcggggtgaaaagctataaagtttag

SEQ ID NO: 29676 - protein, 390 aa, DROSOPHILA
MASYNGVLKDYSHSSLNEAFKSQNNVNFKLIKTVSDFSETLSRLYEEHATALQVAVSNYRKKNAELRKERPACHLAIFQAWETFLQEVETDSQACNDVASVLSRQVSRPMLDKSFHRKVQSRKIFTHRESFETIIAKTEEKLSKCRVDYKQCHLAHRQNPSQHSLTEYIDAHNAYVQQLHATNGMLEAYHTDTLPQQMQELEEIHNDLVAIVSDSLMQGAEVIAGKANDQAKRYNSLSNQCAAVSPQQDLVNFVRLLAQPSQAQKIPRRLFASPQAEVGEEAGDHNEMTPCLRNELVFDRHSTLSQRSALESLKREAIELELQIRQLQDSIEALNRTQTRGIEGQLYNKVNELQEDLSMKKFDLRAKQIHLAAIRAQVSFDLVGVKSYKV

SEQ ID NO: 29677 - DNA, 2598 bp, DROSOPHILA
tgcatgaagggcgtcttttgacggaacttcgcatttggcacattcaactgatttgcgctcggattggtaatcgtattcgtattcgtattcatattcagattgggactcggatcatccgcctgatctgctgcagctgcaacaagcgactcctgtggcgaggctagttgtgttttgcatagtttcgttttggtgtggtttttgttttgttttggggggaagggaagaggatttcatattgatttaatcacattaacgtctagagtcggcaaatttggaatttgtgtgcttgatagataaactacgtgaatggcagcgtcgcacccgcaaggtatgcaacagattctagtttccaccacacaattgtttacagttcaatgggcaggaaatcatcatcatcatcatcatcgtcgtcgtcagtcgacgtctatgaagctcaaaggatattttacaatgcgtttcggtatgttgctgtgcatgtgagagggtgtgttggccgaaccggtgtgggtaaccgaaggagccagggaaattgctaaagttcttgctcgctgaggtctggagaattgcgacacaaatcacaagtgccacaatctgtctgccccacgagtgccataaatccattgtgaaatcaactgatataccagccactcccactcggcattctcttttggccagctcgaatcaataagtgtttttgccaagcgacaaacaaaatgttgctgatgcggtctggcccaaaaggataaaggtaagtggagtggagcaaagtggagaacgaatcgcattcgcttggactctcatattcaaggtggaatcctggagcaggacatgctaatgccacgatgcatacacagttcgggcagggccagtcgaacaaattgttggggaatttcgcttgccagcacatcgcatttcccatgcaagtcgttagccggcctcaagcggtttgttagtatgtaaggtatgtgggtttagcctgttttctttttgttttctagcttcagtgtatttctgtgctcttgtacttctgtttcgtgtattttttgttttctggggccatggctatgatgctggtgcgtgccagatactcactttcttcctcgatatcaacacgattctccagctccgatgtgctcttctgtcgccggagcagcttctgctttggctggcagcgcggcagattgggggcgcaatctccatgggcgttcagcttgcagatgcggcagcgtaatccctggcgtgtgtgccctgcaagcgaatagggttaggaatgtttgcttacaaggagcgggagcagtcccttccagtcagtgaaccaaatatcctaactacttttccgcatacccacctctcagaatctgggagcagacgtcgcaggccgttatcttcttgtaggtgtactcctgcagatggtggctgccatccagattgggacgcagcggctcggaggctgtgctggaggctccattgcgcctgtgagggagatgcaaccgaagggcgttagtgagtgtacccgttaatggagtcgcaaatgttgcactttccccaggagccaacacgaagcacagttggccaaaagcggccaaatggctaaacatatgttcataaatcgcatgaacatacattgcatttgaaggctgctcttatgctattttatgtttctgtatatctatacgctatgtgcacagtgacaacagcaaacaatggcgaatgaacaatggtgtgtggacaatggacaacggacggcggacaaaggacaatgcacattaatcagaccgatggtgcgtatgtgtgagaatgtttgaacaagaaacacattaaaaagtattgtgtttaaaataaacgcacacaatcacaagctttgtgcggtactcaacctaattggattcacaggaaattggtcgattaatcactgccccgagtattttacaatctcatgatcacgtgctttggcccgatctctcaatccatggtgcttatggaaattattgtgttatttatactgtgcatacacatcgaattcatttcagcaaattcgtttcatatttatacagcgccagagggagagagatatacagatacagccaatttgcaaggacttcccgccgcttcggcccgctttgcccctctggcacttttgttttatttaccagggaaaaaccgaagccccgaatggcggagtggagggccggcaggagcagaaggactcacaatggggcaattgctgagcactgggcagaattcaggctcagaggcctaggactcgacgttgattgtttgtaagtggcttatgcacacagatgaacacacagacggctggcaaataaattgtgctgagcacattgccacaatatttataaagttgtttgttgcaaatgcgtaaagtatacaaaaacgtcagatttcgaaggcgtatgggctggtggcgttggaaagtgcaactctgtgcgaattggcagctacaaatgaacactgacacgatgacatttaatatattcgtaaattcttaagctaaatattgatctaactaactgacagacttagccaacaaataatacccgaggttagattatctcggccatgtacaatttacaggta

SEQ ID NO: 29678 - DNA, 498 bp, DROSOPHILA
atgtttagccatttggccgcttttggccaactgtgcttcgtgttggctcctggggaaagtgcaacatttgcgactccattaacgggtacactcactaacgcccttcggttgcatctccctcacaggcgcaatggagcctccagcacagcctccgagccgctgcgtcccaatctggatggcagccaccatctgcaggagtacacctacaagaagataacggcctgcgacgtctgctcccagattctgagagggcacacacgccagggattacgctgccgcatctgcaagctgaacgcccatggagattgcgcccccaatctgccgcgctgccagccaaagcagaagctgctccggcgacagaagagcacatcggagctggagaatcgtgttgatatcgaggaagaaagtgagtatctggcacgcaccagcatcatagccatggccccagaaaacaaaaaatacacgaaacagaagtacaagagcacagaaatacactga

SEQ ID NO: 29679 - protein, 165 aa, DROSOPHILA
MFSHLAAFGQLCFVLAPGESATFATPLTGTLTNALRLHLPHRRNGASSTASEPLRPNLDGSHHLQEYTYKKITACDVCSQILRGHTRQGLRCRICKLNAHGDCAPNLPRCQPKQKLLRRQKSTSELENRVDIEEESEYLARTSIIAMAPENKKYTKQKYKSTEIH

SEQ ID NO: 29680 - DNA, 3476 bp, DROSOPHILA
gtcatttgcatcctgatacagcatgactcggggtggcaagagatctggcacaattcttattgcttttcccttcatattttgaaattgttctataaagattggctttgtccctgataaatttacttcgtctacgttaggatcttgaaaatagcgacaagtgtatatgctttttgacttggtaaagttttctctcaccaacgctatgttatactgctccttttgtgtgtatatattacaaatattacttggttgaaaatcttcttttaataaaactagtctcctgttccgttgcagctttatggaagtactattaggtcctccattgtctatgtcaggtccacaactgagtatcagagtaaggctgctgaaattccattcaaaattcatgctatccgacaccagcactacggcaacatctacatttttaatcactgaatgaaattcacaatcctttccatatacaagcaatgtatcgtaaaactcctcatttcgcagttttagaagaaggttaattagctcgttatccatgaggctctgattttgaacggaaatatccgctatgtgggctgccatatatcccaggaagcagagtagaatgaccaaccatgtcattgttttcaaacaaactgttttaatactttgagttgtgctcctttttgtttcatttatcattcatacaaatggttctcatattggggccttacatatttgaaacttgtcccaacaatttccagtgatgttagccttgtataaactgtttattaaaatgttagttggaagggccagcagtttaaaaccatatcgtgtaaaaatctacaggcgtgacaggtggtattgtaatttgttttgcatttttctgttttaaaaaattcctgaaaaaggtacatcaacggtaagctgttactctacatccgaattgaaagttatgtcggccagcttatttacacgtttaattatttttgtaaagtatttaaagcaatttatttaatatttggaatttttaccatctacacctccataatcgtttgcatctctccccgcaacgcaatatctccagtataaagcaaaaactacttataaacatagctcccaaataaagctttagtatccatgagatatcgtccagcaataggctcacctcttcatttctcttcctactaagatcctccatggatgccaggccaagtctgaccatttcgatgaagctttgactcttccagaaagtcaccaggccaaactcatgctgccgcatcatgtggtcttcgaaaaggtgccgatggggcaagtagcgtcgcaacgggggactgaacaacataaactgattaaaacagagattggtggccaggtaaaaagcgggctcagcgaatagcttttgctgctcttcgtagccattccatcgatcgacagacaccggaaatataaaacttgtgttgaaggagtcgcgcaggactagatattcggaaaggtcgtcgaagatcagcagatgatcttcacttatttcccgaaaatgtgagttgttcagggaggtgaggacattcacttccaacctgctaattgccattttaagcgaagagtttccaatatctcgaaaggatcgtatatatggttcggatggaggctgagtgaaatacgactgcaggtaggcctcatacatggtggtgatcataacgctggcgaagcacaggacaaagatgatcagcttgaggtgcttgcttggatttggcggaaatggaaacgattgacccaaaagtccacgtaggctcttgtcgttcagcaggatgttggccagggtgaggttcttccaggacaaatgttgagtgtagattatcagaacggagaagagacacaacatgacgaagatgatgctcagaaccaggggatccactatcatcgaatacaccagattgtagggcatcttggcaggaactggtaccattagacagtagccggtcagtaggtaaggataccatacggaatccatattcttaaactgcaaggaactggccagtgccgttccaatatccacaatatcctcattcacccagttcattatatccaggacgctgggcttcttggcccccaacttcgatgtatctatgaaatgcagtttggcattcagtttctgggcataggtatttatcatgtgtcccaggtagcccatcatcttagtctcgccagacttttcgtctcgataaaggattgttcggggcaccaaactatctgccaccgttcttatagtagcaccacgcatattctgaaagttctcaatgtagataggttggtccttgaagaagtgtccttctacatagttgggtgtctgaaagaggcgacaagagtagaaggtatccgattgatcgaagtccgacttaaccatggcaatgttgtgctgctccttcaacgagtatctcatacaaacagattcgggctcactattgtcctctagataaatcagacgcctggtcctctgcaacttcattagggtgtacgagttctcttcattttccgcatcatatccacagcttaatattaagatggctgtactaaagctccaatcataatcggtacttcctgatggtacagtgactgcggatatctctagtttcctcagtaacgaatgaaacacgcactcctttccgtagatcaacaaggtattgtactcttcctctagatttagtctcgacagtactcgaaataggctaccttccaacagttctagatctctggactgagtataattaagtatctgtgcgctcaactgtccaatgaagccaagaataatgactgaccacccaagagccatcacgaaactgttgacaatcctcacaggacaagaactttttgttaacctttcacaaatgtgtcacaatatttcaacctcaatccatttaaatggcatttaaaaatcttgttaaaagtgtataccagcttatcatgccatttccgtgttcaggtcgaaccaagtatggcaattaacggctgcactttgaagtgtttggctgacatttatgcgggacacaagattcatttaactgagaatgtccccacctgggggtaaacccaaaactgaaaaatgttttggccttgtgcgtgagattgctccatttgaatggctggaaaggcctttaacaacttccgctgcagatcgaaaataaactcgaacaccaagtgcattcccatttcgatgcatgttttaagagctctgggaagacagacaattcgattgctaaaacgaaattttccggcaatttgagccaagtcaagctcattgcattcgattttgtgactcgcactgggtcccgcatggaaagtgtagaaacgcaaacatttcgttttatgctcttaattgcagtgcaagtggatttcaattattcaaatgaggcgctgcacttccgagccgccacaaactggtccgaacgccatgaatttttggccaacaaacaaggtacgagggatttttggggagagggcggatttgt

SEQ ID NO: 29681 - DNA, 1476 bp, DROSOPHILA
atgaagttgcagaggaccaggcgtctgatttatctagaggacaatagtgagcccgaatctgtttgtatgagatactcgttgaaggagcagcacaacattgccatggttaagtcggacttcgatcaatcggataccttctactcttgtcgcctctttcagacacccaactatgtagaaggacacttcttcaaggaccaacctatctacattgagaactttcagaatatgcgtggtgctactataagaacggtggcagatagtttggtgccccgaacaatcctttatcgagacgaaaagtctggcgagactaagatgatgggctacctgggacacatgataaatacctatgcccagaaactgaatgccaaactgcatttcatagatacatcgaagttgggggccaagaagcccagcgtcctggatataatgaactgggtgaatgaggatattgtggatattggaacggcactggccagttccttgcagtttaagaatatggattccgtatggtatccttacctactgaccggctactgtctaatggtaccagttcctgccaagatgccctacaatctggtgtattcgatgatagtggatcccctggttctgagcatcatcttcgtcatgttgtgtctcttctccgttctgataatctacactcaacatttgtcctggaagaacctcaccctggccaacatcctgctgaacgacaagagcctacgtggacttttgggtcaatcgtttccatttccgccaaatccaagcaagcacctcaagctgatcatctttgtcctgtgcttcgccagcgttatgatcaccaccatgtatgaggcctacctgcagtcgtatttcactcagcctccatccgaaccatatatacgatcctttcgagatattggaaactcttcgcttaaaatggcaattagcaggttggaagtgaatgtcctcacctccctgaacaactcacattttcgggaaataagtgaagatcatctgctgatcttcgacgacctttccgaatatctagtcctgcgcgactccttcaacacaagttttatatttccggtgtctgtcgatcgatggaatggctacgaagagcagcaaaagctattcgctgagcccgctttttacctggccaccaatctctgttttaatcagtttatgttgttcagtcccccgttgcgacgctacttgccccatcggcaccttttcgaagaccacatgatgcggcagcatgagtttggcctggtgactttctggaagagtcaaagcttcatcgaaatggtcagacttggcctggcatccatggaggatcttagtaggaagagaaatgaagaggtgagcctattgctggacgatatctcatggatactaaagctttatttgggagctatgtttataagtagtttttgctttatactggagatattgcgttgcggggagagatgcaaacgattatggaggtgtagatggtaa

SEQ ID NO: 29682 - protein, 491 aa, DROSOPHILA
MKLQRTRRLIYLEDNSEPESVCMRYSLKEQHNIAMVKSDFDQSDTFYSCRLFQTPNYVEGHFFKDQPIYIENFQNMRGATIRTVADSLVPRTILYRDEKSGETKMMGYLGHMINTYAQKLNAKLHFIDTSKLGAKKPSVLDIMNWVNEDIVDIGTALASSLQFKNMDSVWYPYLLTGYCLMVPVPAKMPYNLVYSMIVDPLVLSIIFVMLCLFSVLIIYTQHLSWKNLTLANILLNDKSLRGLLGQSFPFPPNPSKHLKLIIFVLCFASVMITTMYEAYLQSYFTQPPSEPYIRSFRDIGNSSLKMAISRLEVNVLTSLNNSHFREISEDHLLIFDDLSEYLVLRDSFNTSFIFPVSVDRWNGYEEQQKLFAEPAFYLATNLCFNQFMLFSPPLRRYLPHRHLFEDHMMRQHEFGLVTFWKSQSFIEMVRLGLASMEDLSRKRNEEVSLLLDDISWILKLYLGAMFISSFCFILEILRCGERCKRLWRCRW

SEQ ID NO: 29683 - DNA, 7959 bp, DROSOPHILA
ggatgagcgcaggtcggatctgatcggatcgactctgataggattatgccggatcagagctggagcaagtccacgacttcccatgacaaattgatctgcctgggaagcgtaatgatgccacattatcatacgttttccagcgtgatttatgatccagttcgagcgattttataaggggaacttcgtttacaactaaatcgaaagtgaaagatttcacgatactggcttggcaatgacaatgccaacccattgtctcacccactacatcgcttgggggttaaccggttacccaatgccccatccccatcgccaaatccgataccaatttcaattccagtgccctaggtccaatcagcacgcgtcaaaagtggcgccaaagtgacgaaccaaattatgattcggatcgtatatgcacaaatatccatccaaatgagcacaaactaaggcggttttatggcggtagccagttggggttttgcataatccccggttcctgctgagacacccgcattgtggactgtttatggtagtatttatgtaagagccaattatgtgagatgtcatcaaatatttgaccagttcattgggtcgcctcatcatacctgatggaatgcacattttcatccgcgagggtttttacaatcgcatcgcagatatacacagatagggccgattgtctcttaaaaccacatcaaaatcaatatcgcgtatcgatcaacatccaaaattgagcattgattgtctcaatgttcgcaacctccgatgtgatgattcggatacatttgaataacagcgccaacaataaccgcttcttctccatatccgctatcatttattgtgcggaggtggctaatcccaattcaacatttctttgtttgctttatggcttttggcgaaggttgagcagagtgagtttagccatgctagcgaatctttttatttaactatggtgcaaacattgcgatttcaaaactgacaaaaagctattaggatatacgatttaatttctaacccttagccaattggttagcctcaagcgtcgcgtccaacttggtaatcccagtagctccaatccaaagcaacaacaactgatgcccagtccggtgaagtacattccaaaaacccaggagagatcgcttacttcgatataatcctccaaccgtggtggactaaaatcgttcatggttgccagttttagtctcaccatatccgaaaagctccgatcgatccaatacgtcgataaaccgaactcattttgttgcagcatatgttcctcaaagagatcgcgatagggcaagtgtcgtcttatggggaaactaaaaaaactgatgggttttagacagagtttctctgaatagtaaaacagtgggaatgcgaaaagcttctgttgctccttgaaggcactccaactcaaggcgctcatcgggtacatataattgtcatcgaaggagtctcgcaagtattccagttggctggactcatcgaagaccaccacatgatccatgctcacgttaaacggtcgcagcatctcaatatcgtaccgtcgtatggccagtttgtacctggaattctctagatctgcgaaggaacacatctttggatcgattggaggaccccacataaaggattgcagatacgacgtatacattgtggtggtgattacactgaagaagcaaacgagcatggaaatcagtttcagttttctattggattggcggggaaatggaaaaggctgagccaaaaatcccctcaaacagatatcgttcaacagaacattgacaaggcttagactacgccacgacctttgctttatgtagttaagcataactgagaaaatacaaaatatggcaatgagcactaccaggaccggtggatccacaatgcccatgtagatctcactattgggcatcatgtccggaaggggaaccataaaacaagttgatgtcatcaagtacggatatgaaatcgtgtcgaagttggtcatttcaaagtaggcggcgtagctcatgccaatatccacgagatcttccgaggcccatttcgtaatattgtaaaaagatgttttctttccagctttgtgcaattttacctgcatatccaaggtagcattcactttctcaacaaaattattcaataaattggctacatatccaatatgtttctcttggccagttttcggatccctgtatgccatagatccaggaatcaggttgaatgtgattgatttaagcaatgctccttgcatgttccgaaattggtctacatatattggattaccctcggataaatacactttttcatagttcctttcctgaaatagccgacaggcgtatataatcccgacctgatggaagttgttgttcaccatggctatattgtattgatccttcttagaatagaagtcgcatacggagtctggttttatattcccatttagaagaatcagacgcctgttcatttgcagcttcttcagagtttgatagttctcctccctctcggctttaaactcacaggtgagaataagtgctaggctactgtaattccattcaaagctggtgctaccggaagaaaccaatatggtggggacttgcaatctccttgacaaagagctaaaagcgcaatcctctccataaattaatagtgtgttgaaaaattgctcctgttgcaatcttagaagaaggctcagaagtcgttcctctaaatctgtatgattggtattggtcgcatccaagatccgagcctttgtatatccaaggcaaagcaaaattataataatccgtaccatggtgcaagagttactattgcattgtcggagcgaacattatattttgttctttaaacgaccagtgaatgtcgatcaagcatgctatttgtatgttttccatactgtgttaacaaggctgaatgttaaaggtgtacctaatggcccacttaatttgtagttgcgttaaaaatacatacatttcgtggagtcgacaaaagaatagtatattaatttctcaatttttattaacgcctcctttagtatataaaataaaaggcaattctactttctttgataagatcgatgaaatcaccttacgaccgtacaaatatgggcatggtaaaaaatgaagcgccaccgatcccgattaaatgagaaatcaattgtggaaagataactttgttttaaaatcggacaaaactccattctgcgtttagcaggaacatagttataggtggtatacaaaagaaaagtttttattagtgccaaacacatttattaagtgaagtaattgttataaatttgttttggtattaaaaaaaatatattctgtgtgctgaacaatttatgacgtgaatttaaatagaataatgtattacagcttacttagcaaaattttttaagaatgcatagcaatattcgcatttgattttgcagttcctccagtatctcaaaggtcttagaatctccaagataaaaaaacacagacccatgcccatcccaacgaaatacatggtgaaaacccagtagagattatgtacttctatgtaatcgttctctaggagcggactgaaatctttgaatgtcgtaagatttgctcttatcatatccctatagctctgatcgatccagtacttagttaacccgaactccttctgcagcagcatgtgctcctcgaaaatatcgcgatagggcaaatgacgtcttaatggaatacttaatatatcaaactgattaaggcaaaaggcatcgcaatagtagaagattttgtacttgaagagtttctgttcctcgttgatggtgaaccactgcaaagccgtcaccggaaataaataattggtattaaaggtgcttcgcagcttagagaatttgccgtagtcatagatctccacgtcctccaggctcacgttcagggcctccagaaactctctttcgtagatgttaatggccatcgtgtacctagacttttttacatcgtcaaatgaggtcaggcgtggttcgatgggaggaccccataagaaggcttgcagatatgccgtatacattgtggtggagattaaactggaaaagcagaccagcatgaatatcagtttaagttttctattgtattggcgtggaaaaggaaaaggctgagccaaaaagcccctcaaacagatgtcgttcatcaggacactacggatggtcagactacgatatgacctttcctgtatgtagataattagcacagagcatatgcagaatattattaagaacattatcaggatacttggtgccacaatcgccatgtagacatcactaaatggcaacgaatccggcaggggagccataaagcagtacgaactcattaggtacggatacgagatggcgtcgtagttcgacatttcaagtgtcctagcctcgcatataccaatatccagaatgtcattcgatgtaaaattcgtaatgtccacaaaagatacttcctcgtcgtccttgatcaaatcctcccgtatttgcatagtggcgttaaccttcttaacgaattggcttattaacatgcccacatagcccttaaacttttcttcaccggtcttactatcaatatatggtatggttcggggtggctccttatcagatagtgttcttattggggctccatgcatatttcgaaattgatctttgtaaatcgacttgccatcgaagagattcagtttttcatagttttgatcttgaaataggcgacatgagtataccacttcaagctgatagaagttttccttcaccatggctacattatgctgctcctttttagaatagaaatcgcacacagactcgggttttatatgtcctttcagaaggattaggcgcctgctagtctgcagcttcatcagtgttcgataattttcttccctctcgtcttggaaattacaactgagtatcagtgttaggctgctgaaattccaatcaaagttggtgctgcctgaggacaccagcactgcaggaacttgcaatctttcaaatagagaaggaatggcacaatcttctccataaactaaaagggtgtcgtaggacttctcgacttgcaatctttggagaaggccaaacaatctgtagtcaaagtctagatgactgttattggtgacatccaaaatttgagaactggaatttccaaggcagaaaagaatgattataagccaaaccatggtgctaaagtgactaatggaattcttgtgcattcatcacattttgtacccaacacgcctttgaattggctcaaaagtgttggtgggtcatgcaattctcgtgtctcacgttttgtgttgacatgactaaaaattcagagcacaccccaaagtttacttaattagtgggtggctggaaacacctctatttcatgtgcgagcaaatagatagtgggaaaatgtcttaatttaatttatcggactagcagttaaatccagtctggtttgatctattgtagttgcaaaaaccacatttagcggctgctaacttgaagacatctcctttgattaaattaaattgtcatgaacgatctgtgtgcctatttccacagataaaatgaaagcatttactaatataaaacttttattctcttatctattcgcagtacagtgaatatctggtatcattcataaaatgtatttgtcccagtttttttaataaggtattttattgtgcctattaaaagaaggtttttaatttaattccgattggtcagcttaattaagaaactctttcgagtcacaaaatttattgggagaatggaataagtttaacaggtgtttagaatttgtaaatttcggaatttcatccagcgtttccacttgtccactcctatttctaataagaagcagaaaacgcaaagcactatggcagccaaatagattttcattatccacgagatgtcatccatcaataggcttggagtatacgctaatggcctacttagatccttaagtgatgttagaccaagtctcaccatatcgaaaaagctgtggctcatccagtagttcacaaagccgaattcgtgctgctgcatcatgtgttcatcgaagagatgacgatatggcaggtgtctgcgcagaggaaccgacaagaagatcagtctagagaagcacaagtccctggcgaagtagaagactggctccttgaagagcgtctgctgttccgcgtaggatctccagcggtctccggttaccacatagttgtagctcaggttgaaggcgtcccgcagctcatagcactccggcatattatcgaaaatttctaaatcatccatgcgaatttctcggaaatgtgaattattggtcttgattaaaccattaacttccagtgcagacattgcaattcttcggttatagctaccaacatcttggaatgagcatatttctggttctgatggcgggttcgtaaagaaggattgcaagtaggcttcgtacatcgtagtaagcataatgcttgcaaagcatagaatggtaaatatcagcctcagttttttgcttgcatttagaggaaagggaaaggattggcccaggagacctcgcaggctcttatcattaagtaatatgttggctacgctcaggtcctgccatgacattttctggctatatattagcaggacagatagcaggaggaacaacacaaagattattcccaggacgagcggatccacaatcagggcatagactagattgtacggaaactttgctggaacctgaaccataaggcagtaagatgtcaaaaggtagggatagctcgaagtctcaagatttgatgtatttaatgaggcctctaaagtaatgcccatatcaagctcatcgtcctttgccattcttgatatctctgtgatgctcgttgaaggcttcagaaagtctagctgtaaggtggcattcactttttgtgcaaagttagtgattaagtttgccacatagccaatcatctttagttcaccgtcatttgcatcctgatacagcatgactcggggtggcaagagatctggcacaattcttattgcttttcccttcatattttgaaattgttctataaagattggctttgtccctgataaatttacttcgtctacgttaggatcttgaaaatagcgacaagtgtatatgctttttgacttggtaaagttttctctcaccaacgctatgttatactgctccttttgtgtgtatatattacaaatattacttggttgaaaatcttcttttaataaaactagtctcctgttccgttgcagctttatggaagtactattaggtcctccattgtctatgtcaggtccacaactgagtatcagagtaaggctgctgaaattccattcaaaattcatgctatccgacaccagcactacggcaacatctacatttttaatcactgaatgaaattcacaatcctttccatatacaagcaatgtatcgtaaaactcctcatttcgcagttttagaagaaggttaattagctcgttatccatgaggctctgattttgaacggaaatatccgctatgtgggctgccatatatcccaggaagcagagtagaatgaccaaccatgtcattgttttcaaacaaactgttttaatactttgagttgtgctcctttttgtttcatttatcattcatacaaatggttctcatattggggccttacatatttgaaacttgtcccaacaatttccagtgatgttagccttgtataaactgtttattaaaatgttagttggaagggccagcagtttaaaaccatatcgtgtaaaaatctacaggcgtgacaggtggtattgtaatttgttttgcatttttctgttttaaaaaattcctgaaaaaggtacatcaacggtaagctgttactctacatccgaattgaaagttatgtcggccagcttatttacacgtttaattatttttgtaaagtatttaaagcaatttatttaatatttggaatttttaccatctacacctccataatcg

SEQ ID NO: 29684 - DNA, 3918 bp, DROSOPHILA
atgctgtatcaggatgcaaatgacggtgaactaaagatgattggctatgtggcaaacttaatcactaactttgcacaaaaagtgaatgccaccttacagctagactttctgaagccttcaacgagcatcacagagatatcaagaatggcaaaggacgatgagcttgatatgggcattactttagaggcctcattaaatacatcaaatcttgagacttcgagctatccctaccttttgacatcttactgccttatggttcaggttccagcaaagtttccgtacaatctagtctatgccctgattgtggatccgctcgtcctgggaataatctttgtgttgttcctcctgctatctgtcctgctaatatatagccagaaaatgtcatggcaggacctgagcgtagccaacatattacttaatgataagagcctgcgaggtctcctgggccaatcctttccctttcctctaaatgcaagcaaaaaactgaggctgatatttaccattctatgctttgcaagcattatgcttactacgatgtacgaagcctacttgcaatccttctttacgaacccgccatcagaaccagaaatatgctcattccaagatgttggtagctataaccgaagaattgcaatgtctgcactggaagttaatggtttaatcaagaccaataattcacatttccgagaaattcgcatggatgatttagaaattttcgataatatgccggagtgctatgagctgcgggacgccttcaacctgagctacaactatgtggtaaccggagaccgctggagatcctacgcggaacagcagacgctcttcaaggagccagtcttctacttcgccagggacttgtgcttctctagactgatcttcttgtcggttcctctgcgcagacacctgccatatcgtcatctcttcgatgaacacatgatgcagcagcacgaattcggctttgtgaactactggatgagccacagctttttcgatatggtgagacttggtctaacatcacttaaggatctaagtaggccattagcgtatactccaagcctattgatggatgacatctcgtggataatgaaaatctatttggctgccatagtgctttgcgttttctgcttcttattagaaataggagtggacaattctcaaattttggatgtcaccaataacagtcatctagactttgactacagattgtttggccttctccaaagattgcaagtcgagaagtcctacgacacccttttagtttatggagaagattgtgccattccttctctatttgaaagattgcaagttcctgcagtgctggtgtcctcaggcagcaccaactttgattggaatttcagcagcctaacactgatactcagttgtaatttccaagacgagagggaagaaaattatcgaacactgatgaagctgcagactagcaggcgcctaatccttctgaaaggacatataaaacccgagtctgtgtgcgatttctattctaaaaaggagcagcataatgtagccatggtgaaggaaaacttctatcagcttgaagtggtatactcatgtcgcctatttcaagatcaaaactatgaaaaactgaatctcttcgatggcaagtcgatttacaaagatcaatttcgaaatatgcatggagccccaataagaacactatctgataaggagccaccccgaaccataccatatattgatagtaagaccggtgaagaaaagtttaagggctatgtgggcatgttaataagccaattcgttaagaaggttaacgccactatgcaaatacgggaggatttgatcaaggacgacgaggaagtatcttttgtggacattacgaattttacatcgaatgacattctggatattggtatatgcgaggctaggacacttgaaatgtcgaactacgacgccatctcgtatccgtacctaatgagttcgtactgctttatggctcccctgccggattcgttgccatttagtgatgtctacatggcgattgtggcaccaagtatcctgataattttaatctccaccacaatgtatacggcatatctgcaagccttcttatggggtcctcccatcgaaccacgcctgacctcatttgacgatgtaaaaaagtctaggtacacgatggccattaacatctacgaaagagagtttctggaggccctgaacgtgagcctggaggacgtggagatctatgactacggcaaattctctaagctgcgaagcacctttaataccaattatttatttccggtgacggctttgcagtggttcaccatcaacgaggaacagaaactcttcaagtacaaaatcttctactattgcgatgccttttgccttaatcagtttgatatattaagtattccattaagacgtcatttgccctatcgcgatattttcgaggagcacatgctgctgcagaaggagttcgggttaactaagtactggatcgatcagagctatagggatatgataagagcaaatcttacgacattcaaagatttcagtccgctcctagagaacgattacatagaagtacataatctctactgggttttcaccatgtatttcgttgggatgggcatggatttagaggaacgacttctgagccttcttctaagattgcaacaggagcaatttttcaacacactattaatttatggagaggattgcgcttttagctctttgtcaaggagattgcaagtccccaccatattggtttcttccggtagcaccagctttgaatggaattacagtagcctagcacttattctcacctgtgagtttaaagccgagagggaggagaactatcaaactctgaagaagctgcaaatgaacaggcgtctgattcttctaaatgggaatataaaaccagactccgtatgcgacttctattctaagaaggatcaatacaatatagccatggtgaacaacaacttccatcaggtaaaattgcacaaagctggaaagaaaacatctttttacaatattacgaaatgggcctcggaagatctcgtggatattggcatgagctacgccgcctactttgaaatgaccaacttcgacacgatttcatatccgtacttgatgacatcaacttgttttatggttccccttccggacatgatgcccaatagtgagatctacatgggcattgtggatccaccggtcctggtagtgctcattgccatattttgtattttctcagttatgcttaactacataaagcaaagtgtaatcaccaccacaatgtatacgtcgtatctgcaatcctttatgtggggtcctccaatcgatccaaagatgtgttccttcgcagatctagagaattccaggtacaaactggccatacgacggtacgatattgagatgctgcgaccgtttaacgtgagcatggatcatgtggtggtcttcgatgagtccagccaactggaatacttgcgagactccttcgatgacaattatatgtacccgatgagcgccttgagttggagtgccttcaaggagcaacagaagcttttcgcattcccactgttttactattcagagaaactctgtctaaaacccatcagtttttttagtttccccataagacgacacttgccctatcgcgatctctttgaggaacatatgctgcaacaaaatgagttcggtttatcgacgtattggatcgatcggagcttttcggatatggtgagactaaaactggcaaccatgaacgattttagtccaccacggttggaggattatatcgaagtaagcgatctctcctgggtttttggaatgtacttcaccggactgggcatcagttgttgttgctttggattggagctactgggattaccaagttggacgcgacgcttgaggctaaccaattggctaagggttagaaattaa

SEQ ID NO: 29685 - protein, 1305 aa, DROSOPHILA
MLYQDANDGELKMIGYVANLITNFAQKVNATLQLDFLKPSTSITEISRMAKDDELDMGITLEASLNTSNLETSSYPYLLTSYCLMVQVPAKFPYNLVYALIVDPLVLGIIFVLFLLLSVLLIYSQKMSWQDLSVANILLNDKSLRGLLGQSFPFPLNASKKLRLIFTILCFASIMLTTMYEAYLQSFFTNPPSEPEICSFQDVGSYNRRIAMSALEVNGLIKTNNSHFREIRMDDLEIFDNMPECYELRDAFNLSYNYVVTGDRWRSYAEQQTLFKEPVFYFARDLCFSRLIFLSVPLRRHLPYRHLFDEHMMQQHEFGFVNYWMSHSFFDMVRLGLTSLKDLSRPLAYTPSLLMDDISWIMKIYLAAIVLCVFCFLLEIGVDNSQILDVTNNSHLDFDYRLFGLLQRLQVEKSYDTLLVYGEDCAIPSLFERLQVPAVLVSSGSTNFDWNFSSLTLILSCNFQDEREENYRTLMKLQTSRRLILLKGHIKPESVCDFYSKKEQHNVAMVKENFYQLEVVYSCRLFQDQNYEKLNLFDGKSIYKDQFRNMHGAPIRTLSDKEPPRTIPYIDSKTGEEKFKGYVGMLISQFVKKVNATMQIREDLIKDDEEVSFVDITNFTSNDILDIGICEARTLEMSNYDAISYPYLMSSYCFMAPLPDSLPFSDVYMAIVAPSILIILISTTMYTAYLQAFLWGPPIEPRLTSFDDVKKSRYTMAINIYEREFLEALNVSLEDVEIYDYGKFSKLRSTFNTNYLFPVTALQWFTINEEQKLFKYKIFYYCDAFCLNQFDILSIPLRRHLPYRDIFEEHMLLQKEFGLTKYWIDQSYRDMIRANLTTFKDFSPLLENDYIEVHNLYWVFTMYFVGMGMDLEERLLSLLLRLQQEQFFNTLLIYGEDCAFSSLSRRLQVPTILVSSGSTSFEWNYSSLALILTCEFKAEREENYQTLKKLQMNRRLILLNGNIKPDSVCDFYSKKDQYNIAMVNNNFHQVKLHKAGKKTSFYNITKWASEDLVDIGMSYAAYFEMTNFDTISYPYLMTSTCFMVPLPDMMPNSEIYMGIVDPPVLVVLIAIFCIFSVMLNYIKQSVITTTMYTSYLQSFMWGPPIDPKMCSFADLENSRYKLAIRRYDIEMLRPFNVSMDHVVVFDESSQLEYLRDSFDDNYMYPMSALSWSAFKEQQKLFAFPLFYYSEKLCLKPISFFSFPIRRHLPYRDLFEEHMLQQNEFGLSTYWIDRSFSDMVRLKLATMNDFSPPRLEDYIEVSDLSWVFGMYFTGLGISCCCFGLELLGLPSWTRRLRLTNWLRVRN

SEQ ID NO: 29686 - DNA, 3328 bp, DROSOPHILA
tttcttgcctagggtcaacgatgacgaacaacaggagtcgctgataagcaacagcgattaaacaatagcaataatcacgaatggaggctttttgtaaaagtcgggcttctacaaactttgaatgttgctcattgcaatgcaatctaaaacttggctgtttacgagttcgtttcgaatcgttcttaaatcatattgggacaagtcctgcacaatttcccttcggccctgatttgtgtttctcatttgtgcatttttcgttggatattattgtgttgcgaacttacgtacaactatttattataatcttacaagtgtatttattctctgtaaatagctttagatcccacgaataccgtttatctatgtgatagtctacaacgttttgctgaactccacctataatttatttcctcggtattcacactgcgcttagctgtataattgttgacttctcaatacaagatgaaaaaacatatacacatattgataactaattacaataaataaaacttgtctaccgtaagctttaaaatctgctgaatctaaggttaatagccatacggtggcagcggttaatcgtatgtaaattagaaaccattactttttcatttttaaataatgtcgattacacgatttctgagtttatgctttatggaacttatttatttttgataagaactgatttttcatgattcatagaactaatttattttgtattttaccattaagaaccgatttttatattgtacttaatcatgaactttcccaaagttaaaagtcattattttcaattaaataattcactttaattttcatcctatgtcctaaaaatatatatttacaatatgcgactcctaatgtctagaacttaaataggtatgtactcaataagatcacacaagttcatttctgtactgaaagcgcacacaaagtggcatctgtgtggcccagagtggcacggcgaatgcttcagttccaatttatccatgcctccgacggatcacaccgctgtcgttggcaatggagcaggaggaccagatccggagctgggtggaatctgtgccgcgcgggaggtggatggctccatcggttccattgcgatgacagtggcttctgcggcggacgaggaatgtggatctgtctccgaatacggtggcgccggcagtgccgcgattccaatgggactgggtacaccgaggggcgattggggaacaggcattccagccgctgctgctgtgggagtggtcaggttacacatgcgcatcacctcgtcgtagctgggtaaatccttttcatccttttccagttgatcgcgaatgcggttggcctccacgctgccgggttcgatgaagaaaatgtcgccatagcggttcgatgaaggatcctcctgtgcgttgaatacattacgatctgaaaataggttaagaaaaataagtgagtagtgaatagtgaatagtgaagtctttaaacatataaaactcataggacgaatgataagaatttaattaaagattacttgattacatcatattgatatttgggtaatgtcatttaaaggagagttgttttatacacttcgaaatatttgtatatgtgcagtttgattaacccacacaacaaccttgttattcgttaattaattaaaattggaaacactgctctaaacacgacctgataagcacattttaaatgggcttctaaaaacgagttgattagtcatattagcactccaaatttcacacacacaataaacacttttgaggataatatttctaccagtgtgacccaaatgggctatgttccataccagcttgtatctggcgacgatttcgaatccttgagtcgtgcattcgcttggccagctaacaaatagataaatcagttatgggcttctttacttcaaagccattaagataaactcagcttgcaggattaactacatacgtatataagctgggccaccgcgaacatgcaaaacacaaagcccagcgcgacgctcagattagctgtcagacccattccgcaattctcgaagactggccaaaaagtaatcgcccgaacctaaccgattagattggcttcctgcccactttcggattggcacacgttaccaatttcaatgccgtatcgctgacgatggtgctctggaatcctctgctgacgtcgacatcgcggctggcagatctttgccagagtttggctctctacgcggatgtagtagcaggccagcggtagtacgcagaaaaagaagaacaccagggccaaatagatggctatgtgcaggccgaagccgctgccccaatccaatgtcggctccgatccgtgcatgatgagacttagaacgacgcggagcaggaatcaatgccgaactacagccaccaactgcgttttgtagacactagtattacccatagttcgccgttcagcacgcaattgattagtcgcccaagattagattgtccgccatgtttggttggcattaccccataaatgttactccatatatcagatataccatatatacggtccggcggtttgcacacacaaaccaaagccagtgtaacttacgagaatctattcgatggtttcgatgtctataacaccagcatttcaagatccaaacaacagcgaactttgggggaataagaacagaacttggttaccaatcaccatcgaagggatttgctgaatctaaggatcacctgtagggctgcataggccacgatgccgatcagcaggcgtaaaaagaaagtggctatgagttccattttgcaacgagctctccaaaagactgaccccccaaagttactgatttgcaatattagcaagacgttcgaaatcagcttatcacgaaagtccacaaaacaaacactctaggctttatggatttatggtagcacttgatcatcaaacccacccacacacagtcactgtttgtatcagttagtcaatacatatataaaaccgtcaatacatcaatacatcaagccatcagaggcagttcaagccatcaatacataccagtacgctggcgttgacgttgtcgtcgacgtctacgtcttaccggatcttgaaatccccgaggattggttccacagcacttgttcagaataatccatagtataaacttttgggggaatatcaaagaagtgatgagtgaaggactaaggaaggaaacttatatccctcgcttaaagttaggttcaaaaatgtggtggacagatacctgaagagcgaaatagaccatgggcatgatcaggaagaagataaagaacagccccacatagaaaataaaaaaatccattgtgtcaatacccgccagaaaaaa

SEQ ID NO: 29687 - DNA, 648 bp, DROSOPHILA
atgcacggatcggagccgacattggattggggcagcggcttcggcctgcacatagccatctatttggccctggtgttcttctttttctgcgtactaccgctggcctgctactacatccgcgtagagagccaaactctggcaaagatctgccagccgcgatgtcgacgtcagcagaggattccagagcaccatcgtcagcgatacggcattgaaattggtaacgtgtgccaatccgaaaatcgtaatgtattcaacgcacaggaggatccttcatcgaaccgctatggcgacattttcttcatcgaacccggcagcgtggaggccaaccgcattcgcgatcaactggaaaaggatgaaaaggatttacccagctacgacgaggtgatgcgcatgtgtaacctgaccactcccacagcagcagcggctggaatgcctgttccccaatcgcccctcggtgtacccagtcccattggaatcgcggcactgccggcgccaccgtattcggagacagatccacattcctcgtccgccgcagaagccactgtcatcgcaatggaaccgatggagccatccacctcccgcgcggcacagattccacccagctccggatctggtcctcctgctccattgccaacgacagcggtgtga

SEQ ID NO: 29688 - protein, 215 aa, DROSOPHILA
MHGSEPTLDWGSGFGLHIAIYLALVFFFFCVLPLACYYIRVESQTLAKICQPRCRRQQRIPEHHRQRYGIEIGNVCQSENRNVFNAQEDPSSNRYGDIFFIEPGSVEANRIRDQLEKDEKDLPSYDEVMRMCNLTTPTAAAAGMPVPQSPLGVPSPIGIAALPAPPYSETDPHSSSAAEATVIAMEPMEPSTSRAAQIPPSSGSGPPAPLPTTAV

SEQ ID NO: 29689 - DNA, 5850 bp, DROSOPHILA
gttttgacatgacactgcaaacgcctctctgcaaaaacaatgcggcccagagatgccataatcaggcgagactaccgtgtgattgcgcatacgctaccgatcgacagagcctcaactgggccaagcccccgatctttatggcagtgggtaacgctcattgtccgtattgtccgtcgagtgtgtattattttcacttcactttctgctcagccatcaaaatgtgttatactcgcactcgtactttattatttagatacaaatcaaatgtcaagcgcccacacatagacttacaagcacaccggtttgactcgactgacatttgcagtccaagtgcagtttggaaagtttggtgaaaaattcaagacagaattgagcttttcttttgtgtcgttttggcatttttgcgtgggcgtggccagaaagcggctcccgcggtcaattgaaattcgtcgccgcgcttcatggcaactttcacggctaagccagaaaggcccggctgcctcttccgccttacccgcccgttgatgacggatggatgactcaatggcccccagttcgccgattaaccgcatcgcgatatgccaaattaaaaggcgaaaccaggccgaaatgaaatgcttgactattgccttgccttgcctttaacccatcaagttaccaagctggcgttgagtcaattctgtggtcaacaactcaatctcagcctctccatttcatatccatctccaactcgcagctccaacttgacattgacccaatgcaaaaaagtgaaaaaaatagaaaaacacgtccacatttttgctggggctaatttgttgtggtcttgttaactggagatgttcgagtttattgcgcttttaattcgccttttttggcgctcaccaatttgttttgccatctaatatttcggccggtaaaagtttcttttcggttttgggcctttgtcggggtctcgaccttgtccaccaaatatcaattaaaatatttgttttcaggagctatgtgtttacatggcagtagatttatctggaagatttatgtatgcctttcagatgttttgcctaccaacaatttcacccgaatatatttagcttccaaggctgattagtatctttggctatggcctaatccaaccaaattcaagttccacgaagttttaattaaaatattttggcaccagtactaatccaacactttctattcactttgcagttggcgctggcgctcttggcctttggagttgcctcatcatcatcctccaccaccagcaccaccacatcggtaaagccaaaaaccgcaaatccaaaggctgagtccgataaacccaccaagcagccatcgccatccgcatccccatcgccatcatccaaggccacaaacacctcaacgacccggcaatctaaagccttgaagccgggcgagaatcgtggcaagagaacgctttatgactttggaaatgccggttatctgtatcccgaagtggcatcccggagggctggctacgtggacaacgcagcgagctattatccccaaactggttactacaatggtcagagtgcagttggtaagttaactgggtagatttcagtccctaactggcactagatttggcaaaataccaatattaatttttaaagaaattatccgacgatttcgtggtacttcattcaaagtaatgaaagtgtttcatgaaagtgaaaactccagccattcgatttatgattaactctaagactaagcaataacttttcctaatttcagctcaatatcccggaagctttggacccgcctatgctcaatatcctcagtatttggaggctccagagcccatcatcgagatcatcatcaaggatgcgaatgaaacattagcggaagagcccgcgcagccgattgtgaccaagaagaagaagaagaaggagaaggtgcacgtgttctatgtaaactacaagaaggatcagaacaacaagttgcacctggagtcgccaattgcttcgctgaacaacgacgacaacgaggaggaagaagaggaggaggaggaagtcatccagtatccggttacgcccctgcctccggtaaaatccaccaccctgcgtactattatccacccggactcggagaaataccacagtaactccggtattcatgtgtcgttcggagcggagaacaagcaccagaccggtcacattctggaggagcatgatgctgagagcattcagcgccaagtggtggcactgccgccttcggtgtcctccaaatcggaggtcagctatgtgagcaatacccgagcggattacggaagagaaaacaactttggatcccggccaggacctatttccaatatgctctttggcagcaactaccaacagtcgggtatcaactaccagcagcaacaacagcaactgcccacgcagcacagcaacaactacttcaggccgccatcggctctggtgggtcctccccccaactacccgaaaccagcgccccagcaacaggtgcagcagccccatcgccccagcatcacccaacagcaattgccctccacttcctcccagaccattttcaacaagctggtgcaacagtcgcagttctacatcaaccacaatcagcaatacccacagcagcaacatcaacagcagcagcaccagcagcaacatcaacagcagcagcatcaacagcagcagcaccaacaacagcatcagtatcaacagcagcatcagcatcaacatcaccaggcaccgcagcaacatcagcaacaggcaccgcagcagcaacagtatcagaaacctccgcataagcaagtccaggtgccattctttccaaccattccacctaagagcgtgacccctgctccctaccagcccgtcaagttccgccccacaccagcacctgtggccccggccaagcccgtacctctgcccgtcaaactggacaatgcgaactaccaacagcagcagcagcaacactatcaaccgcagcagcaacagaaattgccgcatcaacagcaatcttatcagttcgttcgtcaaccccaatttgtgcagcagccacagtttgtggtgcgttcacccactccacccccagaatactactcccagcagaagcagcagacacagcagcaacatcatcagagcgctctcaattattttgacatcaagccatcaaaggagacggagctgcttaagtccattcccaagttcgagcagcacatcacagagaccgtacagaatccaattgctaccgcacagcagccacagcagcaatatcatcagcagcaggtgcagcaacaacagcagtttggatatagcagcacgaggaatgaggtgatccacgatgtacctgctcccaacttgggacccacggctcagcagcacatctctgggcactatataacggcaggatcatctggtgtccagcagtcgcagcaattcggcagctttcccagtgcatctccaacgcagcctcccgtctacgcagagtccactcatggccagaaagtaatggtagtgactccagtgcccccatcctccaactatgtgacctatagccagtactctcagaccgctaatgagcctgtggtccacattaatgctcagtctgcggctctgcaggctcaggccagcaccaacttcgcccaacagcccaggcagcccgcctcctcgctgatcagtgctccatccacggataattctcccttcagtgtatccacctaccactcggacgtgttcaaggagctggagcagcgcaaccagaaggataagaaggtgtcacagcaggtgcagcaacaggctcagcaaattgctgcagcaccggcttctgcttctgttcccgctcctacctccactcctgccactgctccaaatggcaaggcctcacagaccttactccagttgcccgacgaagtgccagatgatctccgccagcaacttttctcctctggtatcctgaacaacgccgatatctcaattttggactatgacaagcagggggatattgccctggagaacctgccagccgagcatttgcagcacttctatggagccggtggtggtgcccagatagccgagaccaacaaggttttgactgtggtcaagcccaatggcgataaggtcgccctcagcgagaagcaactggatcgtgtgaagcagaccaactcactgccccagaaacaggatctcgatgtaaaggtggtgcgctatgatgccgctcagggtcagagtgtgagcgataagtatgtgcgcaccgatgccaccgtggtgaccccggtggatttggccgaacggcaacaatacaaccgctacctccctctgaagatcaacggagcacagttcccgattcccgatagcgaggagctgctaggcaagcgcattgtcagcgtggtagtcctggctcccgtggaggcccaaaatcctggacaggcggccggtgaggcgcggagcgccgatggcaaagaggtcaagttcctgggcggtgagctcatcaagacgctggtgaagaaacccactaaagagaactttaagcgctggctggagaaggaggcgcgtacggatttggaactgcagtccgtcgtgctgctggtggcaaagtaagtagattacctaagaattcgctagggttggaagtaatatatgactgatacttcttttgttcctcctagatccacagatccatccgctgagcaggagatctttatgtacgaaattggaacgggtagcataaaccgcctcaacggggagctatccagcacgtttgtaaacgtggccgaggagaacgccagcagcgaggatctggagcacgcagccacattggaccatagttcgctggagtccatgatgcatctgcgccgcagataaacatcgtgatcgagtcgagtcgccgcagtccaaacaaatgccatttagctactcaactagacatgttcatcgtgtgcccctgaaagaccctctggactttaacttcttccttagttttgtttcttctcttttcctaaactgtcctcaggttgcacattttccactgcaaaagaaatcgtttcattaatcacggcattgcattcaatcctctcgtagtatttccattttgtaaatattctatgctgatgttacaattatcgtaatttaagttaatttacgtaaaaatattaaaatatacaagaaaacttataacaagtgtattttatttttgcacgggacgtacttatttaaaatgttaagatatgagcgcaaagaagtttataatatcacggtaaagtatagcttagctgccattaaatgttaaaaaaagaagatgatttgaaaacactattaattattacgtatttgcatatttatattctacatgcagctacatttatcattctcctcaattttttattttattattcaaacgtcaaaattggtgtcatgtagtaacgacagtaaatgtaagttactcaccgtagtaccagaaacggccgcatctactgactgcgctagtgtgcatgtttatgtaaagtcgctgtaaagtaacgtatacattaaattgttttggcaaaagactagagaaacattattaacgaatttattcctatgatgaaataaattcctgacaagttaagctcaattataaaattctagaccaatattttcgcacaaatcgaagctagttctagttgtttacagttttacaatcagatcaggcgacaattcgagggcatcagcgactggaccgagccccttattggggccaaggtcagccagtggccaccgcagactccgagatgctggccagcaagaagttaaacgtgtctcgatagcaggacaagatttcgcagcgcccaccagtcacacgcatacgtgatttgacccagctgta

SEQ ID NO: 29690 - DNA, 3227 bp, DROSOPHILA
atgtgtttacatggcagtagatttatctggaagatttatttggcgctggcgctcttggcctttggagttgcctcatcatcatcctccaccaccagcaccaccacatcggtaaagccaaaaaccgcaaatccaaaggctgagtccgataaacccaccaagcagccatcgccatccgcatccccatcgccatcatccaaggccacaaacacctcaacgacccggcaatctaaagccttgaagccgggcgagaatcgtggcaagagaacgctttatgactttggaaatgccggttatctgtatcccgaagtggcatcccggagggctggctacgtggacaacgcagcgagctattatccccaaactggttactacaatggtcagagtgcagttgctcaatatcccggaagctttggacccgcctatgctcaatatcctcagtatttggaggctccagagcccatcatcgagatcatcatcaaggatgcgaatgaaacattagcggaagagcccgcgcagccgattgtgaccaagaagaagaagaagaaggagaaggtgcacgtgttctatgtaaactacaagaaggatcagaacaacaagttgcacctggagtcgccaattgcttcgctgaacaacgacgacaacgaggaggaagaagaggaggaggaggaagtcatccagtatccggttacgcccctgcctccggtaaaatccaccaccctgcgtactattatccacccggactcggagaaataccacagtaactccggtattcatgtgtcgttcggagcggagaacaagcaccagaccggtcacattctggaggagcatgatgctgagagcattcagcgccaagtggtggcactgccgccttcggtgtcctccaaatcggaggtcagctatgtgagcaatacccgagcggattacggaagagaaaacaactttggatcccggccaggacctatttccaatatgctctttggcagcaactaccaacagtcgggtatcaactaccagcagcaacaacagcaactgcccacgcagcacagcaacaactacttcaggccgccatcggctctggtgggtcctccccccaactacccgaaaccagcgccccagcaacaggtgcagcagccccatcgccccagcatcacccaacagcaattgccctccacttcctcccagaccattttcaacaagctggtgcaacagtcgcagttctacatcaaccacaatcagcaatacccacagcagcaacatcaacagcagcagcaccagcagcaacatcaacagcagcagcatcaacagcagcagcaccaacaacagcatcagtatcaacagcagcatcagcatcaacatcaccaggcaccgcagcaacatcagcaacaggcaccgcagcagcaacagtatcagaaacctccgcataagcaagtccaggtgccattctttccaaccattccacctaagagcgtgacccctgctccctaccagcccgtcaagttccgccccacaccagcacctgtggccccggccaagcccgtacctctgcccgtcaaactggacaatgcgaactaccaacagcagcagcagcaacactatcaaccgcagcagcaacagaaattgccgcatcaacagcaatcttatcagttcgttcgtcaaccccaatttgtgcagcagccacagtttgtggtgcgttcacccactccacccccagaatactactcccagcagaagcagcagacacagcagcaacatcatcagagcgctctcaattattttgacatcaagccatcaaaggagacggagctgcttaagtccattcccaagttcgagcagcacatcacagagaccgtacagaatccaattgctaccgcacagcagccacagcagcaatatcatcagcagcaggtgcagcaacaacagcagtttggatatagcagcacgaggaatgaggtgatccacgatgtacctgctcccaacttgggacccacggctcagcagcacatctctgggcactatataacggcaggatcatctggtgtccagcagtcgcagcaattcggcagctttcccagtgcatctccaacgcagcctcccgtctacgcagagtccactcatggccagaaagtaatggtagtgactccagtgcccccatcctccaactatgtgacctatagccagtactctcagaccgctaatgagcctgtggtccacattaatgctcagtctgcggctctgcaggctcaggccagcaccaacttcgcccaacagcccaggcagcccgcctcctcgctgatcagtgctccatccacggataattctcccttcagtgtatccacctaccactcggacgtgttcaaggagctggagcagcgcaaccagaaggataagaaggtgtcacagcaggtgcagcaacaggctcagcaaattgctgcagcaccggcttctgcttctgttcccgctcctacctccactcctgccactgctccaaatggcaaggcctcacagaccttactccagttgcccgacgaagtgccagatgatctccgccagcaacttttctcctctggtatcctgaacaacgccgatatctcaattttggactatgacaagcagggggatattgccctggagaacctgccagccgagcatttgcagcacttctatggagccggtggtggtgcccagatagccgagaccaacaaggttttgactgtggtcaagcccaatggcgataaggtcgccctcagcgagaagcaactggatcgtggtgcgctatgatgccgctcagggtcagagtgtgagcgataagtatgtgcgcaccgatgccaccgtggtgaccccggtggatttggccgaacggcaacaatacaaccgctacctccctctgaagatcaacggagcacagttcccgattcccgatagcgaggagctgctaggcaagcgcattgtcagcgtggtagtcctggctcccgtggaggcccaaaatcctggacaggcggccggtgaggcgcggagcgccgatggcaaagagatccacagatccatccgctgagcaggagatctttatgtacgaaattggaacgggtagcataaaccgcctcaacggggagctatccagcacgtttgtaaacgtggccgaggagaacgccagcagcgaggatctggagcacgcagccacattggaccatagttcgctggagtccatgatgcatctgcgccgcagataa

SEQ ID NO: 29691 - protein, 925 aa, DROSOPHILA
MCLHGSRFIWKIYLALALLAFGVASSSSSTTSTTTSVKPKTANPKAESDKPTKQPSPSASPSPSSKATNTSTTRQSKALKPGENRGKRTLYDFGNAGYLYPEVASRRAGYVDNAASYYPQTGYYNGQSAVAQYPGSFGPAYAQYPQYLEAPEPIIEIIIKDANETLAEEPAQPIVTKKKKKKEKVHVFYVNYKKDQNNKLHLESPIASLNNDDNEEEEEEEEEVIQYPVTPLPPVKSTTLRTIIHPDSEKYHSNSGIHVSFGAENKHQTGHILEEHDAESIQRQVVALPPSVSSKSEVSYVSNTRADYGRENNFGSRPGPISNMLFGSNYQQSGINYQQQQQQLPTQHSNNYFRPPSALVGPPPNYPKPAPQQQVQQPHRPSITQQQLPSTSSQTIFNKLVQQSQFYINHNQQYPQQQHQQQQHQQQHQQQQHQQQQHQQQHQYQQQHQHQHHQAPQQHQQQAPQQQQYQKPPHKQVQVPFFPTIPPKSVTPAPYQPVKFRPTPAPVAPAKPVPLPVKLDNANYQQQQQQHYQPQQQQKLPHQQQSYQFVRQPQFVQQPQFVVRSPTPPPEYYSQQKQQTQQQHHQSALNYFDIKPSKETELLKSIPKFEQHITETVQNPIATAQQPQQQYHQQQVQQQQQFGYSSTRNEVIHDVPAPNLGPTAQQHISGHYITAGSSGVQQSQQFGSFPSASPTQPPVYAESTHGQKVMVVTPVPPSSNYVTYSQYSQTANEPVVHINAQSAALQAQASTNFAQQPRQPASSLISAPSTDNSPFSVSTYHSDVFKELEQRNQKDKKVSQQVQQQAQQIAAAPASASVPAPTSTPATAPNGKASQTLLQLPDEVPDDLRQQLFSSGILNNADISILDYDKQGDIALENLPAEHLQHFYGAGGGAQIAETNKVLTVVKPNGDKVALSEKQLDRGAL

SEQ ID NO: 29692 - DNA, 2138 bp, DROSOPHILA
tttcggctaacataattgtatcttaaagctgaatttttactgaattaagagaagatttgctcatcagtcatattactagcataaagaggttttcggttagatacacatctaaagagtaaaccatattgcgaattgtaggtaacaagaatttgatcctcactccatcctgctcttaaggacatgacctacccctgggcatctggaggcgcaaagaaaatgcagctgcttgcgcccctacctgagatcaaatagtccttgatcctcagtccgaaacgagaactcatcgagagatgccacacttgcagaacatcgagcgggattttccccttaactggaccttgaatcccattcggatctctagtagtctcgccgcaaatactctttccttatatcgaaagatctcgcaaaacatgtggcgcagttgtattcaattttgccatagtcccaagttccagcaatatgttaggtaagtttggatacaatgatattagatatacatataaaaaaatgtccctccctatatcgattcttccagattcctcgagtccagtctctgtcagttttaaagagcaatgatccaagaaaatgcgtcgtcgcctcgtcttcaaaacagattgcttttgatttgcaatcttggcacgttgacgatgccaaaatttgttagttgaattcattatagcgatacgcagagagtcagtcaacgatctcgttccgagaggggggtttcgctttgttgtttcagagttctgaaatacaacaatttgtggcattgtaaagtgctcgtaacgcgattgggtttggggcatttccaagtcggcggctgggaaactacccttgccgcagcaattccaccatccaaccttcagtagggggaaaacacctcgcttggagctgcaataaattccggtcgctatcaagacgagcgttcagtaacgtttcaaagccagacgcgctaagattgctaattccaaagcttcgaccagtcgacgagcatcagaacatggagcacattcgatttgttgacaaagtctttagagccctgatcgccggcaccctgctgctcctgatgaccgccatttaccgggaggacaacaactccggatcccactacatccatccaagacacgccatgcagtagctccatcgtggtctactaagatcgattcaacctagtccgatgcaatcgaatctctcgaaagtgcggcacaaaaaccggttgtgtatattgccggctcgacgacatatcgccatatcaactaactgcacaaataatgttatgttatatgttaataatgttaatgttaagaaacatgtgtaattatctatagctcatcccatcgtaactaatctaacttatgtgctataatgttaatacttagaaattagttttagtgtgaaaatataatataaaatgcaatgtatatgaacacaaccattttgctcaacttgcagataacatgggatcgggagggctctgaaatatcgattagcaagagctattcgcactctttgcaaaacaggttgcaatttcatgcgatccgaacttgtttatagaaaacatttttaatgggccaatttcaaacgactttagcacgaatttctttctttatccgtggcatactctagaagctgaccttagctaatataagcaatcacgttttgcttattggaacaagtgttttgagcaaattaaatttccgtgcaaaagagctacaagtgatatgaagaacattggtacatacgactaagttttgcggtatttcagtattttaaaattgttttaataaataaataaaaaattactagaaaatgtattatcaaaactaaaaaatgtttaattatttaaacattacacaatgcatttaaacaatttttcaatctacatacatatcctcctaattttacatcaccaacgcttagcatggttttcaaccaacaatgtaagatcgaatcttttctacatgaaatgtaacaaatatatgcgaaacttggctaaaataaaaagtcttgaaactcagatggatttgttatatgtataacaagaaaatcataatcagtcaattgagattaagccaataatattgtaatttttttaaaaggaaaacaagatttgttgagtttctttgcttagaaacata

SEQ ID NO: 29693 - DNA, 138 bp, DROSOPHILA
atggagcacattcgatttgttgacaaagtctttagagccctgatcgccggcaccctgctgctcctgatgaccgccatttaccgggaggacaacaactccggatcccactacatccatccaagacacgccatgcagtag

SEQ ID NO: 29694 - protein, 45 aa, DROSOPHILA
MEHIRFVDKVFRALIAGTLLLLMTAIYREDNNSGSHYIHPRHAMQ

SEQ ID NO: 29695 - DNA, 2189 bp, DROSOPHILA
aacttctacacccgaaaagcaatgtgtcaatgttgacacccttggaaaccgcacaaaagccaaaccgccggagcagagttaccccagatcccagatctccaatgcttccacatactacatccccaattttccttaacgcgctctcctccacctccttggcggtctggaaaacattttgcggtttggcaggcgccaaactttgcaaataactcacgaatggcggaacggagtagtcgaaacggaggcggtcggggaacagttgcagggaggattgcgccggaaacggaagtacttacctcagcaggctgcccgcatgagatcgataagtgggcggcggcgaatttccacgcaccacgccattctggcgatcgcggtccaatagcaaaagtctgcgggagagaagcgaaaaggattcgggtgagtagctgttgtagttgtgtggcatggcacgacaggaaaaaggcggccagccaaagggttaagggtgtgatggtgtggatgtggacactgacaatagatacactgtccaccagaggctctatctacttttccaaaaacaattctattttaaaaacaatatttgtcatttataacaaacaagaacttaacaggaagttcttacttattggttgaagagtatatgagtatatgagcaagattgtacactctaaaataagaaagattgtatttcaatttcttttaatttaatgacagttataaagagtgtttttgcttttagaaaaagtttttatagttctccactcttttaaagatattgaaatattttcgatacgaatagtatagtctcagtgtagctacaaatcgctctggttgctgcataattatgcataatgcaattaattgcgccaggacatgcgagtggcggacgaaagccgcaggtccgccaccaactgctgtccttgcgtgtaatttatgcaccagcaattctggaagttctggtagtcctgctactcccggtactcctggtactccactcaactcacctcagccggtactcctgcatgctggcctggtacgagggcggcggtgggcggtgctggaactccggatagagcagtccgtgcggtgctccgccaccgcgactgcagggcctccggccacaccgtccaaggtccacactggtgcccaggccgattcccaggcagctctggccgcccggcgccgtcattcgccaggcggcgccacttacagtcaccaaaacgacgccaactcctgcaatgaaagagaaaaaaatccaaaaatgagaggtggaaacggacttaattttagagctagagttcggttaacgcccccaagtgccccctcccgattatccatttagcttgagcattaattagcccactcccaaggggggcgtggcacgcaattacagctccacttaaagctccaaatccagcctaggcctaatcatgccgtccagactttcacttttcctcctgccggccaaacgagccattcagtggagcatgtcatcatggcaaatttgccagctaggcatacgattttattagcgaaaattgtcatgagcgttgtgacatctccgcacaaaagccgaagaccccaaaaagacctcgcccatcatcgtgatgttaatgttgatgatgacaatgatgatgatggtgggactctaccagtaccagcaccattatgtgcctgtacatagttggagatttgctgactggctggcttgattgccattaaattatgtaaaatgctgccgcacatacatactgtatactgtactgactgtgtggactgaaaacttttcggtaattgccaccgaaaatggcgcaatgtcacgcttcgcaagcgctaaaactaaacgcgccggcaattgattagaccaaaactccgactacagactttgcacataaaagtgagtagtcaagtagtagagctgtgcacttggccccgctttcggcagtgattgcgtaatgaatgattcatgagtggcccgaaaagttgtcagactcggaatcgatgacgttttaattcagaaaagagctttcccaagtgcatttaatttggagtggaactgggctggggttcaactacctgcgcagacctgttgatcacaccaaatagagcgatggcttggccaaagaaatcgcagccggaactaaatgctctggcaatattgacagttggcttgtctggttgcaaatttg

SEQ ID NO: 29696 - DNA, 189 bp, DROSOPHILA
atgacggcgccgggcggccagagctgcctgggaatcggcctgggcaccagtgtggaccttggacggtgtggccggaggccctgcagtcgcggtggcggagcaccgcacggactgctctatccggagttccagcaccgcccaccgccgccctcgtaccaggccagcatgcaggagtaccggctgaggtga

SEQ ID NO: 29697 - protein, 62 aa, DROSOPHILA
MTAPGGQSCLGIGLGTSVDLGRCGRRPCSRGGGAPHGLLYPEFQHRPPPPSYQASMQEYRLR

SEQ ID NO: 29698 - DNA, 2570 bp, DROSOPHILA
tgagtgggtgatgggctgtgctgtgctgggtgttaatcgctgggactccgaataccccactcagagaaactcggatgtttaccccgctctgaatacaaaactttagaggcctggcgatggcagcaaaattcacggtagattaagcaggatcaggacgtggaggcatgtgccacgcccttcgtgcgagaaagaaaaacaatttggggttttgtggcatttttcaacgatttgttgggttttatttctcatgtttagtttacgttgccttgcacattacggtaaaggactttaagttagttttcgagtgtgtgtttggttgttgttgtgtgtgtgtgtatctgtgtgtgttgtactcgtgcaggacacgcgtacaattagtcgtaacttacatatcattaggggtaggtctacctattttgtttttgtgcgaaacgcattcagaaatcgaaatcgacatcgaagttcagtattcagttggatattcgtggtttccgaaagtgcgcgccaaatttgtcaccgtagcgttccgttgcgagttatgcatatcccgaggatactcatacctacatacactatatacttagtatttgctcttcgtttctggcctggtttatagtttagttgctagaaatgcgttcgaaatttcgtcgtatttacagttcaattagtcgttggctgagctcagagtttctcatgttctaattttaacattttctttcgttttggatactttaatacttcaatgggtaggcgtatatgtataattgcaagtatctagaattcgtaataactacgctgcgcatctgcttaatgcttacaaaaataaattcaacacattcaagtacaacaaacatcttaccagctaacgccgcttacagatacaggttacagataggggttacattacattcatttaggagcagcttgagttccgtacaaataaatacctttgggttaacgagtgtctgaatctgatgtatccaaccgttcagttcgatcgctacagatgcgccaatatatcgatctgatcgagtgcgctggcctggccagctggattttgcgtttcagtttgcgtttggctgtgggtgcttccgggtgactgggatatagtcacaatggtcaccagatccttgcttttgctcatcgccgccgcaccgttcgatgcattggattccctttccggaatgcgattggatgactctatctccacgatggccgaggtaagcaacgtgttcgactgcagcgccgtgtagtccggcaattgctccaccaccgacggctccggcagctgcagatcctcattggccagcagtctaccggacggagccgtctcgatgttccgctcactgcatacgagattggcgggcgtggcattcctggagcggtagctgggcggcaaactgtactcggagccgcccatactgctgctgattgttcccccggcgccgcatcctccgcccattccggatctcagggtggtcagtggagccctggaagtaagtgaatcaaagcatgaattatttacacatgagccaaagtcaatccggttctgtttgcccttctcgggcataagaagatggcaaatatgttagccaaatgcacaaatttgcatccatgagatagggtctcttcaaaggcgaatttctatgagatttgtctattcgagtgcacaggcaaaaaattttcaattttatttaaatattatttagttattttaattggtgtcttttgattacttactataattattatttttgaaagatacttgcaatcaaatacgaagtttaattgttacacattaaatttaaaatttattttcaaaaatttcgcactgtgcacacaaacgttgtgagtcttaagtatgtataggatatatgacgactccggtccttttcaaacacataagcgtgtgtgtctctattctctatattctcatctttgtcaatttaaataacaaaaggccgctgtggcaattgttgccatgtgcatggcgataggtaaaaagatttcaaggggaggattttgaaaggagctatttttaggtgagggttcgtcggggaactaaacccaaatcacagacaattcacacttcagtcggcagagcacaaaagtcaacactcaaacgctcatctgcacataatggcttgccgagtgctccaaagggggcgtgtctcggtctctgtgggcgtggctggttgatttctcaaaattcgagaagctcgcacaaattgtatggagcaatttggagtatgtagaattgcatttaattgttccgacaaagacgccgggcgaacggaaacagcaaaataagtcatcgtccaggatttgtcctggaatcgggcctatctatatgttggcctccattgtctggtctacgatgtgatgtgatgtgctgtgcataacaggcaattttcgcagctctttggtcggctctttgttggtttaattgacttggccagcagcaaggacagttttccgtccttgcaacgcaggacatcatcccctttatctctttcgcccttttgccccctaaccttccatctttacgggctgcttgttatgcggcttgg

SEQ ID NO: 29699 - DNA, 570 bp, DROSOPHILA
atgcccgagaagggcaaacagaaccggattgactttggctcatgtgtaaataattcatgctttgattcacttacttccagggctccactgaccaccctgagatccggaatgggcggaggatgcggcgccgggggaacaatcagcagcagtatgggcggctccgagtacagtttgccgcccagctaccgctccaggaatgccacgcccgccaatctcgtatgcagtgagcggaacatcgagacggctccgtccggtagactgctggccaatgaggatctgcagctgccggagccgtcggtggtggagcaattgccggactacacggcgctgcagtcgaacacgttgcttacctcggccatcgtggagatagagtcatccaatcgcattccggaaagggaatccaatgcatcgaacggtgcggcggcgatgagcaaaagcaaggatctggtgaccattgtgactatatcccagtcacccggaagcacccacagccaaacgcaaactgaaacgcaaaatccagctggccaggccagcgcactcgatcagatcgatatattggcgcatctgtag

SEQ ID NO: 29700 - protein, 189 aa, DROSOPHILA
MPEKGKQNRIDFGSCVNNSCFDSLTSRAPLTTLRSGMGGGCGAGGTISSSMGGSEYSLPPSYRSRNATPANLVCSERNIETAPSGRLLANEDLQLPEPSVVEQLPDYTALQSNTLLTSAIVEIESSNRIPERESNASNGAAAMSKSKDLVTIVTISQSPGSTHSQTQTETQNPAGQASALDQIDILAHL

SEQ ID NO: 29701 - DNA, 28344 bp, DROSOPHILA
ctgaccccttttcttttcccaccccctcctgtgacgcacgtacaaattacatagctatgacgggggaaaaaagtgcgacaggacatggagtagtaggacaggacgaaagggcatggttggggagatgggggtagttgagtacggacgcacagaaagatgggaacccgtgtaagccacacttacaacacggctccgtgtgccgtttggggtgcgcttacttacagcactcactgtggccaggacgagggatgcagcgggtccttcgaagtcctggtgctacactgagtctcctttccggggtgtgagtttctgtgtgtgcaaaaaaggcgatatctaacaaagtttaactcgttttatgtccaacaccctgcagaaatatcaggcaaatgggatatgatggcattctttgaaaatttggggacaccaaacatttgttgtggtattctttaaaagaaaaacgttcgaactaaaacatataatgcatttaagtcccgattagatgtacatttggatgccatgtctgtctttacatttctatgctcatgttctgtgcccctaagtccccaggatatcacccagttcgatcctgtgcctcaaccacttttctgactgcctgctgcattcagtcagccgaatatgttggctcagtttggcacacaaaacgacgcagcagcttttccgcatgcagctgcatctggcaaccggttgtgggtggcacaaaagtggggcagggccgctttagggattccatgattcgggctggcagccaggggaaggaaccagggaaggtatgtaaagagtcatctgactgttggcaggattagcctggacatgcctgaataatgtctttattagtggcctaaaaggagcaatccgttctcgtctgtctgcgttgtttttcgttggtttcgtgtgcgtcgaggttttgatttcattaattagtcgcctacgtgatatcaagtatacgccatgttatcatgattattacttctcgtttcgttacagtcagctctaaaagaagatggcccaaccacagctgctgcaaatcaaattgtcacgtttcgatgcccaaccctggggattccgccttcaggggggcacggacttcgctcagcccctgctggtgcaaaaggtaagtgagggatctcttgccccacccacttatatgcatacatacgtatccatttcgcaactggccggcgagtaaacatgtgggaaaatcagaaacaattcgcttatcgggcgattgacaaatggaatttgcgtgttcggaaacgctttccgaaaaatgaaattaaatttacgctggcaacaaacgagagaagcgaatattagttggtcagttaatttatttatgtgtttaagtgcttgctggtcttctttttttatgttaaaaataaatccgttgatataagtttcaatttttgtggtggcgtttccgtgcgatttttgcgcacgttacccaaaaacaaataaaagtcgtatttttcccaattttcaacaaatttcccctcgccatacagcatatatacaactatacagacactccggtatataaacccacacaaatgtacacagcattcacacagacagggaccaaactaaaaatttgttaaacattcataacagatctcgaaacattttacatttgtggcgacacgcaacaacaaaatttgctaaatcattttgacaactttatgagcgcttgtggcgcgaaaatgtcgaaggaataaatgaatgtgcctagttttatatcgatgtgcagtgcgaatcaaaactgtaaggctgtaattaattaatgcgattttaatggatacagtttcaatttggccaagagttatatactttgcaagaattgtacttatatctaatctagttgttgttggcttcgtttaacgataatatcgctgagaataacattccaactcttgataaagtaagacatgagctaatattttagttaatcaagtggaaatgatattcccgagacttcgaaatgaaacaaattatgaatcatatagcaaaggcaaagctggcgacttcgtttgtgactcaaactcacactgataagaacctttgtttgtgtgcgagtctaatcggtagctaaacatcagttgaattcctatatgctctcataaagtcataaagagaattgctttacttattgggaccaaaacaatgccccaatatttcggaattattgatttgggacttgatagctgagtcaaagtccccctgaaaagaatttgtaaatattgttgttcgttcaaaaataacacgaattctgtgcgctctttttatctgtttgtttttggcttcgagtgggcggtacgtgggggtgggcgtggccagcgctaaatgcgcaatttctatttaaacagctgtggatttgtgtcaatgctatgcggcttctctcttttccgagctgcactgggctatttaaaacagaaaataaataaaacaccacacagccagtgtggattatcacggaattgagctgtttcgattaatttaaatgggctaaactcgagcacttctgtcatttaacaattatcaacgcagccacataaaacaatgttggccaaaagtgcaacaggactgtcatttaagggctgtaaaaaaaaagtactaagcaaattggtttgcaatttatgcgaaaatcattcagcttgcgcagcgcaatttgaaatggaaatcttgatggattacacaacgaaaaataaagcaaactaaatctcaatcatttgttggccactctctggtttttccgcccataaatccaaacagtcctagccaagatgagttgagcggcctcgcggcggtgcgacatctcctggctggatgccttttgcctttcgaacacttcaagcccaattgaatttggaatggcgcacttaagtcgcatcctcgtccgcaggattttgcgtaaaaactttgctcgtaatgagccacacaggaagaaacgttatccacatctactatgtgtgcataaaaagtttatctttaattagttatgtttatatagttcatgcgaaaccttaacttttgtctagcgaaaagggatttgtgttcttttgtgtaccagtacatataccacactattaatgatattttgaggaagcttatgaattcccaacaatacgttacatagatcattttgcccgagaaagaatgccatgctgatgaaacgtttctaggctatttttcgccgtgctgagctgagctccttggctgccaggacgacacaagctgtgcagcgcaactaagccccgaacgaactcgaatgaactgcgccactctgcccaactgagcactggcagtcgagggtccttctaccttgacaacgaatcatcatcttagtcatcgtcagcatccaatcatgtcagcttcctggctcttgagccagtgccaaacaaattggtctcctttaaatgctgccgcaactcatcaggatgcaacacatgacatggccaggagtaaatctaccaccgctttcatcgagcaacaaaaactgctggtttggagttggtttggcataaaaataagctactgagctgcttaaatcggattaatttatgatttctcgcagcgagttttctgtgttcagttctcgcaccccgtatacagtataaagtcctcttcctgttgcttccctggttgttcggaagttctgcatcctgtgtgtgttataagccgtatgcccacggatttttacccactctcgcatagaagccacgttcatatatttcattatcaagtgcagggttcgttttggggccacaaaaagcgtcgcacaaaaggccaaagtcaaataaaagcgaaagccaagcagcgcacaaataatggaccaaataagtaatacaagagcgtaaattcggtttactacaaatttctggctttctgaccaaagccctcgcgccacataccatatcataacaaccaaagagataaaaaaaaagcgccagtgtcggctattagccaacttaaagtctagacaaccacgggaacactggagaggacagtgcataacaagctactgacggcatccaaggcaaccgacgtggccgccagtcccacacacatgatcctccagcccagtatccttttcccgccgaactccgcgtttcgctcatgcaaatccgctcatgactcgcctctttcgctacccttgctaagggtatgtttgttttattaaaatattcctttaagtaagttattgtcactacgttaattttcaccagcagtgaaatcctggacttgctaacaaccctgtatatatcatttcattttatacataaatacataagtacgtattaaaaacaaccaacaaaatcgtttagccaatttgtgattgtcttggcatttaatcgcccatgaatggagcttccttttccgaggaagtgtattcaaaacagttgaccatcctctcgagattttttctgctttcggtacgtttcggttcagtttctgttgtgtttttgctcgttttaagcttgtttgtttgccttccccggttggccattaattatttgactcctgtctgggggcagcctttgtgttggtagccgtgtttgcctttgtctttgactcaagcggaggacttttcataacttgcaactgctctttcactttgaggtatattagttccgtttgccatgttctactcatttttgtcgtatctgtggaaacagggtatgaactgtctgctttagtaaattctcaaggtcttcgttcttagtgatttatgcaagcgaaataatagaggcaaatttcctttgctctgattacgggctcttgtgtaattgaatcaggcgaaggcgacaccctgctgtggtctccactctcgattcttgactctcgattgcaatttgcagcttgcagctgctgattgaacttgcacttttctcgaccacatcgtcaacagatgaggggcgaaagtggggaaagtgcatctcggtctgcggttgctttcaatgcactcggacattttattaattgaacaatgccttaagagcaactgttgtgctagcttattcgaagccgagatatgaaaattgcatttgtgcacttggcaggccatgtaacattgtttcaggaagttaccttggttttgaacatgccaaggaaccacagaagtgtgctgattatgcggacataagcctcacctgatccgcaggcttttgacttgagtcgccggctaattccacaccaattgccagagcaacgttaattgaattaataaaaagatagtcgaccgttggggtaagcaacttctctcgatgcattgctgatttcccgtgattcatctctgtcagtcgccaaaaggcgtaattgataaaagttaagccagcgaaacaaaaaggataaccagacagtgattaagtgcctggctgcgtcagcgccgcatttgattgattatcaattttaccgggcccgctttaacggacccatgactactgactccgcactggacgccatggacatcggtgcatgccactgccactgaaagtgcatcgcattgccaatttaagagtgctgaaatttattgaacaaaccccttatacccataaacctggctgcttcctccggtagcccccatatccacttccgctccagggaatcgagtggcacttccgttttgtttaaagggagttcgacgggatatgagttcgtgagccaagccagatcattttgtatgaaatattatttacatatttgtaggttcagtgatcctaccacttttgttagctcatcaaacgatcaatatattaaataatatcttcttagtgtttgaatcgctttacgttcttaattgcatgtttaacttttattgactactagcaatgtctaattctaccttgcgtcttatctttttatacatgcagtaatgattagcaacttgaattactgtgattcgtgtttggactccgcgtgttcatccgcctcacgtgctcatctctcgtgtggtcaggtagttgggagtatctttagtccctttaagttcacttgcacttcattgcacaaattctctggctgatgttgcatgctccagctaccttgccgcagaatagaggagatgcagaaggagagggggcagtaggagtagaaggagtaggccaggcgggagtcggagcacgtcttatttagatttatcctgcctgctacgcttcagttgagttgtcgaattcgtgcctgctggtgtgcgcctgtatctgccggttttcccagctccttgccttttgtgtgatatctctttcgggttgctggctatatctttaatatattattgaatattttgtggcctggaccggaaattgtactaatgtctagccagtgcgagccacatcctgcatcgtgcagcccacatgcaaaagtcacataaatttctgctcctttctgttgcagactcccattctccttgtggcctaatccttgcgctcagcatcgcttcgccgattgttgttccgactgcacaagaaaagtatcccgcataagaaaagtttgccgctgcttgcgtccgcatcccgtttcccactccacacagtgctatctcttgctgttgtccttgcttttaagttgcatgtcagcgagcataaatccttcagtggaaaatgctcgcttcgctgcatttggagcacacacacacacatcccgacatttagcctgggatcccagttatcgcagagctgtaagcggagaaattattggccgagctcaacgcgctgcattatgtgcgccataaatatttataacatctaagcgtaaagagcaaacgcttaaagcgggaatcgattttggtctgcttctggagtgcctcggactggagcagccactcttgaaggcaacgattagtcagctaatggtaatgcttggcggcctcttgttacctgcatgaaaacgattggaaatgattcacttcaggtagcctttgtctttgtttctgttttccagtcctcaaattaatgcctctgagtcactcctgcagcgcggactttggttcgtcatataagaatggatattatacgacattctaaatcgattcatgaaaacgtttactatttttagtatagtcgaacatcatctttcgatagttggtaaagttcgtgaacgattccttacattgtttatgctgcattctaagcttttatcttgccaagttgctctcgagagtctgtgatttaattgttgcttagtggattttcacagcatcagcgctggataagggcaaaccaagcggaaacggaaattgcgcgcagcgcacacttatctctagccctggtgctccactcgcactcccggtgctcttggatatctcacttcctgtgcgtgtccgtgtgctcgaaaaggatgtgcccggcgcaaattgcgtgctgcggcgtaatcgaaataaattatgagccgcacttacattgcggctggctctcgggagccgtgagatccggattgagggcttttagcactccaaacggcatttgtttggctttaattggcgaccggcttaggcggcgacaggagaagtttgtccggcaattagcggcaggtaatggctccgccgacatatgctattattcgggttattactttatttcaacctattattcccgtccatgtggccccggcgggcaaacgcatttggcgtaaatatatgtcattgatttgcagttaaggagacggagctccggatcgatgtcatccccatggcagccattacgcatcagtgtccttcgaagctgactctccatcttcgtgtcgtgtcgtcaggcgccttggggccatgatatattatggcctgtcgccttgtcttgtttatttgccgcactttgggggaaagggcgggaaatgggatgcttctttttttattgttatgacgcatatcttctcggagaaattgagacgctcttgatttcctggtgatttattgtccatccaaattgattgaatatttactaaacgtctacggcatcgtcggctaaatggtttacagctgcgcctgctctccatcgatcccaaatcgaaatcgattggcgagaagtctgcaaaaaagtcaattttgttaatcaacacgaacgacttaatccaaattgaatgaactcgaacctgggagcgttgccaaagcggatcagccgctacacatcatccgggccaaatgcgaaaaataaaagcgggcgcaaatttacacatttttcgcatttctgcaccagattccgccccgtttttcctccgaattttcctccgtttttcagctacgaaacatttgccaataagtgactgaagcgaccgaactgaaacaaaccaaaccaaaccaaaccgaaccgaaccgaaacaaatcggctcaaggctcagggctcaacgagctcaggtgagagtttgcaggcctaaaaaagcgaaaattgaaaaacgcagctgcctgggccataataaagaaccaaaacacgcagcaaaaaccgagaaaaggggattcagctgcggccactgaacttcagaatactctagcagattgtaaatttaatttttatttactaaatcaatttacgggaatatatttaataacgatagccactggcttggcaaaaatataatgagatatcaacagttggctctagcaaccattaaatagattggaattcaaaatgtaagatgtttaattagatcaacttggtatatgcttcttaagatcaaaccttttaagaatacatcttcaaagcaatgccgactcataccacaaaaaagaggatggttcagaatcatgcatacaggtattaaagtgatctattcacagatttctagatttcagattagtcctaagctctgaattactcatcatgtaatcatttaaaggcaaactcctcggaagatctgcagtacacaaagcagatgaaggaatcgtaatatcctttgaagggaagggcatgtagacacacacacaaacagttcctttgataaggcaagagggagagagtgaattgcgttttgtggacgggccagtgtgtgtgcgggtgggcgtggcactgcccacagccagctcagccacgcttgaggtgataatgtaataagcactttttatgaccctgccggatttagacctaaaattccactcaactcggaatccgaagggcattgttctgtctgtaaagttcgctagattttcgacgaccaacaggcacatccggaatgttggacccccccacaccccggaatccaacccgtccatccacatccattctactgtttttattggacggcaaggatttagattctagcctgcagttgtttgggctcagctgaacatattgtctcgccatattccatttttttgggagcaggactctactaattggtggcattcacaatgccctagaaaggggggctccaaatggtcgttcgtgcaggtgcgaagtacatagtacaagggcatatatgggaaaatatgaaaatttaagacttatcacctttgattttggtttattgctgagtttttgcctacctgccgaaaaagtttaaggtttatactagattttaaaatatacgatgagctgtactacctgtcttatctgcttctttgctgatttatttacattcacatctttcacttcctggatttgttttaaattaattgcactttacactcgctattgaagattttccattgaagatttgtcaacaaaacaagatcagtgatgagcttttctaattctaacgatgacacggattacttctcaactatcgattcagcacaggttaaaatacatgctagtaattaaaaatggaaaccaagaacacccgttatctattattgcactaatttttggtaattgcattttcaaattatccaactgcaattgcgacacacactaccaaaattaacttttcccccagcatcgattgccacgtgatgcctgctccccccatcgataaataatcgatgacttgactaattagtgcaattttcacgtttcatgttcgcaaatattcagagttgtatttccacgggcattaaattgaacaaaaccgtgacatattccaccgaccaattggccattaagtgtacccatatggcacattgtgttttttatttttcgcatttaagagtcttaagtgattaagcgagcgagacggagttgtaaagggacatgcatcaaacatactgtcattaatataaaaatgaaattaccttgtcgagcaccagatgccattaaaaaaggaacggcagaaggaaaagcgctcgaatgggaaaaataaggacgaaattgccgcccactcggttgtttgttgttgctgtgcatcatcaaattgaaaaatgtcagcgatagagaggaggaaaatgggaaatcagagaacaatgcggcattggacaggtaaaacgcaaaggtaaaggtaaactgccacgccccaggggcgttctgttctgttgtcgtccctgttgctgcatcaacttgttgttgttgctattctgctgcggacgcggcccagttgcattgacaatcgacaaatgaggaaagataatgcaggcattaatcttgctaccagcaatttgtcagcgttgctccatcctgctccattccgtattgccatctcttaccgttcgagatgtcagctgcagttcgagttactcgattccaggggctgcctcttaggggggctaaagtatctcacaatgagagtattgcaaaatattttatatgagtttatgttatgagtaatgtaaactacccttctgcaaacagtctaaaaacttaagacgatttttttgctatgttatgcagttattcgctataataccagcattactcactgtaagctcaaagtattagcccaatccctgtcgaatatttccagcgaccgccctgacattccgaagtccgagagtttgtccctgcctcttctaaacgctggcttcatcaattaatttacaatttgccagacgtccgtgtccgcatgcacagtctccagctccatctccatctccatctccagttccagtttcaggtcctgtcccagcatcagtggctcgttctcgtcctggtctgtgttatcctgtgctatgcggtcagcttggcatactttttctattccactcgtggcccgtggcccactaatggccatgtccttgcatcctggcacccgttccacttcatccatttcgccgggctctgcatccgtaaattgcattgcttgccaacttgttgaaaggcggagcgaacttaaatgcttttcaatgtttttccatgccgtggtacccacttaaggtcacagatagttcactggaaaaaagggaattgaaatacttgagaaaacatatcgcactctttagtcttaacaactttacttcgatgttactaaaaaaactaattattttgagtaatatatattaacttgcctatcgaatggaatccgtttttgttttatgtgtaaggtagacagtggcgttgtgaaccccatttaatggtcacaatttagcttttaattagatcggcaaatttgttttcgaaccattttgctcgctcgtgcggagaacgaatgcggaatacgaattcgaagtagtcggaaaagtgccgcccgttttccgcccggaattagagtgcttacggtttttcattttaattgtttttgtgcggcgaagatgggtccctgtggccgcccatcctccccagagctcatctgccgtgtcgctgatttatttatttctatttgctgttatttagctggttcttgttgctttttgttctttatatcattttattttgttttattttattttattttctttcacttcattttattttccgccaaaccaagcgagcgcaattgcggtcgctgagcgtctgcccccctgtcccgattttcctccgttttccgtcccgcagaaaacccctctgcagctgtctgcgtgccatgctctagttttctatttttgctttcccggccgtaatggcaaccttaatcacgtaatgattttgagcgagaggcgcgggtgtccaaattccgaccaacccgcagcttttcatactccacccacgattttcctgcgattttcctcctgctccttgctgtttgctcattcatcgcggctcttgtttttgtattccgcatttcgcaattggcacaaatctcggcactcgccacgctaatggccaaatgctgtggcgctaattgaaattacatttcttaaagttaaatatttaattgagagccgccaagccgagcggacatcatcagcagtccggcgaaggcttaaaagttgctcgagtgcacacaagagtgtgggaaattggggaaaagttttggggggggagtgggttttgcgagcatttcccaaagccttccatccggaaacttgtgcatttaatatgaaaagcctttaaaagttttattgagtacgcttgtttcaggcgaaagcgtaatagaaactaatggaatactgtgacccaattcccatattcaatataaaaacccatgtaatgtgctctgttctttatagaacagagatagtcctttaaacaagtattttccatttagacaatgtgtttactggatgacctaattaagagatttcacttgactatgccttaaatgctaagataattggccatatgtaattttaatgtcagaatactatttatttatttatttcatgataaagaaagtgtttcggtaaacttgaatgtgcttaaaactgtccattccatagtagtttccccacccgtttgggacagttttgagctgttcaactccatcctcgtggatcgacatttcggcgcctttcatgtcaaatccccggggacaaacgtcggaccttgggtcccagcttcatgtctgtgcctcagcttgggcttgttgcatttcccctcgggcaatgagaggggggactccggcaggcgaagacccgaaaaagaatgacgatgtggcatgcttagaatgcccgacacgaaagcgtcgccaaatcctaattgcatttgtctgattgcacccgttgcagctgcaacttctccgatatctgcaatgctgcatttcgagaggcctatcgaaagtagaatagccggagctgaaaagctcgagcaggagctggctgatgatgatgatgatgatgatgctgattcattaaattggttccctgctcccctttcggccttatgacaggaacatgtaaatgccatttactgtttccatttcgaattcggtttctgttgccccgccattgtcttgtcatcgtcattgtcattcccagatcgcaggactggtggactgttcgatttggggaactggcgagggagaggcccaatcgaaattccatttaatgtaatttgagtgccatcattcatgcctcgaatagctgtggcagcaacggtaggtgaaggtggagggtgatttttggttagcctgagattacgtttaacacgatttcacggctgtcagaactgcgtccaggattgatggatgcccgaggaacatatctggcatttccaggaacgagattcccaaatatcttcaacgacctcctcctcttggcactattaagccatcatgtgtaactgaaacatcaaacacgcaggcatttcctgcgctgccatagagtttatttaaaggctgacccaaatatgccagactgcagcagtccagttgcagtcatagataccagatatgtaccatgtacacgaatgcagatactttggcagctgactcacatgcctcgcatttcgacacgtccgtcggcagtgcgtaaacaatggcccaaaccattggccaccatcgccgggaaattgggcgagttgctgcgtggcgggaaatgcgaaaacacattgcgccgcccagcaggtagaagcagcaggttgggaaagtatcccgttcccgaaaatttcccaatccactgttagcttagcactaccatcgtgtggcccacacgtcttggttatttcccgcagccaatttcgggcttcattagaaatttccccggacccgcagaaaatataatttatgcatgcttctgacacaatacacaaagggttcaaggcaaccgcagccacagctagctgaagaaataacaaacggattggttggtggttcgggaatcccgaattgaaaatacccagtacttgtgatatgtcagttattcaaaaaattcggaatttcggaatgccgaagaaaatcaaacatacgtttcatcaaaggtaaaaattcgcacaaaagcattttgttttcacaaagcatgctagtatttatttcaaaagaaacagtaaagaatgggcatcatatttacgagcagaacacgcacttaattcgcgtttatctactgcaattaccaacagcataccctttttatctcgaattactgggtgaaatcagcaacaaacgacaacgtcgacgctgacgacactaattaaaaatgttggccaacccttcaaatggctcatgcggcgactgacaagcgcagagctctggtcaaaaccaggaactggagaacggtgaggagcaggaggaggtgggcaggatctggagctgcggctgtggctgaaattgaaaagctggctaagctcctggccgcagtcagtagaaatccgctaaattcccaaacaacaacccgtcgcacaaaaacaaacagcgcggattgtgggtggggcaggacacctttcgaccttgcgaccggcggcccattgatgatgttgttaatggaaaaaatctcaacaccctttctcgcacacacacacacacgcacacacaacagacacagcaggatagagatggaaatctactggggggacgcagccagagcgagatggagccaaacaatggcgcgtaattttgcgaaatttacattccttaattaatcttgtttgcgctgcggcagttggcagttgtctgcgagtaccgaaaacccctttccatcgacgcccctgctgggtttttggggtttcatccaccggtggatttgcctctgggggcaactaacaccaagccacgctaatgacattcaaggcacaagatgtcagccgaggtggaaccagcacacatcctgtagctactatatacatatatcctgtcgccttattaacccacatatatatttgtgtgcggcaactggatatcccgttgcctaatgaacccttcttggccccggtgttcaggatcaggttcaggtcgctccactccactccgctcgctttaatcaacaatttgcgtacgcaggcagcgcggtacatgtgacatttattgaaattctagtttatcctggcaagaggaacccgcggcatcagctgagagcaatttaaactcaatttccagactgagacggaaagtagaaactggtgccgtaaattgctccacgtagatgagccgccagatgagcttgtgtgagcagcaagtggggatgattaaattggatcggagatggggacctgcttaaggaaactatcttagcgagcacatatctcagaaaaaataagcaccaactggtagttagctattgaaattaaaagtaagggaaatcacaaacccattacatcaatttgttcgtgtgtatcctgaaagttgcagttgaacactttcctcgacgggaccataaaaagtagcagaaattacagaaatgccatgcgtgagtgggtatcgtttaaattgtatctcgcactgaaggaaaacctgtccccgaagtaatcagggaatctatcacaaactcgtgcgtgagcggcactttcacctggacttggacgtggacctggagcattcgtgttatggcttagctccgcaaatgcaattggcaattgcaatttctcactcgtttttagccattttgctgctgtcacaactcacaagtgtccagtgtgcatgagctgaagccaaagccaagcccctcaaggcgattgtcgtttcttggtaggtgttgccttggctgtccaggaaatccacacacgtcagcccccagatccgcagataccagatacgaagatacatccatcctggccatacatacatgtgtgtatccgaatctttctttcagacctgcgagcgaggtccggcattagcggtagattaatgatcggcatactagctgcgcccacgctgcggactagaaaaatccctgggatgtgaagcagagaaacggaattggattccggccgccggcagtgagtgctccacatgggaattcctccgccgtttggccaacattcattagccgggagctggctgccgcaaaatgcgcggcattgtggcaacgtattttcccattgctcctcgttatgaatatgcaacatttatataaattgtcacgtttattgcagtcagactgtgttttactctcacgctttttccgcctttcgcccatcaattttctggctgtgtgtgaatgcgactgcatctgtcgttctaccaaatcaaaaagcgggatctagttgcaaaacacttgcttatgttgtaataccctgactgaagtagatttgaaaaaaatttgaattgcaaatgttttacaagacttggcacttgagtacctataagatacttaacagaagtaccgaagctagatgaaaataaactcttcaatcaaatgacattacaattttccaatttacaatattttccaatagtaaatcgagtctaagcgtcttatttgatgttcatgtcgcgaaggggaatgaaagtgttcccaatgggattgctaatacccaaaagttatagagtataacaaccaagttacaacgaagccagccttctgatggtggaacgcgcttttgttgaacgttgattgcaatcataatttataaatgttgccgacagtttggcgggtgccacgatgttgcagttgctgccgcccatatttcgccatcaataaataaatattatttgtctgtctgcctgtccgtctggcggactggatggctgactggtcagccctgtaaaacggaggagcgacgttcaaagccgaagccattagcaagtgatttggtgactttttccaatctaattgaatgtgcatgggcaggggacgctaccatgtcgagggcttaaagctgaagtgtagtccaaatggagaggcagcagatagaggaaaatggcaaggagcactttaaactgccaggcagagtgaattgtttctgtagccggtagtttgctgtttttcattcactctttggctcgttttaatcgctgccagagctcagtctagttgcgaactgtttgcccatcgggatccagttcccagtaccataacccataccatgcccgttcgcattcgcgctggtcaagtgttgtggttgccatttgtttgtgccagaaagccgcatcagcgcagtgccggagttctcgggtctccagtgatttactagcgggcgagggcatctggaaggggggcgaacgtggcgtatgagtgatgcagcatgcatattcatacacattgagattcattgtatttgccctgcatttccgcagtattttgtattttatctgctttgttcatgttcgctctacttacgacttttccgcaatttctcttttcgccctttacggccctcgaggggcagagatattgtaggcggggcggtggcaaatgagagtgtgtcgctgtcatattgctcgcctcagctggggctttaagcagatttattttcaattagacaagctcataacttggccgacaacttggcagaacttggctgttaggcatccactttagagtcctgcaagtgtgtatcctggctcttggttctggcttaatttacgccacaaattcaatttatttgagatacacctaatccacaaaagcaaacttgatttatcaacataaatattttgcatacaatgtgtgagcatggcccaatctttcccgatcttttcccccctcccccaacagaatgcatttcggtttggtttttgttccattgttgttgtttttgtctccggtacatcgatgtgtgtgtgtgtgtgtgtgtgtgtgtatgtgtgtgtactgaacgaaattcaattttaatgcacttgaatggatttgagcagcgcttagttgacttgattacgggcctttggctttggctttggcttcgcttcggttcggtccacagaatttcatttgctttatggattttggatggtggatggccgaaaccatttttccctcaactccggcaaatcaaacacttcaacaactcagcaacgaaacgagacgaaattcttcatacttttgtagaaatgtttgtcaagctgccagcgccaagccaacatcgccacgaaagccacttcgacgtatctgggagtatttgtcataacgcatataatttcaagagcttctctcaagtggggccgtcgaaagaagcagagagcatacatatgcagatgccgagtaaaatgctaaatacacacaagccagcaaaatgttgatgataatgcaaatgaaattatttttacaacatttactctcaagcgggcatacatatatgtatgtatatatcaccctagctctgtccactcgctatataaatcatcatttgcctgctgcagctatccccttggtgagcacccacacacatgtaatgtgccaggacaccacattaatgtcctgctgaaagaggcgtgaggatatgagctctgtggtgggtgcctaaaaacatggcattgcttagtgggcgtgaagtcctagcttttggactctatgagaagcgcagagaaggctttaagtgcagagaagggattttttgcattcctgcatgaaaacgaactttatattctactttacaaagataaggccttcgtgtgacaaatgctttttgtcggttgatatactccacatgggatatgtcgtcgtgggtttctcataacaaacaatgtcaaatgggcaacgagctcgacctgagggatctgtggaaagtggcagcaaaactaataatgcgacccagggcggggccaaaagctcctggtaatgccatttgggccttgtccatctcctcgtacatatggcccgctcataagtcattcgaaagggcaaaaacaaatgctccgtcaattgtcggcctgccgcaaatgctataaagctgacaaatgtcgaacgagcgcacagatagatagatattcgcatggggtgggggatacaaacacggatcgcaggtactcataaaactgtccgaatgtcaatatcccagacccacgactcacgttcccaaaaaagaaaaaaaatatactttccgagccgcgttcgctttgatttcggttggctgaatgatgagggcatgggtaagggggtgatgagcttgggcaggacgaggagccaggacttatttgttgctgtctggaaaacaccttggccaagcaatttcaattttccccacagccgacgacaagaaaatgaacatgtcaacggcacacgtcggatatggacttggatttggctttagttttggttttgccattgggattgtgcgtgcactgacaaaaattgcatataagttgcacacaacaggataatagctaactattgctaactaacaaaagatgaatatgttatattatttatatttcctgttaaaacacttcacttttaagatacacatactttttatagacccaatcttctacgggtttttttctctgtgtacatttttgtggctcggttaacctgtcggctctgctcggctgccccgattcgctgcgcttcgattcaattcgattcggtttcggggggagattcgccgttttttggcaactttgtaaatattacaaaatttaggtgtctcgcttggtgagtgcgccaatgaaatatttatgctcacacacatacacacacaccgatgcggcgtatctgtgtgcgagtgtctctgtttgtgtttgtttttgcacgagcgtcgcccgttttgtgcaaatataaaccgaccacagtcgaaagggggtgggcaggctttcagggggctggcgagcactgactgactgggcctgccagttgtctgataaacagacaatttgccaaagtggatacgtgcatggcgcgtataattttggggcacacctgagcccccgttcggacctcctttcgcatcaggtcccccccaaagcttttggcctagaccccgagtggagcaacaggagcagtggagccccgccctccgcgctcctctgtggctgtattttgtggttgtggactttagcctgatgagtgtatctatgtgtgccagggattgagtgtgtgcttagttggttagtttggctgatgaagcgacattgacaggccaagtgactttcattctaagcggctttaaatttgccaatcgaaggttgagtttaaatggagctgaaaaactaaaatgaagggtaagttattcgacgctttggcttagcaataataaatgttcagcaagggctgtaattacaatttgtcaaaaaacatacatattacaatccattttctgtaatttatacacatttacgagcactgtttccacaaaacaaaacttggaaatgactagttattcgaaaccctccgtgcttgagtaactgcctgccatttcaattttaagtttgaaatttgaaaattctctgacggctgtatgcgtcagtgccgcccacacagccgctggccatatagaagaatctccggcgtaacttttacgattttaatcgtgcaaatttatggcattttcccgcacgatttccccgtggacgtcgaagtgcccgaaaacatgcatatattcggaaataaataaatgatgaaaacaaacgcccaaaacgcacacaaagcagcgcctataaaactaaactttggccaacagttgcgggccacaaaaaacacagaaatatgcgtatatatgtacatatatgtatgtatatatctttatctgcatgtttcgatggacatgtgggatatacgtagtcggctaaagtcagcgcgagtttggaactcggagtgccgctcataatttttgcagttgcagcataataaattttaaacccagttcggccaactaggcattttcagggtagtgagttatggccatggcaaatcgatgttgagttgagtaatggttactaaccggtcttgtgttttctctgattttttccaggtgaacgccggcagcttgtccgagcaggctggcctccagcccggcgatgcggtggtcaagatcaatgacgtggatgtcttcaatctgcgtcacaaggatgcccaggacattgtggtgcgctccggcaacaactttgtcatcacagtgcagcggtaagtagatggaaccacttgccaaaacaaacttctcaatattatcgtaattttccttgtgatcctttagcggtggctccacctggcgcccgcatgtgacaccgactggcaatgtgccgcagcccaactcgccgtatctgcagacggtgacgaagacctctctggctcacaaacaacaggacagccagcacatcggctgtggctacaacaacgcggcccgtcccttcgtgagtgtactaatttgcaatcacgcagagtatagccccatgcccgtcctcgcaccacatcatttataaaattcataaactggcagcccaaagttgggaatgcggaaagttttagtggcccatctgatgctgacgtcctgatgatgaccaatgatgttgatagttagtccttgactggccgcactccacaccccacaaaacgcctcacactttgcgtttattttgttgtctgtctgtggcttttcatattcattcatttcattttcggttgttgggctgggatatctaacccctaacccctaacccaaaatcccgtagacccgtagacccgttcacaccgagcccccaaatgctcagtatgagttgacaacatttgcatttatacgatgtctgtctgtctgacgctcagtttgtttgtgcgtagttttgaaaagtgtcagaatgagtaatgaatatgagtgctaggattatttgcctggcaagaattaatgtgcaaaaggtttctctcacacacacatatccactcacacacccacgcatctgtatctatgccatgccatgcatagtaatgtctcttttggtgcgtctgtgtttgtgtgatatgcatacattttcgtatattttattgttatgaatttgtataataatagctccagccaatgacaacggacatgaaattgatttgggatcattttatgtgccaagtttcaggaacaatattatggaaagcatagcaacttaatttgatttaggaccatgtgaatgatcatagttgaaatggtacggagatactgcaaacaccaatggcgataaaacatggtgttatattaaagttccttttcacacacatatttcagtattcatgttccgaggcaaacggttgcacaactcaatctggaatagaaatgtactccaaccaaagacaatatgctggtaattaattcttttatttcgaatacacccttgatattttgaaattaaattagtcaggctctatttcagttagctttgctttgtgagaagtgcagaggagggctcaaacatgaagaacaataacttccaattacaataagtgcgtgggcggactccgcttgtcctattcattcatttcaccagtaactttgctcatttcacactttctgagccccatgtatttcctacaactcacacttgtttttcagtccaacggcggcgatggcggcgtgaagagcattgtcaataaacaatacaacaccccggttggcatttacagcgatgaatctattgcggaaacactctcggcccaggcggaggttttggctggcggtgtgctcgggtaagtttttccgggaaaagtctgggcgaaaagctgggcaaaaggcaacaaacaattgtctgggccgcagccgtgacagtgcaaaatatcgggaaaagttttacttaaaagtgttctttctctgctctgctttgcgctgaaccgctgaagaagaggaaaaaaaaaaaaaaacagacacaacaaatttagcagactgagaaagcagaaagcagagcgtgcgaggaaccgcaggccggtcgaaacgaagagtgcaatttggcaaatgatagccgttgctgcagaagtcgggccaagtgcttcggcttgtgccagttgtcgacttttgcgggccaaaacgcacgcgtgggaccgtggcccgcgcctttagcgcttaatttctttgggggattgctggccaacgcggcggatgcgtaacaatcttgttgccgccactcactcacttagtggagcatactttcgggctgcgctgtgttcatgcctgaaagtatgctacaagctgaactcaagggctcttggtttcatttactcctgcgattcgtgtttttatcccaatcgttaaagctcactttgcttgttctgagattctggtccttttcaatttaaaatttttttcctgctctaagtgttttcgtacagcatcttcagttgctaagcattcttaatagaagtttaataaatttcttctgctttcagcgtcaacttcaagaagaacgagaaggaataccagggcgatcgctccgaggttctgaagttcctgcgcgaggaggagaccggccagtccactccaggtaatgacgccaactatgagctggcccgcctgctgctcatcctgaacgacggtgccaatccgttcgtgagcgatgcgctgggcgattagcaggggggagggcgaggtgggcgggcagtctgccagatgctagccaatgatttttttaaaacgcccagcagagaccttgaaatggccgatctaacgtgcgagacacgaatccaatgtaactaaattgttctgtttttttttttgtcgtttaacccatcagaccagcagaaggagatggactttcgttttctctatgtgaagacacatttctagtgcccacacacagtcatgtctataaatatatatatttatatattaaccaacaatttcaaagtcacctgcacggattgagtagattattattataaagtattatttttagtgaggaacaataggttttgtatgggcaatcactttatagttgatcgatagcaggggtcatgtagtttagttatttgattagtttcgattaaagcatgagctctaatatagtgtcttgccagctcatttctgtcttccattgactgctaaagaaaacccagagacacacccattgcaagtccaatttctgtctatctttctgtctaactcatgtttgtatttaaactgtttttcatacgcaccaaaacaaacatctatcgtcaacacggcccacaccaacacaaacaacaacaacagcattcggcaatagccactacgagcatgatgcaccacagcaactgcaacagccacaacagcaatacaaccaacaccagcaacactatcaccagcaacaacaacaacagcaatcgagcaccactcgccatgtcagcgcccccgtgaactcccccaagcccccgagcaccggcggactcccaactggccagaacatttgcaccgaatgcgagcgcctcattacgtaagtgcctccgattggatatcactatcttgtgaaaagaatacagggtattggcctgaactaatggggtaatatatgatggtattccaagatgtagagatctagcagagatctatcgcagaaggaattccttcaaaatataccttattggaccgacttaataccctcgctattgtgtgtgtgtgtgtaactagcatttgtgtatgcacattgactaacagcaagcaaaactgcgatgcttttgcattattaactgattcccagcaattagtagggtgcctagagggttcagtttcctggagcagactttaggcaggttttgcacatgattaaaccaaataactcactgagcttttccgcttcaatcgtaatgatgatgcctgttgctgattgtgcagaaccacacagtcccgccaacttctactggacacagagccacgcaatcggcggcaacgagcgacgcactccactgcaccaccagcaccagcagcctcagcaggatgagcggattggtgtaccattgcagtcaaatacactggcgccggaggcgacacacaggcccagcttgccggtggccccgaaggataacgaggagcaggccagacaggatcagcaggagcagcccgatccgcgcatcattgtgctgcccatctgccccggcctccaggggcccgagtataaggctgaaatggaggctgcagccgcggcactggccaccgaccaggatggacgaccacgtccattggccgccagcggacatccggcctgccagctgtgcggcgtgggcattgtgtaaggatatgcgttgttcgccgttcaatgataattcatgcgtctgctgttgcaaatccaagcccccatccccacccagtgtgtctgcattttaattcgcatttattccacgaactcacggcggcgaagtcaattgtttgccattcacgcaatatacccaaacaacacctgagctccagcctcagttgcagcttcagttcccgcagcagccaggaaataaagctcatgatccagaccagatccatgggaaccatcatttgtattaatttgtatgccaatttaattggctcgccgttcgggagcttaactcaataatgcattatagctttttacatatttctcgcattacctgctacacggctaactgattgcctttggggactgttacgatgtacacacacaaatgcacagtgaactctatcagtagtaatccagtaatcaagtgcttttcgatcaatcatcgagttcggtgtctgcatttgaggggctcttctatgggattgatgtggaaaaattaagtagttaaactatcagtaacagtagtaaatatctatattgcgataatacttgacatgagtaaaaggatacattttttgttgaataaaacgaatcattgtgtttattttcatcattgacccatgaagagcttctcgaacccacatcattctgcaactcccgctaataatcttacttttttccacaccaattttttttttagtggcgttttcgtgcgcatcaaggataagaacctgcacgtggagtgcttcaagtgtgccacgtgtggcacctcgctgaagaaccagggctactacaacttcaacaacaagctctactgcgacatccacgccaaacaggccgccatcaacaatccccccaccggcaccgagggctacgtccccgttcccatcaagccgtaagtgatcggagttatgcccaatattttatcagattttttttttttggtggcattcgcctttacacggccaattggtcggtggcgggatacgtgagtgggggctggtcgggtagaaggtcctgggctcacatgaaaatgaaatataaataaattcagcgtattcgcatatgccaaaatacgactgacatgctggcgacgaaaaatcgtccatgctcaacggagtatttacagtgggaaatactctttaacgagatattttggataaaaaattattaataactaaagttggtaataacatgagatttaatttcctaacgatttaggatcactaaggaggcagtatatacatgagcaagattgccttagttgcaaagcaattatagatatagataaataccgggtagacttatagttagttttttattagaattttgattagatttttaaaacagaagacccttacaaagtcctaggggtacgaagggtcgaagggtattttctcttcgttttcaactatcgaagcgttttctttaccttgttttatttttggctggccaatcgccgcttttggaaatgaaagaggcgacactgattgctctgctgacgtgtcatcggctgtgccgcaaatttttaataaatgaattggcaacatatgtgtgtgccgcatactttgcatgccaactaaaacgacggcaaacgagttgggaaagcgctttcccagcaatcgattggggttgtgggttgtaatataacatatgtgagcaaaacgcctgtggagggtgtgcgatattgctggtgtgtcaaaaatgcacaaacgaccagtgacagttgcaatttgccaaatgcaaattttggaatttggaatttgtttcgggttttaggtggttgtttgcttaatttaaaacaatgtcgttggccaaaccaaattaaaggtctggcactgggggggccaattaggcgggtggctggtgacagccaattaccgctggcaaatctgatttatgtggcacttttctaagatattgtctatcttttctattattttccattgctaccgtacagcaacaccaagctgagtgcctccaccatctcatcggccttgaactcgcacggatacggtggccactcgaacggctactccaatggaaactccacccctgctccggcaccggtaagtacagattccggcaggtggcaatagaagtcccacctgtcaagtgttaagtgttccctgccgtggctaaaacaatgtcagacactcaccggaaaacacagttgtatcgagatagagacacagccaaacacacaatcagaaggcaaaagcactgggtcgaaggtaaatgtgcggagggtatttcccaactgccaacccccttccacctgaatctgcttttgcaacattcaattctatcatattgctaggaaaaatgtttgcttaaactcagcacatttcgccggaagcgccagcatccgacatatgctaaaatgttaaaaatcatctgcagaacggggagggcggcagagaaaaatgcaatataatgcaaaaagtttttgccagcaaagaagttcaagcatctcgtgcaattttatcaagaaacgcttcttgtttactgttttctttggctgccgctccgcacttttccacttttctacttttcctgcccacaaagcgatgaaatgaaaacgcaaaagttgtatgcatttgctggcagagagcaaaactatgtgtagttattttggtaaattattttaaaacatcaaaagcataatttgcacatgccttatcaactgttgttctcaagtattgatcaaatggttaattcatttaaattgatttgacacgttgtttatctgtgtgttgtttgcctgtgtttccatttagtttctctgtatttttgcgtgagtcctctgcttgccttgcatggattttgtgtttatgtttgttggatcgacctacggctgattgggtgagcagatcaagggcttggggatgggtgtgttttcattgagagattgaagacttcccccttggcacggacgggcgaatcaatccgatcgacatggtcagattgattgcgcggcggtataaatagcgtacggctgtagagactattttactatttatctgtttttgccgcggccagcgcatttcgcgaaaatgtgcaatggctgctagatgctaaatatatatgccaagcgct

SEQ ID NO: 29702 - DNA, 1224 bp, DROSOPHILA
tacagtcagctctaaaagaagatggcccaaccacagctgctgcaaatcaaattgtcacgtttcgatgcccaaccctggggattccgccttcaggggggcacggacttcgctcagcccctgctggtgcaaaaggtgaacgccggcagcttgtccgagcaggctggcctccagcccggcgatgcggtggtcaagatcaatgacgtggatgtcttcaatctgcgtcacaaggatgcccaggacattgtggtgcgctccggcaacaactttgtcatcacagtgcagcgcggtggctccacctggcgcccgcatgtgacaccgactggcaatgtgccgcagcccaactcgccgtatctgcagacggtgacgaagacctctctggctcacaaacaacaggacagccagcacatcggctgtggctacaacaacgcggcccgtcccttctccaacggcggcgatggcggcgtgaagagcattgtcaataaacaatacaacaccccggttggcatttacagcgatgaatctattgcggaaacactctcggcccaggcggaggttttggctggcggtgtgctcggcgtcaacttcaagaagaacgagaaggaataccagggcgatcgctccgaggttctgaagttcctgcgcgaggaggagaccggccagtccactccagcattcggcaatagccactacgagcatgatgcaccacagcaactgcaacagccacaacagcaatacaaccaacaccagcaacactatcaccagcaacaacaacaacagcaatcgagcaccactcgccatgtcagcgcccccgtgaactcccccaagcccccgagcaccggcggactcccaactggccagaacatttgcaccgaatgcgagcgcctcattactggcgttttcgtgcgcatcaaggataagaacctgcacgtggagtgcttcaagtgtgccacgtgtggcacctcgctgaagaaccagggctactacaacttcaacaacaagctctactgcgacatccacgccaaacaggccgccatcaacaatccccccaccggcaccgagggctacgtccccgttcccatcaagcccaacaccaagctgagtgcctccaccatctcatcggccttgaactcgcacggatacggtggccactcgaacggctactccaatggaaactccacccctgctccggcaccggtaagtacagattccggcaggtggcaatag

SEQ ID NO: 29703 - protein, 400 aa, DROSOPHILA
MAQPQLLQIKLSRFDAQPWGFRLQGGTDFAQPLLVQKVNAGSLSEQAGLQPGDAVVKINDVDVFNLRHKDAQDIVVRSGNNFVITVQRGGSTWRPHVTPTGNVPQPNSPYLQTVTKTSLAHKQQDSQHIGCGYNNAARPFSNGGDGGVKSIVNKQYNTPVGIYSDESIAETLSAQAEVLAGGVLGVNFKKNEKEYQGDRSEVLKFLREEETGQSTPAFGNSHYEHDAPQQLQQPQQQYNQHQQHYHQQQQQQQSSTTRHVSAPVNSPKPPSTGGLPTGQNICTECERLITGVFVRIKDKNLHVECFKCATCGTSLKNQGYYNFNNKLYCDIHAKQAAINNPPTGTEGYVPVPIKPNTKLSASTISSALNSHGYGGHSNGYSNGNSTPAPAPVSTDSGRWQ

SEQ ID NO: 29704 - DNA, 3710 bp, DROSOPHILA
ccaccccgagttcccatacatcgatgccgagatccggtacggagtgcgagagtacgcctgtaccgctgtcgatatgatcgcccgtcgcctgcgactggccttcctcaatgtgcaggcagcacaggaggcgctgccagtgatcgttgacatcatgggcgaggagctgggctggtccaaggacgagaaggagcgccagattaagcacgccactgagttcctggccaacgagatgggacactcggtcaaccgcacctccaaggagcgcatacccatcaagctgtccaaggaggagatccagacatacatcaagcgcttccagctgatcgacaaagacaagaagggctacgtttccatcaacgatatccgtcgcgctctcaagagcttcggcgatggcgacgtctctggcgagcagctgcacgaaatcctgcgcgagatcgataccaacatgaacggccaggtggaactggacgaataccttcaggtgagctagggatataagagaatatctcaaaccttgggaaactggaagcattcccaggaccaaaaaatctatttaatggcacatagtaaattttataaaagtgaaagacacataagatgggtttaacaaatcggcaaataagttacacgtacaaattttaaattaatttaaaattccagatgatgtcggccatcaaaacgggcgacgtggcctactcccgatttgcgcgcatggccgagctggaggagcagaagcacgaggcggccaatctgaagcagatcagcgtggaccgatccggaggcggcttgtaagagcaccagcgacttaacaacgacgaccacatcacccggccatcggaggcatggactagacttaagatcgaacgtttaagatcaaacttattttcattttgctgttaataaaactctttcaactcacagatgaccgccaacacttcaggtacgattaagtttcgcctgtttctgctgtgttttttgtttgaggggattcaactccatcttagccatccgcttctcctgtttagtggaatttggaatttctcttgttcatgaagtattgtatttggattaggttgaggatcgaagcttgaggccacttcgtttttaataggtttattttgcttaacatgaatctttaataacaattgttacaatttgtatgtggtgttcttactaaaagagctatgcacattgttttcggtgcagtcattcacatttccattgtctttgcgaaaggtgtactcgcacttcctgaagtggttgtacaaatccgttcgctgggaatcggttaactgggcaaacatgtctagtttggggtcccagaaaaaggggagcttacccttcttcggcgtcaaagctagtgagtccgccaatttgcccaacatctgtaatgatagaacgttagcagtggacatcacaaaatcatcattcacctcgataaatatatcttttggtgaattactccagtaactgggatcctgttgaataacctgccacaggaataacgtcttgatgtggtagctcttcaggttggccttattttttacatttcggttctgcttcatcaggcggatggcgggcttgaggaactgcttgccgtatagtagtctgcgctctgcctcataaaaggacgatgtgaaggatgtgttatcagttttggctggcttcatgggcttcggtatggcatcccagtagagcgtttcaccaaaatgtatcctttgctccggagccaagaccacttgtgctgctgaaagcctaatggccggaacaaagtccacggagtacttgcaagatcccttcacaaagatcgtgtgagcggggccgcactttttgtattgaaggtgcgaaatcctgcctgccacctcgatctgattgcccattttgttgagcgtctgggtcattatgctctctaggaagctgttcagcttgtcctccagcagctgctttttgttgttcacgattttctggagacgatcaaacactggcttgttgtgctcctgactcccgataatctccatcaccttggtcatgtccagaatgacattgcctatccaaaacggcattgttccgcttaacgagtataattgtatgtcagttttcatctcacctggcttactcgcatcggccttgacaatgatcttgtcattttcgggaaacaccaaatggatcaacaagtcaaactcatcgggaattgataccttgagcttatctccatatccacctaaacagtttatattgtagtctttcttgcaattaatgattctatcaaccagctaaggtataaatgaactttatttactgaaggatttcgaatacagcttgtattctgggaaactagcgacgaaagtctgaataatctaataaaatagcacttttccggtggcagtttcgaaacgcatacacacattgcactttttattggtattgactttgctggtactttacttccgattaacagccgactcattctctttcgttttttcactcactacacgtggcattggagaatggaggggctaatagacgagtatcacataccgcaaagtgtgcttcccttgagcagcttgcctagaactgcagaactcttccactccgagtacaccttatcctttaaggcgttatagtgggcggtgtacggctcgcggtgctctttaattttcacgtattgggcggtggcctgattgacgatattttccaaattcatcgccataactgaaaagcttccgacgtcgaacgcggacgaatgatatctgatcgaaggcatagacgcagcgcaattaatgttgccacaaacaaactctaacgccaacaaacctttataaactgtcacgacagcatttctgcaaaatatttttttgatatttataaaatcgttgaaaagtatgtaacaggcataaggaagcgtctgactaggatgtcaggatctcaatatatcatattgatcaatcatttatttattagtcttgtaaacttttccaaaaacaatgacaaaaagcgatgggaaaagaataaatacgctttgtttaaaatgcaatttcaagaatattttattgatcggtatttttaatttaagtggtattcatattgattttccattagcgcttcacatttgcagaattgagagaacaatcataattcattgatccataaattgaatgttgttattacacttggtttgacattggttttgctagcttgctttatgtatgcacgtataaatactagggaatttgcaaaaatattttacaataacaatcaaaagatcgatcgatagttggtacgttagataatcgagagttaaatagattaacaaagacgtaggccaataaagcagggaatctgtcagtaatcttagttctcaactaatgtgtgcgggatgcattttggagggtttagcgaaggacaacccatggatttgaaaccacttgcagctaatgggtttgaaagcggattccggatggaggaggaagatgaagtggtactctgtcctgatctggcctgctatcggaggttgacttcccgttgcatgcagatgagtctgaatcaaaggtggctccatttttaccattctttgcgtttttatgctcagttgtgattttgttcagttaaatataaatacttatgtaaaaaagagtaaaaagacgctcagttttcacgctggcgccaaaacttaatgcttagcttatagctatatatatatatatatatat

SEQ ID NO: 29705 - DNA, 1176 bp, DROSOPHILA
atggcgatgaatttggaaaatatcgtcaatcaggccaccgcccaatacgtgaaaattaaagagcaccgcgagccgtacaccgcccactataacgccttaaaggataaggtgtactcggagtggaagagttctgcagttctaggcaagctgctcaagggaagcacactttgcggtggatatggagataagctcaaggtatcaattcccgatgagtttgacttgttgatccatttggtgtttcccgaaaatgacaagatcattgtcaaggccgatgcgagtaagccaggcaatgtcattctggacatgaccaaggtgatggagattatcgggagtcaggagcacaacaagccagtgtttgatcgtctccagaaaatcgtgaacaacaaaaagcagctgctggaggacaagctgaacagcttcctagagagcataatgacccagacgctcaacaaaatgggcaatcagatcgaggtggcaggcaggatttcgcaccttcaatacaaaaagtgcggccccgctcacacgatctttgtgaagggatcttgcaagtactccgtggactttgttccggccattaggctttcagcagcacaagtggtcttggctccggagcaaaggatacattttggtgaaacgctctactgggatgccataccgaagcccatgaagccagccaaaactgataacacatccttcacatcgtccttttatgaggcagagcgcagactactatacggcaagcagttcctcaagcccgccatccgcctgatgaagcagaaccgaaatgtaaaaaataaggccaacctgaagagctaccacatcaagacgttattcctgtggcaggttattcaacaggatcccagttactggagtaattcaccaaaagatatatttatcgaggtgaatgatgattttgtgatgtccactgctaacgttctatcattacagatgttgggcaaattggcggactcactagctttgacgccgaagaagggtaagctcccctttttctgggaccccaaactagacatgtttgcccagttaaccgattcccagcgaacggatttgtacaaccacttcaggaagtgcgagtacacctttcgcaaagacaatggaaatgtgaatgactgcaccgaaaacaatgtgcatagctcttttagagaagcggatggctaa

SEQ ID NO: 29706 - protein, 391 aa, DROSOPHILA
MAMNLENIVNQATAQYVKIKEHREPYTAHYNALKDKVYSEWKSSAVLGKLLKGSTLCGGYGDKLKVSIPDEFDLLIHLVFPENDKIIVKADASKPGNVILDMTKVMEIIGSQEHNKPVFDRLQKIVNNKKQLLEDKLNSFLESIMTQTLNKMGNQIEVAGRISHLQYKKCGPAHTIFVKGSCKYSVDFVPAIRLSAAQVVLAPEQRIHFGETLYWDAIPKPMKPAKTDNTSFTSSFYEAERRLLYGKQFLKPAIRLMKQNRNVKNKANLKSYHIKTLFLWQVIQQDPSYWSNSPKDIFIEVNDDFVMSTANVLSLQMLGKLADSLALTPKKGKLPFFWDPKLDMFAQLTDSQRTDLYNHFRKCEYTFRKDNGNVNDCTENNVHSSFREADG

SEQ ID NO: 29707 - DNA, 3219 bp, DROSOPHILA
gggcaatctccatccagaggctcccgtcttcgaggacgaggtaaggggtcgtcagtatctgggctgctatgtgatggcctgctgtgcggccagcgtttatcggttgatggactggagtccacatctcctcgacaccattgtggtcagcggaagcacctacttcaaggagagcatcgatcagatcagcaaagaggactacgaattctcactggagaacctcaacatcgactgctctatggacaccatcaactttgtggtgcatatcgagcatgtgtgttacggaaaactgtatcgggtccctacgttcaaccgaatgaatctatccgaggccctgatctacttcttcagccactaccagttcggaattgtgagtgtccgaaaacggtcactggccattggattctgccccagtcacgatggcggatactttatgtacgattgccaggagaaggatcatccactgttccccaagcagcaaggtgcttcctacatgctgcgcacccggcacctacaggtgctcctctactgcgtagtggtcaccctaaatgtgccattctacaacatagacttcagcatccacaaggtagagatgttgcgcgaaggagccaccgtggagaacgaagaggaggagggtggcgaagagggtggtgcttgacgggatttagcagaaagagtcgcttggtatttgttggctatggagctctaaattcttttttacttattgtttggataaaatttatggaagcattaataaagtatataatctcttttttaatttgatagttttattagtcccaaagataaattaaaacagagatagaaaatacaaacgcttcagatgtgactaatataattcagacaggattatctaaagcatagtcgtcttcaaattcgaaatttaatatgctctttaagaactaagataaacatttaacaacaatcggatgacgcatcgtccgatgattcgatgtcgtcattgggtgactcgattttgagtgactcaatgccgcagacgacgctgttcctcggcttgtttatagtgatagccatcggcacggagttcgtgggcgggctccggttccagctgctcttgggtctccacatcggatggagccatgggctgctggacatccagaacgtaagttggttgctgctcctcctgtacaggctgctcttccaattgttggggctgctgctcctggggcgcatcgtgcatctggatctgctgcatctgctcctggtattgctggtaggtcagctgctgctcagaaactggtgcgggaggcagataacggtgtgcgagctctggctgttgctggaatttcgccatgacagcttccatttggggcatcatcgtgggatcaatggccatctgaactggaactgttacgggtgcaggtgcaggtggcaggtagcgagaggagggcatgacttcctgctcatccactgcagcgggaggagtgagaaggctgctgggcatgggctccatctgaccctgttcatttggacgcatgtactccacttgctcgggcagctcacgcagctcctgctgctcgatgctcatggacacagcgtgctccggatgaggtggtggaaggtagctggtgctgggctgtaagtgggacacatcggcggcggccaggcaggcgcacaatgcgagggtcaggacgaaggttttctgagaaggattaagaaattgaagagttttttaaatttaaaaattaaggttaaggttttcttaaattattttataaaaatttttataaattaaagataatgtgttaaatattagctttatttagtgttatttcatatcctctgttatcgtcttatggagtttgaaaatcctcgcctaatacttaccatcttgttggatgtatggctgtgaagcgtctgatgttggaacagatcgaagatatgatatttatacgagtacagcttcaatggagaccttcgcctggtacaaccaataagttaaggtagcgggtttcggatcgagttccgttatttgatttgtcgtcggttttggactttgattttctttagttttggcgcatctcaacaaacaatttgacaaacaaacattcgaatggctaaatatccaagtattccagctgattcatcaccactggccggccgccaaacaaaccatagcaattcgatcccatccgatccaagtcgaacctcaattggactcactttaagccgcttttggccattttcgtacccttgcagagggtagtatgactattagttcacacaaggaagcgattctatctaaaaaaaaaaaaaaacatttacagccggtacataaatagtttatataaaaacataataaatgccttattaaaagtacaagtgcactcaaagcaaaacttattattattataattattaattaatccaaatcttataacagtttataaaacataatcgactgattatattcattattaatatctttatccatattataatattcatataggttgtgatactcacacaagttcgtagaactattaatatatcccttgaagtttaattctaattctaaaatagagtatgcaaacgtcaccgtgccaaaacacgtatttcttcatttttagcttttctcctctctttatttctgtcctcacctgctgacaggtgccacttgatggggcgtttgacaatctcaattgggctcgagagctccggctcgaggcgtataaactggagtacggttggtctgggaatccaaggttccccgaattcgattttcactctgtgagttttgcacataccctcctgaccttcttcttcagatttcacggtcaatggatagattgtccaaccccgggcgaagatctgtgcgaatctccaaaggggccggaccggaaaagcaaacataggaacttgagtttaaatgggtttatttcctttaattattacaattggcttttaccttggcatattttttggaacaatgtttttcttattgtttgttattaatccagttaatccagattcgttacaaagtatgtaacaggtagacgaaaacgtttccgatcatatcaagtatatatccagatttatatgtccgtatgaacgtcgaggtcttagaaactataatatcttaagattaaggatgcagatttcagagacatagatgcagcgtatgtttgttgactgccacgccacagtatatgccaaaaagaatgtttaactttcttgttcgca

SEQ ID NO: 29708 - DNA, 792 bp, DROSOPHILA
atggccaaaagcggcttaaagcgaaggtctccattgaagctgtactcgtataaatatcatatcttcgatctgttccaacatcagacgcttcacagccatacatccaacaagatgaaaaccttcgtcctgaccctcgcattgtgcgcctgcctggccgccgccgatgtgtcccacttacagcccagcaccagctaccttccaccacctcatccggagcacgctgtgtccatgagcatcgagcagcaggagctgcgtgagctgcccgagcaagtggagtacatgcgtccaaatgaacagggtcagatggagcccatgcccagcagccttctcactcctcccgctgcagtggatgagcaggaagtcatgccctcctctcgctacctgccacctgcacctgcacccgtaacagttccagttcagatggccattgatcccacgatgatgccccaaatggaagctgtcatggcgaaattccagcaacagccagagctcgcacaccgttatctgcctcccgcaccagtttctgagcagcagctgacctaccagcaataccaggagcagatgcagcagatccagatgcacgatgcgccccaggagcagcagccccaacaattggaagagcagcctgtacaggaggagcagcaaccaacttacgttctggatgtccagcagcccatggctccatccgatgtggagacccaagagcagctggaaccggagcccgcccacgaactccgtgccgatggctatcactataaacaagccgaggaacagcgtcgtctgcggcattga

SEQ ID NO: 29709 - protein, 263 aa, DROSOPHILA
MAKSGLKRRSPLKLYSYKYHIFDLFQHQTLHSHTSNKMKTFVLTLALCACLAAADVSHLQPSTSYLPPPHPEHAVSMSIEQQELRELPEQVEYMRPNEQGQMEPMPSSLLTPPAAVDEQEVMPSSRYLPPAPAPVTVPVQMAIDPTMMPQMEAVMAKFQQQPELAHRYLPPAPVSEQQLTYQQYQEQMQQIQMHDAPQEQQPQQLEEQPVQEEQQPTYVLDVQQPMAPSDVETQEQLEPEPAHELRADGYHYKQAEEQRRLRH

SEQ ID NO: 29710 - DNA, 3717 bp, DROSOPHILA
cgaacgtgtcgtgctacaaaattactagttttattctcaactcctgcaaaatcgtcagtgttttgcaaaaatgttgaaaaaattcgtggaagtgaacgccgagtgcagtccctctaacaatccctatgagattcgtacctttctgggcaacgaaacgtcgccggaatggaaggcggagaactgtccgccccgcgatcgcgtctgtcagaaaaagccacccaactccacgatctcccaagtgctaaccatcgaggatgagctgcgtcgcatccaccacaaggcggaggaatcccgcttcacaaagccctataaaaagaaatgtgacctctacgacgatttaaccatgtgcatcgtgccacaacgaactccagcggagctaaagacccatgccgagatgcgagagcgaattctggccgcgcgcaaggactttggactcgtcgagcacgacgccagggtcgataggccatgtcccaaagatctcgtcgtcctcaacagtcccatggacatgggcgaggaggaacaacaggcggaggagggcgaggaagaggaggagggcgaggtcaagccacaactagccactccagaatgcagttctgatatgataattattccggacaaacgcatggtatgtttagatatagcttataaacttggtatagacaatatttctcgattcgtataaactacgtatcccaaattaccaccatttccaaattatctgcggattattaaattttaacatgatcataataagcaattctggtttattaaccttttaatcaatcaaatcgaatttgatttaaactaaattatgaagtagatctcttattgttgttgttttaagaattaatcttaataaaagtcgaaggccttaagtacttttttggtgaaatgaactcatttaagttcataacaaaacgatttgttgattataaataacagtcgactacgctgaggcataagtttagactagctttaaccttttgataaattgatgtttttactcgatcaattcgatgtcatcgatatcggcgtaaatacttcccggtggcagttccgaaagagcgatttctcctggatcgtcttgcccatctccatcggtagtcgccagcgacaggttatgataagctccagaaacagcctgttgctgcatgtgcactcccagctgggagataagttccaatgcctgtacatccgagttcatcagagcgaactggtggataatggctagatgcggaaaaaccccattcagaagagtactggttccagcgttaatctgatcatccgggttttcctggtcgccatgtgcctgcagaggtatttccccctctgcagcatctggtgtgctggatggtgaggacatcatggtgggctcacatgttaccagctccacttcattatccccctctggatgatcggacatgatactgttttcgctggagagattgacaaaatctgccataacagctgcttttgagattgcttcgcctggattatccagctcccgttgcatgaagttcggcagtgcatgcttaaactccacaatgatgtcttcgacaggcaggtcctggttcaagggattttcgccctggtagcccaattcatcggcctcgtacttgtacttgttgcggaatcggcttagccatcgataggatggtctgaaggatggcaggttcaacacagctgccatccggatggcggtttccttcagtttttggttccttatgctgatgttcaactgcatttggatgcacctttccacccactcgtgtagtaggaagctgatggcactcatttcgaacttgcggcgcttgcgcgtcatctcttcgattataatggaggcatctgcctcgcttaaggtggccaactgctgcagcagatcctttttcttatccaagattctacgtatttgggtggcgcagcagtggaacatcttggccagactgttcctagagatgttggtctcgtcatagtaacggattacggcaatcttttcgtagaatgtcaggatgttacgctcattgcgacgggatttgatctaaaatatagagagggaagagtataagattaacctaagattagtattaaatatattttaagcaatttaataaattattagatatctgcaactattagggtacaagccacatttgttgaccacctcttatatcctgtcgaaaatttccatgcagaagtgttactgggcggataagtaattttttctctcagtgtcgtatatatatatatacgtatatttcttttccaataagctctatagaatttgtacatttttatagataatattattgttgtatatgaacatagtgcgaatttggcattacaatgaaaacagaggcctatacgaactgcaacactaagctagccttaagggattaacggcctccgtttcgatcatgcaaagggtgtgcatgtaaaggaccttggttgcaagccacgcagctcaagggtaaatgaatgtacgatatgtgtgcggtatacatgtacatatgtatgcatatgcttgtgtacacgtgtttagtgtaactgccgcgtgtccactcgagacacgttataaaatccaccctcagcgggtcgcttaagggccaagttaacagacatatctggtcccttgtccctttgcgactacttacccctttggtgttgttgttgttgttgcgccgcaacgttgttgttggcagggcggcaatagcagccatttcaatagttgtgttaagtcaattgcaactaggtttctgctctttccgttctccttcttttccttctccacttcttcttttccgataactgcgcagcagcttcttgcgctcttacggctgtagtcgttccgctctcgcgccacttagatcatgcgtcagagggagatagagatgtgttcgtgcgagactcctttttgaagctgttacagagaaaacgtaataaaacagaaataaaagcaatattaatactgttgatgcaaatggctaagcgtttgttagtcactttttacgaaagttggcacggcacgttctcaaattcgctttgcctctgtattagcttttgttgttgcgcctctgacatttttacaattactgagtaataacacacttgtgtgccctgtttctgtttcttggttccgctcttcgtttctctgcgcctgtgtgtgtgtgcgttcagtgcgcgctccgtatgaaataaaaacggttcactatgctcaatcccttttgcatggtgtttgctgttgtagcaacgcagctgttacttttgtacagtgcaggtcaagttactagcgtacttcactagaaagggtattaaaccactagacaatgcttagatgatttgattgtaggaagagattagagctgattctggcaaaccagggaagcaagcagaatattttgggtttcataagtaattatagttggcgaaaacaaaacaatatatacaatttcatatttgtcatattaataacaaatgcagttatcaactgcagaaaggcttaattctagtaataaaacatggcagtttttttatgaattaatattaaggctttcaaatattcaattacagtccttatcctgcaaataccccaaatactttgggaaccctggtaacatcgactacttttaaggcgttaattgttaatttgctgatcttatgtatctagtatatatgtacatatgtatacatgtataaatacatgtctgcacctaaaaagtg

SEQ ID NO: 29711 - DNA, 1104 bp, DROSOPHILA
atggctgctattgccgccctgccaacaacaacgttgcggcgcaacaacaacaacaacaccaaagggatcaaatcccgtcgcaatgagcgtaacatcctgacattctacgaaaagattgccgtaatccgttactatgacgagaccaacatctctaggaacagtctggccaagatgttccactgctgcgccacccaaatacgtagaatcttggataagaaaaaggatctgctgcagcagttggccaccttaagcgaggcagatgcctccattataatcgaagagatgacgcgcaagcgccgcaagttcgaaatgagtgccatcagcttcctactacacgagtgggtggaaaggtgcatccaaatgcagttgaacatcagcataaggaaccaaaaactgaaggaaaccgccatccggatggcagctgtgttgaacctgccatccttcagaccatcctatcgatggctaagccgattccgcaacaagtacaagtacgaggccgatgaattgggctaccagggcgaaaatcccttgaaccaggacctgcctgtcgaagacatcattgtggagtttaagcatgcactgccgaacttcatgcaacgggagctggataatccaggcgaagcaatctcaaaagcagctgttatggcagattttgtcaatctctccagcgaaaacagtatcatgtccgatcatccagagggggataatgaagtggagctggtaacatgtgagcccaccatgatgtcctcaccatccagcacaccagatgctgcagagggggaaatacctctgcaggcacatggcgaccaggaaaacccggatgatcagattaacgctggaaccagtactcttctgaatggggtttttccgcatctagccattatccaccagttcgctctgatgaactcggatgtacaggcattggaacttatctcccagctgggagtgcacatgcagcaacaggctgtttctggagcttatcataacctgtcgctggcgactaccgatggagatgggcaagacgatccaggagaaatcgctctttcggaactgccaccgggaagtatttacgccgatatcgatgacatcgaattgatcgagtaa

SEQ ID NO: 29712 - protein, 367 aa, DROSOPHILA
MAAIAALPTTTLRRNNNNNTKGIKSRRNERNILTFYEKIAVIRYYDETNISRNSLAKMFHCCATQIRRILDKKKDLLQQLATLSEADASIIIEEMTRKRRKFEMSAISFLLHEWVERCIQMQLNISIRNQKLKETAIRMAAVLNLPSFRPSYRWLSRFRNKYKYEADELGYQGENPLNQDLPVEDIIVEFKHALPNFMQRELDNPGEAISKAAVMADFVNLSSENSIMSDHPEGDNEVELVTCEPTMMSSPSSTPDAAEGEIPLQAHGDQENPDDQINAGTSTLLNGVFPHLAIIHQFALMNSDVQALELISQLGVHMQQQAVSGAYHNLSLATTDGDGQDDPGEIALSELPPGSIYADIDDIELIE

SEQ ID NO: 29713 - DNA, 2917 bp, DROSOPHILA
aaattatggtgttcacctttagagtcggcttatcaaggggggagggccccacttaacgggggctattttctagagggcggtgtctgcacttttctacgcagcaggaaacagttggaaatcaattttcaagctgactttacacagctggcactttttgcgtttcgaaatcagaaccagcgatctgaagagttggagtcttgaacttttggctcaattagttatcaacaaatgcatttcaactagctagctgcaagtacgacgtttgtgcctaatccaaatacgtgatcggcggctccccattccgcctgcacttcgcgataatcgcattccatgagatgtcttccataaacataacattgcatatacacatgccgtccattccaattcacccacacacccatgcagccgtgtttaatttggattttcggcaatccttcgattcggctgcggacttgggctataactcaccaaaatgccgagggaagcagcagctccttgggctgaatccacattttgattgttcttagcccgtgccaggctctaaatacaaaattactctttgtttaattctgcatcgagcgctgattgctgtttttgtggcaagtgtgcccgttggctggaaagcacaaaacgcacaaagaactaagcaatctattgtgaatgggtgcactctgcgtccgatttttgaatcaaatagttaacgtttagttaaacctaagaatatgaatctgtatcttaacttcaattaagcgaaatatgttctctccaatttaaaaacttgttggcttttagaagccgaatagagaaacagaaaatgttcattattaacagtttaatattacgcaaagttaccatataaattacatagttagcctttagctttaaatcgaaactgaaacctctcatttatataacaagttcaaagcccaacgaacgtgtcgtgctacaaaattactagttttattctcaactcctgcaaaatcgtcagtgttttgcaaaaatgttgaaaaaattcgtggaagtgaacgccgagtgcagtccctctaacaatccctatgagattcgtacctttctgggcaacgaaacgtcgccggaatggaaggcggagaactgtccgccccgcgatcgcgtctgtcagaaaaagccacccaactccacgatctcccaagtgctaaccatcgaggatgagctgcgtcgcatccaccacaaggcggaggaatcccgcttcacaaagccctataaaaagaaatgtgacctctacgacgatttaaccatgtgcatcgtgccacaacgaactccagcggagctaaagacccatgccgagatgcgagagcgaattctggccgcgcgcaaggactttggactcgtcgagcacgacgccagggtcgataggccatgtcccaaagatctcgtcgtcctcaacagtcccatggacatgggcgaggaggaacaacaggcggaggagggcgaggaagaggaggagggcgaggtcaagccacaactagccactccagaatgcagttctgatatgataattattccggacaaacgcatggtatgtttagatatagcttataaacttggtatagacaatatttctcgattcgtataaactacgtatcccaaattaccaccatttccaaattatctgcggattattaaattttaacatgatcataataagcaattctggtttattaaccttttaatcaatcaaatcgaatttgatttaaactaaattatgaagtagatctcttattgttgttgttttaagaattaatcttaataaaagtcgaaggccttaagtacttttttggtgaaatgaactcatttaagttcataacaaaacgatttgttgattataaataacagtcgactacgctgaggcataagtttagactagctttaaccttttgataaattgatgtttttactcgatcaattcgatgtcatcgatatcggcgtaaatacttcccggtggcagttccgaaagagcgatttctcctggatcgtcttgcccatctccatcggtagtcgccagcgacaggttatgataagctccagaaacagcctgttgctgcatgtgcactcccagctgggagataagttccaatgcctgtacatccgagttcatcagagcgaactggtggataatggctagatgcggaaaaaccccattcagaagagtactggttccagcgttaatctgatcatccgggttttcctggtcgccatgtgcctgcagaggtatttccccctctgcagcatctggtgtgctggatggtgaggacatcatggtgggctcacatgttaccagctccacttcattatccccctctggatgatcggacatgatactgttttcgctggagagattgacaaaatctgccataacagctgcttttgagattgcttcgcctggattatccagctcccgttgcatgaagttcggcagtgcatgcttaaactccacaatgatgtcttcgacaggcaggtcctggttcaagggattttcgccctggtagcccaattcatcggcctcgtacttgtacttgttgcggaatcggcttagccatcgataggatggtctgaaggatggcaggttcaacacagctgccatccggatggcggtttccttcagtttttggttccttatgctgatgttcaactgcatttggatgcacctttccacccactcgtgtagtaggaagctgatggcactcatttcgaacttgcggcgcttgcgcgtcatctcttcgattataatggaggcatctgcctcgcttaaggtggccaactgctgcagcagatcctttttcttatccaagattctacgtatttgggtggcgcagcagtggaacatcttggccagactgttcctagagatgttggtctcgtcatagtaacggattacggc

SEQ ID NO: 29714 - DNA, 600 bp, DROSOPHILA
atgttgaaaaaattcgtggaagtgaacgccgagtgcagtccctctaacaatccctatgagattcgtacctttctgggcaacgaaacgtcgccggaatggaaggcggagaactgtccgccccgcgatcgcgtctgtcagaaaaagccacccaactccacgatctcccaagtgctaaccatcgaggatgagctgcgtcgcatccaccacaaggcggaggaatcccgcttcacaaagccctataaaaagaaatgtgacctctacgacgatttaaccatgtgcatcgtgccacaacgaactccagcggagctaaagacccatgccgagatgcgagagcgaattctggccgcgcgcaaggactttggactcgtcgagcacgacgccagggtcgataggccatgtcccaaagatctcgtcgtcctcaacagtcccatggacatgggcgaggaggaacaacaggcggaggagggcgaggaagaggaggagggcgaggtcaagccacaactagccactccagaatgcagttctgatatgataattattccggacaaacgcatgtcgactacgctgaggcataagtttagactagctttaaccttttga

SEQ ID NO: 29715 - protein, 199 aa, DROSOPHILA
MLKKFVEVNAECSPSNNPYEIRTFLGNETSPEWKAENCPPRDRVCQKKPPNSTISQVLTIEDELRRIHHKAEESRFTKPYKKKCDLYDDLTMCIVPQRTPAELKTHAEMRERILAARKDFGLVEHDARVDRPCPKDLVVLNSPMDMGEEEQQAEEGEEEEEGEVKPQLATPECSSDMIIIPDKRMSTTLRHKFRLALTF

SEQ ID NO: 29716 - DNA, 4250 bp, DROSOPHILA
ccagccaaaccacagaattcagttaacgaacgaaacgaaaagcgagcggataccgcctcgatcgaagcgaaacataaaaaataaaagcccctggccagttggctttttgttataagagccattatcgcaaggtttatcgggaaatatagtaaacgggtggcgaactcaattgtccggctcgatcgttcagttggccaacagacgtcgcgtactgcaaaagcgcactcaacccgatcgatttgagtcccgcatacggggcgtgagaatatctcccagtatctggaaaccacccctatatatcgaacagtcactgcaaaatgtattcagcaccagcggcaaaaatcaagcactttggctcccttaaaacggtagcagcttgggccggaattctcggagtggtaagtcggcgctggcaattcaatgttacagtctaggccgccaagcgaccgcgaccccattcccagctcatcgataagtgatatggggagatgttcgacctgacattgagcgcacttactaagattggatggtctctccctatcgaatagtccagtattccaacagtcggagagctaatcatgatacgagtataatactcattgactcatccgggacggctcccaaactgaagaactgagccgcaccacagatatcagataatgccgattgacgtgtgtaaacaagtgaatgaacaaaagatctagattgggacactaaaaaacgtaaacgtaaataagtacatacaaaattggatatttcgctgggtatgaataatatcacgatctagaagccatccaacctctttaatgacggaacacgaagaacaaacgataaaacaattttatttaattaattttcaatataaatataaatttaaaaaaacatgacaaacaaaaaccgattaaaaatagtgctcatttttattcagtgtggctctgacgttttgagaactcctcttattttattgttatttttatttcaggcccagtccatcatctggatgggcttgaccataacagcgatatgtgcctacaattgtgtcctgtatattacaaatgacctcacctatggctccatggtcaagactgtattctttgacgtgtacttcaagggcagttgcaagatgaatcccagtgattaccagaactacgaccaaaccatcctgaatacagtgactactgtttttgatcccacccagattttgatctggaattcggtctacctgggcgtttcggtttgctggctaatcgtctccgttgtgctgctactgtgtaagtactttaagaaccggaaatgaactgcatacatagttaagatatcgaagcctttatgattcacgaggagaaatctagaaatttatttgtgaggcatccaaaacttacgcatggcacacagccgtaaagcccaaataaacaaaacttgatgataagttcgctgggaacttatatgatgggttatataacgatttcattaatggttctttcccaccatatacaattttcagcatttgctattggctttcaaagaattaagcacattagcccacaagtaaactggaaagtcttattctttgttatagacagatatattcattcatacaattcgttttctaaagttaaaatatagtagcatggttatagttatagttatgactcaatcttaatactgctcaaatatgtacgaaacatatcttatctagtaattgattaattaaaatttgttaagtgctatttactttaattttgaaaccaaagtgattagctttttgacacattttagagcatactttactcgtacataatggtctttaaaattatattacctaatgactccattataagattgattgatgtatcgccaataagtaagcccatttaagtatcacatgtttagcgccctgttatgttcctgacagcacttgcccgtaatggattacacttaagttaataacccgcttatactcttaccatttcaggggtgcgcaaggacaacccgaagcagaccgtgactgccatctacatctgggccttcttcgtggccaccatatgctgcatggatgtagcttctggagtgatcttcggcgtggactacggacgtttccacaaggaggctctgaggtataatgccaatagtatcaatgctggtgtcatctatcccttggctgccaccttgatcgccggaggagtggctgccatttccatgatggtcatctccttcaagggattcgttctgtggttcattaactttggactgctcgcataccttgtcgcgagagccattcgaatttccaccgataaggacaatgtggtaagttgtggtcaggtcggcgagtgagctcatcgcccaccaatgctgagtgacttcttcgttgtctccgctgattccataaattttcgacactgcctttgaaaatattccaacaacgtagaagttaaaaatcgccgggcagcgactacgacatggctaaacttagcactttgtcgccattaactcaatgtggtggtggtaattgctgataagctggtttccaatttggcaccaggtttgcctgatagcgggctcttggcttttcggtttggtttgaccgagcacgctggaaaatgacgacttactgggccttaggtgcgggggttctttgcaaggacagttcgcttgaactgaggtgttcttaactcagtgtacacttaaagtatccttaaaaagcctcaaatatcttccttaatataaattaattacaaaatcttgaatgagctatagctatcttgcctaaaatcaaacaaacatgcccttttccacaggatactttgttcaatcctcgcaaggattccaatgatattctgaccaccaggaccccgattcgcgcctacgaggagtaagtataacgattcacacatccttaatgtcttgaaaataattctcgatttgtatggacagggtggaggtccaggcgtataacaatgccgcctacgttccggaaacccgttccatggccgagaccatccaggtgaacgagggagccatcgtgcgggcggcgcacttgtcgatggactcgaacctaatggatcgtcgcttcagggacctcaacgcgtaccagcagtacccgcctccgaatccgcagcaaagtcgcccgctgaagcaatcttcgcagaatcccatggagaccattgtggtggccacctcgggattccccgtgccggactactccccgcagcccagtcccaatggcgttctgcgccacaaccagtactagattactaagccccttggcgcccccaaaaaagccctcttcgatactataattctcaaataatcccagctaaagtttagttcaaattttatcagggggggcaacttcttctgcgtttttattcttatttatttgcatgtttataacgatataagtgtacagctgtaaatatataaagccgttctagttccgcagtggaatggtatttgtttatatatgctaatttgttttttttttttttttttgtagagctgataaggaaataaatcggcccccagcaacgattaattgggagtagataagaaatacaggaggagcatcgacgtgttgtcggaaattaagatgactgctttaatctttagtctgatctcaacatttagaagagataaaagtaaagcacctgtttgaaaaatacattatgtatgtttgatttctttacattttttaatatttcaaatagaagcaaccattttgacaacttatgtaattgaagtatttttgtggtgcactattttctaattaaatcgaaagtgcgaaagctcaaatttaattataagaaatacagtccaccaataaactaaataaatcttgaagttttcaatctgcccgccgaaatgttgggcagtgcgataaccggtaatctattatcgctatcgatatgcatgccttacgccatttttaggcacattttgaagaagccgctgtttactcgggtcaacaaaagttcacgaattatattctggattgtgataagccgggcaatattcgactttcatcccgattgccgggcattaaacgtagcgtgtgtgttttcaaatcggatcacttgtcaccgaaacacccccgggaacggttggaaaattcatctcgccggcagttgcctttgtttttgactgggaaaatatggtattcataacgaaattcgcaaggattgggctgcaggccgcccgccagcttagtgtcacgccccttggcgccgtccaggctcgcgccattcacctga

SEQ ID NO: 29717 - DNA, 993 bp, DROSOPHILA
atgggcttgaccataacagcgatatgtgcctacaattgtgtcctgtatattacaaatgacctcacctatggctccatggtcaagactgtattctttgacgtgtacttcaagggcagttgcaagatgaatcccagtgattaccagaactacgaccaaaccatcctgaatacagtgactactgtttttgatcccacccagattttgatctggaattcggtctacctgggcgtttcggtttgctggctaatcgtctccgttgtgctgctactgtgggtgcgcaaggacaacccgaagcagaccgtgactgccatctacatctgggccttcttcgtggccaccatatgctgcatggatgtagcttctggagtgatcttcggcgtggactacggacgtttccacaaggaggctctgaggtataatgccaatagtatcaatgctggtgtcatctatcccttggctgccaccttgatcgccggaggagtggctgccatttccatgatggtcatctccttcaagggattcgttctgtggttcattaactttggactgctcgcataccttgtcgcgagagccattcgaatttccaccgataaggacaatgtggatactttgttcaatcctcgcaaggattccaatgatattctgaccaccaggaccccgattcgcgcctacgaggaggtggaggtccaggcgtataacaatgccgcctacgttccggaaacccgttccatggccgagaccatccaggtgaacgagggagccatcgtgcgggcggcgcacttgtcgatggactcgaacctaatggatcgtcgcttcagggacctcaacgcgtaccagcagtacccgcctccgaatccgcagcaaagtcgcccgctgaagcaatcttcgcagaatcccatggagaccattgtggtggccacctcgggattccccgtgccggactactccccgcagcccagtcccaatggcgttctgcgccacaaccagtactag

SEQ ID NO: 29718 - protein, 330 aa, DROSOPHILA
MGLTITAICAYNCVLYITNDLTYGSMVKTVFFDVYFKGSCKMNPSDYQNYDQTILNTVTTVFDPTQILIWNSVYLGVSVCWLIVSVVLLLWVRKDNPKQTVTAIYIWAFFVATICCMDVASGVIFGVDYGRFHKEALRYNANSINAGVIYPLAATLIAGGVAAISMMVISFKGFVLWFINFGLLAYLVARAIRISTDKDNVDTLFNPRKDSNDILTTRTPIRAYEEVEVQAYNNAAYVPETRSMAETIQVNEGAIVRAAHLSMDSNLMDRRFRDLNAYQQYPPPNPQQSRPLKQSSQNPMETIVVATSGFPVPDYSPQPSPNGVLRHNQY

SEQ ID NO: 29719 - DNA, 2593 bp, DROSOPHILA
caaaaaccgttccgataaccgtttttttaccgtttcgctaagtaaaatcaatcgttttgcgcatgagtttttcaaggagttcgcatggatagtatcgggaaatccgtttttgagatattatttttgaacctgttaactatattctttcggcatgccttaagctcaatataaaatattaaatctttgaaatattttagtttaatataaaaagaacttttatacaaatttaaccaattctcaacagacatcgtcagcactcccttggaaattcgcataattcggaatcagctgaatttcaatctattatcgaacgaatggccagtttgggacccaattcccagctaagcaagggtgcagatgaaaatcttttgctgtaagtagttcaacttaatgtcgaagtaataaaaacaaagactcatctatgaatataattaaaattattttcagagccgattatgtcacctggaatggacccaacacgaagcttcttcaaaagcagatcactcaaggacctaatgctagtcttctcacagatcgcacctataagccaaggggtgggaaatcggaactctgcaaaggaccccagtccggattggcgaagggcagcatctacgcccaaggcagcaacaagagcgccaacatcaaatgcaactaggcgggagtatctcatctggaacctcccccagagtgccaaagaagtgaagatgaatcttagtagccaagcaccaccctccacatgttcagacttacgatttatatatgtcgtagtgttttttgctcttatccttaaacacctaccaaataccacacgagtacgtagactcaccaaaaaaaaaaaaaaaaaaaaaaaaaaccgaagtcacattccatccaagctccaattgtttttagtaactcgtaaataaacaaactttaaaactaacaaacttatttaatattaatgcgcgtctggagaaaggggattatggggattatggtacaaaaagcacatgggtgtaatctagacctcgtcctcgttaaggagcatgtttggtataccatcgctgatgggaaacacacgacctgtctccgggcactccagttgaccctcgagcacgtcgatctcgaagagcagatggtgaagcttctgcaaaagcagttcattctccacaatgttttcaggctgaacggcaggaatgtcttctgtgagttccgcctaaaaaacaaattccaattattaacgaatataaaaaataacaggttttaatagtttaaaactgattaaaaatatttgaaaccagtaaatttgaaatcagtaacactatttagaaccattctatggttcttttagaaccattctatcacttaccacctgagcagctccatagaccgctgaccagtccagcttgggaaggattctctccacaaaagttggattaaattcgctctccaccacttcctttttgttaatctaaatgcaaaaacaaatagaccgtgaaacaatcaatagccaggacttgggacaccggaactcaccgtcagtttcaggggaaatcccactttgacgcccttgatggccacggaggtcaagaagttgtatgtgctgagtttcattttcgggcttgtaatggtttaattaatacaaagagatgaggtaaacaacaatgtttttaaataatagttgcggtgcacgttgtattccttcttcttcttgctttaaacattcacaattggtgtatgtcatcgataccacgatacacacttgtcgatgttttgcagcagttggcaacgcgagcagtgtgttaaatatttaaaacgtccacactgcacaaattttaattggaattctcacaactgtcgcattttaagcgtttaaatctgtttctagatgtaaattaggttggaaaacctataatatcagtgactgcgagcggaataaaggagtgaggagtaaaaatggaggacatattccactggtgccgcgagggcaactcgattcaagtgcgcctctggttggatgaaacggagcacgacaacaatttggggtaaatccaatagaggcaactaactccatcactttctagttgctttatagtgcacttagaaagttaagccctcaagtagcaaccccctctaccaggaacgtttacttagtcatcgcctaaatacgcccaagatttcgagggtctttcaagtctaagtgacgtcatgatttattcttgtgttgtgtaaacagacgaatcaaatatataagtatacgtatgttcatatttgcctgtgtgcatatcgcgagcataaaacccgcttgccatgtttatattgttctttacttataattagtcttataatcctttaaaaaggaccatacctaactctaagagcataagtatataaggtctataatgctcaaattccaccataattaaaataaataaaacaaataaattcgtacactttagagacgaccatggcttcagcccgttgcattgggtggctaaagagggccacgccaagcttgtggagactctgttgcagcgcggttcgcgtgtgaacgccaccaatatgggcgacgacatcccactccatttagcggcagctcatggccaccgcgacg

SEQ ID NO: 29720 - DNA, 375 bp, DROSOPHILA
atgaaactcagcacatacaacttcttgacctccgtggccatcaagggcgtcaaagtgggatttcccctgaaactgacgattaacaaaaaggaagtggtggagagcgaatttaatccaacttttgtggagagaatccttcccaagctggactggtcagcggtctatggagctgctcaggtggcggaactcacagaagacattcctgccgttcagcctgaaaacattgtggagaatgaactgcttttgcagaagcttcaccatctgctcttcgagatcgacgtgctcgagggtcaactggagtgcccggagacaggtcgtgtgtttcccatcagcgatggtataccaaacatgctccttaacgaggacgaggtctag

SEQ ID NO: 29721 - protein, 124 aa, DROSOPHILA
MKLSTYNFLTSVAIKGVKVGFPLKLTINKKEVVESEFNPTFVERILPKLDWSAVYGAAQVAELTEDIPAVQPENIVENELLLQKLHHLLFEIDVLEGQLECPETGRVFPISDGIPNMLLNEDEV

SEQ ID NO: 29722 - DNA, 2945 bp, DROSOPHILA
aaataataatatatttgcattaaagcgatatgttgatgatgatgattttgtccagtgcaagaagttcgtttgcattggaaatatttagagaaaagctgtgggttcacttcgcacctggtgggtcatccgcatacgcagttgacttattgatttgcacacacgacaaaaaattcaaaagccacacatcacagagcaaactctcggcgattctcggttgctgctattcgcgtgcctaaatagacagctaatttgaagttctacgaagcgccatgacgtaggcgccctccaaaaggccacccgcttctcataaagccaccctttttgctggaaaacggaagtatttcagcagttaaccaacgctgattggttgagtgtttgcaaaacgttggcttgtcaggcttgtgaaatatgtgggtgattggagggggctggtggcgcaggagctggtggaaaaacctgacggaaggcgcttctgatgaggagctttacggacgacactctggacacgctgacaacgatgacggcaacacgaacggacagttcttgcattaatttgcatgcggaatcaagcataagtctatctacatacgcacagtgggagtggttggaacttatattttctttttgaaaaatataataaatatatttttatggaataaaatattattgtatgtaactatactatgtaaccaaacacaacaaagtgttttatcttcagaaaaattgcacttgtggttcgaaatatttgtctcttccgtcagactcccacccgaattgcctccaaattgccgatcgatttcgagccacccacagttgctaaattcgttgaattgagctgaagtaactgaccgttggctgtcgcccgttgccgacttgaatacttgttacataatcttgcctgacatatgtttgcataaattttcgaattctcccccgatgccgtgcataattgcaaattaaatagagtgtaatgaaggaacgacaggcgatgcgacgcgattcaaaaaaaaaaaaatgtcaacttaccggtaatatcgagcggagtgtccgcccttctgacttccgccgtcaccggtggctggtgctcctcctcctcgtagtcccgcgcatccgccggacagtgatagggcacacaggaggcggactccacagacatgttaaccggatattctccactgtaaacgggcgtgctctgactactgtcgctcctcgcccgcgtgctgcaattgctgatgccgctgtccgttccggtggcactgatcatgggcggcgaagtggtcaaccgctgagcgggggactcggccaccgcctccacctcgacatccggatcctcgagctttggggttccaggcagcgggtgatgttgcagctgctgttggctcagatgctgctgctgacttaggtgttgctgctcggcgctgtagctgcgcagcggttccaaatagctcggtggcaacacggtgcgatttggagcgggcgtggaggatctgcctggtggcgcatagtggggcgttgggcccgcaaaggcaccgaaaccacgtgattgataagaagcggaagaactgtatggcaagggtggtggtggctcgtagccaggctgagattgctgaggatgtggctgctgctgctgcggtagctgctggtagggatgcggtctgggcggatagtggagtacgctggaggggattatctgctggccagccggcgtgaacatcccctgatggtgctggctatagtgcggcgaggcgtacggagcatagcgatagtagttaggcatgtaagaagcactagaagaagacccatagccgtagccataggtatggtagccggtgtaacccgatctgtagggttgcggcggatagtgtgacattgtcggcgtaagatgttgcggatgatgatgactatgatgctgatcgtagaagctggctggatatcgatccgacatgttactccctgggactactcgttagttattccaccacagcaactggagtctaggtgtcgtgagccccatgccctgccgattggacaccatgtcgcttgtgtccggtgtcctcttacatgtggcgtttttattgatttttgccttttcggccaataacaaatccttcggcttcccttgcctttgttgtccttgtctggccacgcttggctgccctttatttatgttcgaatcaattttcgcaacacttgcagttttcttattgtcctcctgtgaatggagcgaatgaaaagaagaagtgagcaagggaggtggctttattatcagttggaaatagtatgtcccgtgtgagtgttaatgccacgacatttgacggcccaaaggaaatggtaatgccaatggcgagatcgttaaacagcagcccatggctgggaataacgagacaattgcgctcggggccgcagacaattcaattaacatcgggccaataacgttttatgtgctatgtgagctacatggtcctggggtttggttggccgagttacgagggaaattatgtggtttcaagactacttaactgaccaggactaacagagaagtagggcattatgaaaatacttatcatctactcacgacatgtgtgctttatcattaaaaaaaaaaaaatttttgtttaaattacaattgattgaaagattattgttttaatctaagtctcattgataaattaaaagatcgtgttgaatgtatgaaggcaaccttgttaggcaaaagaacgacaagcccacaaaatcctccattgtggatccttgagtttgactgagtgcaatccagacgttccatacatgctaatgagagccagcaactcgccgaataattgccagcgatgttatgatgcacgaaatgcggttgctgactgaagatggctaggaaatgggaaatggatggtggcatgggatgatgggtctggcaattggggagctggaacggcggaaagtatgtg

SEQ ID NO: 29723 - DNA, 945 bp, DROSOPHILA
atgtcggatcgatatccagccagcttctacgatcagcatcatagtcatcatcatccgcaacatcttacgccgacaatgtcacactatccgccgcaaccctacagatcgggttacaccggctaccatacctatggctacggctatgggtcttcttctagtgcttcttacatgcctaactactatcgctatgctccgtacgcctcgccgcactatagccagcaccatcaggggatgttcacgccggctggccagcagataatcccctccagcgtactccactatccgcccagaccgcatccctaccagcagctaccgcagcagcagcagccacatcctcagcaatctcagcctggctacgagccaccaccacccttgccatacagttcttccgcttcttatcaatcacgtggtttcggtgcctttgcgggcccaacgccccactatgcgccaccaggcagatcctccacgcccgctccaaatcgcaccgtgttgccaccgagctatttggaaccgctgcgcagctacagcgccgagcagcaacacctaagtcagcagcagcatctgagccaacagcagctgcaacatcacccgctgcctggaaccccaaagctcgaggatccggatgtcgaggtggaggcggtggccgagtcccccgctcagcggttgaccacttcgccgcccatgatcagtgccaccggaacggacagcggcatcagcaattgcagcacgcgggcgaggagcgacagtagtcagagcacgcccgtttacagtggagaatatccggttaacatgtctgtggagtccgcctcctgtgtgccctatcactgtccggcggatgcgcgggactacgaggaggaggagcaccagccaccggtgacggcggaagtcagaagggcggacactccgctcgatattaccggtaagttgacatttttttttttttga

SEQ ID NO: 29724 - protein, 314 aa, DROSOPHILA
MSDRYPASFYDQHHSHHHPQHLTPTMSHYPPQPYRSGYTGYHTYGYGYGSSSSASYMPNYYRYAPYASPHYSQHHQGMFTPAGQQIIPSSVLHYPPRPHPYQQLPQQQQPHPQQSQPGYEPPPPLPYSSSASYQSRGFGAFAGPTPHYAPPGRSSTPAPNRTVLPPSYLEPLRSYSAEQQHLSQQQHLSQQQLQHHPLPGTPKLEDPDVEVEAVAESPAQRLTTSPPMISATGTDSGISNCSTRARSDSSQSTPVYSGEYPVNMSVESASCVPYHCPADARDYEEEEHQPPVTAEVRRADTPLDITGKLTFFFF

SEQ ID NO: 29725 - DNA, 4014 bp, DROSOPHILA
acctgaaattggttgtttctctacaagtaaatcatacaaattcgttacgtttatttgtttacgccagatattggaaatcaattcaagtaaaataaggcacttaatacaacaatgaaatcgattagaaaattaataagttgttagtaaatcggtagaaaacaaaaaccattttgccaagtacaaattagtgcggtggtttgagtgtgtctctgtatgggtgtatctgtagccgtgtgtgtgtgtttttgtgtatgtgtgcgtcagtgccctagactaaaatgaactgcattgctttaacattaactatctggctttagattaccgtagctaatctttaatttgtattggtattgtacataaattcctaaattatggtgttttaaattaaatatatttttcaatggcacatctatttgctatatgtacgatttttcgctctgtttaacttacttatttttggggtgatatcggaattttgaaccccaaaaacaatggcttccgattggaaacggagctgtaagcgatttttgagttgagaaaaaatatcctcgaactcctggaggccttgaaaacatttagatcccaataccaactgcccaagtagtttgactaaacctagagttacatatacgaaatgcattcttatgtacagtgggacaagatttcgactcacatgctggatcgatttaaaaacgcattcgatttaaaatacattgaactacttaattaaatattcatgttcatgtatatgatattgctaacaacatttggcttcttgtttcctttggtttttctatgttttctatcttcattgtggtaaattttgaccgcactcattgctaacaatgcccccctcaacaacaactcttcgggggatacattttctaattttgaccggaaaaggcacacacagagaatatcgaatgagaacgactatgcacgactacaacaacactaaccctaatctatatatgatccgctcgatatcggtggaccgtatctagtagccgttgcagcggatttccccgtagcgagctcttggtcttccggctccataggccgcgtatcgctcatacgccatgtagtctggtatctcgtagccatagtctcgcattcgattccttggatagccgccttggttctgttcctcataaggatagtagttgtgcgtggccatggccggggactcgatgtagcctccagctgaatgagatggacagttgttgggtgcactgcctgcatattcttcggctaatcgctctactagggattccggcgtttgcaggaaacgctcggagaagcgacctatttcggtggaaccaaaggcctgcaggaatcccggtaaaggtttgatgtcctgtcgggagttacaaggtatttattagaagagatgtttaaattttctattctcttttataaaaaaaaaataattattttaaatagaaaaactaaattttcgaaataaaaataaagatcagaaggtgctgtaacaactaaatgttagctcaccctaatttgttccctaacaattggctccacagcctccatattttcgatctccccggcttgctttttgaccgacttgcgttttgatttcttgctaggaatgagatcgcactcgatgatgcggttgtggctgctgcgattctttccagatgttgcacaccgcttgaggttaccaacctgctgctgttgttgctgctgctgcaactgcaattgctgctgttgctgctgctgcagcaggtgagccaaggcgggtggcacactcgcattttggccgaaaccaatgggcgagttctgaggtgccggcggagtgcgcgggcgccgcgtcgttggactccagttgttcgtcacaggatgttgctgctgtcgctgttgcaagtggaaagcacaaaaatcgattaagtttttttccaagtcgatttgcagcggcaaagttgttacgctcaagtagcgagtacttgaacaactttgctgtcagtctcccctcggactctctgcaccctactatcatccccattccccgacagctggcagctcgtgttaccaggcaacccccaaaagagccacctcctcatttttcgaaccagctccaatcgtacttgccagccatccagacagccgggtgaagttcaacgtagcgccccaaaaatcaataggcgccccattttgtgtactgctggagcaccctgtaaaaaggcttccggctgtggttctctccatttgagagcttttcccgtgctttctctcaatttttacggactgctccgtcagacttttttatgagtaaagccggtcgatggagctaaacgcatttcgcctttggccttctcttttttggccaggactggtgatgagtgtgggttgctgtcattatcaggctctggttgctcgcctgctttggcctaatttatcccgtcagtatggcaggatacccgccccctgattgcctcttaattataccccttatatatccacgctgcacctgcagcttaaatttgcaatttttcccgcccgcgctaattcgatttcatccaccacttaccgcatgttctggcctctcgtcggccgcctctgttattggatcaccactagtatcctgcggcgtcgtcggcacatccaaggatgctgctgagtccggctgcaaattggtttccgcactcttggcaacttgcgatgaagtgggcgctgtaggtttcacctcatcagcggccactggcgacgtagcgcttatgtcatctgaaaaataagttaagacttaagctggaggaggctttgacaaaaaaaatcaatagtgaaatgatgggattcccttttccttgcttatctttgcgcaattctggagctccaattattttgtcatgcgtgcaggcggccatcaagggttaaaaaccgggcccccaacattgaccatccaacgagaaatcgaggggctttttcgcacacgcttatcaaatcatatttcccgaggccagcaagagagagagagcgatagtacgtccagagagcgccatgcacttgttgaacgtggctaacgcacacatacacaccgcctcatgcacccacacaggcaaaagagcggacagtgagagcggagggacatcaacaaaaagtgtagcgcacttcttggcgcatgcgactgcctgcaatgtttacgtattttcgtagggctcgaccaaacttttggacttgttgttctcattctggcagtaactgcaatacatttaatgttatattttttccctgaatgtcacgaaattaattccgccattacttaattattcacttaattttcactttgaagctagtgtccaaacatatgattttaaaaagttcaattttaaatgaatcaaatttacttgtgcttcctatgccactaaaatgggctcatttgcattctgatttttactgcacttttttcacataacggacattgattttcgcctccatatggtggctaaaatcggaggttgaggttgaagtctaatttgaaccctggctattgcaccagggagctgtttctattcttgtttcagggtgtcgttggttcctcccttgattagtacacagaaaaaaatattcattaaatattttcaacgctattcgaaaataaggttaaaaagaatttcggcattataagataatagaaactggaaaattatcttccctttttcttctgtgcatgtgtttgcgagtgtttgcctgtctttcctgtctgtgcttgactaacggtagtaaagcggcaaaagcagcggcaaccaccgcattacgctgaaaagttcatttacatgctggctgtgatgacatttcacgcacacacagatgccagaaagacacccttagatattgctgtgtgggtgtgcttgtgtgcgaaagaagtcaaacgcccattgataacgatgtagctccacaaaaaaaaaaaaacaggcaaccaatacaccagattttcaaaaacattacctgaactttggaaaaacaggcaaaaataacattgttaggtcattttaacataaa

SEQ ID NO: 29726 - DNA, 930 bp, DROSOPHILA
atggcgctctctggacatgacataagcgctacgtcgccagtggccgctgatgaggtgaaacctacagcgcccacttcatcgcaagttgccaagagtgcggaaaccaatttgcagccggactcagcagcatccttggatgtgccgacgacgccgcaggatactagtggtgatccaataacagaggcggccgacgagaggccagaacatgcgcgacagcagcaacatcctgtgacgaacaactggagtccaacgacgcggcgcccgcgcactccgccggcacctcagaactcgcccattggtttcggccaaaatgcgagtgtgccacccgccttggctcacctgctgcagcagcagcaacagcagcaattgcagttgcagcagcagcaacaacagcagcaggttggtaacctcaagcggtgtgcaacatctggaaagaatcgcagcagccacaaccgcatcatcgagtgcgatctcattcctagcaagaaatcaaaacgcaagtcggtcaaaaagcaagccggggagatcgaaaatatggaggctgtggagccaattgttagggaacaaattagggacatcaaacctttaccgggattcctgcaggcctttggttccaccgaaataggtcgcttctccgagcgtttcctgcaaacgccggaatccctagtagagcgattagccgaagaatatgcaggcagtgcacccaacaactgtccatctcattcagctggaggctacatcgagtccccggccatggccacgcacaactactatccttatgaggaacagaaccaaggcggctatccaaggaatcgaatgcgagactatggctacgagataccagactacatggcgtatgagcgatacgcggcctatggagccggaagaccaagagctcgctacggggaaatccgctgcaacggctactag

SEQ ID NO: 29727 - protein, 309 aa, DROSOPHILA
MALSGHDISATSPVAADEVKPTAPTSSQVAKSAETNLQPDSAASLDVPTTPQDTSGDPITEAADERPEHARQQQHPVTNNWSPTTRRPRTPPAPQNSPIGFGQNASVPPALAHLLQQQQQQQLQLQQQQQQQQVGNLKRCATSGKNRSSHNRIIECDLIPSKKSKRKSVKKQAGEIENMEAVEPIVREQIRDIKPLPGFLQAFGSTEIGRFSERFLQTPESLVERLAEEYAGSAPNNCPSHSAGGYIESPAMATHNYYPYEEQNQGGYPRNRMRDYGYEIPDYMAYERYAAYGAGRPRARYGEIRCNGY

SEQ ID NO: 29728 - DNA, 2249 bp, DROSOPHILA
aatgtaatcaagtgagacttgcaaaaatatagtatgtatttcgtttgtctcttacttgttaatcaatgttgtaagggtttttacacaatggtataaatttgagaaatgttttatttttatattaaaatttgtttaaaataatatttatatcaaattttgaaatttagacagatggagtgcgcattttgatgcgtattatataataacaatctaaattatcgtacgatgaattttcacaattttgcttaagggttttcaaaactaagcttcttgttaatcgaattatacgtaatccgtttcctgacaaatacattttttcgaattcaaatatttgttccaagtggtaggtaagcttatcgcgcctgtttgttattatcccttatctttatgggacctccacattgttcttgggtctgccgctgttttatggtctgactattcttgggccagtcaacgagtatcggtcgagataaacccgctcaattatttattaatatacaccgtttcgaagggtacggtaaatatttattactggattttcaagactttgattttattggattcctcgaaggaaatgtaattcgattagatattatggcggggcttgtaattatacaaacaaaagtgttctgagaactcaagtttttaaataataaacgtatttggtttgaaacttgtctaatagatgggctgtgaattcatgtggaagctaggattgcaagcagaaactgtggcatatttatgggcttaacataaaatgtaaagaaaatcatgtagaaagcatgcgatccacatgtaaaattacttcaaagtacaaacattaaaatgtattcatataaaattatggtttatgatacgaaaacaagcttttaaaaacgaaactaccaaaaacattttatccgtaattttccagtcaagttttagttatttttgtctaaattttgtataaatttttggccgtcacctggcatcattgactgaaaaattaaaaaaaaaaaggatgaccatggaactgcttgcgcggcacaatcttcagaaggttgaacagctcacgaccttcgatctgaaatatttctttatcatctacgccatcgtcgtcctgatgatcctgggtgttccactggccttcctacttcaaagcaagggttcggcgaacgaaagggatcgttttcaattggaagccaatcgatcgcgcgtggatccagtgaggggagaaacccggcgacgaatccgggattcgagtgcctaataagcttttgatattgatgttgatattcatggaaatacattgaatgcggcgcaacagcggtctgtttgtagtttttcctagtctcaaaaccccaaccccaacgtgtctggcccgcttgtggcacactccataaacgttaagccccctttcaaaatgcacataaacgaacccgagaaatctaatgtaaaatcaataataattacgccgagtaggccatcggcggttgggtcacgtcagccgatttggacacttgttgcatacgcaaacaggaggaagtccggtgcagttttggctcgcgagcgtcagctgagatacaagatacgagctacgatgtgcgagatactcagatatacagggcgatacacagatactttctgggatggtcaaacagacgggcagtcttgaaaatttagctccaacatgtgcaacgtgcaacggcaaacaattagggcgacgtgtggcagatgtttttccttctcgaaagcaggactcttaaaaaatcagagggttgcgaggaaggagaagtggtacaataacaagccagttcggcaggcaaaaactacctgccgttgttgtcctttcaggaattgaaaaaaatttttatgtatatatatcccaaagaaacccatgcaaagccacgccaggtgcagctggaaaactggcgaaaagagtgtggaagagataggcagcaacaaggatgcccctttcaattttgtgttttcgttatccttcggttttcctgctgatcctgtttttgtccaactcccggctataggtgcaaatatgcagctgccctcgaacttttcaatatcgatcttctgggattgtcccgctgcgagaagatttctggtagtcatttgtattgcatacgtagataatgaatttgctgggattttcgagcaaatcgaattacgatttccaagccaagggaaaatcgaatagtgttaaggtgaatacattaaaggaagatgagtgttttgtggcatcatgttgtggaaat

SEQ ID NO: 29729 - DNA, 249 bp, DROSOPHILA
atgaccatggaactgcttgcgcggcacaatcttcagaaggttgaacagctcacgaccttcgatctgaaatatttctttatcatctacgccatcgtcgtcctgatgatcctgggtgttccactggccttcctacttcaaagcaagggttcggcgaacgaaagggatcgttttcaattggaagccaatcgatcgcgcgtggatccagtgaggggagaaacccggcgacgaatccgggattcgagtgcctaa

SEQ ID NO: 29730 - protein, 80 aa, DROSOPHILA
MELLARHNLQKVEQLTTFDLKYFFIIYAIVVLMILGVPLAFLLQSKGSANERDRFQLEANRSRVDPVRGETRRRIRDSSA

SEQ ID NO: 29731 - DNA, 8267 bp, DROSOPHILA
ttacccaatttgacaatggattcaagtgggaaagcacagcttgtttcagctccggcgttggaaacttttccaaaacgcttttcgatccgattcaaactcattttcgttcgcttaaaatgcaaatatcgtggataattgagccgcttactttctggtggctgctgcactttgacggcgggttatatcgtgggttatataatgacaattagacccacagtgacagcacacgtcaacgcttatgaaaatgtgagagctagctgcaggttagtgagcagatgggagcggggctgaaactcatataaaaataaatagtaaatatatatacattggttctctactgctgtacatttttccataagtgagttgctttcaatactgggaaatatacatacatatatgtaatcgctttgtaatacaagaacccctttaatgctatgaggtactgtatcggtaaaatttttgctaaggaaataaaattacttgaaataatttgaaatgttttcgctatttttaaaactttagttttggtttgaggtatgttcttaaaattatgttccaaatctaaataaagttagtttaaaaatggtttgtcagttatttcaaggatttagttttaacacaaaataagtagttttcctcgtaataacagtagaaggcagatacttaaattagtggttaagggatagagttttctgtatgcatgttatttcaaaattttgatctttgaaatcagatcaagtggaaaataacagcttagtgccccgagtattcaaagtaacaacaatattagccagtgttttaagtggcccacaaacttggccagtaggcaataacaaatacgaatacaaactcagcagcagtagcagcaacaagctctctttccacgcatacacctgcatttcccgccccactctcttcctctttcttccctctccaaatttgaggctctcgcagcagttttgtttgtggctcagtttcattcaaagcttcgtgggggcagcacacacgtcgcttgctcgctcgttttgttgtttttccgttcgattacacctttcgcagtcgtcgttggcagcgctgcacgcgtctcggtcgccgatcgtttgtgtttcaatatattcaaaatatattgtttaattaacgcagtttggcaagcgaaagaaaaaaacaaaaaattgaatttttaataaattcaatgaaaatttgaaattgagtgtgagtgccaaacgaaaagaaatcgaaacaaaagtttaaacaaaaacccaaaatttcccaacacgcatcaccactatttgttgctatttgtttattaatttgacatcgttgtatcaccgtgacatgccacaaagtaaatcaaacaaaaaacacaataaaacaaaacggaaacaagccacaatttttcgatgtaaaaaatatatataattaaagagaaaatcgcctttctccaaccgtccagtgtatcacaaaaacaatagtgccgccaccagcaaaaactacaaataaaataaaaaacagtagcgggtgcgagggaaagaggcgtagagagcgggatcactggaaagagcgggatccacggccactgccccgttacgtttcggcaaacacacaaaaacaaaaactgaaaaatccgaaaaaaagacctcataaatcgcgtgttttttttttttttttttttttaatgtgtggatccaactggaaatttctattattttgtaattgaattcgtagcactttgctttcggcacgttgttttacaaagtcgaaaaaagcagacattcctggaaaaatccgcccacgctgaccgccaaaatcgctgattcacttattcagcataaggtctggtgtaaagggggtttaccttttgaatcatcctttgttggcacttaaaatgcaattctcgtaagcacttcaagtgaattaaatggttcataaagctattttaaaagcactcagaacttatggtgtctcacatcccatttgttaaggaacagtgaaaatggcgtttggagatgcaagaaagtcttcaatgaagtatgaaccatttattataggaatttctcatttagtgtaattgacaaaaggttttaaaaggatttagcccgttttgaagacattggcactttattttcaagatcagctgattcagtggcgtaaacaaagctttgaaagccaaaagccgttgatccgattcaataaatgttgaataagtctttgagctctctcttttctttgttcactctcttatcccgttaacaaaaaaaaaagtgtgatgcattttccagtgcgttttcgctgcttttagatttttgaatcactttgcttttggttttgagttttctgtgtgacgtttgctctttcggctgcagttgttggctctttgtgttgcctttcggccaggcttgtataatcgcttgccacccaattacgctgcgtcgccgcattcgatgtttgttgcacattgtgtttccacttcctcttccgttcggagagaaacggagagactgagagagcgagacagagagcaactggtgccggagaaggagagggagtgtattcgggctttttgttacgtgcgccgttacaaatgacacgaatgtgaataaaaagcattgagcacggactgtccctcttcctccacttccgcaaaccccaccccaacccggatacttccacaaacctatccctaaaacaccgagaaaaactgaaataattttgacatggtagtatcatctaatttcattttaaagtttgaataaattttaatactttttataccattcatgatgaggctatatagtcgaaggggaaactttttaaaacattttatgtaaggatcttaaattccgaaaatgttaaaaaatgcactcaatgtatttattttcatgtacttaatcatggtcaaagtcatttttactttataaagatattatttgaggaattagggaatatattttttccaatgcatcgaaactcctcagttgattcttagtatttgttttagagcgagagcggagcgcacttcgaataattataaattaaataattatacaacacaagcaagaaaacagctttgcaactgattgcggcggccgtcgctgttgttttttccccgcacctgcactcgccgctgcttttgctgctcgtgcagtggaacacctgtaaaacaaaggcagctctatctgccacaaagctgcaactatagcaacctataccaatcttggccgatgtcgatgtcgtgctccacagcggatgcagctttagatgtagatgaagccaacagagccccaaagctctgtccatatactacacagtgattgctcccaaaattcaacttcggaatacaattaaaatttatagcgacagtaagccaaaaataagagagaactctattatcgataccctcgactactagataccccttacttcgctagtctgagcaagggaaacattttaaaactatgatttgcatgtttaagtgtaacctttaagctattgtagttccctggatcacagagttcaatacggctcggatactaatacttttcaaccattaacatggtagaaaacgcttcgttctatcggttacatacttttctacaaatctagtaaactttgcgagcagcgggaacgtttttaataatctttattgggttttattggtctacgagatctattcaaacgaaacaataataaaacaattatacttgtgtctaaaaataagtaataatacaaaatatttacgttttgtgctcaagaaaaattcaattgcaatgccttaagctaaagaaattttacagtattgagatacataattagaatcacaaccatggataattaagtcataattctgatttagtttttgacctttaaaatagttaaagacagaatacagatatccagccgttactaccaagttctttgaacttaaattactcccaatctgccaattaagcaacaaccgctgtaatttaaaagcgaaccagaaagccaacacaattttcgtaaaaactttaaaacaacgaaaaacttgttcaacaaaattgcaattacaaacaaagtttctaagaagcgagcgaaacatacacaaaaaagaaaaataaaagggaaaacaagttgaaactgttctaaacacagcacaacacatcagcagaaacaactagaaaagccacaaccactaatagttgctaaataacacaaatattcagcttttagcattaggttgttcttttcgagagcttgggatctgtatgttgttgtattttctgtattttgtgagtgggccccggcaggcagcagcattctaagcgattgtgattgagaactcccctgaagcgtttatacccgtgcacatattggcagtaggcgacttgttttggccaataattccatgacttgttccaaggctgggcccgagtcgtgagattaagcgaaattcgtttgtttgaacagctttttactcgattcattcggttcgttcggttcttatggtggtatatggtacgtatgtatacaagtatgtacactccatatgacgaaacacaaaaaccagagacagtggcaagtgttgtcacaattgtaacagagatgtctcgggatcgttttcgagctcttgagactctcgaaaaaggttcttgaactttacgacgaaatataatattaaaaacaaaaatccactctgaagaaagtgtgggggttatggccggagattttcatacatatgtacatatttatagccatatagagatcttgatcttgggaccacaacgctcttttatacatgtatttccctttctattcattgttttcattgcgaattctcacgcacttcgcacataaagctcatatgatttatgatcacgcggcctttgcctttgtgtgcaaagtggatcaggtcagtagattgctaatcagctaatcagatcgtgggtgatccgagagagtctaactaaacttgggcccactgccaggtgcgctttcccaaggcacgttttcgaggccttcagtgtgtctggatcaatgtggaatatgcggaatatgtcggaatatatcggagtatgtgcaactgtctgcgcttggtgccaaatcgatgttgttatgcccgatgtctgcgtgtctgacatattcaatttgaatattgtttattcaccagtcccgcttctacttccactctctccggcctgctgtttcgctttttttcctcatttttttcagccgtcttttcttttctagtctgcagttgacaactggcgacttttacttgcgatcgacgacggccaatgatcagcaattgacgttgacccaaaaagcagaacagccgcaaagttgattgaatgcgattgcagactgtaaactgcgactctctcattgggactttaataaacaaatatagttctgtttttcaaagtatcattcgtcgccaccctgggggttcatctgaaaatgtgggctatgatgccttttagcaggttcaaatactacttctaaaagtggggcataagatggatgtttaagacgaaaattaatgcatcaaacatagcgtggttatttaatgattgcgatcaacgaaattcttaaattaagtaactgctgactcagttggaatttgaaattggttccaattaaaatgttttgacatctaactgaaatctacgacagtccatatatgtcaacttaattaattccataactatccttatttgacgtgtgattcattcatgtacaaaaggtgaatcaatgcagttgaatgaagctaatcggaaagacacaaactacgaaaatggtatagagtttatacaacgattcttaggtataaaacagtcggtaagtttcccgagaaacttattgttctaagtgatctgtgaattctctggcgctctctcttgctcatactgtcaaacatatattgtcatactggctttctaaccccgacaattgccagtcataaagcgtgttctatgaattgtttttatgacaagcgcgctttttgaagggcattctcaatcgttgacgtttcgaaacgttcgctctttacggggcgtatacgcaatacgtgaacaacaaatgtggtttttggctaacggaagtgtcacggtgaacaaatttcaattattattgaacaaaatgctttatcttaggctaaaacgctgactttgaattgtgaccgaaatagaagtaataaacaaaaagaatgtagccgcgcgacgcgactcttggaattccaaaactaaaccaaagataaaatggcaaagaatgatgcgcagacgctcgtaaataaattaataagcccaatcaacaacacaacgaaacgacaagaaaacaaatcaatttgcaaatgaataaccgaaagtaaccaaccaaccaaaaagcgaacacaaaggggaaattccaataataacaacaataataaaaaacacaattgcatgacgacggtgaaggcgaaagtaaaagccattgccccctttcaccccccgaatcgcatgaagaataccacaaaccacaatgtccaggtgtgacaaccacaaatcccgccgccaacagctgcccgttccggcgcccctgtcctcctcccactccaactcgtcctcgtcccgctcgcaaggacaccaccaccaccaccaccaccagctccattcgagcaactcggatctgggcggcagtgagtccttcctgcaatattgcagcgatagcgaaaagaggccaccaccgattgtggtggttgtgggcgatggcaggagccgggtacgtcgggtggtgcgcaccgcaacgcggcacgtcaccgtggtcagtctgtccacccggcacaaggagacccagacgcacacctcgcaccatgtgacggccgtcaggtaagctatgggcgattccatccaacccatccaaatgggcatttcgaaccagctgggcagacacttaaaaaaaaatcgacaaaaagtatatttgatttctgagataatagatacaggccacattttgtttgcaaccttgatgtgttcattaaaaatgtgtaaagcaaattataaatgttaatcccaccacacatgtctaaagatatgtaaaagggctatcaccattcgaatattttaatgtaatcaagtgagacttgcaaaaatatagtatgtatttcgtttgtctcttacttgttaatcaatgttgtaagggtttttacacaatggtataaatttgagaaatgttttatttttatattaaaatttgtttaaaataatatttatatcaaattttgaaatttagacagatggagtgcgcattttgatgcgtattatataataacaatctaaattatcgtacgatgaattttcacaattttgcttaagggttttcaaaactaagcttcttgttaatcgaattatacgtaatccgtttcctgacaaatacattttttcgaattcaaatatttgttccaagtggtaggtaagcttatcgcgcctgtttgttattatcccttatctttatgggacctccacattgttcttgggtctgccgctgttttatggtctgactattcttgggccagtcaacgagtatcggtcgagataaacccgctcaattatttattaatatacaccgtttcgaagggtacggtaaatatttattactggattttcaagactttgattttattggattcctcgaaggaaatgtaattcgattagatattatggcggggcttgtaattatacaaacaaaagtgttctgagaactcaagtttttaaataataaacgtatttggtttgaaacttgtctaatagatgggctgtgaattcatgtggaagctaggattgcaagcagaaactgtggcatatttatgggcttaacataaaatgtaaagaaaatcatgtagaaagcatgcgatccacatgtaaaattacttcaaagtacaaacattaaaatgtattcatataaaattatggtttatgatacgaaaacaagcttttaaaaacgaaactaccaaaaacattttatccgtaattttccagtcaagttttagttatttttgtctaaattttgtataaatttttggccgtcacctggcatcattgactgaaaaattaaaaaaaaaaaggatgaccatggaactgcttgcgcggcacaatcttcagaaggttgaacagctcacgaccttcgatctgaaatatttctttatcatctacgccatcgtcgtcctgatgatcctgggtgttccactggccttcctacttcaaagcaagggttcggcgaacgaaagggatcgttttcaattggaagccaatcga

SEQ ID NO: 29732 - DNA, 945 bp, DROSOPHILA
cacacacgtcgcttgctcgctcgttttgttgtttttccgttcgattacacctttcgcagtcgtcgttggcagcgctgcacgcgtctcggtcgccgatcgtttgtgtttcaatatattcaaaatatattgtttaattaacgcagtttggcaagcgaaagaaaaaaacaaaaaattgaatttttaataaattcaatgaaaatttgaaattgagtgctaaaacgctgactttgaattgtgaccgaaatagaagtaataaacaaaaagaatgtagccgcgcgacgcgactcttggaattccaaaactaaaccaaagataaaatggcaaagaatgatgcgcagacgctcgtaaataaattaataagcccaatcaacaacacaacgaaacgacaagaaaacaaatcaatttgcaaatgaataaccgaaagtaaccaaccaaccaaaaagcgaacacaaaggggaaattccaataataacaacaataataaaaaacacaattgcatgacgacggtgaaggcgaaagtaaaagccattgccccctttcaccccccgaatcgcatgaagaataccacaaaccacaatgtccaggtgtgacaaccacaaatcccgccgccaacagctgcccgttccggcgcccctgtcctcctcccactccaactcgtcctcgtcccgctcgcaaggacaccaccaccaccaccaccaccagctccattcgagcaactcggatctgggcggcagtgagtccttcctgcaatattgcagcgatagcgaaaagaggccaccaccgattgtggtggttgtgggcgatggcaggagccgggtacgtcgggtggtgcgcaccgcaacgcggcacgtcaccgtggtcagtctgtccacccggcacaaggagacccagacgcacacctcgcaccatgtgacggccgtcagacagatggagtgcgcattttga

SEQ ID NO: 29733 - protein, 122 aa, DROSOPHILA
MSRCDNHKSRRQQLPVPAPLSSSHSNSSSSRSQGHHHHHHHQLHSSNSDLGGSESFLQYCSDSEKRPPPIVVVVGDGRSRVRRVVRTATRHVTVVSLSTRHKETQTHTSHHVTAVRQMECAF

SEQ ID NO: 29734 - DNA, 2387 bp, DROSOPHILA
tgcgagataggattgctcgttttccggctaacgtgaccacgtcgaagccgattctttggctggtgccctcacctcgcatttcctctgtgtagaatccttgaagaatgcgtcctctatcctgcagagccgagcatattttgtggaccagtgtagttttacccactcctgaaaatcatgattacatacataataaacaaatagcaaatattttcccagctaaatttgcacctggtggcccagttagtataatggttatatttttttggttcttcatgtcggcttattattacaataccaattttatagaatatttttgtggtgaactagatcaaccaggaatggatcattggcagttccaaaataaatcttaattaatgcacacatatttagatttaatgagttttaaatttatcaaagaaagaaaatgcttatgtataataatgagcataaacttaagattgtttatgcccttcttaaataagatgaaaacaacaatatattttaaaataaaacggtcgtcttaaaatgccacatttgatgcggtatattttttgaatacgatagcgtattttgagttgcatgctctatggtcacactgcggtgccccccagcacgtccacactgtttccaaacgtcgaacgacgagtgcgtcgtgtttttcgtcgcgcgtgaattgaaaatccgtaattccgagaatattcgtaatccccctccgatccgcaccaactgttgctcgcgattcgaagtgctggctctgaagtataatatacgaaggtcattcaattacaatacgagtgaagtttcaactcgcagcaagctgcattttcagttcttattgtgagattcaaagtggttctgcctgtttcgctgttttatcaccctctccaccaccttccctcattcgcgcgagtgcgtgtgcgtggcggggctataatgttttggccacaaaagcacatcgattaggagtgcagccgatccccgctaaggttataaacaaaacatgtccgaggccgatctgaagaatctatcccagaactcggatggcgaccaggaattgctgctgcatcagaccacgcagtccctgctgatggccagctccataatgtttgtgggaaaccaaggagggccgggcggttccgctgggggtgtcgccccacctggacccgtttccctgcccctgcccctctccatcaacatgccccatcaccatgtgcatgcgatgccctacaatgtggacgagctgctccgggagaacaatgccctgcacgccaagatcaaggagttgagtctggaacgcgatcgcctgctctgtgaagtgtccaatctgcgactggagctggacatgtcggagctcaagcgactgcccgtcgatctcgatgataagtgagtgcccaccaatgtttactatctagtaatatattcaaatatctgttaaataagggtgaattaatggcatatcatattttcctattggacatcccgcttaaatggaaacttccaataggaagagatgcactttaaaattgcggttgcaaaataattttcatggcatttgggggccagaaaaaatttgcaatgttcagcaatttgatttcaacatatttaaaaagaattttgtcgatattgttctagatgtgtcaacgagcattttacatattacaaagaacaatttctcactaaatactctgtaaaatgcggttgtttattttgtgatctcattaagagccaaaatattccattaagtaattataatcagtcaggagatagtattcatctttaaattgattatattttgaaacaatatatatttaaaatcttttctgctatactacctacttttaaagctcttctttaatgcttcttatcagagcggcatttcgcttttaagtttcaggtcaaggcctttgatatatctgtatatattgtagttttatttataccataatttaatctgcacataggccagttttttatttcccttttctgattagaaattaacattttagctgataagaaaaagagctggaatacataattcattcagtgaagatccttactttatattttgtggttgtgtgatcttaaaacaaaaacttgaagccaaagtaccatttcttcttcagcactcaaacaaaaccacaaaaatcattgattttttttttggatcgccattttcggctgcatttccgtgacccccaactccaatgtttccttgcccccgggttgagtcaacttctcgttgagtcacattcattcgtccccttgtccttgccaccttggcagctgcaggctgacaagtcggagtgcgacttctggtttttgcaacccctttttgcacgccggtctacctgtgggctaatcgacacagtcgtggtcgcaaaatgaag

SEQ ID NO: 29735 - DNA, 387 bp, DROSOPHILA
atgtccgaggccgatctgaagaatctatcccagaactcggatggcgaccaggaattgctgctgcatcagaccacgcagtccctgctgatggccagctccataatgtttgtgggaaaccaaggagggccgggcggttccgctgggggtgtcgccccacctggacccgtttccctgcccctgcccctctccatcaacatgccccatcaccatgtgcatgcgatgccctacaatgtggacgagctgctccgggagaacaatgccctgcacgccaagatcaaggagttgagtctggaacgcgatcgcctgctctgtgaagtgtccaatctgcgactggagctggacatgtcggagctcaagcgactgcccgtcgatctcgatgataagtga

SEQ ID NO: 29736 - protein, 128 aa, DROSOPHILA
MSEADLKNLSQNSDGDQELLLHQTTQSLLMASSIMFVGNQGGPGGSAGGVAPPGPVSLPLPLSINMPHHHVHAMPYNVDELLRENNALHAKIKELSLERDRLLCEVSNLRLELDMSELKRLPVDLDDK

SEQ ID NO: 29737 - DNA, 9718 bp, DROSOPHILA
aggtcaaagttgctgcatttatagcagtagcatgacaagatactatccttgttcctacgagaaatatgcaaggtcatcgatcaaaacgatgaaataacatagaaattcacatgaccctacatcattaaggcatcaggagaagagaccacgcgataggtcagtttgtcaaagaaactctctatttccccataaagttcattaggaatctagacggaaaactaaaacaccttgattcctagaactgtagttttaatggacggcatgtttttaccttatccagctcacggacttgaaatgttggcaaatgtacgagctcatcgtcgttacggagaactctctgtaccctttctatggttgccaggatacgttgcactgtttcatcgtagagctgtcctacgtttggccttgatttttccatgatttttcgggtcctatcgcatctgtcaggtgcttgagagaggacactacactcgtccactgaaagaacccagcttatttcgttagcgcacgactcttgctccataaaattaagctggaatatgaattttcgaatttcggcgggtcgactgggattgggtaatccatcacaagccaagtaactattccatttgtcgttacgcaacttttgtttctgaagttccttgtactcctcgacggcatctggagaaaaaaccttgctctatatattttacatataactctttttacaatactgtaccatcaataaaggctacacttgtcttaagatccgccaaacgctgcatatatatatttcttcgggccatccactcctcctccgaaagaagttccacggctggtttaatggaaaccgcgtcctggttcttcctttttaccattttataaaaatgtttttttttgtatttgttttagtgtatctgtgtcagtttataaatgtaactgactgcaatgacattttcaaaaatgacttatctgacaatatgaattattgtaaaatttatacagaaatcttgacaataccctaggagtaacttaaaggacgaatctcatttagaagcctttttaagtagacgaagagcatcgcgtctttattggaaccctcgagggtatggggattaagcgaataaatggcctgcccaaagtcattataattctgcagttaagggaattgttgataacactcctacgaataataatagtgataatagcaatgaatactcacgttaacattccgccaagtatcctcgtaacgaagcttcacaacattcacatcatccgaacacatctcggaaatcttgacaaaggttgtcttctcgggtgtaatacgcattgtgacctccgagtagtccgagttgtccttagctatcttcatttccacgatgatatcacgtcgttgggctaggcgattccagctggatcggcagaacttcatcagcttgcattgcagagccatggtattgtaggtgtgcagctctaaggcaatatgcttgatggagaagtaaccatttgtaatgtaataactagcatcgttttcagcaaaaatattcagattcctttcaatgagtagctgaaaaataaaaaatcggcgtcaaagaggtaaggaactctccacaaacctacctttctcagttcgcgaaagtccgagattggctcgacgatctccaagtacttgaccggcttggcagtatatcctttgaccagatcagtcacatagccacgcactcctcgtgctgagatgtagaagaacattcgcacatgaaatgtgtcgagactgaggatgacttcatctggactgtataggatgggattttatacatagagtacccctaagatgcgtaagaccgaccacttacttatcctcactgggctgcagacaccaatcgcggaatggaaagtgctcgtatcgcttgaaggccaatccgaaaatgcccaaacgatccgtcctaaacgtaagtgtgtttgtttctagattgatctgtgattccatgatgtactctttcgtccagtgatctaacaacactggtggttcactatccataggacgaaacctgtccatatcttccatcctggctgactttcttgttgatcgccgtttcatcaccgaaccactcctcctggtcctagtttttgaagtgcttggtatttccatcttattttctgatgtactaatggtaatcattatttctgtttcatttattttggttttagcgtctaaagcagtctttttgccatttacatttgcaaaagacgacctatccctaaaactaaaagcacttgatcttccatccgcgtttttgttttcccacttctccgcctttttctccgactttttggacacttggacctgaatttgatctaacaattcttggggcctctgcaagtatttttctttgatgtcctccaaagtggatagtaatccacacgccgtggctttattcccacactcaatagatggcataagctcagcagcagaagagaattcaatggcaaccgtcttttcgaaaatgggaaaagctctttcagggcgttcctgcgattcatattcgaagtagatttccgctggtgttttagcctccacagctgtttcggtatcaagcctttttactagacggtttggccttgactttagagcttcggatgttagttggtcttcgacgaattcgcttggaaacttaaacgaggaaattatgcgaggcagacacattttttccagcttcatgatttctatcttatttaacgatttgtccagattaaaattagctatcggttctccccttaatggaaaatgtccataggtaatactctgctttaggagtgatttcaaaggtggtgaaaactgattagccaatgtcgattgcacgctgccatcctcccttttggataattcagatgatatacgtatgggcgaaagtacatttagcgttacgagagtggacctgtctggagcccgtgttggggtctggagctcccttaaataatgacacacctcgggcttgccccacctgcacagatgtggcggtaactgtacggtaaccacaaagaacggcagctcttcttcgctcagcttcatttgggaagtgccgagcgtcattctagtatactcggtaagacgggactttcgattatcctgtttggccactacttggggtatgaccttcaaaacacggccatcctcgtgcaacactatattaaacttctcaaattgcgtttgatcaggtcgtcgcacgaaggagatgttatagattccgccaacaataatacactccctaagattaacctagcgatagatatgttattaaaagattttaatctttcgaaaaattaatcctgtcctctactcacctcctcgggtgtcaagcttagattgtctggatggaaataggtactcaggaacttcttgtattgatcctcttcgcgaaaaaggaactccttgaatacatcgggatacatgccctgaggaacaaggggcactgtcttcggggtcttcgggataactatctttggacgcttatcaccatcgccgcccttaccaaacttcgcctccttggcagcctgctcggttcgctccgcaatgagctgcatcagctcgtcatactcctctcttcttcgattcatgttgttcaaagtctcctcctggatatcgttctgcatcagccactcaccaaccacagactcctccatgtctgtgagtccagcattaggcataaaaatgctctccaccgtcaaaggttcgtagcttttggcatgcggcgagtggtggtcaaaatcggtgtggacacagcggatggtaatgcaatcacacagcacacttaggggtacctggaccttgacgctagtttccttaaaatcgacaatcattagtggtactctacgagagagatgattaaaaactactatttggttaaaagttatttggggatctcactccaattgctgaaagattatgggaacgttgtaaagaccccagagatccatgcgccatagatcacatgagtggctccacctagccactattccattaacggatcttgaatgagattttgaatatatcaaataaaagagctgcaaataaaacacctactccatataggccttttgcattcgcaatatgcgataagtaagtcgatcaaagaggctttcaatctccagttggacatctctgtagacctgtgagtagctcattggattagtagctctaaaattggatatccacccacttccaaaagatcaaccaaaacacttttattcatacgctccatttccacctcattgtccatcagaatatccacctgctgcaatacatccatacatttctttaaattactctcaaaataagaaccaggattatcaacagcggttctttgcaacactggtcgggtcaagtccttttggtaaatattttgtgatagaacactgcgttcgtccacccccattgtccagtcaatggagttcttcgtttcgatctcttcgaagtggcgaattttggccaggaaagttcgaatctcgattggggatcggaccttgggcaagccatcacaccgaagatactgatcccaacgaccttgattcgttcgctcttcctctagcagtctaaactgaaggagcgactctataaaacggatcgcaattattaccaactctatttgtattgttcaacactttacttctgaatgtagcacaggcggcggcaatatcgtgcattcgagtggtgtagttcttttggcgctccatcatttcggcttcacttatcagaaccggtgtttccgtagttgtaccaccttcttttcccatcttaacctttttgtccaaatctctggtattagtatcctactaaatatttttgtgtttttttattttttttgtttgtgtatagttgtgttgttttgtggttgagtacatgtatacatctgaaagttgaaacaagggctgtgtaggcagcaaacatattttgatagcctaaaaatatacgagttatatgttatatatataaatttttattcaagattatatggtatagatgtacaaagtatattgaaattctacgaaaagcttagaagacgtatttctttgagcatcctagtaacataatataaaagaatagaatccttatttcgcacctctgtggcattcggcaccatcgaatttatagcctgatgtagatccgtaaagttctgcagtttacaatgtaagcaatccatacacatttgataagaaatttaactacttacgccgatgtttcgccaagtgttaatgtagtttagcacaataacattcaccttatctgagcaattttcggaaatctgaacaaacgtggttttctccggtgtaatgcgcatcgtgacctcagaataatcagagttatccttggcgatcttcatgcccatgatgatatcgcgtcgatcggcgagacgattccagctcgatcggtagaacttcatcaatttacaatgcagtgccataatattgtaggtgtgcatctcgagtgccacgtgtttcattgaaaagtagccattttcgatatagaaactagcatcgttctcggcaaatatattgatgtttttgctaataaatatctgcagaagggatccgtttagataggaataacaaataaaccccttctttgtgggcttacctgacgcatttgccgaaagtctgatattggttccacaatctccagatatttaatcggcttggccgtgtaacccttgctcagatcagtcacatagcccctaactcccttacacgtgatatagaaaaagatgcgaacgtggaacgtgtctacgcatagtatgatctcatcaggactgaaaataaagaggaatgtgaggaattcgggttcgtcttggatttttataaacgcacttttcctcatttggctgcagtgaccaattacgaaatggaaaatgctcgtaccgcttaaaggccaatcccaaaagtcccagacgatctgtcttgaacgtaatgctattggtttctctatcgattacgacgtccttgacatacttagttgtccagtgggttacttgttcttcgctcatcgggttagtttttactgaggatttgtctgagccgactgtaactcgatccatcctgtccgtcttaacagatgagcgtactttgtcaccaagcttagaaaattttcgttttgctatctgtgcttctggtacatcatcctcctcctttacgcccagttttttttgcttcgatttcttgtcctgctcgtcgggttgacttattaagtcgatatgcttttcctgatatttcgatttaatgttgtcaaatgtttttagaagttccagcgcacttgttgggtttactggacctggttccaaatcatcgaagggaatgggatacttaatgggatccatttgtggaaagtaggggtacatccgttccggacccagcacctgggaattatagttaaagtctaaagtcttaacctgagtaacgacttcctctgcatctggacgcttgaccaaagcccttgggccctgcctaataaattctcgtttttcatctcgaaagtctacgggaaacttaaacgatgatatgatccggggtagacaatatttttccaatgtcctaatttccagatggctgagttttttttccagcttgaagtcctctatgggaactccgggcttcggagccgctccgactttactctgtctcagaaaggaccgaagactgggccgaaatatatttgcagaatcacccgaaatttgactgcctaaattgagcatacttctaccggcatattccgaatgccttataacactttgcatggtcggcacccagtaggattcgcgcttgtaatccgtcggaataaaatccttctccgttataaaatggcaaaccacgggctcactccatttgcaaagatccgcggccacttgaagggttacaataaaatatggaagttcgtcgtcttccagcttgattttagtgccccggtaggtctccctggttttcctgcctatatttgacttccgtacagcctctaccggtatatcggccttcatttctgtcagtatgtgaaccacccgtccatcctcgtgcaatacgatgttgaactgttcgaactgggtttggtcaggtcgtcggatgaacataatgctgtaaataccaccaagcatgatgtagtccctgagatttatctaaaggaggtgcaaggacattggcattatggtcgattattgatatcagaatattttaaggaattcacatttggtagattctttcgattttatagacattatattcgattatagattttataattattttaaataccctatttcggaatttcggaatatttcagaatgcaatgaattatcaacttatttcactcacttcgaacggctgcatatctaagtgccttggatggcatacctcatcgagatagccagagtactggctttcctctattctaagaaaatcttcatagatgtcgggaaacatgccagtcggaacatatggcggttcctttggtgcctttggaattgtgattttgaccatcttatcggggtcagtttgtttagcagccttagctgcctgctccgttttctcggcgatgagctccatcatgtcctcgtactctcgcctcctggttaacattaaattcaatgtctcctcctgtatttcgagttgcatgtgccattcgttgaccaccgaattctctatgtccactatcccagcgtttggataattgagcgatgccttaacggcaatttcgaagctcttggcgttttgcgaaatgttatcaaaatccatgtgtaagctgcgaatagttacgcaatctttaagaacactctttggtatctggacttcaacactcgtggcactaaattcggccaacattactggcaatctgaaatttgttcggtgttcttactattcagaaagtgcattcgtctggatgttacttactccaactgatcaaaaataattggcacatttcgcagtccccacaaatccaatctccaagggttacacgtgtagctccacacagctactcgaccatccttggatctagggcatacaaaggtggtcagaaaatcagatagtcataagatggatttatacagactccatataagcatcctgcatgctcaatactcgataggttaggcgatcaaagagatcaccaatttccgcctcgacttcggtgtaaacctatagtgagtgggcgttaaatttatctaattgatcttaactacattaacctacttcaattacatccttttgccttttatctgacattcgaaccatttcagcctcgttgtccagcattgcatccatttgtttcaatgcattcaaacacatctgaacgttatggtcatagtgttcgcctggattatctttgttgaccatcatcatacgtcgcgttttgtccaccctaaagatattctgagtcaatatagagcgttcgtccaccgacaaggtccagtccattgaattattcgtttcaatctcgtcgtaaaaccgtattttggacataaaagttcgtacttcgacgggaagatagggacgtggcaggccatcacaacgcaaatgatgctcccagtgttctcggaacattctatcaacctcctgattataaaaatcgcgttgggcacctgttggttttatattgtatacatttagttgttagtctattaatcgcttctcacccttgactaactccgcactaacagtgaaatcattaaggcggctcatgtaccgagcttctcgatccattacctcattttcggatatgagaggatatctgagaatcggttctgcaacgggcttggccgcggcagtactttttctttttaccattctaatattgttttgttaacttggtcgtgtggtaaggaaagtttggacctactgattttggcaaaagttttatattcatagttgctactccttgcctacttgttccattcattataaaagttcgtgaacaaccaaaaatcgtttaaaatataaaataatgtaatgtaatgtaatttattttaaaataaaaaacaataacttaattcgtttttaatacatatttgatgttcctgtgtaaagtacaaaacgcttatgcaaacaaatttcaagattttctcctctggctgagatccagaaactgaaaaataccataatctaatgccaaactttggccgcaagttggccaactaggtggatgtgggtgcgatggtcccgccccaataaagagaaaacgcaacttcccacacgaatctgtaagatttatcttggcctttgctgcattcgtgccaagaaaatagcatatcaacctgagagtggagaaagtgtagatgcaaagctggggataagccccgacgtcgagtcgactcaaagctgaaaagccaaaaggcacaaagacaatagctcgtttccaataaattgattaaattttatgttgcattgtgggcaagcgtatctcttccaggctccatttacatacgcggagcacgttacgtggcatgtcaaagcccgacgaccatcgacatgtctgatcgattacattgatgaatgaatttcaacaagccattccagcattactggacgtcaaaggagcaggacaacgacgtggacagagtctcctccacaggtagcaggcaaagccaaagccatggatacgtggatatgtgaatatcgggcatctggcatctggcatctggctttgtttatttgttgcaagttgtcttttataaataaatgttgatcccaacatcccaacagc

SEQ ID NO: 29738 - DNA, 4770 bp, DROSOPHILA
atggatcgagaagctcggtacatgagccgccttaatgatttcactgttagtgcggagttagtcaagggtgcccaacgcgatttttataatcaggaggttgatagaatgttccgagaacactgggagcatcatttgcgttgtgatggcctgccacgtccctatcttcccgtcgaagtacgaacttttatgtccaaaatacggttttacgacgagattgaaacgaataattcaatggactggaccttgtcggtggacgaacgctctatattgactcagaatatctttagggtggacaaaacgcgacgtatgatgatggtcaacaaagataatccaggcgaacactatgaccataacgttcagatgtgtttgaatgcattgaaacaaatggatgcaatgctggacaacgaggctgaaatggttcgaatgtcagataaaaggcaaaaggatgtaattgaagtttacaccgaagtcgaggcggaaattggtgatctctttgatcgcctaacctatcgagtattgagcatgcaggatgcttatatggacttacacatggattttgataacatttcgcaaaacgccaagagcttcgaaattgccgttaaggcatcgctcaattatccaaacgctgggatagtggacatagagaattcggtggtcaacgaatggcacatgcaactcgaaatacaggaggagacattgaatttaatgttaaccaggaggcgagagtacgaggacatgatggagctcatcgccgagaaaacggagcaggcagctaaggctgctaaacaaactgaccccgataagatggtcaaaatcacaattccaaaggcaccaaaggaaccgccatatgttccgactggcatgtttcccgacatctatgaagattttcttagaatagaggaaagccagtactctggctatctcgatgagataaatctcagggactacatcatgcttggtggtatttacagcattatgttcatccgacgacctgaccaaacccagttcgaacagttcaacatcgtattgcacgaggatggacgggtggttcacatactgacagaaatgaaggccgatataccggtagaggctgtacggaagtcaaatataggcaggaaaaccagggagacctaccggggcactaaaatcaagctggaagacgacgaacttccatattttattgtaacccttcaagtggccgcggatctttgcaaatggagtgagcccgtggtttgccattttataacggagaaggattttattccgacggattacaagcgcgaatcctactgggtgccgaccatgcaaagtgttataaggcattcggaatatgccggtagaagtatgctcaatttaggcagtcaaatttcgggtgattctgcaaatatatttcggcccagtcttcggtcctttctgagacagagtaaagtcggagcggctccgaagcccggagttcccatagaggacttcaagctggaaaaaaaactcagccatctggaaattaggacattggaaaaatattgtctaccccggatcatatcatcgtttaagtttcccgtagactttcgagatgaaaaacgagaatttattaggcagggcccaagggctttggtcaagcgtccagatgcagaggaagtcgttactcaggttaagactttagactttaactataattcccaggtgctgggtccggaacggatgtacccctactttccacaaatggatcccattaagtatcccattcccttcgatgatttggaaccaggtccagtaaacccaacaagtgcgctggaacttctaaaaacatttgacaacattaaatcgaaatatcaggaaaagcatatcgacttaataagtcaacccgacgagcaggacaagaaatcgaagcaaaaaaaactgggcgtaaaggaggaggatgatgtaccagaagcacagatagcaaaacgaaaattttctaagcttggtgacaaagtacgctcatctgttaagacggacaggatggatcgagttacagtcggctcagacaaatcctcagtaaaaactaacccgatgagcgaagaacaagtaacccactggacaactaagtatgtcaaggacgtcgtaatcgatagagaaaccaatagcattacgttcaagacagatcgtctgggacttttgggattggcctttaagcgtcctgatgagatcatactatgcgtagacacgttccacgttcgcatctttttctatatcacgtgtaagggagttaggggctatgtgactgatctgagcaagggttacacggccaagccgattaaatatctggagattgtggaaccaatatcagactttcggcaaatgcgtcagatatttattagcaaaaacatcaatatatttgccgagaacgatgctagtttctatatcgaaaatggctacttttcaatgaaacacgtggcactcgagatgcacacctacaatattatggcactgcattgtaaattgatgaagttctaccgatcgagctggaatcgtctcgccgatcgacgcgatatcatcatgggcatgaagatcgccaaggataactctgattattctgaggtcacgatgcgcattacaccggagaaaaccacgtttgttcagatttccgaaaattgctcagataaggtgaatgttattgtgctaaactacattaacacttggcgaaacatcggcgttaagatgggaaaagaaggtggtacaactacggaaacaccggttctgataagtgaagccgaaatgatggagcgccaaaagaactacaccactcgaatgcacgatattgccgccgcctgtgctacattcagaaagtcgctccttcagtttagactgctagaggaagagcgaacgaatcaaggtcgttgggatcagtatcttcggtgtgatggcttgcccaaggtccgatccccaatcgagattcgaactttcctggccaaaattcgccacttcgaagagatcgaaacgaagaactccattgactggacaatgggggtggacgaacgcagtgttctatcacaaaatatttaccaaaaggacttgacccgaccagtgttgcaaagaaccgctgttgataatcctggttcttattttgagagtaatttaaagaaatgtatggatgtattgcagcaggtggatattctgatggacaatgaggtggaaatggagcgtatgaataaaagtgttttggttgatcttttggaagtctacagagatgtccaactggagattgaaagcctctttgatcgacttacttatcgcatattgcgaatgcaaaaggcctatatggaagtaccactaatgattgtcgattttaaggaaactagcgtcaaggtccaggtacccctaagtgtgctgtgtgattgcattaccatccgctgtgtccacaccgattttgaccaccactcgccgcatgccaaaagctacgaacctttgacggtggagagcatttttatgcctaatgctggactcacagacatggaggagtctgtggttggtgagtggctgatgcagaacgatatccaggaggagactttgaacaacatgaatcgaagaagagaggagtatgacgagctgatgcagctcattgcggagcgaaccgagcaggctgccaaggaggcgaagtttggtaagggcggcgatggtgataagcgtccaaagatagttatcccgaagaccccgaagacagtgccccttgttcctcagggcatgtatcccgatgtattcaaggagttcctttttcgcgaagaggatcaatacaagaagttcctgagtacctatttccatccagacaatctaagcttgacacccgaggaggttaatcttagggagtgtattattgttggcggaatctataacatctccttcgtgcgacgacctgatcaaacgcaatttgagaagtttaatatagtgttgcacgaggatggccgtgttttgaaggtcataccccaagtagtggccaaacaggataatcgaaagtcccgtcttaccgagtatactagaatgacgctcggcacttcccaaatgaagctgagcgaagaagagctgccgttctttgtggttaccgtacagttaccgccacatctgtgcaggacggatcgtttgggcattttcggattggccttcaagcgatacgagcactttccattccgcgattggtgtctgcagcccacacgaggagtgcgtggctatgtgactgatctggtcaaaggatatactgccaagccggtcaagtacttggagatcgtcgagccaatctcggactttcgcgaactgagaaagctactcattgaaaggaatctgaatatttttgctgaaaacgatgctagttattacattacaaatggttacttctccatcaagcatattgccttagagctgcacacctacaataccatggctctgcaatgcaagctgatgaagttctgccgatccagctggaatcgcctagcccaacgacgtgatatcatcgtggaaatgaagatagctaaggacaactcggactactcggaggtcacaatgcgtattacacccgagaagacaacctttgtcaagatttccgagatgtgttcggatgatgtgaatgttgtgaagcttcgttacgaggatacttggcggaatgttaacaattataatgactttgggcaggccatttattcgcttaatccccataccctcgagggttccaataaagacgcgatgctcttcgtctacttaaaaaggcttctaaatgagattcgtcctttaagttactcctag

SEQ ID NO: 29739 - protein, 1589 aa, DROSOPHILA
MDREARYMSRLNDFTVSAELVKGAQRDFYNQEVDRMFREHWEHHLRCDGLPRPYLPVEVRTFMSKIRFYDEIETNNSMDWTLSVDERSILTQNIFRVDKTRRMMMVNKDNPGEHYDHNVQMCLNALKQMDAMLDNEAEMVRMSDKRQKDVIEVYTEVEAEIGDLFDRLTYRVLSMQDAYMDLHMDFDNISQNAKSFEIAVKASLNYPNAGIVDIENSVVNEWHMQLEIQEETLNLMLTRRREYEDMMELIAEKTEQAAKAAKQTDPDKMVKITIPKAPKEPPYVPTGMFPDIYEDFLRIEESQYSGYLDEINLRDYIMLGGIYSIMFIRRPDQTQFEQFNIVLHEDGRVVHILTEMKADIPVEAVRKSNIGRKTRETYRGTKIKLEDDELPYFIVTLQVAADLCKWSEPVVCHFITEKDFIPTDYKRESYWVPTMQSVIRHSEYAGRSMLNLGSQISGDSANIFRPSLRSFLRQSKVGAAPKPGVPIEDFKLEKKLSHLEIRTLEKYCLPRIISSFKFPVDFRDEKREFIRQGPRALVKRPDAEEVVTQVKTLDFNYNSQVLGPERMYPYFPQMDPIKYPIPFDDLEPGPVNPTSALELLKTFDNIKSKYQEKHIDLISQPDEQDKKSKQKKLGVKEEDDVPEAQIAKRKFSKLGDKVRSSVKTDRMDRVTVGSDKSSVKTNPMSEEQVTHWTTKYVKDVVIDRETNSITFKTDRLGLLGLAFKRPDEIILCVDTFHVRIFFYITCKGVRGYVTDLSKGYTAKPIKYLEIVEPISDFRQMRQIFISKNINIFAENDASFYIENGYFSMKHVALEMHTYNIMALHCKLMKFYRSSWNRLADRRDIIMGMKIAKDNSDYSEVTMRITPEKTTFVQISENCSDKVNVIVLNYINTWRNIGVKMGKEGGTTTETPVLISEAEMMERQKNYTTRMHDIAAACATFRKSLLQFRLLEEERTNQGRWDQYLRCDGLPKVRSPIEIRTFLAKIRHFEEIETKNSIDWTMGVDERSVLSQNIYQKDLTRPVLQRTAVDNPGSYFESNLKKCMDVLQQVDILMDNEVEMERMNKSVLVDLLEVYRDVQLEIESLFDRLTYRILRMQKAYMEVPLMIVDFKETSVKVQVPLSVLCDCITIRCVHTDFDHHSPHAKSYEPLTVESIFMPNAGLTDMEESVVGEWLMQNDIQEETLNNMNRRREEYDELMQLIAERTEQAAKEAKFGKGGDGDKRPKIVIPKTPKTVPLVPQGMYPDVFKEFLFREEDQYKKFLSTYFHPDNLSLTPEEVNLRECIIVGGIYNISFVRRPDQTQFEKFNIVLHEDGRVLKVIPQVVAKQDNRKSRLTEYTRMTLGTSQMKLSEEELPFFVVTVQLPPHLCRTDRLGIFGLAFKRYEHFPFRDWCLQPTRGVRGYVTDLVKGYTAKPVKYLEIVEPISDFRELRKLLIERNLNIFAENDASYYITNGYFSIKHIALELHTYNTMALQCKLMKFCRSSWNRLAQRRDIIVEMKIAKDNSDYSEVTMRITPEKTTFVKISEMCSDDVNVVKLRYEDTWRNVNNYNDFGQAIYSLNPHTLEGSNKDAMLFVYLKRLLNEIRPLSYS

SEQ ID NO: 29740 - DNA, 4675 bp, DROSOPHILA
cctatgccaaaggacacgatgccacatacttgattcttgtacaccaagggaccgccggagtcaaaggtgcatgcatctttttttcccagcactccggcgcaaaacatactgtctgttaaatgaactgaaaacaaataatgtgttttcggaaaggttcttaagacaaaagtagtgtatgctaaataccttttaaaaataaatcaaagtgcttatgactttcccaatctaaagttaccaaagttattaaccccatattgccgtgcaatattccactcacccgtcggcagataggaagcacgacactttttcttatccacgactggcactgtcaccgtacgcaatagtttctgtgggccaaactcactgttctcggtgagaccccaaccggaaacgcggagttccgtgcctggcattagctgttttttgcacaatatcagctgtccgagagacttgcccttcatgggtttctttagccgtaatatggccacatccatgttcatgtcatcctcgcgaaattcggccgacttgataacttccttgacttgacgctggatacctctatcattgagcttggaggcgccgccgacggccaaccaatcgctgatcttcacccgtcccagaaagcaatgcgctgccgtcaggacgataaggtcgtgaagcagggtgcctccgcaaacgaagttcatttcgtagcgcagtgcgattagatagccaccgagctgtgcattcgtagtgacatcaccaccgacgacccgggtctggaatccaggccgttgcacaatctttgccaacttgttcacatcgatggtctggttgaggtcctgggcaaggacttctatgctggctaagggggcagtcagtagacagtaaagcaaaagaccttgcattgcagacgaggggtggagagcaaaaaccacagactgtttctaacgcactccactaattgaagcgtgaagaaacaacttaagctaaaccaatggaaataattcaagacttcgttgtacggcaattgagtttaattgctggtaattggaaagtgtacgctgtggtctgtgtttgtttggtagttgttggttgagcagcgttcgcggatctaggagaagctcaatggtctgatctcctgaaggagctggggaatatagtacatctggttggcatcgcgattacggatatccgtggcttgtgaatacatggagttctaggagaagctcaatggtctgatctcctgaaggagctggcgaatatagtacatctggttggcatcgcgattacgcatatccgtggcttgtggatacatagagttgataagctgatgcagatccgagtaggtctgttgggtaaagacattaagtacattttattacaatactgtttacattcagagtttacccccatattgcgccaagtacttttataattaagttttattactttggtatcgtccgaacagagctccgaaacatccacaaaggtcgaaacctcgggcgttacccggaccgtgacctccgacccatcgtgtatatcccgggtattttgtagacaaagcacgagatcacgatcctttgctaggcgattccactggctgcggctaaacttcatcagcttaccgtgcacggcgatggcatcgtagatgtgcaactcagctgccaggtgcttctgcgagaaatagccctgatcgatgtagaaacatgcgtcgagctccgcaaacacgttcaggttcatgtcctgaaggcgctgtaatgggacgtacaaacgcaaggaattctctctgaagattagacatatttaaccttgcgaagctcgacgaagtccgagatgggtttatcgatatctatatatttgaacggtctatgaacgtactccttgggtatatcaatcgcatggcaccgtatgccatccttgctgatgaagaagactacacgcacatggtaggtgtccaatgttaggatgatctcatcgtggctgcaaggacaatttcaaaatatgaataattatggtaaaattagcttgagggcaatcataattccctacttctgctcgttcttctccaattcccagtgcctgaaggggaaatgcgcgtatcgtcgataggcgaatccaaaatgtcccaatcgatccgtcttcacgataaccaccttactttccttattaaaactcgactccagaatgaactcggtagtccagtgggcagcgtttctgggttctgcgctttgagataaaatcgtcgaaggcagtcgactatcttttctgctcttaatcatttgttcaccagtgtcgctggtttcactgagttcatactctatatccaccggtcgagcaatgctcatgatgctactgtccagctgtctgacagaccgtcttccgaaataactctgtcgacgagatcgagtcgtaggaatgggatctgaataagctttcctgctcattctaacggcgtgtgtggtttgttccacaatccttttcggagcatccaagtatttgtccttaatgccttccaacgttcttagaaggccaagcatagtaccctcctctttcgaactatcggtgcggtcagtctccacacgcaagtcttccgtcacaggaaactttgggtacagtcgttctggattggactgatcttcgtaattgaaactgaacttctcgatttgtgtagatccgactgattcggtcaattgccttttgtaaagttgcgtaaccggaatctttttcatagcctgtgcttccatcttatcatcttggaagtctcgcgggaacctaagcgaggatattattctgggtaagcattgatcctgaagaaggctaagatttctctttgatattggctccttcaccagattagagttcttaaacgtttttttatattgtatctgctccgtttccataccgctctgtcgcacaattgttaaagcagatggacggtagatattgaccgaattttctcgagccggctggtggtatgttggcctgttgctttgcggtggcttctcctctgacatgcttacagatcctgacgtggttggcactctgagtactgattcgttttcctttcgggatgactttcgcacaggctttttctttttgtctagctttttatccaattcttctgctttcgctttcgacggcgtttcttcgatttcgctctcgaagaattggcaaacaatgggttctccccacaagcacaaatgattgggcaccttgaaggtgagaaagtaataaggcagctcatctggttccaagtgcagtggaattttagaggcttccccaacttcggtatccctcattatatctgtgccgatatccaatttgctaggctgcatactacattcctccgtactcgattcgtccaaaatatttagagatttccgcagtacacgtccatcctcatgcagcgttatattaaatttctcataagaggcatgtttggcttttcccacaaagaccaacgagactatgccacctaagatgatgaaacgacgcaggttcacctataaataaaattagagttgatcacgtagttaccaatttaatatatatatgacatacctctgagggcagtaaatttatattgcctggatggaagtatctattaaagaagtcagtgcaatctcgtttttcgtgctccagaaatatcttgcgtggatcaggaaacatgccagctggaagctcttgtggcatttttggcggctttggaatcgcaattttttttttctgagacttccttttttcttttgcttcggcttgtgcgataaaactggaagagaacggtacgtattataactattagtgaccgatcctatatatatatttacgctatggcctcattgtaagcccgcatttccgtttccattttaaccacgagatcttcctgtatatccatctgggtcatccattcgctcattacactatctgcgatatccaccagaccacagtttgggattacagaactatcaatgaccagctcaaagcttttggccagatgggagagcggatcgaagaaggttcgcacacccccgcagtgtaagattgtcgcaaagcacactgagtggcagttgaatagtcacacccacgcagttcagatcggagcacattacgggtagcctgaaaatattaattaatgtattttcaggcagtgccattaagtcaatgactaacttcaagtaattgaaacgaatgggtacatcctgtagtccccatatctccaggtcaaagttgctgcatttatagcagtagcatgacaagatactatccttgttcctacgagaaatatgcaaggtcatcgatcaaaacgatgaaataacatagaaattcacatgaccctacatcattaaggcatcaggagaagagaccacgcgataggtcagtttgtcaaagaaactctctatttccccataaagttcattaggaatctagacggaaaactaaaacaccttgattcctagaactgtagttttaatggacggcatgtttttaccttatccagctcacggacttgaaatgttggcaaatgtacgagctcatcgtcgttacggagaactctctgtaccctttctatggttgccaggatacgttgcactgtttcatcgtagagctgtcctacgtttggccttgatttttccatgatttttcgggtcctatcgcatctgtcaggtgcttgagagaggacactacactcgtc

SEQ ID NO: 29741 - DNA, 2391 bp, DROSOPHILA
atgccacaagagcttccagctggcatgtttcctgatccacgcaagatatttctggagcacgaaaaacgagattgcactgacttctttaatagatacttccatccaggcaatataaatttactgccctcagaggtgaacctgcgtcgtttcatcatcttaggtggcatagtctcgttggtctttgtgggaaaagccaaacatgcctcttatgagaaatttaatataacgctgcatgaggatggacgtgtactgcggaaatctctaaatattttggacgaatcgagtacggaggaatgtagtatgcagcctagcaaattggatatcggcacagatataatgagggataccgaagttggggaagcctctaaaattccactgcacttggaaccagatgagctgccttattactttctcaccttcaaggtgcccaatcatttgtgcttgtggggagaacccattgtttgccaattcttcgagagcgaaatcgaagaaacgccgtcgaaagcgaaagcagaagaattggataaaaagctagacaaaaagaaaaagcctgtgcgaaagtcatcccgaaaggaaaacgaatcagtactcagagtgccaaccacgtcaggatctgtaagcatgtcagaggagaagccaccgcaaagcaacaggccaacataccaccagccggctcgagaaaattcggtcaatatctaccgtccatctgctttaacaattgtgcgacagagcggtatggaaacggagcagatacaatataaaaaaacgtttaagaactctaatctggtgaaggagccaatatcaaagagaaatcttagccttcttcaggatcaatgcttacccagaataatatcctcgcttaggttcccgcgagacttccaagatgataagatggaagcacaggctatgaaaaagattccggttacgcaactttacaaaaggcaattgaccgaatcagtcggatctacacaaatcgagaagttcagtttcaattacgaagatcagtccaatccagaacgactgtacccaaagtttcctgtgacggaagacttgcgtgtggagactgaccgcaccgatagttcgaaagaggagggtactatgcttggccttctaagaacgttggaaggcattaaggacaaatacttggatgctccgaaaaggattgtggaacaaaccacacacgccgttagaatgagcaggaaagcttattcagatcccattcctacgactcgatctcgtcgacagagttatttcggaagacggtctgtcagacagctggacagtagcatcatgagcattgctcgaccggtggatatagagtatgaactcagtgaaaccagcgacactggtgaacaaatgattaagagcagaaaagatagtcgactgccttcgacgattttatctcaaagcgcagaacccagaaacgctgcccactggactaccgagttcattctggagtcgagttttaataaggaaagtaaggtggttatcgtgaagacggatcgattgggacattttggattcgcctatcgacgatacgcgcatttccccttcaggcactgggaattggagaagaacgagcagaaccacgatgagatcatcctaacattggacacctaccatgtgcgtgtagtcttcttcatcagcaaggatggcatacggtgccatgcgattgatatacccaaggagtacgttcatagaccgttcaaatatatagatatcgataaacccatctcggacttcgtcgagcttcgcaagcgccttcaggacatgaacctgaacgtgtttgcggagctcgacgcatgtttctacatcgatcagggctatttctcgcagaagcacctggcagctgagttgcacatctacgatgccatcgccgtgcacggtaagctgatgaagtttagccgcagccagtggaatcgcctagcaaaggatcgtgatctcgtgctttgtctacaaaatacccgggatatacacgatgggtcggaggtcacggtccgggtaacgcccgaggtttcgacctttgtggatgtttcggagctctgttcggacgataccaaaacctactcggatctgcatcagcttatcaactctatgtatccacaagccacggatatgcgtaatcgcgatgccaaccagatgtactatattcgccagctccttcaggagatcagaccattgagcttctcctagaactccatgtattcacaagccacggatatccgtaatcgcgatgccaaccagatgtactatattccccagctccttcaggagatcagaccattgagcttctcctagatccgcgaacgctgctcaaccaacaactaccaaacaaacacagaccacagcgtacactttccaattaccagcaattaaactcaattgccgtac

SEQ ID NO: 29742 - protein, 730 aa, DROSOPHILA
MPQELPAGMFPDPRKIFLEHEKRDCTDFFNRYFHPGNINLLPSEVNLRRFIILGGIVSLVFVGKAKHASYEKFNITLHEDGRVLRKSLNILDESSTEECSMQPSKLDIGTDIMRDTEVGEASKIPLHLEPDELPYYFLTFKVPNHLCLWGEPIVCQFFESEIEETPSKAKAEELDKKLDKKKKPVRKSSRKENESVLRVPTTSGSVSMSEEKPPQSNRPTYHQPARENSVNIYRPSALTIVRQSGMETEQIQYKKTFKNSNLVKEPISKRNLSLLQDQCLPRIISSLRFPRDFQDDKMEAQAMKKIPVTQLYKRQLTESVGSTQIEKFSFNYEDQSNPERLYPKFPVTEDLRVETDRTDSSKEEGTMLGLLRTLEGIKDKYLDAPKRIVEQTTHAVRMSRKAYSDPIPTTRSRRQSYFGRRSVRQLDSSIMSIARPVDIEYELSETSDTGEQMIKSRKDSRLPSTILSQSAEPRNAAHWTTEFILESSFNKESKVVIVKTDRLGHFGFAYRRYAHFPFRHWELEKNEQNHDEIILTLDTYHVRVVFFISKDGIRCHAIDIPKEYVHRPFKYIDIDKPISDFVELRKRLQDMNLNVFAELDACFYIDQGYFSQKHLAAELHIYDAIAVHGKLMKFSRSQWNRLAKDRDLVLCLQNTRDIHDGSEVTVRVTPEVSTFVDVSELCSDDTKTYSDLHQLINSMYPQATDMRNRDANQMYYIRQLLQEIRPLSFS

SEQ ID NO: 29743 - DNA, 2453 bp, DROSOPHILA
catccacttgcacttgaacggggcagcaacacatgtcgggcgacacttgcaacccgccagttgtggagcatccgatgtcctccgtcctgcgtccgctgtccaatgagcccgacgactcctttgtccatgcataatcgctgataaatgtggctttcggtgctgcaaaaatgatttgttgataattaatgcagtcgccttgggtgggggcaacaaaaaatgggggacaaactgcccgaaacccgtttgccgcatgccgcaaaagaaaaaaactgtatatataagaacagcagccagcaatttgtgctggccaaagttgttgttgttgttgatgttgcaatcaggccttaaaggcaatcaacgcacagtaattcatgccgcctgacagcagcagctccattctttagactccatctccagatcccagttcccattccaatccgaaaagaaccaagtgaaaattgtttcctacgatttttctgcgcctgcgtcacgcagctaattgcaaatagttgaaggggggcggggaggtggtaccaacatgatcgcaattaatggggccacagttagtaggctgcttaatcgtggtcacttgatcaatttagcacgcaatggaatcggtaaggcaaaaattgaatgagcaaaggggaagagcgggacgagattgaaattagaaaaaaaaaaactagaaatcaaattttaagcgctgtatacatcttaaggattttactgcagttaatacgttttctgaaattaagtgactaatctgatgaattttgtgtggagctgaaaacggttgataaggaactgtaactcgttttaaaaataaattatttaaattgtagttgacctgatggtaatgcgtcttgctctgctaatgtcgcaaccctggaaaagttattggaaatttaggcagccctgggtgcgtctaatttatgtttgtgtatgcatttcatttctaactcttttcaacgttattcgatttaattttgcaatttcgaacatgaatgtggacaaagccagagacgagatgattgagatgtccgagcaggtgtggaaggatgcggagcagtggcaaagaggtatccacaatggtcaggcggtcatgaagcagatcaaggccataaatcttaagctcttcagcaccgagaataggctgaacaacgcggactcgcgtaaggagctccaggccacagggaaacggatcaaccacttgtaccaatgcctccaacgacctctcgccacgataggcaacattttaaggaccctgaccggtatcagggacaacactgccaggatgttgagccgcttgaccatattcttggacgatgaaacactggcgaagcacagaatacggcccaagctcgagagttccaagcttctgaagatgctgcagttcctaagccaccgttacgataccgaatgggaggtcaaggaaatggtcgtgagtaagtagccgatgaatttgtggtcctcctaattttccagcgtcgttatagagcactgtactagcagtaaatcgaactttttggcattatataaggaaatgtattatcagtctgaaaaatatccaaaatataaataagccaaacttttacactggatccgttgaaaagcagcgaagagacggaaagacgcatttctgaccccatatagtatatattcttgatctggaatactagtcgagcggatctgctcatatctgcctgtccgcaattctgccagtacatgtccgtccgtttgaacgctgtgatatcgggaatagcaataagttgaagctagaaagctgagattaattcgaataaaagggtatctgcaggtggtagaggaactccctcgtggtttgtaataaacatgttatcgtttcgtatgttccttacagacgaattggagagaatcagcaactcctatgatctggatcttgcaatggcgtgctggagcacttgcagtcacgcaggaggtccagagttcgcaaagatgatgcgcgagtattactggatcattgatcgccggcaacctttttagctgacttcctaaaaacgaagtagagtcctatgtcgaggacaccacgagggttcattagatgttaatccactattttaagagaaaaaactttacgttttgaatttgatgttagttttatttgaaaaattgttttttagtttgtatttgttaccacctgtttgccaaacaaatctataatctgtaaagaaattacaaaaaatttgttgttcctttttgtgtcggttttgctttgcacatttaaaatttgacccattgtttgacctttgctatttgctcatcaattttgctcttgttttgtttctgacttggtagcaaaacaaaacttaattgtaatttgactacaacaacattttgtttttgccctttaatttaattgtatatattatataatatgcaattctgtagctagattttgacattcacgttctcgt

SEQ ID NO: 29744 - DNA, 453 bp, DROSOPHILA
atgaatgtggacaaagccagagacgagatgattgagatgtccgagcaggtgtggaaggatgcggagcagtggcaaagaggtatccacaatggtcaggcggtcatgaagcagatcaaggccataaatcttaagctcttcagcaccgagaataggctgaacaacgcggactcgcgtaaggagctccaggccacagggaaacggatcaaccacttgtaccaatgcctccaacgacctctcgccacgataggcaacattttaaggaccctgaccggtatcagggacaacactgccaggatgttgagccgcttgaccatattcttggacgatgaaacactggcgaagcacagaatacggcccaagctcgagagttccaagcttctgaagatgctgcagttcctaagccaccgttacgataccgaatgggaggtcaaggaaatggtcgtgagtaagtag

SEQ ID NO: 29745 - protein, 150 aa, DROSOPHILA
MNVDKARDEMIEMSEQVWKDAEQWQRGIHNGQAVMKQIKAINLKLFSTENRLNNADSRKELQATGKRINHLYQCLQRPLATIGNILRTLTGIRDNTARMLSRLTIFLDDETLAKHRIRPKLESSKLLKMLQFLSHRYDTEWEVKEMVVSK

SEQ ID NO: 29746 - DNA, 4167 bp, DROSOPHILA
aagtaaaaaactccactgtcgctacaacacctccacgactcccttcacgcggattgcccctctaaaaatggaggagctgggcttagatccgtacatggtggtctttcacgatgtgatttacgacaccgaaattgatgggatgctaaactcgagtgattttggattatccgagtctgtttctggtctgaagtctgaggtgagaacgtccaaggactcacatatagtagatgctaaaacactcaatgagcgcgtaaccgatatgaccggactcagtatggagatgagcgatccattttcgctgattaattacggcttaggtgggcacttcatattgcaccatgactttcatgaatatacgaatacggtattatttttggactaaactattacttttagaagtattattgccattcattttcagaccaggcttaagcaaggggatcgtatagctactgttttgttctacgtaagtcagtccagtttgtcgcagaatccttggtattagcttgaaccctttccagctgagagaagttgactcgggtggcgccacagttttcccgatgcttaatattacggttatgcccaagaagggatcagcggttttctggtacaatcttcacaactcaggagctgtaaattcgaaaactttgcacacagcttgtccagtgataagcggttcgaaatacggtgagctttagagtgtaatggttttgtataaagtaccacctggatcttcttttatagtgctcacgaagtggataaacgaactgccgcaaatgtttgtcacaccatgtatgaaagactcgaacctacgcccaccccaaaaagaataattctgtaatctgtaatggaattaaatttaaattaaatttgttttcccttttctggatgatatccacgttttatgagcaatggaaaaacttatcttcagtgagttgtgccatggaggcgttgaaatcattatgatcttttacctatttcttaagcagaactcgatgctatggagaataacaatcctgagctgatagtgctggtctgaaagtctgaaaggcttatttcactgatgttatttttcttcattaacttacgctggatttaaggaaccttcctagataccagctgctagttgttttggttttaggtcattaattaatatcaggctaataattttacgataagcgggtatggtgtaacataattagtcaagcttgatatagggcatacaaaggaagtagaaatttaacccattttctatgaaaattttttcagtttagtgcgttttaataaagttaccgtttttctatctcctatctatctatctacctatttatctatcgtcctttaatattttggctttattagattttctgaatgcgtacagagatatagcattgctaatttaattaggccgcgacaaatttcttattttcaatgttatcattaccaagttgtaaagtcatttgccaatacgtcccacaagcgaaatgtacatcttaaaaaacttaacgcttattggctttctgagtgcttgttttattaactgccaaggatttgtcaaatcgaacccaaagaaatcctatgctgcctcaacaatggaactgatgaaactcctagaggtggaggatgaactggtagacaatttaaagggctatgtgaaaacactgaaaatgaaattcaatttaatggaaaggtaggactaaggtgctattcctccatgaataattctatattcacgtgtttcatcaagatccctaatagatatgagtagagagaacatggaaatgaagagtgattatgaatcgtacttgggaaatccattgaacagctttcgactaatacatcgcctacacacgagttggagaaaatggtatcaatatgccattaaggtcgagaataatgctttaggtactgtcaatatctagttaagttaaagaataagctttaaataattgtttgtagggcacattgaaaatgcccgactgatgagaaagatgctaccaacctcgtcggatttgcagcaggcgtgtcgcggaatccatgacttgatgtccttttacgatttgaagccagaagaactggcagctggtaacttagcagggtactcgcagccagggtaagttaggagatccatcctaaagtataccatgattgctgaccatgattgctgacttccagaacaggactgacagcttacgattgtttagcccttggtgagtttagcgttcaaaaacgagaggacgatcttgccgaggcttggtataacctttctttgattcgttttgaaaataaattcgacaaataccgagtgcacaaggcgtggggccttcttttggcgaagaacaagcaacttactgacgccttttaccatttcgagaacaagccagagggaataatcgccagcaatgaagtcatacacttcaaggaggagttgtcgaccaagcagaactgcgctgttgtggtccaaaaaccaagtcgactccactgtcgctacaacaccaccacgacgccattcacgcggattgcccctctaaaaatggaggagctgggcttagatccgtacatggtggtctttcacgatgtgatttacgacaccgaaattgatgggatgctaaactcgagtaatttcggattatcccttactgattcaggccagaagtctgaggtgagaacgtccaaggactcatatatagtggatgctaaaacactcaatgagcgcgtaaccgatatgaccggattcagtatggagatgagcgatccattttcgctgattaattacggcttaggtgggcactacatgttgcactacgactttcatgaatatacgaatacggtatgagttttggataatttaaaactattttgtatatgtattattgtcatatatttttagaccaggccaaagcaaggggatcgtatagcaactgttttgttctacgtaagtcagtccagtttgtcgcagaatccttggtattagcttgaagcctttccagctgggagaagttgactcgggtggcgccacaatcttcccgatgattaatattaccgttacgcccaagaagggatcagcggtgttctggtacaatctgcacaattccggagctatgaatttaaaatccctgcactcagcatgtccagtgataagcggttccaaatacggtgagctttagagtgtaatggttttgtataaagtaccacctggatcttcttttatagtgctcacgaagtggataaacgaactgccgcaaatgtttgtcacaccatgtatgaaagactcgaacctacacccaccccaaaaagaataatcctgtaatctggactgaaatcctaatgattaaattagttttcatttttcagcatgatatccgttatatcttttacagttatccgcccatccagtgctgccaagtaactgagtaaacggagagagcggaagagagggccaaaagtttgtttggcgtatcttcggcttaccgcgattgcaacttcgattcagtttcggattgcgcctatgtttcagtttctgcttcggctttcagtcgttggccgcgcgccagagcaacaagtttagttttgcacctggccaggtgatcgcgatactcgcaggttgtaagtcgctaacttcgctagttttgctttagcaacacagtccaaatattttgtgtagccaaggcaatattatcagacccgtctccatctattgggctgtggtaaaaattacaaaattaaatcaggaggctaattcgcgttaacattgatttggccagcgctaagtgactgtgagcgtatgtgcgtgtaaatcggttttgcgctaatttctggaaaaaaattatagcggccaaaagagctaacgaaattaaaacgtatcgaaaacaacttttacctatactgccagtttcaaaacgaagcagaactgttgttgttttagttgttgccgccgaacgtgcggtcgcagtgttgttcgttatcgcggtgtgtttgcttttgggggcgtggttggtagttggcatgtgcgcagccgccttaagttgacagtgacaatagacgaaaaagacagacagtcgaggaaattatggagcgctgaccaacaaaccaaaaccaaagcgctggcaattggaaagttgttgttatgctcaagagagcagcgaaggagccaagtgccggactgga

SEQ ID NO: 29747 - DNA, 1179 bp, DROSOPHILA
atggagaataacaatcctgagctgatagtgctgaaatcctatgctgcctcaacaatggaactgatgaaactcctagaggtggaggatgaactggtagacaatttaaagggctatgtgaaaacactgaaaatgaaattcaatttaatggaaagatccctaatagatatgagtagagagaacatggaaatgaagaggcacattgaaaatgcccgactgatgagaaagatgctaccaacctcgtcggatttgcagcaggcgtgtcgcggaatccatgacttgatgtccttttacgatttgaagccagaagaactggcagctggtaacttagcagggtactcgcagccaggaacaggactgacagcttacgattgtttagcccttggtgagtttagcgttcaaaaacgagaggacgatcttgccgaggcttggtataacctttctttgattcgttttgaaaataaattcgacaaataccgagtgcacaaggcgtggggccttcttttggcgaagaacaagcaacttactgacgccttttaccatttcgagaacaagccagagggaataatcgccagcaatgaagtcatacacttcaaggaggagttgtcgaccaagcagaactgcgctgttgtggtccaaaaaccaagtcgactccactgtcgctacaacaccaccacgacgccattcacgcggattgcccctctaaaaatggaggagctgggcttagatccgtacatggtggtctttcacgatgtgatttacgacaccgaaattgatgggatgctaaactcgagtaatttcggattatcccttactgattcaggccagaagtctgaggtgagaacgtccaaggactcatatatagtggatgctaaaacactcaatgagcgcgtaaccgatatgaccggattcagtatggagatgagcgatccattttcgctgattaattacggcttaggtgggcactacatgttgcactacgactttcatgaatatacgaatacgctgggagaagttgactcgggtggcgccacaatcttcccgatgattaatattaccgttacgcccaagaagggatcagcggtgttctggtacaatctgcacaattccggagctatgaatttaaaatccctgcactcagcatgtccagtgataagcggttccaaatacggtgagctttag

SEQ ID NO: 29748 - protein, 392 aa, DROSOPHILA
MENNNPELIVLKSYAASTMELMKLLEVEDELVDNLKGYVKTLKMKFNLMERSLIDMSRENMEMKRHIENARLMRKMLPTSSDLQQACRGIHDLMSFYDLKPEELAAGNLAGYSQPGTGLTAYDCLALGEFSVQKREDDLAEAWYNLSLIRFENKFDKYRVHKAWGLLLAKNKQLTDAFYHFENKPEGIIASNEVIHFKEELSTKQNCAVVVQKPSRLHCRYNTTTTPFTRIAPLKMEELGLDPYMVVFHDVIYDTEIDGMLNSSNFGLSLTDSGQKSEVRTSKDSYIVDAKTLNERVTDMTGFSMEMSDPFSLINYGLGGHYMLHYDFHEYTNTLGEVDSGGATIFPMINITVTPKKGSAVFWYNLHNSGAMNLKSLHSACPVISGSKYGEL

SEQ ID NO: 29749 - DNA, 2216 bp, DROSOPHILA
tgtcctattttcttacctttgctaccctttgcgaagattatcgatcatcgcatatcgataactattgttacatacatattattttgtttattagtacatgtattaaaatatggtatttttaaagtttggccaaacgtttatttctattgataccattggctggtaaaaaagtctgataacaagtttggttcgcgttagaacccataattcgtcaggcagaaaacttgttaaaatggtgaatcttgacttagaaatgattttggagactctcctgaacgcggcgaggaggaaaagggaaagggaacaccttgaaggttcttcggaaggtaagttccgccaacggcatataaacataaacataaacataaacggtcaacttacagaaggcgagtataaaacactaaacgattacctacctatcatatcaattgtatttgaaatgtaggagttatctactggatgtatgagaaaattgcggatttgaccttgagggtcctggcagaattggttgactttgtgaaggcagctattataaaaatagttggtgtcgctacaaatgctgtggagtgtttcaagcgtgattttacagtgcaatgtgccgcattggaagcctttgtggtatttttaaccagtaatttgggatttcaactggaaatgtaattattcatgcggttcaaaaaattccattccatgcctgctaaatcattggatgcactgccataagattatgatttctttatacttgggttctgatatcgggtactcctaaaaaaaagctttcaatctacatatgtacatatgcgaagcttgattgcaatgatagattaaaattgatttcgatgatttggtttgtatcgagtaactcccctccacagtggcggatatacaattattgcactactgataacgaaataacaacgtgattgtactcagttgttagaaagatcgtcaccgggaaagaagtaaaactttgtaacggaaatatacataaattgaaaatatggattcagccatctcagagataatcaatgccctggctatactggccgacgataaaaatatccagttgaccatcaaggaggccggcaagggagctgcaatttgtgctggcgctgcgctgatcggaggactactgctgggcccccggggactggcactgggcggggccatcggtggtctcaccgcctacggacttacggagggcaagagtgtctagcgttacatggtgactatcattcttatcagtcttttaattccaggaaatttcaaatctctaagtgaggtcattttgaacgatttgacggagagtcagcgtcgagaactggagcagcacgtgatcagggccatatccgaagttagaaatgtacgcgttcgagatgtcgcaagactaatactaaataaccggcatgtgcaagaggttgcactcgaagcagtcaagtcctatatcactgatcgtatgggaatgaccatcgttgattaggcattaatagaaatattttttaaactatatttctcgatgattaatgctataacacagaattttgcctgcaacataaataaattgttggcgcactgaatgattttattttaaaatctatagtaaaaaccatttcagcttataatttaatagtcagtgactagccttttcgatgtgccagatgtaaaaagattgttttgctcagagctcggctttcaatagacaagagtcgcgcgatctacgtcatcaaaatccgtcagatgtctggaggagctgaacagatgttggagtaggcggaatttgtgcagctacactaccaaggcgatcatcagcagggcaacaactgttacaagcagtaaaaataagataaaattcagagactcttagtgaaattgcggcaagagccgaaataaagagtcgtagaaatttcgttgctgcactgtgaacgacgagagagatgtgtgatgcgatgctttggtgtatctcacggatgcacagatactcgcttcggatattcgctcagtgtgcggtaggcaggtcaaaataattttgcttactgcggaagcgagaggaagaggaaaaaaactggctgatctcgatctcgatctccgtctctatctctttctagggccagctgtcgcccatttggatcggatccgtatgctactatatcttatatcgtgtggctgccacgtgtcgtgggcaagtccattgggcaattggtcagtttagccgaaca

SEQ ID NO: 29750 - DNA, 216 bp, DROSOPHILA
atggattcagccatctcagagataatcaatgccctggctatactggccgacgataaaaatatccagttgaccatcaaggaggccggcaagggagctgcaatttgtgctggcgctgcgctgatcggaggactactgctgggcccccggggactggcactgggcggggccatcggtggtctcaccgcctacggacttacggagggcaagagtgtctag

SEQ ID NO: 29751 - protein, 71 aa, DROSOPHILA
MDSAISEIINALAILADDKNIQLTIKEAGKGAAICAGAALIGGLLLGPRGLALGGAIGGLTAYGLTEGKSV

SEQ ID NO: 29752 - DNA, 4266 bp, DROSOPHILA
tcaggacctcaatgttaccggcaatattttgccgagtgcgatttattttctcctccaactgaatggaggtgtcgtcgctgacacttacggcaatctctgccagattgtccacaaccatggtaacaggtccatagtttgtagtctctgtctccatctttgtttcatagccgacttcttggcagtcctgaaataaaggagcatatgaatttgaaaagtactataaatggaaagttactattaactcactgccaaagtcagcaaaagcagagcaagtactcccagagtttgactcatcatctttctgttatatttcctagtgcgactggccctacacttgacttcttatatatgtcaagagatccagtgtcacgataagagtgtgtctcatagcaatcactacgaaacacaatttgagcattaacttgatgaactgagatgatgttttagtacatgaacttggtatactattcaaagtattctatttggtcatcgtatttttcgtaaattttcgtaatttctttttgtaaatttctcaccttcgttgaataatggagggatcaattatacttttatttgtaaaaggggagatatttacagttcaagtttgctaaagaaagctgaggttgatgactaacttgaagcatatagtcgttacacagtcatcatgcgataagaatctttcttataaacattataagacacaaatgagccatttgtctaattcagaacttaatttaagttttgttcggaacttaaataccctaaagtttcatattgatcacatatgacatgggtatttttagcaacttacgctgttaaatttttcggtatcccaatattttctttataaacaataacaatttttgttaaagcgttaaaactctttcccaaaaaagaatttaattcttagtcttagttaattaaggcaacctttggcgatctataaataaaaggtatggtatcttcaatttttcgggaatcaattcgatttagtttcaagatgacaacagtacgggtgtcactgcttttacttcagtcgcttctttgtgtatgaaatagcattatttgtgtaaagtataatattaaagaaaagatcttacaggtgcatggccactttcaaagaatttggggacaaaatggaccactctatgagtccacaaagcagcttatagccagccaaagctccagtgcagccaggatctggaacgtcacccaacaggccctcgatcagaagttggagtatcttcaagaagccaaggacacactggatgaccatcagcaagtggttagtggacgcttggagatgttttttggaagccagtacagcgatgagtggcgggcatgctcaaagaagtacgaactccaggtggcacacttcaatcgagagctggtggacaagtacagtatctgcaggaattctctggaccacatcatggatcattttcaggaggaaatcgtgctggaggctaattttctgagtaaggcttcgcgggagatcagtgagttgtcaaacacctgcagaatctggcagcttaagcagtctggtttcaatcacgccggagttttattatgcactgtcgctggaatcgggaggatcaatcagcggatgatcagcagtctggagctgtgcgatgcaattgtgctggagatgtccttggaagacctggacacaccaagttgcctcttctaccatcatctgaagatggatttcgatgacctctttacgcagattgagtcgtgtgcgataaactagaaagaatgtaataaagtcaaatgcactattaactgtggtctggtgtcgacttgaaaatattaattacttacatcaacttttacctaatatttatgagcatagttatctttaatcgttatcagttcgaccattcataaaaagccaaatagaaatttaaattttctctcgaaaaacattgccccgtggtggtttatatatagcgtaatattggcgataagccggataagcctaatcaacctgcgccacttaagaaaaaccaagtgtggtatcttcgatagtgttttacgagccatacttcttccgataatgaagctggtcaaaatccctccctcagttgtactgaaacagttgcccgggcaaaatgattggaaaagcattgcttctgctgggctgtgtgctgctcttcgcttttggtgaagccaaccaggaactggagactctgctgcagaagcaacaggtggacttgcagttgtctggcgaggaagtggctgctttgcgtccactgtacctagagtttcaggcgcagtacaactatctgtacagcctgaggctccagagcggcgatgggagtgatcagaatcccgcggaggagcctgaactggatagcaactacctacgggcatttgaagactttcgcgaaaagttctccatttacttggatgagaaacctcgagtggtgtatgacacaaaattgcccactgtcgacgagatcatgggaaagcccagtcccgacttcacaccaaatcagagggcggaattcgaggatctcagggagattattcaggatgttattgacgaggcacagttcggcattgacgacttggtggagagggccatccaactggagacgaatctgctgaagctgaacaaaccaaagatcgtgaccgcagccattgccggattgggatacatgtggaactactggggccgcggaagtcaggccgcctattgcagttactcgctggtcccagagttccagataggtctgcaggccattaacgatggcgttgattgctactcccgcaccatggccttggtaatgcgcattcagaatgaaacagtggccgctgtgaaggaggttaaacgcaatgtcagtagtcttgtgaagatttgcaagaagattgccgccaagcagaccaccgttggcaaaatcctgtcgggtacagtaaacgctctcagtgcgatccgccggctacacgacatcatcgctgtcggaatcgatgtctacggcaaaatcaacaaccagttgccggaggaggccatccactctgcggagtgtggagtggtgttcgtcaacagcataccccaaatgttggaaacggcccagaatctgaccacttgcattacctacgtgaatccggataagcccgacttcgaattcacgcatcccgaagaggatcgctattggaacactggcgctgatcctccggaaataccccatgaaaacgtggtggacgatgatgacgatgatacggactatccggagttggacgactatgaggatcacagataagctttggaatttcacccattgataaggcaaagtttgataatcggcacaataatgtccaaataagaataaattgatcgttgtgattacaatacaattattgaaagattgtgattaaaatagatcatggttttacaagaagtttttgttttacgagacttttaaaccacaaattcgtttgtgaaatcagcaaacaatatcaatttaaaggtgagttttacttaacattaaaagttcacccattattttcgtaccgaggttcttatcttaaaatcggtaatcggaaatttatattaatttattgcaccgaatgaaaagcgtttgatatatttttaaaatgtacatatatttaaaatatatttggttagatataaaaataggtaattgcatgtttcgtaaacaaaaaatgtggatttagtgactacaccttagatttggatttttgattttacgcagatcaatctgattctgcttcgcaaatggctcgttgagtatctcaactttactgcacacggtcgctaattattaacgtacaaaaaaagaaatattgatgagttctgagaacctgacatcttttgtgccaacatctaaataattaattcgggttgaccccaaaatgcacgcgcttatctcgtacaacgattttatagattgctcctatgactagattctggactggagactgggaatctgactagacgtcgctctccttgagctggcggacatattgttcgctcagcgacttgggaatcccttcgaaattgatattcgaaggtccagcagcctgcggcgtgctctgcgactttgagacatttcgtcctgtgggacttggtggaggcttctccgttccgaaagcctgtggtatggctatgacatcggccattagggtttgccgacacagggcggataaggcgctaccaggactaggaggtggattcttgggctttttgttgccccttcgtaactttgatgttaaagtggcgaatcccagtttactagaaat

SEQ ID NO: 29753 - DNA, 1809 bp, DROSOPHILA
atgacaacagtgcatggccactttcaaagaatttggggacaaaatggaccactctatgagtccacaaagcagcttatagccagccaaagctccagtgcagccaggatctggaacgtcacccaacaggccctcgatcagaagttggagtatcttcaagaagccaaggacacactggatgaccatcagcaagtggttagtggacgcttggagatgttttttggaagccagtacagcgatgagtggcgggcatgctcaaagaagtacgaactccaggtggcacacttcaatcgagagctggtggacaagtacagtatctgcaggaattctctggaccacatcatggatcattttcaggaggaaatcgtgctggaggctaattttctgagtaaggcttcgcgggagatcagtgagttgtcaaacacctgcagaatctggcagcttaagcagtctggtttcaatcacgccggagttttattatgcactgtcgctggaatcgggaggatcaatcagcggatgatcagcagtctggagctgtgcgatgcaattgtgctggagatgtccttggaagacctggacacaccaagttgcctcttctaccatcatctgaagatggatttcgatgacctctttacgcagattgagtcttgcccgggcaaaatgattggaaaagcattgcttctgctgggctgtgtgctgctcttcgcttttggtgaagccaaccaggaactggagactctgctgcagaagcaacaggtggacttgcagttgtctggcgaggaagtggctgctttgcgtccactgtacctagagtttcaggcgcagtacaactatctgtacagcctgaggctccagagcggcgatgggagtgatcagaatcccgcggaggagcctgaactggatagcaactacctacgggcatttgaagactttcgcgaaaagttctccatttacttggatgagaaacctcgagtggtgtatgacacaaaattgcccactgtcgacgagatcatgggaaagcccagtcccgacttcacaccaaatcagagggcggaattcgaggatctcagggagattattcaggatgttattgacgaggcacagttcggcattgacgacttggtggagagggccatccaactggagacgaatctgctgaagctgaacaaaccaaagatcgtgaccgcagccattgccggattgggatacatgtggaactactggggccgcggaagtcaggccgcctattgcagttactcgctggtcccagagttccagataggtctgcaggccattaacgatggcgttgattgctactcccgcaccatggccttggtaatgcgcattcagaatgaaacagtggccgctgtgaaggaggttaaacgcaatgtcagtagtcttgtgaagatttgcaagaagattgccgccaagcagaccaccgttggcaaaatcctgtcgggtacagtaaacgctctcagtgcgatccgccggctacacgacatcatcgctgtcggaatcgatgtctacggcaaaatcaacaaccagttgccggaggaggccatccactctgcggagtgtggagtggtgttcgtcaacagcataccccaaatgttggaaacggcccagaatctgaccacttgcattacctacgtgaatccggataagcccgacttcgaattcacgcatcccgaagaggatcgctattggaacactggcgctgatcctccggaaataccccatgaaaacgtggtggacgatgatgacgatgatacggactatccggagttggacgactatgaggatcacagataa

SEQ ID NO: 29754 - protein, 602 aa, DROSOPHILA
MTTVHGHFQRIWGQNGPLYESTKQLIASQSSSAARIWNVTQQALDQKLEYLQEAKDTLDDHQQVVSGRLEMFFGSQYSDEWRACSKKYELQVAHFNRELVDKYSICRNSLDHIMDHFQEEIVLEANFLSKASREISELSNTCRIWQLKQSGFNHAGVLLCTVAGIGRINQRMISSLELCDAIVLEMSLEDLDTPSCLFYHHLKMDFDDLFTQIESCPGKMIGKALLLLGCVLLFAFGEANQELETLLQKQQVDLQLSGEEVAALRPLYLEFQAQYNYLYSLRLQSGDGSDQNPAEEPELDSNYLRAFEDFREKFSIYLDEKPRVVYDTKLPTVDEIMGKPSPDFTPNQRAEFEDLREIIQDVIDEAQFGIDDLVERAIQLETNLLKLNKPKIVTAAIAGLGYMWNYWGRGSQAAYCSYSLVPEFQIGLQAINDGVDCYSRTMALVMRIQNETVAAVKEVKRNVSSLVKICKKIAAKQTTVGKILSGTVNALSAIRRLHDIIAVGIDVYGKINNQLPEEAIHSAECGVVFVNSIPQMLETAQNLTTCITYVNPDKPDFEFTHPEEDRYWNTGADPPEIPHENVVDDDDDDTDYPELDDYEDHR

SEQ ID NO: 29755 - DNA, 2642 bp, DROSOPHILA
aaaatccgtcagatgtctggaggagctgaacagatgttggagtaggcggaatttgtgcagctacactaccaaggcgatcatcagcagggcaacaactgttacaagcagtaaaaataagataaaattcagagactcttagtgaaattgcggcaagagccgaaataaagagtcgtagaaatttcgttgctgcactgtgaacgacgagagagatgtgtgatgcgatgctttggtgtatctcacggatgcacagatactcgcttcggatattcgctcagtgtgcggtaggcaggtcaaaataattttgcttactgcggaagcgagaggaagaggaaaaaaactggctgatctcgatctcgatctccgtctctatctctttctagggccagctgtcgcccatttggatcggatccgtatgctactatatcttatatcgtgtggctgccacgtgtcgtgggcaagtccattgggcaattggtcagtttagccgaacaatggccaattagtatgcatgcgactttgaaaagtgaacttgcgattagccacaaagttgcccaatatacatatgtacatatgtatatatatgcaattacagagcaacctctctaagtcgaatcaaactgaaatgagatcttgatactaagtagtaatttacttcactatttattgatcattttaaaatgtgtaaattccttggtttaacacacgcctcttagcgttttataagaacatagtgatttgaaattgattttatttcaattccaagccagactttaaaaaggcttcactgtgcctgcaaatatgctgatagctgtaccagatcgactgcagcagctgtaaaatcaatcaaaaacttgtcaaataaatgtcatgcataagcaataagtgaacaggatgtggcgagtcctcggcccctgtcatcttgcgggtgcataaatttgccattggctgtttttgcctgggttctctcttaggactattgcttacgggaagggtcggtccactatgattgccggcactgatcctgctcctcgcgcagatagtcgccgatgtgctgcaccaccatggcactgcacagctgagcctgcaccacttgatcctcggcggtctggtgggtctgcaccaggattagggatgcattgtgcatggattgggccatccccagattgatttccgccatcgcgttaatgaaacagacacttccgccagctgaagctagaggattaagcggggaagcccccagcaattggcacttggccggcaagtgggcaatctgctgtacgaattcctgtactctggccaaagccagttgactctccagacggaagtcttccaaaaggcttcccaagtcttccgtacacccacccagctgatgggtcacattttcattgagctcatccaggctccaggctgggttgcaatcgggattggacaccactaactggtttgtctcatagatcacatcacttagttcggccatagcattggcggtcaggacctcaatgttaccggcaatattttgccgagtgcgatttattttctcctccaactgaatggaggtgtcgtcgctgacacttacggcaatctctgccagattgtccacaaccatggtaacaggtccatagtttgtagtctctgtctccatctttgtttcatagccgacttcttggcagtcctgaaataaaggagcatatgaatttgaaaagtactataaatggaaagttactattaactcactgccaaagtcagcaaaagcagagcaagtactcccagagtttgactcatcatctttctgttatatttcctagtgcgactggccctacacttgacttcttatatatgtcaagagatccagtgtcacgataagagtgtgtctcatagcaatcactacgaaacacaatttgagcattaacttgatgaactgagatgatgttttagtacatgaacttggtatactattcaaagtattctatttggtcatcgtatttttcgtaaattttcgtaatttctttttgtaaatttctcaccttcgttgaataatggagggatcaattatacttttatttgtaaaaggggagatatttacagttcaagtttgctaaagaaagctgaggttgatgactaacttgaagcatatagtcgttacacagtcatcatgcgataagaatctttcttataaacattataagacacaaatgagccatttgtctaattcagaacttaatttaagttttgttcggaacttaaataccctaaagtttcatattgatcacatatgacatgggtatttttagcaacttacgctgttaaatttttcggtatcccaatattttctttataaacaataacaatttttgttaaagcgttaaaactctttcccaaaaaagaatttaattcttagtcttagttaattaaggcaacctttggcgatctataaataaaaggtatggtatcttcaatttttcgggaatcaattcgatttagtttcaagatgacaacagtacgggtgtcactgcttttacttcagtcgcttctttgtgtatgaaatagcattatttgtgtaaagtataatattaaagaaaagatcttacaggtgcatggccactttcaaagaatttggggacaaaatggaccactctatgagt

SEQ ID NO: 29756 - DNA, 642 bp, DROSOPHILA
atggagacagagactacaaactatggacctgttaccatggttgtggacaatctggcagagattgccgtaagtgtcagcgacgacacctccattcagttggaggagaaaataaatcgcactcggcaaaatattgccggtaacattgaggtcctgaccgccaatgctatggccgaactaagtgatgtgatctatgagacaaaccagttagtggtgtccaatcccgattgcaacccagcctggagcctggatgagctcaatgaaaatgtgacccatcagctgggtgggtgtacggaagacttgggaagccttttggaagacttccgtctggagagtcaactggctttggccagagtacaggaattcgtacagcagattgcccacttgccggccaagtgccaattgctgggggcttccccgcttaatcctctagcttcagctggcggaagtgtctgtttcattaacgcgatggcggaaatcaatctggggatggcccaatccatgcacaatgcatccctaatcctggtgcagacccaccagaccgccgaggatcaagtggtgcaggctcagctgtgcagtgccatggtggtgcagcacatcggcgactatctgcgcgaggagcaggatcagtgccggcaatcatag

SEQ ID NO: 29757 - protein, 213 aa, DROSOPHILA
METETTNYGPVTMVVDNLAEIAVSVSDDTSIQLEEKINRTRQNIAGNIEVLTANAMAELSDVIYETNQLVVSNPDCNPAWSLDELNENVTHQLGGCTEDLGSLLEDFRLESQLALARVQEFVQQIAHLPAKCQLLGASPLNPLASAGGSVCFINAMAEINLGMAQSMHNASLILVQTHQTAEDQVVQAQLCSAMVVQHIGDYLREEQDQCRQS

SEQ ID NO: 29758 - DNA, 2957 bp, DROSOPHILA
gatatgcatgcagccgagtccgttggttaggaagaacaggtcgttggtgttgttccacgatatctcgttgacctcgaagctgaacggctcctccacgcgaatcttgttcgtgcgtgtgtctataaaggtgatcagatcctccttgttgcccacggcgatcgttttgccatcgggcgaccaggcaatgttgatattctcccccttggtgttcgtcaccgatacgcattttccaactcgtatgtcccagatgcgcacggtcttgtctccgcttgcggtggcaaactggtcgggattggtgcgatgccaacacagctggtccacggacgcagtgtgtccccggtatgtgttgcccttcaagaagcggtcccgctccagcgagtagacgaccaccgtcttgtcgaagcttccggaggccaggtaacgaccatcggcattccagcagaccgagtgaacctgtgggcaggcgggaattcattggttgcccaataaatgtggccatcgtgctcaccttagacatgtgcgaccgctgctcgcggattttgctgtgactccgcaaatacgacttcaggtcttccaatgtctgctccgtgcgactcattgttaaatgtttatttatatttcaaccggctttttcttaaaagatctaaacaacaatgtgactgtagcccactaaccaaattatactaactgcccgatttgcattagcaaggactcacaccaatatatcgattcctggcttagcggctaattcaaatattcttacaatctctgaggtaacgttttcaaacgagtttctgccaacattcaagctcatatcttttgttgttaattacgctattgtttgcgctgcaaacatttaaacaagcagagagagagagagagagagagagagagagagagtttaatgtcaacaaaactttattgtatcgctgcagcaaaacaaacattaaatgaggaaaacaaataaataagaattacaagcctagattgtggcagtgcactattgaagtctgtggtttcgcggcggctcgcgcacattccgatcgctcttgtcgtggatatgcacattctccgctagctccacgttggcatgcaaggccgcgtcattggcattcaagtgcgcctcctgggcggacaaggtagccttctccgccgcatcgcgcgtttcctcgtagtccagtcgagctgcataagcctgcgattcggcgtgctccagcttggtcttggcctgggccaccatatcaatttgcgaagctagctcggccgccgcctccgatgctgccttttgtgccaactccgaggcggattgggcattgttaagtgcggcagttaggacactgacatggttgatggcctgctgggcggcatattgggctgccttggcggatctcttggcctgctgcagttgggtcagctcgttctccatggccttgtgggcctccacgctctgatcctccagccgatggagcagcacctctttgcccttgagcacggccacagctgtgccggctgcttgtgctgccgcctgagccagagtacttttggccacataggatgcctgtttgcctgccgcattttggctggccactgcggacagggcctgatccgctgaacccttcgctatgctgcgcaatccattgtcggccaggtagccaccgcttcctcctccaccgcctccgcggtgggagtgcactatgtaatcggaggagccttcgaagtgggagagcttcaccttggccggttcgaattcgtcgtggttaatcgcctcgtaggtgtatggcggcacctcgtgctcgatcaccgccgtttgctggggcactggacccggtccatggggcgatggcggcggtggtggcggcggcacattgacgtgatggtgatagtgtggctccttccgtttgatcttgcgaccctgcgtcggcatggccactaaatcaaagtcccaatttagccacatttgcatgaggaagtcatgtgcgactcacccaaaaacagcgccaggagcagcaggtgcagcagcgatggcatctctggcgattatgcaatggagcagctggcgaaaggaagtcgcacaaccggaagactcgtgatcaccgcaggcgcaagcttttgggttcctctgtcgcacgccgagtgctgaaagaaaacaaatttccgtttttaattggggaaaagtttcttcattgtttttcacgtatgtatatgcttttcagtttagttagctagttagttgttgattgcatctcactaaaataaacttgttacgaaatgtaccacttcattctgcattaaaaatatcttcacatctgaaggacaccttttgcgagtgcataatcattgggcaaccggttacatagccgctttgcctattagctaatattttatggtgcggcactttctttgctctaggatggccggtaagtcgttagtgggtcacggaatgatatgttccacgagagaacctgtttagtttgaagcgcagccaaactggacactgcacacaaggcacacaccaatcactcagttttgacaccaacgcacctctcgatctcgatctcgacttggacttggacttgaccgacacgaacgtcctgtgcggaccagagataaaatgcttatgactcgagtggaggatcgcccgccaagcggagtcaatgtggatggacgagttcggtgaaaaacgcttttactttcgcactagatgaagctaggagcgcgcaacaggtagagctggaggctggtggctgggggagcggcaagtgggcgcagtaaatccggtggagactcaacgacgattgccagttggccaccagaggcgccatgtatttataaacgaactggtcgggtcgccgaaagaaagtgcaaacccgttggctgttggttttcctcgcgagctggccatgcaccatcatccaacaacgatggtgctgggtcaatgctaccaggcggctgctcga

SEQ ID NO: 29759 - DNA, 957 bp, DROSOPHILA
atgtggctaaattgggactttgatttagtggccatgccgacgcagggtcgcaagatcaaacggaaggagccacactatcaccatcacgtcaatgtgccgccgccaccaccgccgccatcgccccatggaccgggtccagtgccccagcaaacggcggtgatcgagcacgaggtgccgccatacacctacgaggcgattaaccacgacgaattcgaaccggccaaggtgaagctctcccacttcgaaggctcctccgattacatagtgcactcccaccgcggaggcggtggaggaggaagcggtggctacctggccgacaatggattgcgcagcatagcgaagggttcagcggatcaggccctgtccgcagtggccagccaaaatgcggcaggcaaacaggcatcctatgtggccaaaagtactctggctcaggcggcagcacaagcagccggcacagctgtggccgtgctcaagggcaaagaggtgctgctccatcggctggaggatcagagcgtggaggcccacaaggccatggagaacgagctgacccaactgcagcaggccaagagatccgccaaggcagcccaatatgccgcccagcaggccatcaaccatgtcagtgtcctaactgccgcacttaacaatgcccaatccgcctcggagttggcacaaaaggcagcatcggaggcggcggccgagctagcttcgcaaattgatatggtggcccaggccaagaccaagctggagcacgccgaatcgcaggcttatgcagctcgactggactacgaggaaacgcgcgatgcggcggagaaggctaccttgtccgcccaggaggcgcacttgaatgccaatgacgcggccttgcatgccaacgtggagctagcggagaatgtgcatatccacgacaagagcgatcggaatgtgcgcgagccgccgcgaaaccacagacttcaatag

SEQ ID NO: 29760 - protein, 318 aa, DROSOPHILA
MWLNWDFDLVAMPTQGRKIKRKEPHYHHHVNVPPPPPPPSPHGPGPVPQQTAVIEHEVPPYTYEAINHDEFEPAKVKLSHFEGSSDYIVHSHRGGGGGGSGGYLADNGLRSIAKGSADQALSAVASQNAAGKQASYVAKSTLAQAAAQAAGTAVAVLKGKEVLLHRLEDQSVEAHKAMENELTQLQQAKRSAKAAQYAAQQAINHVSVLTAALNNAQSASELAQKAASEAAAELASQIDMVAQAKTKLEHAESQAYAARLDYEETRDAAEKATLSAQEAHLNANDAALHANVELAENVHIHDKSDRNVREPPRNHRLQ

SEQ ID NO: 29761 - DNA, 2786 bp, DROSOPHILA
tctgaaggacaccttttgcgagtgcataatcattgggcaaccggttacatagccgctttgcctattagctaatattttatggtgcggcactttctttgctctaggatggccggtaagtcgttagtgggtcacggaatgatatgttccacgagagaacctgtttagtttgaagcgcagccaaactggacactgcacacaaggcacacaccaatcactcagttttgacaccaacgcacctctcgatctcgatctcgacttggacttggacttgaccgacacgaacgtcctgtgcggaccagagataaaatgcttatgactcgagtggaggatcgcccgccaagcggagtcaatgtggatggacgagttcggtgaaaaacgcttttactttcgcactagatgaagctaggagcgcgcaacaggtagagctggaggctggtggctgggggagcggcaagtgggcgcagtaaatccggtggagactcaacgacgattgccagttggccaccagaggcgccatgtatttataaacgaactggtcgggtcgccgaaagaaagtgcaaacccgttggctgttggttttcctcgcgagctggccatgcaccatcatccaacaacgatggtgctgggtcaatgctaccaggcggctgctcgattggataatttgtagccgcaattatggcagagcgtctaattgccatgagacgctttaaatgcccgctccgggagagattgcatatgacgaaagaccgatgaagtccgatgattgttcgcttcctcgcagatccgcgtgtgaacacggaggagtgttcggaagcttagcgaggtgtgttgagtatacgccccgtaatccccaattgcatcatgataaacttgatgtcacaatttgtagtttataattgtgatctcacctacgaactattgaatttaataaaactgaattatattctcccttttgaaaatgcaaagtaaaataaaatataagatatacaagttattggcttcagttggtgcgccccctcttcagccagagtaagtgcctcagttccgccctcctgcgctccctggtggccctatgcctggcctcctgggcagcacaggctgccttctcggcggcgtttttggtattcttgaaatccacacgggccacctccagctggcggagcaatagctccacccgcttcttggccgcttccacaagctgttgcttctcgcccagctcctgctgagcgccactggccacgtgctccgagttgaccacattatcctgcgcattcttcaccgccagcgtaatggtgttcagctgatctgccgcctgtttggccgcttgcccggccgcagcataagtagtttgggtggtctgtaacaaggtgctctcctcctggaccactagctccccctcgcgcacctcggactccagttgctcgacaatctgttgcttgccggccagagcagcttctgccgccttggctgcggccagcgctttgtcggccagttgctgcttcacctggcgggcagctgcctcgccagcctctatctgggcatcggatgcctccatggcttccttggccgccttctgcgcaatgcatgaggcctttaccctggtctttccattcatcttgaagtcgcacggggcaccgccggaggatgacgacacactgttgtcgccatcaccatgatgatccgacattagagcagctatctcattggaggactgcggcaacttgtggcccgcagaatgatctgagaacaggaagaaaagtagaaatgcgattcgtgctatctccatgcttaactcgaaatagttgtattaaacggatttctaaagatatttaagaaatatatactccaggtaacttgtggttactgtacaaatatttcaaataatagtgatttgaaaggtggagctgctatattcccattattatctccacatttcgatttcctgatgagccttgagatttatgtacgatgcaagattcccaatgcgttgcgactccctggttacgatgttgcttctttcgaacatcctgctgtcgaccgccgcgcatcctgcccagcggaatgatccgcgtttcaagcccggctcccttccctgcaagacgagcatgaaagccagccaggtggcctcgaaggcggccaaggatgcgaaggacgccaaggatgcgcagccatgtgccgcggagatggcgggctacagggcacgggaaatgctggcggacagggcgttgcaggcggccaaggctgcggaggcggctctcaacgggaagaagcagctcctcgatgaatacaccaaaagtctggcagaaacgaacagggttatcgaggaaatccaacgagccattgctgccagctcgtgctcggcgacgtcggcaaaggggatccgtgacaagctctgcacatccgtgaacattatgaagagtatgctaaaggaaatgggcggaaatctcgataacatccggaggatggccgacagtgcccagaaagaggccctggaaaagcgcagccttctgaaagcggccaggatgcgggtggaagagctccatagctgcatgtgcgaggctcagaaggatctggagcgaaataagcagagcgctaagaaggccaacgacgccgccaaggaagcacagcaacggatcgaagctttgcaaaaactggtgagcaggattaagatgctgaagcgaaaggatcttcagtcgctcgagaacttcctgcgcaggagaagaagtagcactccggaaaaaacaagttgagtttcttgtttgttatggcaataatcatatttatat

SEQ ID NO: 29762 - DNA, 786 bp, DROSOPHILA
atggagatagcacgaatcgcatttctacttttcttcctgttctcagatcattctgcgggccacaagttgccgcagtcctccaatgagatagctgctctaatgtcggatcatcatggtgatggcgacaacagtgtgtcgtcatcctccggcggtgccccgtgcgacttcaagatgaatggaaagaccagggtaaaggcctcatgcattgcgcagaaggcggccaaggaagccatggaggcatccgatgcccagatagaggctggcgaggcagctgcccgccaggtgaagcagcaactggccgacaaagcgctggccgcagccaaggcggcagaagctgctctggccggcaagcaacagattgtcgagcaactggagtccgaggtgcgcgagggggagctagtggtccaggaggagagcaccttgttacagaccacccaaactacttatgctgcggccgggcaagcggccaaacaggcggcagatcagctgaacaccattacgctggcggtgaagaatgcgcaggataatgtggtcaactcggagcacgtggccagtggcgctcagcaggagctgggcgagaagcaacagcttgtggaagcggccaagaagcgggtggagctattgctccgccagctggaggtggcccgtgtggatttcaagaataccaaaaacgccgccgagaaggcagcctgtgctgcccaggaggccaggcatagggccaccagggagcgcaggagggcggaactgaggcacttactctggctgaagagggggcgcaccaactga

SEQ ID NO: 29763 - protein, 261 aa, DROSOPHILA
MEIARIAFLLFFLFSDHSAGHKLPQSSNEIAALMSDHHGDGDNSVSSSSGGAPCDFKMNGKTRVKASCIAQKAAKEAMEASDAQIEAGEAAARQVKQQLADKALAAAKAAEAALAGKQQIVEQLESEVREGELVVQEESTLLQTTQTTYAAAGQAAKQAADQLNTITLAVKNAQDNVVNSEHVASGAQQELGEKQQLVEAAKKRVELLLRQLEVARVDFKNTKNAAEKAACAAQEARHRATRERRRAELRHLLWLKRGRTN

SEQ ID NO: 29764 - DNA, 6830 bp, DROSOPHILA
tttgttgccaaatgaagtgccatgggacgattttgagagttgtttccctatactgtgaggccttaggtgtctgtaagtttggtatgcgttctgactgcttttttttttactaaataccgttcccgaattccttttccagcattgtcttccttcttagatgaaattacgaacagtgactgtaagaaaatcagttatgcttaatatatccctaacccagaaagtacactattcagttttgcattttgaaattctttattgcatgcaggtaagagttagtaatgtttccttttgtaattggtttacttttgctttgacttgcaattatcctaaaagttacaacaagtgacgcaggtatatgctataaatatccgtataatgtatagatgtatatcgggcttgtatggtatattctttagatgaattcaaattataattgaagagacaaacttgtactcgtaaataactaggttgagagcatgaattgtcgtttgatttttatttccatatctaaccatagctctcggtacatcttcgatcctatttgtacaataatgtttatgtatatttatatatggttgtatttataaatatggttagtcatcttttgatttgattttcatgcagtttcgagtaattggcttaatgtaactatgcgtaaattacgaaattagtttagttcttttgggtgctattcctcgtatggcttaattctctttgggcttgcttcgggtcgtatctttgtcttccattatggcggcgggatagctgcacttgttccacatctacatcggattcgggttcggttagagggtcttgatcggaatcgaaggtaggggtcgggtcgttttcgtattggtttggggatcacacttattctacaaaagcgtcgcctctggggtaaacggaaatgcgaaagaaatcgatttaatatctagatgaggccaaataactggtcaacaggtgagaaacaggtgcataactgggtgcccattgttcctgtctacagcgctgatccctgctctatccttcgctgatacttacgcgcctgcacgctcagatcgtcgagtagtagttcgctggacgacttggatcgcttcggaaagatcagggctttgcggaggggtgtcacatgggcaatggccacttgggagcgggattgcggcttgggcggtggccttggcgctcgtttctgcttgtgagagggctttctcagatgctgcacaaaggacttactaactgtggagcctctattgaagtcctctgtcttgttgagcgccccattggcggcgtacttctgtagcgtcttgttgtcctgcgacttcaaacgctcgaagagattggtaagagtgcgggagcgaggtggcgatggagccgtatacttgttgtggtttaactggggcgtgctgtgtttgggcgttcgtccagctcccattcccgcactggctgtgggtgtggtcgaggccgtttgcgctcggctggcgaacacctcgtcatcaagttcgctcaggctgaccagcatatgctcgtcctcgaagagatcatcggtattggtctgcgtctgcgtgcccttgtcatcctcgttatcgtcatcgtagcaggagaagatctcatcaaaagccgcgttcactatgaacgactcgtcctgcagctcttcgttatcctccaggctgccatgtcttcgcagggtgccgaacaagttcttgcgatagtcctcgaaggtggactgctgcagttgctgccgggagtcatccactcgctggctcggctggaatggccaaaagccggtggccagtgtttgggtgctgcaactgttggtcaaaaccccctcgtgcatggtcggctgcttttgtggctgcgactgtgttcgtgagcgtgcgatttgctgatgttgcaggtgtggctcgtgttgctgctgcagttgctgctgctgcaaacgctggcggtgcaattgctgcaccagccgctggcgcatctcctgcgagcggcgcttcagctggctgtacttgctttgggtggtggtgccgccgttggcctcatacttactcagctcccgctccggatggcgatcctcctcctccgccaggcgacgttgcagggccagcgtttcgaacgtgtgcaccacactgcccacatgggtgttgatctcgggtatgcccagatctccgctaaatagatcggcattgcgtctggtcagcgtcttggtggcatgtccatgccctggggcgtggcagtgacgaaggggcggcactgggcagctggaatcggagggatagtgctcgtggaactcacaggaatcctgctgccagagtaggttgcccagttcgtcgtgaccgctgcttctggcctgggaactcgactggaggtgttggaagcagtgtgtttttgtggtgtgtcgatgttgttgttgttgttgttgatgatgatgatgttgttgtgtggtttgagttgagttgttggcagatatttcaagcaattcgttaatgaaacaaataaacaaaatctgattagccgagttgggggcaaaacacggtctgcttttgggtgctaagttggtggctggtgagcttttttcgggtttatcggtatcttttttttcatttttggctaagggtcaggggtcaggaagtggtgggcctggcttaggtctacaatagaagtaactactttcatacgcttatacattatatatacacatttaacaataagctgcatatgccatctcaatggtctttcaattgccttctgacattcgctacgaactaaattagtttatagagactattattcgaaaacaacaagctgcccaaacagttggcactcaaaacacttaactccttgtccgcccaagccttttgtgtaaaaatgccgggaatccacttccggcagccgcaaattcaagtttgcattgcaatcggcaatgtatcttgtagatcaaaattctgtcttgcgaattcgctcaatcaagtaaatactttcaaccatttggcaaacacacatgtaaatgcgtgagtctgtgtgtgtgtgcgttcatcaaattcaggtatttagtgggtgtcccaaaaatgctcccgaattccacaattgttgctggtacttttcagattcatgattactagatagataactgaactgaatatgtatatcttgtttcgggactattaattcaatcaatgtaatcaaaaacctagccaattaagtgcaagcaatgttaatgcattatattggctgttattttcattgaacctatgaccttttgccaattaattggaataactatcactaattgtgcagtattttaaacttaaaaatgaaaatatacatattttcaggaataaacatcggaaataaacctgtataaatctcaagtaaatgttttttttttcaactgccttactttctgatcaattaaactagcaacgctaacctctaatcagtgaagaagatatgagtcatgtaaaggatcggacagctgcttttggaacaccctcaacctccgtgtgtgtgtgtgtgcctgagtgtgctggtgtctaatagtagttattatcgaatggtaggctatcactggagctggagtagtgctgctgctgcggtggcagcggcaacacctggttgccgcaaccgttgcgcttggctgacttgctgttgccgctgcactttggcggctgcatctgttgcttgtgcaggaccttgaagtcgtcctgcgacttgctgctgctgccctttgagccgtgcttgccgttcttgtgccccttgccgtgcttggtgtgcttcaggctgtggtgttgctgctgctgcagctgatgctgctgctgatgctgctgctgatgttgcagatgtgcctgctgcatgtgcgggtggctgtagcgatcgctgccgttctgcggatggtggtggtgctcgatgtgggctatgttgctgctgctgtggtagtgctggtgcggcaaatgctgctggttgtggttgctgttgtcgctggtggtgccgctgctgccatagctgtagatctgcgacttggactggctgcgtagcggctgctgctgcatggtggccacactgtagtggtccaaactgtcgaaggtctgcagatagtgcggattgatctgggtgcagtagtcgccgccagtgttgctctgctgcttgcggtccagggtgttgcgtgcgttgctgccgggatgctgctggtagttcaagtgttggtagtgcgactcctgttgttgctgctgctgtttggcgccgtttttcatgggcagcgggggcggctgtggggactttctgtgaccgctcgacttgaagctattgttgccgctatgaagggtcaggctgttgttgctgttgctgttgttgctgttgctgtggttgctgctgctgcagtcggatttcgtcttgatggccacgaaagtgttgggcagcggcggcagcaggggtggcgtaccggtgggcgtggctatcgtggtcgagggcgagctggccccgcccacttcccgttcccgctcgcgctacgcgatgtgatgaccgccaaatgttcgaagtaccggaacgctctgatttttgtgatgttttttttttcggggggttgttgttggttgtggtgttttggttgtcgagtggttggtgttttggtgggtagttcacattacaattgtggtgtgcgtgtgttggttaaatgcgcattttgattggttggttggttgtttgttatcggaaaatgaaatgtcagagcgtaaaaagagacgaaaaaggaaaagagtagacacttatcatataagttgtgtatgatataagtatttaaatatttttgcttaagaagagtatacgtaggtgtcgtggtgtgagtgttagtgttcggtattttttgggggaatcgggaagtgcgtccgttgacatttgtcttaactgtgtttgcttggtcactaaccgatggacggttcagttggtaattcatatatatacatatagctaagctcgactcacgtacaggtgctaggaaaggtataataaaaggtgatatattcgtgcattcgcgggctacattaatatttacacaatctaggttcacaatcttatccagatcttggccagcgccctgtgagcttcaagacaataaatgtgcaaaacgttccacataaattagggatactgctgcaaatgcttttcgggggtgaattcggtggggatttcatgctaggatgcaaggatgcagttgcaggcgagcgggggaaatggctaattggcgagcgaaaacttattaaatttagctgcaagttaagcgatggcacacccacacacagttacacatgcatataacgctaattaaccagactaatttgaaaaaagcgagcgcaaagttggcattaagttaagttaaacgaagttgtcgcatttaaggacttttcgtgacttctgtttgaggcggcgtggtaggcaatttttacattaaattaaaaaagtttccgccccgcggcatcagtaagcgcaactgttctttaatattcttttatcccagcagcttccttctgtctgaggagcactgtaaatgcactttatgcatagtcaataacgcactcacatacgcacgcacgcacacacacacatgaaagcggtagtggtgaaggggcaaggggtgcggggattaaagaaaactttcagtcgctcactcaatgcactctcaaagacactacagggtgcacttgtcgagcaacttggctcagcggaaaagttgacaggcattgacataattttacgcgccatgacgacttgaaggagccgcaggatgtgtctgaatgtcgagtgccacacccagctggtgctgcatcaacattttctgcatcatttagttactggtacactcgcgaattgatgaaaacttaatagacctgccacataattgtggctaatgatggatgactgcgaatcgaagaccatctgctgcccagaaagagtccacgaaaaatcgtagagcggcggaacagcgatggcaacatcatcaacagcagccggaaatgggaaaatgggttggggatgggaatgagaactggaatgggtgcgctcggcggaagttcaactcagtgccacaaaaatttgaaaactttgtaaacaaaactttgaactcggcacttttgctgctggcgcgaaacgaaacgaaaaacatcaggcgacgatccgcaggacctttaggataaaaatggctgagcatccgtcccagccctgcccctttctcccggttgtcaactgcacaaagttttccacacggcaaatggtaactgaacttgctcgaaacttggacgagaacgacgacaggcactggagttcaactggaatccactctgcatacaacaacaaaggcgttcatcaattgtccggcggatgttgagttcagccggagaggaatctggtttccagtgttgaaagggggtcccgccaacagacggaccagagatgcagatagagggtgagcggtgacagcgacaaggacaacaacaatgacagttgcagccaggcttccgctaagctcggctacatccgccccctaaccccccccaccaatctcagaccccactatcctccaatttacacgcaagaaaaatcagcacaattacccattaataataataataattgaagaaatattccatttcatgaattgtagttctaaattatcaattttctaaatttgatttcaatttccaaacattgttcataataagattaaaaaatgtacctgttcttttcgagattttctcacagtgcactcccacacggatcaatggtaactgcacttcaaaaatggcttctatctgccatacacaacactacgaaatccaaatggcgaa

SEQ ID NO: 29765 - DNA, 2460 bp, DROSOPHILA
atgatgcagaaaatgttgatgcagcaccagctgggtgtggcactcgacattcagacacatcctgcggctccttcaagtcgtcatggcgcctcacagggcgctggccaagatctggataagattgtgaacctagattgtcgcgagcgggaacgggaagtgggcggggccagctcgccctcgaccacgatagccacgcccaccggtacgccacccctgctgccgccgctgcccaacactttcgtggccatcaagacgaaatccgactgcagcagcagcaaccacagcaacagcaacaacagcaacagcaacaacagcctgacccttcatagcggcaacaatagcttcaagtcgagcggtcacagaaagtccccacagccgcccccgctgcccatgaaaaacggcgccaaacagcagcagcaacaacaggagtcgcactaccaacacttgaactaccagcagcatcccggcagcaacgcacgcaacaccctggaccgcaagcagcagagcaacactggcggcgactactgcacccagatcaatccgcactatctgcagaccttcgacagtttggaccactacagtgtggccaccatgcagcagcagccgctacgcagccagtccaagtcgcagatctacagctatggcagcagcggcaccaccagcgacaacagcaaccacaaccagcagcatttgccgcaccagcactaccacagcagcagcaacatagcccacatcgagcaccaccaccatccgcagaacggcagcgatcgctacagccacccgcacatgcagcaggcacatctgcaacatcagcagcagcatcagcagcagcatcagctgcagcagcagcaacaccacagcctgaagcacaccaagcacggcaaggggcacaagaacggcaagcacggctcaaagggcagcagcagcaagtcgcaggacgacttcaaggtcctgcacaagcaacagatgcagccgccaaagtgcagcggcaacagcaagtcagccaagcgcaacggttgcggcaaccaggtgttgccgctgccaccgcagcagcagcactactccagctccaaggttagcgttgctagtttaattgatcagaaatcgagttcccaggccagaagcagcggtcacgacgaactgggcaacctactctggcagcaggattcctgtgagttccacgagcactatccctccgattccagctgcccagtgccgccccttcgtcactgccacgccccagggcatggacatgccaccaagacgctgaccagacgcaatgccgatctatttagcggagatctgggcatacccgagatcaacacccatgtgggcagtgtggtgcacacgttcgaaacgctggccctgcaacgtcgcctggcggaggaggaggatcgccatccggagcgggagctgagtaagtatgaggccaacggcggcaccaccacccaaagcaagtacagccagctgaagcgccgctcgcaggagatgcgccagcggctggtgcagcaattgcaccgccagcgtttgcagcagcagcaactgcagcagcaacacgagccacacctgcaacatcagcaaatcgcacgctcacgaacacagtcgcagccacaaaagcagccgaccatgcacgagggggttttgaccaacagttgcagcacccaaacactggccaccggcttttggccattccagccgagccagcgagtggatgactcccggcagcaactgcagcagtccaccttcgaggactatcgcaagaacttgttcggcaccctgcgaagacatggcagcctggaggataacgaagagctgcaggacgagtcgttcatagtgaacgcggcttttgatgagatcttctcctgctacgatgacgataacgaggatgacaagggcacgcagacgcagaccaataccgatgatctcttcgaggacgagcatatgctggtcagcctgagcgaacttgatgacgaggtgttcgccagccgagcgcaaacggcctcgaccacacccacagccagtgcgggaatgggagctggacgaacgcccaaacacagcacgccccagttaaaccacaacaagtatacggctccatcgccacctcgctcccgcactcttaccaatctcttcgagcgtttgaagtcgcaggacaacaagacgctacagaagtacgccgccaatggggcgctcaacaagacagaggacttcaatagaggctccacagttagtaagtcctttgtgcagcatctgagaaagccctctcacaagcagaaacgagcgccaaggccaccgcccaagccgcaatcccgctcccaagtggccattgcccatgtgacacccctccgcaaagccctgatctttccgaagcgatccaagtcgtccagcgaactactactcgacgatctgagcgtgcaggcgcgtaagtatcagcgaaggatagagcagggatcagcgctgtag

SEQ ID NO: 29766 - protein, 819 aa, DROSOPHILA
MMQKMLMQHQLGVALDIQTHPAAPSSRHGASQGAGQDLDKIVNLDCREREREVGGASSPSTTIATPTGTPPLLPPLPNTFVAIKTKSDCSSSNHSNSNNSNSNNSLTLHSGNNSFKSSGHRKSPQPPPLPMKNGAKQQQQQQESHYQHLNYQQHPGSNARNTLDRKQQSNTGGDYCTQINPHYLQTFDSLDHYSVATMQQQPLRSQSKSQIYSYGSSGTTSDNSNHNQQHLPHQHYHSSSNIAHIEHHHHPQNGSDRYSHPHMQQAHLQHQQQHQQQHQLQQQQHHSLKHTKHGKGHKNGKHGSKGSSSKSQDDFKVLHKQQMQPPKCSGNSKSAKRNGCGNQVLPLPPQQQHYSSSKVSVASLIDQKSSSQARSSGHDELGNLLWQQDSCEFHEHYPSDSSCPVPPLRHCHAPGHGHATKTLTRRNADLFSGDLGIPEINTHVGSVVHTFETLALQRRLAEEEDRHPERELSKYEANGGTTTQSKYSQLKRRSQEMRQRLVQQLHRQRLQQQQLQQQHEPHLQHQQIARSRTQSQPQKQPTMHEGVLTNSCSTQTLATGFWPFQPSQRVDDSRQQLQQSTFEDYRKNLFGTLRRHGSLEDNEELQDESFIVNAAFDEIFSCYDDDNEDDKGTQTQTNTDDLFEDEHMLVSLSELDDEVFASRAQTASTTPTASAGMGAGRTPKHSTPQLNHNKYTAPSPPRSRTLTNLFERLKSQDNKTLQKYAANGALNKTEDFNRGSTVSKSFVQHLRKPSHKQKRAPRPPPKPQSRSQVAIAHVTPLRKALIFPKRSKSSSELLLDDLSVQARKYQRRIEQGSAL

SEQ ID NO: 29767 - DNA, 9112 bp, DROSOPHILA
tcaaacactcgggcgggcgtgtaatgggaaaatattgcgcatacgcactgtacgctcattaaaggcgatcgctgatggcactcgcccgacttgctcgataatagctagttgtagttgtatttacaatgcgaataacacaaaggctaccgctttaaatcaattttggctaacaaaatagttcaaagcttttattttcggttcgcttaatcgagtggaatctctgagtgctcggttttttcctttacaattccacatacaagtgcatttgtatctgaaccttcatttaactataagcgtaaatagttagtaaatatcattgtatttctgtaccactttgcggtacgttgcttagtaactttgcacgagtttgatttggtataatgaaaaactgaacaacaaaactgggccggcgattgataaaatttcaatttgaagtacgtttggaaaattcgttattcctctagaatgcagtatacagtatgggtcacttacgttcatatacactttacggatatacatacacatacatttaggagaacgcttaacacggatgtttaattgatttaactataaatttgatttatgctgcttcaatgtatgtgaccttcgctaagattgtgactaataaatgtacgctttgctctatgcgttatcgtttatccgtatctttatcaattgtaattgaattgttgcattattgtcgtagtttacgttaatttatctcctagcataatcaagtggataagcatcttcctatgcaaacgagtaactatccccctatgccctataatctcccactgtctgatatgatacgaataattggctcctttcccgaatcccctcctcggcatatattacatactccttatctgtacacacgagtcctaatcagcgtagaagcgaatgtgccaatttgtaattgtaatttttggccaagcaaacaaatagcgaacgagaaagaaacaaattgtctccattccccctccattccgattgggggctaacactcgtactcgagaatgaatccctctcccttggacgtcgacctcgaatgttgctgatgcggcagcagcagtggcacggttgttgctgccgcaacgctggacgtcgctgctgctgtcggctgtacggttgctcggcttaaatttacttgtgacaacattgcggtggccgttaatttgccattgtaggcgagggcgggattcagtgtgggcgtggcaccgtgtccataatagttcagagcagaggtaagtggcacggactgctgttgctgctgctgctgctgggtgccgcgtcggtgctgctgctgtttggccatataatccgtgctcgtatttgccgtggcattgcgcaacgctatgaaggtgtcgaagttgtcggcggtcgaggaggcgttcgaagtgctcgagttacggcggttgcccaaatgttgttgctgcactttgggcgcggtgggttgcaggttcagattgagctttaggtgctgctgctgctgctgctgggacattgatgagttcgacgaggaggagttggacagcgaggacgagttgaccgagtgggcgggcgggtgctggtgctgattcgcatagtatttgcgcaaattctccagcatatagcgattgtttgcatttccggctgagctgacagcgaccaatgttgttgctcctcccgctggtgttactgcagttgctgttcctgctgccattgctgttgctgctactgctcctactgcagctaatgccgctggctctggctttggctgatggaactgtggccctgcggttggcatcggcatcgttatctgctgcttgctgctggtggcatagagtacatcgctgctttgtcccggcagcgccaaattgatgacactgcctgttgcagctggcattgcggttgctgctgcagtcgggattgctgcgtgctgtctttccatctccagtgcatgggctcttgtcctgccctttgccctgctccccgactgatagctgcgggcgtagtgggcctccatcaggtccgcccgtcgctgtctgtccacatccggctgttcgccgccttctccggcactcctgccgaatccgtagaactcggcccgccgatagtgcgcagagttcgtggtcctgtcgtagtttctgccccggtgtcgctggaagtgctccaggtagttctcgccaactccccgttcgccaacgagtagattctggtcctccagccccacttcatcgcccacctcctggcgctgcagatgctgattgagggactggtagaatgtgctttcggccagattctcattataggatgtcgcactcgccggctgatgccaatcagcgtcttcgcattcgttcactttgacgcgaatgcgtatgtcgcgggccatgtaatccggccttccgccagccgcctcatcctcggcactcaatccatccaccgccagcccagcctcatcgccatcgtcatcctcctcgtcgtcgtcgtaaaagaatcttgctgatttggcgctttccgccagcagcaagtcctcgctctcctccaaagccagggcgtagctcgttaggttgtcaaagtagtattcgcacattttgtccgggtgctcgtagcgtagtttaaagtcctttggatcctcctctggttcctgccggttagtagtgggtccactaaataccgaggcatagtcggaactgctcatcgagtccgagttgagggcagtgttccttaccttcgacttggacgcaatgggcaaagtgccgaggttctcgtaattagcaccatagttggctgcctgcgattgactccttttgtgcctgggagggcggggagtctccggggtaggatcatgctgcttagctagagctttccgctgggctccacttacacgacccactgaatgggccgactgcttggtggtgctcagctggtgatcaaagttttgctccaagtaggcatccaaatagtgcaggttcttgctgagatcaatctcggatttgtagctcttgtagatggtcgcttgtttgcagcgagattcgtagctggagatgtttgcccgatcactgataaagcggaagctctcatccttggccagagtatgaaagccactgaactctgaaccaccaagggatcccccttcaccggtggttgtcttgaagttccggcacttgtcgcgtattttctggataccctgccgtgtcttcgcctgcagtcgctcaaagtaatttgccttggtcaccggcgatgtagagtgatttagtcttggatgataggcggtggtgtgctggatgtcatagccgccaccgcccgaagcccgcatgctctgaatgctgtgcgtcctattgggatagctcagtttcagtttgggcagcgatggcggctcctcagcggcggcgcggttgtgcagttttcttagggaaagttgcttgaaaatggccctcgaacgcttgggcttgccactcgaggtgtttgtcctcctgcccaacaaatcacccgagtcattgtcgaagtcctgccgttcgaagcgccgcactggcactccgtgcagatagtggtgctcggaggggggattctggctacgattggactcgaaaagtcttcgcaatccacgaccctgcctctggggtcgggaactcctggcgttcgccgcactccgcagacgcgtattaacgctcagcgttaggatctcatcgtcgtggaaaatggagaagggattcgtgatcaccgtggagctgtctcccatctgattggtggaggggcttaaactgcttacggatctagtcttaaggctaacgctactcctaggcctactaatggctacttccttctgcttactatctagtacaactacaactttggcttcactgtgctgctggtgtggcattaactgctgtcccctaacttgccccagatccgtttcggatcgcgagcggactgatggagcatccgagcccgtcttgcgccgcagctccttcaaggagttgctctgcttgcggaagcggtagaacggattgttgatgctcagcttctggagcagcacctgcgtttcctcgggcgtgagtggacccactggcaagggatccactggacccggttgctggtgctcctgctgctccccactagtcacattcaggtggagcaacttgggcgccgtcgccggcttaatgtccctgttcatattgttctcgagatcacgcttgctgctactggtcttgctgctagtcagcgaactgccgccctcgctgttgctgctatcgctggctttggccacctctgaggtgttgttattatcgctattggtcaggacagtagtcgatgtggaactgattttgtggttgttattgttgttgtggctcacactactgtcatcaagtcgctgttcgttcgatgttgtgtgttggtctgtcagttcgttttggtgttcgttttcgtttttgtttttgtttttgttatcgtcttgttgttgctgttgcgttagctgttcgttggattcgctagtggtatcaattgcctgctagaccctagtgggcggttgtaatatcattgcagccatgcgtaccttcattgcctccggtgatccgtgtcccgggtactgttgctgcggatgctgggatgcggcatgtagggcagcggctgctgctgctgctgcgtgctgctgctgctgttgttgctgctgctgctgctggtgatgatggaagcccgctggcgtggtgtaaatcgaatcaccttgagggccactcgtgctatccgagcgtgatttcaaatcagctttctcgctgcgggcaacaaacaaaaaggaaaagagatgagaatgagaatgagatgggtggagcaaatcgttatcgaaaattgtttgcccaagtgacaattgtgtgggtggtggttaagtggttgggtggtgccatcatcggctgccatcgctgattggcaaattgtatccctcacgcatatctgaatatctatttagtttttgtcgctgcctcgccttgccgcaggcaattgtttacttggggcttaggaaattagatatgccccttgccacttgcccctttgcatccttgcccccatcaatttactctcgagatgggcccagaaatttagctcacaaaacgaattttgtggaattgtggttctagcgtgtggtgctcgatacggaaattctaaatccatttccgttctccttttaatattgatctgttcagtggtacactttgaacttgtgtgtgtataaacagaatatatgtagttattctaaactcctaaacaagtggaacaaaggacgttagcggtgaatggccaaataacctctcataactcatatttcaggactggggctgcatggcatgcagcaacaatgagcgataggttgcccctgtttcgaattgctgctattggaaaacaaaatattatttacccttctggagttttgggttataacaaatgtttatattctaagttatgattctaatgaaaattattgagaaagaaaagtttaaatcaaagtttcccttccgccctaaaataattataatttacactagttaaatttccttagctattctacaaaatagtcttatcgaaccactttctcaacatgtgtgagggtatttctactttgttctgcgccaaataaaaatgtttgctcgccgatgcatatattgaatatatgaaaaatgtataatattttatgtccctcacacacacacgtacgtgcagtggaaaacatttttcattgttccaatgctgtacgtgtgcatttgtgttggtgggcgagctgctctattcggccagtaggggcgcataaattggcacgccagcgccacctgttgggtgcaggatgcggctgcataaaaatatatcaaaatggtcatttatctatggccccctccctgaacatgcatgtgtgtgtgtgtctgtgtctgtgggtgtgtacgtattacgcttcaacttacctgtctttatccgatgatttatagcccgtggaacctgtgccatgcgagaggcgaaaggaaagagaaaggggaagattcatattagagtgtgcaatattcaggaatataaattccacccattattctttgaagggtgtggttgtgtctcgctgcaaaatagtagaaattagctgtgaaaataccgctggcaatttgcaaatagacagctagacagagggctatgtatgtacgtatatgaatatatttttgaaatgagcccttggagcgccgagataaatgagccaaggacttattgattgcgaggaacgtgtaaattcccaacgaggtgttcgcaaattttgatagatatcgaaggggtgaagtgaagggtccccttagcctaagatatatgtgccacagtatcgggtcgcacttgagagatctgtcaaacggcatttgacaactggaaggcagctgcagcagtcagtcagccagtcaaattgacagcttgattgacaactgagaaattgcgattaggtgcctgggactcgggacacagcctgaaaagtgtttacagatcacgtggatgtggatgggtaactgtgtgcaggaacggctcagatgtccttcagcaatggcaaagtttcgcccttgctcctttagaaaattgttttacaattgtaaaaagtttcaccgctttttgtctgcgttttgatttctaattaggcagcgaactctggctttaagccatcttccttcgccgaaggagaagagatgaaaatgttggcgcaactaacaaaaagccggctggaaaacccttaacccttttgtgtgcacagggggcaggattcagcggaggaaacaggaaacggagactgaccgcaggcgttggacgctaatgaatattttatgagatttatttgagtttcgagtttcaagcagtgtgtagggaaaagggaaaagctgcaaaaagaataaaataaaaataaaacgagccaacacaacacacacacaaagcgccaaagagacgcatccatcctggcagccattttttccgccatgaccgcgtccttctcgcatttcaatgctttgtgagctggcaagtttttgtgtttttgcaattagtgtgacagcggccttgggggggctggtttccagctagaaaggggtggtggtgttggctgctgggtggtgaaacaggcgccataatcaaggaggaagttttaattgtcgcggccttgacggcactggcggtgcaattaatacgggcccgatgattgttcgccttctttttttttttttgggtgttttccctccttctttcaacttacccttgaagcagcatctcttgctcttgatcgcatagatacagaggcaaaccagcaaaaggatggcggccatgcagcccccggccacgcccattagatagctcatctcgtagggttctgtccggaaattccattcgattcgatacacggattcgtatttgtattcgtattcgatgttgtggagggtggtggggttgattatgcaagcattaaggggaattttcattttcatatgcaaaatatatgttatgcaattcatgtattgcacgtgcgattgattttaattaaaaccattgggcagcgatgcgatgatgggtgggtgggatatgtttaatgggttctcagttcatgtgttctttagcgaatttacactaccttgtggcaataagcaaggattaatcactattcggctaattaaagtgaactttcattgaaattttaaggatatgaattactgaaattgttgtttctaagattcaacatttgacttatatctttggataaagactgaataataatatgggttcatgagtaagtgaatttgactgtgacgatgctagcataaaagtgttttgcaggaatgtatggtattctatgcattaatttcttgatgatgaagtgaattgaaaaaattgagtgtaacttaaatacgtgatgtatgtgatggggagcagtatgtggggagggggtaaagaaaatcaaagaaaagtctatgcacctgcaaacgtaccctccacaatcaggtgtatggcatgacgatcggtgccccgctcgttctccaccaccaagtagtagggcctggagtcgtgctcgtccgcgtgcaggatgtgtagggtggacaggtagcaatcctcccgcgtgtccggctgcatgtcatcggcccggaagcgatctgtgggatatgaaatgggaaatcaggcaagtccttgtgctttttagttgttaccaaatgcgaattggctttcgtgggctaagtaattgcactggaattgcacacaatttgtcggcggccgacattaatcattcgattcgatgggctaactagcatcgcaagcgaaaaaaaaatggacgcggagcaaaggagaacgaattggacgggaatgcgccccgtttgatttgtgtcagtggcagtgagagcacgcaggattacacgcacgaaggacgagcaaggatggacacgggcagacaagctgaaaatgaagagtaatgcgacttgcggaccaaggaccagtgttgcccagtcagatgttttctagaataaagaacaccagatttaattctcacctgaactagttattcaattatattcttatctgtgtctgtgttttatattatttaatttccgcagaacttatttaatatcctaatactttatgaacacattattggttttctttgaacttttaaatgaactaacatgagaaaattctcttttttggagtaatttaatttaaatctgcaattttcaggttgagcttaatcaggtaatcaatagttgccaacactggcaaggatgcagttcaagttcatggaattgcgagggtagcggaagttaagaagggatgcagccgcatctggttgcggatgttcatcccgaaagagtttcagctggaaaatgagttgggttgtgtgcgctggctgtctgttgaagctcggattaccggcggctgacaggcgtgggaagtctgcccgaggcacccccatctcgaccgaccattctttgcactacccactttgcaacaacggacatgacactgccagtttcttgtccgactctgactccgcgtggtcatgtaatttgtcttgatttgcggaacaattctgcgcgaatgccctccccccgtccgcaaccctttctgcgacgaggcagtt

SEQ ID NO: 29768 - DNA, 4023 bp, DROSOPHILA
atgcagccggacacgcgggaggattgctacctgtccaccctacacatcctgcacgcggacgagcacgactccaggccctactacttggtggtggagaacgagcggggcaccgatcgtcatgccatacacctgattgtggaggaaccctacgagatgagctatctaatgggcgtggccgggggctgcatggccgccatccttttgctggtttgcctctgtatctatgcgatcaagagcaagagatgctgcttcaaggcgtccaacgcctgcggtcagtctccgtttcctgtttcctccgctgaatcctgccccctcgagaaagctgatttgaaatcacgctcggatagcacgagtggccctcaaggtgattcgatttacaccacgccagcgggcttccatcatcaccagcagcagcagcagcaacaacagcagcagcagcacgcagcagcagcagcagccgctgccctacatgccgcatcccagcatccgcagcaacagtacccgggacacggatcaccggaggcaatgaaggcaattgataccactagcgaatccaacgaacagctaacgcaacagcaacaacaagacgataacaaaaacaaaaacaaaaacgaaaacgaacaccaaaacgaactgacagaccaacacacaacatcgaacgaacagcgacttgatgacagtagtgtgagccacaacaacaataacaaccacaaaatcagttccacatcgactactgtcctgaccaatagcgataataacaacacctcagaggtggccaaagccagcgatagcagcaacagcgagggcggcagttcgctgactagcagcaagaccagtagcagcaagcgtgatctcgagaacaatatgaacagggacattaagccggcgacggcgcccaagttgctccacctgaatgtgactagtggggagcagcaggagcaccagcaaccgggtccagtggatcccttgccagtgggtccactcacgcccgaggaaacgcaggtgctgctccagaagctgagcatcaacaatccgttctaccgcttccgcaagcagagcaactccttgaaggagctgcggcgcaagacgggctcggatgctccatcagtccgctcgcgatccgaaacggatctggggcaagttaggggacagcagttaatgccacaccagcagcacagtgaagccaaagttgtagttgtactagatagtaagcagaaggaagtagccattagtaggcctaggagtagcgttagccttaagactagatccgtaagcagtttaagcccctccaccaatcagatgggagacagctccacggtgatcacgaatcccttctccattttccacgacgatgagatcctaacgctgagcgttaatacgcgtctgcggagtgcggcgaacgccaggagttcccgaccccagaggcagggtcgtggattgcgaagacttttcgagtccaatcgtagccagaatcccccctccgagcaccactatctgcacggagtgccagtgcggcgcttcgaacggcaggacttcgacaatgactcgggtgatttgttgggcaggaggacaaacacctcgagtggcaagcccaagcgttcgagggccattttcaagcaactttccctaagaaaactgcacaaccgcgccgccgctgaggagccgccatcgctgcccaaactgaaactgagctatcccaataggacgcacagcattcagagcatgcgggcttcgggcggtggcggctatgacatccagcacaccaccgcctatcatccaagactaaatcactctacatcgccggtgaccaaggcaaattactttgagcgactgcaggcgaagacacggcagggtatccagaaaatacgcgacaagtgccggaacttcaagacaaccaccggtgaagggggatcccttggtggttcagagttcagtggctttcatactctggccaaggatgagagcttccgctttatcagtgatcgggcaaacatctccagctacgaatctcgctgcaaacaagcgaccatctacaagagctacaaatccgagattgatctcagcaagaacctgcactatttggatgcctacttggagcaaaactttgatcaccagctgagcaccaccaagcagtcggcccattcagtgggtcgtgtaagtggagcccagcggaaagctctagctaagcagcatgatcctaccccggagactccccgccctcccaggcacaaaaggagtcaatcgcaggcagccaactatggtgctaattacgagaacctcggcactttgcccattgcgtccaagtcgaaggtaaggaacactgccctcaactcggactcgatgagcagttccgactatgcctcggtatttagtggacccactactaaccggcaggaaccagaggaggatccaaaggactttaaactacgctacgagcacccggacaaaatgtgcgaatactactttgacaacctaacgagctacgccctggctttggaggagagcgaggacttgctgctggcggaaagcgccaaatcagcaagattcttttacgacgacgacgaggaggatgacgatggcgatgaggctgggctggcggtggatggattgagtgccgaggatgaggcggctggcggaaggccggattacatggcccgcgacatacgcattcgcgtcaaagtgaacgaatgcgaagacgctgattggcatcagccggcgagtgcgacatcctataatgagaatctggccgaaagcacattctaccagtccctcaatcagcatctgcagcgccaggaggtgggcgatgaagtggggctggaggaccagaatctactcgttggcgaacggggagttggcgagaactacctggagcacttccagcgacaccggggcagaaactacgacaggaccacgaactctgcgcactatcggcgggccgagttctacggattcggcaggagtgccggagaaggcggcgaacagccggatgtggacagacagcgacgggcggacctgatggaggcccactacgcccgcagctatcagtcggggagcagggcaaagggcaggacaagagcccatgcactggagatggaaagacagcacgcagcaatcccgactgcagcagcaaccgcaatgccagctgcaacaggcagtgtcatcaatttggcgctgccgggacaaagcagcgatgtactctatgccaccagcagcaagcagcagataacgatgccgatgccaaccgcagggccacagttccatcagccaaagccagagccagcggcattagctgcagtaggagcagtagcagcaacagcaatggcagcaggaacagcaactgcagtaacaccagcgggaggagcaacaacattggtcgctgtcagctcagccggaaatgcaaacaatcgctatatgctggagaatttgcgcaaatactatgcgaatcagcaccagcacccgcccgcccactcggtcaactcgtcctcgctgtccaactcctcctcgtcgaactcatcaatgtcccagcagcagcagcagcagcacctaaagctcaatctgaacctgcaacccaccgcgcccaaagtgcagcaacaacatttgggcaaccgccgtaactcgagcacttcgaacgcctcctcgaccgccgacaacttcgacaccttcatagcgttgcgcaatgccacggcaaatacgagcacggattatatggccaaacagcagcagcaccgacgcggcacccagcagcagcagcagcaacagcagtccgtgccacttacctctgctctgaactattatggacacggtgccacgcccacactgaatcccgccctcgcctacaatggcaaattaacggccaccgcaatgttgtcacaagtaaatttaagccgagcaaccgtacagccgacagcagcagcgacgtccagcgttgcggcagcaacaaccgtgccactgctgctgccgcatcagcaacattcgaggtcgacgtccaagggagagggattcattctcgagtacgagtgttag

SEQ ID NO: 29769 - protein, 1340 aa, DROSOPHILA
MQPDTREDCYLSTLHILHADEHDSRPYYLVVENERGTDRHAIHLIVEEPYEMSYLMGVAGGCMAAILLLVCLCIYAIKSKRCCFKASNACGQSPFPVSSAESCPLEKADLKSRSDSTSGPQGDSIYTTPAGFHHHQQQQQQQQQQQHAAAAAAAALHAASQHPQQQYPGHGSPEAMKAIDTTSESNEQLTQQQQQDDNKNKNKNENEHQNELTDQHTTSNEQRLDDSSVSHNNNNNHKISSTSTTVLTNSDNNNTSEVAKASDSSNSEGGSSLTSSKTSSSKRDLENNMNRDIKPATAPKLLHLNVTSGEQQEHQQPGPVDPLPVGPLTPEETQVLLQKLSINNPFYRFRKQSNSLKELRRKTGSDAPSVRSRSETDLGQVRGQQLMPHQQHSEAKVVVVLDSKQKEVAISRPRSSVSLKTRSVSSLSPSTNQMGDSSTVITNPFSIFHDDEILTLSVNTRLRSAANARSSRPQRQGRGLRRLFESNRSQNPPSEHHYLHGVPVRRFERQDFDNDSGDLLGRRTNTSSGKPKRSRAIFKQLSLRKLHNRAAAEEPPSLPKLKLSYPNRTHSIQSMRASGGGGYDIQHTTAYHPRLNHSTSPVTKANYFERLQAKTRQGIQKIRDKCRNFKTTTGEGGSLGGSEFSGFHTLAKDESFRFISDRANISSYESRCKQATIYKSYKSEIDLSKNLHYLDAYLEQNFDHQLSTTKQSAHSVGRVSGAQRKALAKQHDPTPETPRPPRHKRSQSQAANYGANYENLGTLPIASKSKVRNTALNSDSMSSSDYASVFSGPTTNRQEPEEDPKDFKLRYEHPDKMCEYYFDNLTSYALALEESEDLLLAESAKSARFFYDDDEEDDDGDEAGLAVDGLSAEDEAAGGRPDYMARDIRIRVKVNECEDADWHQPASATSYNENLAESTFYQSLNQHLQRQEVGDEVGLEDQNLLVGERGVGENYLEHFQRHRGRNYDRTTNSAHYRRAEFYGFGRSAGEGGEQPDVDRQRRADLMEAHYARSYQSGSRAKGRTRAHALEMERQHAAIPTAAATAMPAATGSVINLALPGQSSDVLYATSSKQQITMPMPTAGPQFHQPKPEPAALAAVGAVAATAMAAGTATAVTPAGGATTLVAVSSAGNANNRYMLENLRKYYANQHQHPPAHSVNSSSLSNSSSSNSSMSQQQQQQHLKLNLNLQPTAPKVQQQHLGNRRNSSTSNASSTADNFDTFIALRNATANTSTDYMAKQQQHRRGTQQQQQQQQSVPLTSALNYYGHGATPTLNPALAYNGKLTATAMLSQVNLSRATVQPTAAATSSVAAATTVPLLLPHQQHSRSTSKGEGFILEYEC

SEQ ID NO: 29770 - DNA, 2372 bp, DROSOPHILA
gaatctcggataggcaagtaatttgaggctatacagttcttcagccttgaatatttttaagaatacatatactgacttgcattttatgtaagtaattaaagtagtgtaaacatataaatatgataatgaagtttgttttaatcttaaatgtatagtatctatttctaaaatattactgccaagtaatgagaaactaggtcctttttttgacactttggcactatgtcgctgttagttagttagtttgttacacacacatagacatgtacatataaatgtgctgtggacttttttcgtgcgcttgtttatttttgtgcatttttttttttgttcccggctctgctaaattgctcgtgtccttggttggtcataaattatgtacgtgctgtggtattcggcactaaatttaaatatttcttgctgttctttttttttagagttatccttttttccgagtttgctgtccagtttttcgccctcggcagttgcagctccatttttttattccgctggcgctgcggtcataagttcattttgattttgtgttacgttttggtttagtccgttgtccagttgctagtcgccgtccaccgcgaaattgtacggttgtatggaggggggaaatggcaaggggtaagatgtagggaaagtggaaaagcgggaaagcgacgaggaggtggcaacgcaagcgcttaaaatgtttcgcaggcgctttccggctgcagcttttaatggagttttgttagttattttaagtgtgcattagttgcacgggagcccagcgaggggaggaattaaatgagtagcccgaggaggaataggtttcgaccttttttttcccagttgcgttgtcacctcctctgtggctatgctggtcatctccatgacactggtttccattccagttcggtcaaaaaaaaaaagatcggaaaaaaaatgacatcgaaaaaagcaaagagagctgggatgcagatttatgaccgcaaacatggtccgttccttaacccgcaataccctttccggtgggtcggctggccatccctttggcagtgcctctcctggattccagatcctcgaggattcgatgcgtgtcaggtggaaaacatgcaggttgcggcaccagccgtgttgtcgtcatattttgtggaattgcggtttttatggccacaccacacacagtaaatacgagcagtgcagatagcgacttacccacaacttgcaacgacaccggatcggatatggccacccgctcctggccattgatgtagctggtggcccggcactcgtactcgccctggtattcgtaggtgacgttgtcgatgaccaatctggactcggagccccgttccacgtacttggatccatgggccattctgaaaggaaagtcgagagagcaagatattaaagggtagggtgcccagtattaacaacttttaatggaatctaacttggcaacagtttaaatggattgaaaaattaattgattttcccctttttggcgatgcatcggaggattcgatgtatcgatgcaaaaagccagttgtacgtgtggcaattgattatgattatgggcaactaatatacggattccatctggtcacggacttcggcatggagcgcactttgcaggccgctctttgagctgctcgcagtcgagcaaaatgaaactgatgcatgcaacggaggatgccacattcctcctccggaccccagccttttcccatgtgtcctcatgctgctgcaatccttgcttggcaatattgaaaattgcgtatgcgtatgagttattttttggtgcaggctgcccgactccgactaacagacgggtgggccaaagagctggctcacagaaatatttgatacatttttaatatgagaaatgcctttcaagctgcgaaatgctctgggctctcagattcttttgagggagccgcataaaaagatgggaaaaaaacagcagttcagccaatacattcattcgatggtgctttaagtgggagcatggatctttaaggcggtccctggcaaccggcaattaaaggcaataaattagaaagccattcaaatgcaaatctgccaagtcgaaaaagtttggcaagcgctcttctttttttcgtctctagttctcgaaggtccagcaagtgagagaaagcggtgaaatcacgtaaatcaaagtgacaggatttcgtgtcctgtgtcgtgtccttgggtacctcatttgcaagccgcccgcgcagcagttgcacttgcagctcggccgaaggccacaaggacaccacctgggaggagattaaggagctgccgagcatacgtcgctcggcctgtcagcggctcacttcgtggcattgatttattacccactggttccaact

SEQ ID NO: 29771 - DNA, 372 bp, DROSOPHILA
atggcccatggatccaagtacgtggaacggggctccgagtccagattggtcatcgacaacgtcacctacgaataccagggcgagtacgagtgccgggccaccagctacatcaatggccaggagcgggtggccatatccgatccggtgtcgttgcaagttgtgggtaagtcgctatctgcactgctcgtatttactgtgtgtggtgtggccataaaaaccgcaattccacaaaatatgacgacaacacggctggtgccgcaacctgcatgttttccacctgacacgcatcgaatcctcgaggatctggaatccaggagaggcactgccaaagggatggccagccgacccaccggaaagggtattgcgggttaa

SEQ ID NO: 29772 - protein, 123 aa, DROSOPHILA
MAHGSKYVERGSESRLVIDNVTYEYQGEYECRATSYINGQERVAISDPVSLQVVGKSLSALLVFTVCGVAIKTAIPQNMTTTRLVPQPACFPPDTHRILEDLESRRGTAKGMASRPTGKGIAG

SEQ ID NO: 29773 - DNA, 4756 bp, DROSOPHILA
tggcattcgttattagatgacgacaccttcgcataacaacttcccattctcctatatcctacatatatgtctgtccgatcacgatctggtgtagctatgtgtgttttatgctgccccgattgtctgggggcaagtgcaaacaaatggaatcgcaaaaatcacgtacttacgtggcatcgtcaaagcccttgcctcggaaagagatgcaaatacgcagcacaaagagaaaggacgagccataggcaggagtgccatgaggagtgctccgattctttccctacaatctgcctgttttgcatactaatgcacgacggcattaaccacgaaagcagaaacggaaggagcctaatcctgcaggcattatagatggctgcttgctatgctagcttaatatggctatatacgaacgttaagtctctttactataagcataggctttaataaatatcaattactctataatggtattgcgatgcagaaagttctaagctcgaagcatgactatttttatttttattttgtcagaatactaatgatttctgaatagaaaacgagtacttcgaattacagggtagaaccgctgcagtgtttttaaaaacaatccgtgttctatgatgttttccttgtctcaaacaatttccgctgagcaggtaattaaaattacgcgaaatagcatcagttctgttgaaaagtgggcgaggctcctcatataaaggaaatgtgcaacaggaaacgtgcttacgtaagaaggaaaggctgttcataaggactaatccttgctacatatactggtactaaatttaactatatattccataaagtgcaaacatttctacaacatatttattactggggcaagacaaatattgcgcatacgcagagtgagttgcgtttaattagctctaccattcagccagctacaaaaagcggtcccaagacgagttatttgaacgggaaagacacgtgctcacagccagaccagtaaagtttttaacgcaacctagaagtccaccaaaactatgcaacgcaaactgccaaagaactccagcgatgccaacctgcacacagagaaaaacttaagccaactgacaaaggtattggtagctaaaactaaataggctgcaataactcagcatccatcctgaacccaagaatgtgtatttccagtgtacttatacgtcaatggactcacctctgtacccatttgaaggatggcaggggattaccatcagccaggcactcaaaggctgcaggactaaaaagcggggcggtggtaaggcgatccggaccagctgaaataattttggggggatctgaaaggaaagggaagcacagaagaaagcagagctgggtgaaaactttgtccaaggtaaatagtaagatacgtacatttcacatccaactgcaccgacaattgctcagaggtgcccaccgagttctgtgcctggcaggtgtacaatccggcatcgcgacgcccgacgggacgcaattgcagtgtttcctgtgggcaagagattggaggaggagaggagatgggaggtggcttggatcagcgggcaatttaatacaattacaaatttctgctacacttcagataaattcccagcgagggggtgactccacccgacactagcaatttcggaacaacataaacaagctgggcggtagtatccgcatccttagctgcaactaagctaagctcacctgcaagctggctatctcggagcgacctgcccgccgccagacgatgctggccggcggattggcatcggccacgcagcgcaggaccagggcatccttgtcctcctccaagtcgatttccggtgagccaattagacggatgctcggcgcgtctgcgagaaaaacagaacacaggaacacaaaatagaaacagagaaacggagacggagacggagatggagacgttcaacttggttaggcaaaacaaaaacagcaattgaaactgcagaaacagcaatggcagccgagcaaacagagtcaacaagccgggcaagtcctgctcctggccacgtcctttgggacaagtcaactcttgaattgctcagcaaaacaggaaattacagcaaattgttgttaatttaattgttacagctttctgtctccgattcggatttggattgtgattccactgccacttctactcggtctccatggctcttgcttagattgccctgccctgactttaagccaaatcgaatgaagccactttagtggtccggcccgcattcatactgcaggtgctgtatcacagttttgcatatcgttatcgcaacactcacatttcacgtccagcctggcctccaccaccaccgatttggctgtgtaggactcgtggtaggcggcacatcgcagtatatctccgtggcgctcccgcatcgccgacacctgcaccaccgaggtggccgaccaggtgcgtggattatccggctcggtggcattcatttgcgggtggatgggcgagatctcctggtcgcctgggggagagagcagcagcaaatgggaattaattaacattaacaactgccgctggataacaacagccactggggtaatgcggcatgctgcacccaaaaaaaaaaatgtactatcagttggattgaaataaatataccaatgaatattcatttgtgttgctgaaaaaataaactattaattgtaaaaaaaaaaatgcaattgaaagcaaacatttataattcccttttccgtgttcgccacataaactggcaacatttcgttgcgtgtgctcccaaggagtgcacttacccaaaaaccatttgagggtggccggcggattgccgtaatgcgagatgcacttgaccgtcgccagggcgccggcgtctgcggtgatgttgtgtcccggcggcacgtggaccgcctcgtattcgagcctcggccgctgtggcgccactgcaaacaaaagagaagtgtccttggcaattaagtctcgaggataaacggtgaattaaggggcattttagcatgtaagggacaatcaatcgaaccgagaatccggatgcgaggcacttaccacgtacgacaagccgcaccggctggctggtgagggcatcctgcgtggtgaagtcactggccgtcacttggcactcccatagtccgtcgtcaaagtccagtgtggcggagcggatccagagggagcagtcgccaccgagctgcaccggcggcggatggagatccagatgcaggacatttccattgtcgcttgtcggcatacgtgaggcccattcgtatttctttgtatagatgccaacgggctgggggtgaggaaatgaatcggtttagttccacacacggagaaaaaattcaattatactaatttgtaatattattaaagatttttacgattggagtacatatggaaatggactagatgtttccgctcctatcaaacttggtttcaatataaacatttttccatttagatatttattccggtgtcgattgaacaaggatacagattggatacggatggggataaaaacgatgatggcgttgaaatgaactgggcgtcgtctacgacatgtttagcatgtttaacttttcgatgcaggcagccgtataatttgttctccgatttggtcaaacattcacggacaaatcggcgagccaatggtgaggaggacacacggtggtgtcctcgcccggaattccaaccccgaatctccaccgcctagtccgcccaccagcgccactactatccacccaaccactatgtgtcatttaactccatttcgagtcgccgtttcagtcgcttctgtctgtaaattggcattagtttgtttgctaattggaaattaaattacaattagtgatctctgagcgtggcatcgttcgcatttaagtatttatgggaacggaccgtaccccaaaaacccccagaactgagctgcctaattgcatttgggcttttagtgttgtctgacttgtccgtggcataatgggttaaattaattgctacattgagcttgtgcgccatggcataacaatcgtttaaaacgagcattcaaaggcagttcactgcagtgaaagaaaaggaaagcacatgcaagtgcataatctaatctcgtctgtcctgccatttgatatttagtgcttaaatttgcgcaaatagccacaaatgcattttctttgtcccatgctgataaaataatgtgtgacatgcatttgaccaccttgagttgactggccagccagcataaatacagtatctctggtttattaaacagcttgcggctggcatgcatgtgaaatgtctgcagatactacatgccatttgactccactgaccttaggccacagggaataatcaatggccggtcgccgggcaccaaagggttaagttaagttttgcaggctttgcggtaacaaaagatatgagctcaatgggcgaccgagctgccaaaactgcttgaaaaacaatttcagcatgggagataaaaaatcgaaccgaacaaatatttggctctcgcccattgatgctgccattgctgccaaaacattctcgaatcgatattcgtatcggcataattctctgcatatttcaacttcaatatagatactgctagcaacaacttggaggcaaaactccggagttttagcctgggcatccgcatcgttgagctcgatttgttggcctgcgaaaaaatgtgcgatggccaaaaattacttttattcaaatggctgagcctggttgttgatatcatagtcgactattctccac

SEQ ID NO: 29774 - DNA, 1134 bp, DROSOPHILA
atgacacatagtggttgggtggatagtagtggcgctggtgggcggactaggcggtggagattcggggttggaattccgggcgaggacaccaccgtgtgtcctcctcaccattggctcgccgatttgtccgtgaatcccgttggcatctatacaaagaaatacgaatgggcctcacgtatgccgacaagcgacaatggaaatgtcctgcatctggatctccatccgccgccggtgcagctcggtggcgactgctccctctggatccgctccgccacactggactttgacgacggactatgggagtgccaagtgacggccagtgacttcaccacgcaggatgccctcaccagccagccggtgcggcttgtcgtacgtgtggcgccacagcggccgaggctcgaatacgaggcggtccacgtgccgccgggacacaacatcaccgcagacgccggcgccctggcgacggtcaagtgcatctcgcattacggcaatccgccggccaccctcaaatggtttttgggcgaccaggagatctcgcccatccacccgcaaatgaatgccaccgagccggataatccacgcacctggtcggccacctcggtggtgcaggtgtcggcgatgcgggagcgccacggagatatactgcgatgtgccgcctaccacgagtcctacacagccaaatcggtggtggtggaggccaggctggacgtgaaatacgcgccgagcatccgtctaattggctcaccggaaatcgacttggaggaggacaaggatgccctggtcctgcgctgcgtggccgatgccaatccgccggccagcatcgtctggcggcgggcaggtcgctccgagatagccagcttgcaggaaacactgcaattgcgtcccgtcgggcgtcgcgatgccggattgtacacctgccaggcacagaactcggtgggcacctctgagcaattgtcggtgcagttggatgtgaaatctggtccggatcgccttaccaccgccccgctttttagtcctgcagcctttgagtgcctggctgatggtaatcccctgccatccttcaaatgggtacagaggttggcatcgctggagttctttggcagtttgcgttgcatagttttggtggacttctag

SEQ ID NO: 29775 - protein, 377 aa, DROSOPHILA
MTHSGWVDSSGAGGRTRRWRFGVGIPGEDTTVCPPHHWLADLSVNPVGIYTKKYEWASRMPTSDNGNVLHLDLHPPPVQLGGDCSLWIRSATLDFDDGLWECQVTASDFTTQDALTSQPVRLVVRVAPQRPRLEYEAVHVPPGHNITADAGALATVKCISHYGNPPATLKWFLGDQEISPIHPQMNATEPDNPRTWSATSVVQVSAMRERHGDILRCAAYHESYTAKSVVVEARLDVKYAPSIRLIGSPEIDLEEDKDALVLRCVADANPPASIVWRRAGRSEIASLQETLQLRPVGRRDAGLYTCQAQNSVGTSEQLSVQLDVKSGPDRLTTAPLFSPAAFECLADGNPLPSFKWVQRLASLEFFGSLRCIVLVDF

SEQ ID NO: 29776 - DNA, 3277 bp, DROSOPHILA
gctcatcttgttatgcggaaaatgcagcgttagaagagatttcttacattttttttgtatctttttcaaaaggacatttaattagttggattatacaaaaatttgaatatcaatctaaacatttagttgactagatattttcgatttattttatgggttcggttgcttcggtaattgcttaattaaatatacttgatgtgttaattaaggacttaaaagttataattcaatttatacgtattccctgaatttgctctcttttatcgctcgttgcgcgcgccctctcgctctccttctcactctcttccgtttcgagttccatgaagcgacgccaaaatagcaataaaaacaacgacgcaacagagccgcaaaaggtggcaaccctgcttgcgttgcactttttacacccaaccgcccacaatttttccaaaaaacaaatacataagggaaaaggaggaaaaatccaaacagctggcagcctcgcattggcagctgtgattttcattcgttcttccgctggacaagatggcttttccacactatctccttctctattccccctcccactctccttctcctctttgcgatcgtgtttcgttgcgtcttggccttgcactcatttcccattgttattgtttatttcgcaagaattacgacactgtcaggcgaatttgttggtaaacaattgtgtattgaagcagctacggtggtcactcgatacggggaagatctttaatatgtacataactgacaatacattaatgatttgtaatgatatgtgcaagctatttagtacgatcttaaaagtaggaaataaattaacaagaaaacaaggattatacaactcgcatttaggtaatacttcatatttacgctcaaaaagtgaaactgaaattgttgaaaaatctcgaaactcttatccaaatagagttaaaataatttgcagcgtttagaaaaacagaattgtggacgtagcatccgttagtagggagcgcatttgttagtacgagtgatccccgtacagtgaattcccttgatagcgatccagtccgttcaggattttctcccgccgcattcgctgttgctgccgtcggcgctgcctgtagagatccaggagagcattgcaggtgttcctgtcgagtgcgtaaccgcgcgctccattggcccttatggcgacagtgggtaggcggtgaaccgacgacttgtacagcaaactgccggtgccgaccttttgcttggcctccacggcggcggatgcggcgcgacaggccgcctccttcacctgctcgtactccgacttagcttgcgccacctggcgggccaggcggtcaccacgtgccttcgccgccgccagcatttggttcttctcctcgatatccatgttcgactggtcgattaggctgtccatttccgacaaaatgccactcgtctgctgtacgagggccctgaaaacattagtaatcgaaaaagcattgatattaaaaatcgatatgttatcgctggtagatattatgatagatataacgatataattgttccgcttttaaattgtgtagatagttggatggattgtgaacaatattgaatattgaatatttatcaattatacctgaatgtttcggcttgaacctccgctgctttgaccacggcacaggaggcctccacgttcgtctcactgttctgcagcgagcagctcacctgtccgaccacctcctcggcatcccggatctccctagcgtagttgtccaccattgcctgtttgccctcgagcaccgcatcggcggcacgggcagcggagatggccttttccgccagctgcatcttcgcctgccgcgatgcatcttgagcggcggccgcctgtgcatcattggctgccttggccacctgggcggcattctgggcaatgtgggtggccttcagccgcgaattgataatctcgtcacaggagtcacagttgtccctatctctaatattattcctgtctttgtcccgatccctgtttctatcgcaacccctatttcgatcccaatctcggcctcgatcccgatcaatattgcgatctttttctcggtccctagcgctttcgtccatgctttcacatccagattggtaggacggtcttgtggtgcatcccagataagggaatggcaccactgtggcccccgaactaccattcccatcgccgttgaagccctggggagatatgtcatcgttggtgttgtccaaatagctagccagggaggcgtcgtgttcgttgtggggctggtcgaagctcatcgcacggacactcacaatgcggaggatgataaggagcagggtatatggtggaaatatatacattttgaatccggaatttgaggaaagcgactcaggctgctgctttcaaaactactagatattccatagaatatatacatatttcagggtattttgcgattctttacagttggctggctttctagtactttcgcatagtatcagtttaattgatgatgggaaccccttaacttaccgtctaaaagagctagaacgtatttgtgaaacggaaaagcaattgtttgccctttaacgattttttaattgagctgagtggttgcccatacttttccaccagcgcttttccagctttcccatttcccattgtcctgcaggataaatggctgccatagcgatgggtaatcagcacctcagttggcagctttcgcaccttgctcacctttcgcaccttctttctccctttgcccaatgcagtgtaaatgcgtatcaagaatacttcattagtgcccaattgcggcgcaattgcgacgctgacgcagccaactggctggctaactaagtatctaactagctagcggctagctgactaactagctagctggttagctgactagcaagcacgtgtggcgagcggagaaagggtagaaagcggcataggtgtgggtgggctgggaaaagtcgcactttatcacaacaaaccagatgctaagcacgtgctgccatttgttttggttattattattgtgattccagtctctaatcagtgcggccaaataaataagtgtgcggaaaacagaaaccatgaatgcagttaactggcggtggggaaaacgccacctggcggaagtaatatcaacaattgcaacgatctgtagatacagattcatagatacatagatagcgctataatagatatttgcgtatttttcatttacactgaatatactaacatttattccgtgagagaattcaaattcttcgttgaaattacgcataaaag

SEQ ID NO: 29777 - DNA, 1113 bp, DROSOPHILA
atgagcttcgaccagccccacaacgaacacgacgcctccctggctagctatttggacaacaccaacgatgacatatctccccagggcttcaacggcgatgggaatggtagttcgggggccacagtggtgccattcccttatctgggatgcaccacaagaccgtcctaccaatctggatgtgaaagcatggacgaaagcgctagggaccgagaaaaagatcgcaatattgatcgggatcgaggccgagattgggatcgaaataggggttgcgatagaaacagggatcgggacaaagacaggaataatattagagatagggacaactgtgactcctgtgacgagattatcaattcgcggctgaaggccacccacattgcccagaatgccgcccaggtggccaaggcagccaatgatgcacaggcggccgccgctcaagatgcatcgcggcaggcgaagatgcagctggcggaaaaggccatctccgctgcccgtgccgccgatgcggtgctcgagggcaaacaggcaatggtggacaactacgctagggagatccgggatgccgaggaggtggtcggacaggtgagctgctcgctgcagaacagtgagacgaacgtggaggcctcctgtgccgtggtcaaagcagcggaggttcaagccgaaacattcagggccctcgtacagcagacgagtggcattttgtcggaaatggacagcctaatcgaccagtcgaacatggatatcgaggagaagaaccaaatgctggcggcggcgaaggcacgtggtgaccgcctggcccgccaggtggcgcaagctaagtcggagtacgagcaggtgaaggaggcggcctgtcgcgccgcatccgccgccgtggaggccaagcaaaaggtcggcaccggcagtttgctgtacaagtcgtcggttcaccgcctacccactgtcgccataagggccaatggagcgcgcggttacgcactcgacaggaacacctgcaatgctctcctggatctctacaggcagcgccgacggcagcaacagcgaatgcggcgggagaaaatcctgaacggactggatcgctatcaagggaattcactgtacggggatcactcgtactaa

SEQ ID NO: 29778 - protein, 370 aa, DROSOPHILA
MSFDQPHNEHDASLASYLDNTNDDISPQGFNGDGNGSSGATVVPFPYLGCTTRPSYQSGCESMDESARDREKDRNIDRDRGRDWDRNRGCDRNRDRDKDRNNIRDRDNCDSCDEIINSRLKATHIAQNAAQVAKAANDAQAAAAQDASRQAKMQLAEKAISAARAADAVLEGKQAMVDNYAREIRDAEEVVGQVSCSLQNSETNVEASCAVVKAAEVQAETFRALVQQTSGILSEMDSLIDQSNMDIEEKNQMLAAAKARGDRLARQVAQAKSEYEQVKEAACRAASAAVEAKQKVGTGSLLYKSSVHRLPTVAIRANGARGYALDRNTCNALLDLYRQRRRQQQRMRREKILNGLDRYQGNSLYGDHSY

SEQ ID NO: 29779 - DNA, 2378 bp, DROSOPHILA
cgaatgcctggctgcatctttatgtaattatgtaattaggtgttaaaggcagacaatttgatggagcccaacaagcacacaaaatattgacaatgataatgatgtttggagcaccgttaggagtaactccttatcgaggcactcagatcgcacgacatatgtatggaccatatgccgcatacaagttatatatatgcgatcgattcaatatccggtcgtggccacctgttgtgcccctttttctatgtgcgccgcatttttaatttaattttttttgcactctccctcatatgcaagcttaaattatttcgtacgctcctcaacttcgaacctcatgctcatcctcctgctgctcctgctgctcctgctcctcatgctcctggccatcgctggtgattaataaagccaacatccagaccggatcggcaatgttgcctttgcaacagctggctgcaacagcctggccaattccaattgccaatcgcgttcgtgagaagagcgaccgggcccaaaagcacagaaaacagtgccgaaaaaactgcagttgactttcttttttatggactaaaaattattattataattataatcatacgatcagtcgttaattgacgagcgtttacacgatttacttgattttttgcggatttattgaattggttcgtatgaacgattgtatgcacatccttgcgatttctctgggaatataaagaacaactttaatactaactaacatcctagtacatcagactaatgctatgagttttccatcttttaattcaaagaacagagttcttaaaagccattcattctgttgaatttctatctcagatagcaagaagtatgtatctttagtcccaattgactcaagtagaatgattaagtgatttctaatttgatttattttgtaacatatccttatgctaactgtacacttatggtaggtactaacttatggcgaattatgtacacgagtcagagtatgcaaaacacttcactctcactttttgatcaccgcattggcagtcgcgtcctgggtgaagtggaatatcctcaggcgatggtacgaacaggccacccgacatccgcgggtgcagaactcccgatccgcgcacatggaggtggccagactgcgctgcacaacgtccaggacgcggcagtagtcgtggcacatgtagcagtctggacgggatcggcagagcagtggtggcgtaatcgctggcaaggattgccggtagcagagctctcggcactcggcgatcctctgcggtcgtccttttagtcctacggcggatgtggatatggatgcgcccagcgcattgccagcgataaagatgctcacacacaggatggtcatcatttttgctcctccagtcatggttcctttgaatttgaggtccttacttttagttttacttccgtaatgtcgaagagatgtgtggatcgctttagatttctccggcttctgattgtcccggtcaactagtatggccttatataccaacgccgtcgtttccaacccgtttcattcataaaacgtttggaaaatcccgactaactacctggtcggtcaccatatattacccgccggccgcacggttctgatcctctagattgggactgtggatccaggtaattgacaacacgtgtgcgcaacgcgtcgccgttgcagtttcatgaatgaccggctctgcgggaaatcccatggactttcccgccattcataaggttacctgcaggatgagccaaagtctcggattcctgctggcgccattcggtgacagtttttattgttgcgtaatacgtttttaactaatcccggaggtgacatgaagcaaccagaagcacccactacctggctcgaaaacgaagttcgacagacgcaagttaattgggaaagtttcaggtaaaaccgcaccacgagtccaattgataaaacgcatacaacgcacggcattggtctatcaaaaatatcattacccctcttttaaaagaatatagcgtaatgtacaaaacgcctgcatttgatataattgttataaattatgcttatatataatatttgcattaaaagtattcatgaaataatctaatcaaacaggcatttagtttttcagaatcgtgtgcactggcgccacctaggtatgcttcttgtgtttgcaatcgaacatatagagccatctacttcacgatgtgaaaatctcattgtaaattaacaataagtagacagagtgcgtgtatgatgtaaaatgcatgtaatttaagaaatgctgcgtctgctgtaagagtggtttgtgatactattaaagggatatgcaactaacattcacatatatacatatatattacacatatgaatatacattctatgaacttag

SEQ ID NO: 29780 - DNA, 378 bp, DROSOPHILA
atgactggaggagcaaaaatgatgaccatcctgtgtgtgagcatctttatcgctggcaatgcgctgggcgcatccatatccacatccgccgtaggactaaaaggacgaccgcagaggatcgccgagtgccgagagctctgctaccggcaatccttgccagcgattacgccaccactgctctgccgatcccgtccagactgctacatgtgccacgactactgccgcgtcctggacgttgtgcagcgcagtctggccacctccatgtgcgcggatcgggagttctgcacccgcggatgtcgggtggcctgttcgtaccatcgcctgaggatattccacttcacccaggacgcgactgccaatgcggtgatcaaaaagtga

SEQ ID NO: 29781 - protein, 125 aa, DROSOPHILA
MTGGAKMMTILCVSIFIAGNALGASISTSAVGLKGRPQRIAECRELCYRQSLPAITPPLLCRSRPDCYMCHDYCRVLDVVQRSLATSMCADREFCTRGCRVACSYHRLRIFHFTQDATANAVIKK

SEQ ID NO: 29782 - DNA, 2728 bp, DROSOPHILA
atgttaatcacataattaaatcaaaactttctatgatttccgcgggtgggatatataattgaaaaaaaaaaaaaaacagcagggagcgaaaggaatttgggattagcagctgaattatggaattatgaatatggaaatggatcggaatcacattcatagctttcgctttcgtttctcatctccaccggcggccaccgggtcgtatacttaatgtgcgagaggtcagttgcctgccacatggcgcagatacatttgctttgccaaattaagcaacaattctactctatggtgcattataactaacactatattgcacggctggttgtgcaatcgataatcaagtgagtaatccagtgactatgtcaaaccaccgccatcgatccatccatatctccggctgttccactcactacctgtgatctcacgctggtggcaatttgttggctgtttgcttgaaggtttggacatgccaatgctgatgatgtcacttgattggctcacccacaatctgttcgggctatcgagctcagaacgtttcgattgatcactgtcttgacatgaactgtcgaacccacttcgtcgctggagatcgcagtgatgtgatagttaagcgattacttatgttcatatcgttccaactgcctgtgtagattttacctcacttatctagactgttgaacggaaatgcaccttattaaataactaggaatgcataatctaagattaggtttaactactacttaactcttaactcgttaagtctctctatgtagaactcattgcattgatatgattctatctaactttagttagatagcttaaacttttatcctatctaaatagttagctatcttgtatcttaacttaacattctgttagacttcgtgcagaatttattgcacagaaggtataaactaagttggtccactaccaaatctaatgaattgatgtgaagatagtgtttaacttccgctaacgttgtgccctgcccacgtatgaactagttgaactcaccttctttggtaatagcttctgtatcgcaattgcttgccgtgacctcgttgctttcctcgtcgtctttgggttcgaattcgacctgcgaagtatcaatgtcgtagaagttaacgcgggtcacgtgacgcacgtagtcagtggtggtggttgtggtggtggtggcgttagtaaagctcccgttgggcagtgacgattggacgcgaaagatgaccggttggtggctggtggcatgtgtggcaggataggcgctcgatgaccactggaggccatgggatcgcggtggcttcggcacggcgttcgctggctgctggggcatccaacatccgtggccaaaaacggatagtggtgctgtgtttgtggcggtgctacaactatgactaggttgatggggataattatccgaatgttgccgattctgtggatccttctgattttgattttgattctgtttctggtggtgcaactgcagatatccagccggaatggctgtgtcgcccgtggatgccgatgaagactcattgctgctgcgggaatctccacttctagccaccgatggtggttgttctggttgttgatggtgctggctgttttggtggtgttgttggtgttggtggtactggtggtattggtggtggtgcttggatggtgcgtggccgggatcatgggcgtggtcgtgggcgtggctgctgctgctgctgcgggctgcaagtgcatggcgacagtaggaggatcaccaccattcgatcatctggcgctggcggttgcaacggtggctgtgctctaactgccgactacatctgcttgccccactgttcccgccaactttccgtttccgtttccgttcccgatcccgttcggctatcgcttccagttgcagtcgcacttccagctccagtttgtggtattgctcggcggcaagtccagagctcgcaccacatcgcagagcgcgattcacggctccagctcgcgaagatttagtccggattctaagccaagcaaaaaaaaaaccataccaaatcgaatcgaaagacaattaagccaacgagcggagaaagagagataaagagcaggaaaataaaaatcatagaccaacaaaatctatctatatttttagatcaactaaggcaactacagcaaaatgtcgactaaaaatacgactaaaaaaacaaccagaaaaaagggtatgtatgttgccaacaagctggaatttcacaaatttcatttcaggccatttcacagcattggtgttggtgttgtatattttccaccaaaattttttttttaaattatgtacccatattcgtttgagagataaccatggatgatacgcctcccgccgtttcagtgggcgttaaatttctcaagcgttaagcctagaacggttctaccagctcattaagccgcagccaagggccataaatggatttgggtccggcatttgagccactatatctgttgtggtaacgaagatatatacatgtatatttttcgttaaccagcaaaagaaaatacaggcagcaagccaaaaggccagcgtgcacagttcaaggcgatgaaatggaaaataaaagtggaaattcggacgcaaaacaaacttttgggcccactttgaattagctggacccaaagagcggccaaaggtcagagcaccagacccacggcgatggcaaaacaaacaaaacaaaaaaaaaaccagaccctgtggcctgtgaaa

SEQ ID NO: 29783 - DNA, 728 bp, DROSOPHILA
atgcacttgcagcccgcagcagcagcagcagccacgcccacgaccacgcccatgatcccggccacgcaccatccaagcaccaccaccaataccaccagtaccaccaacaccaacaacaccaccaaaacagccagcaccatcaacaaccagaacaaccaccatcggtggctagaagtggagattcccgcagcagcaatgagtcttcatcggcatccacgggcgacacagccattccggctggatatctgcagttgcaccaccagaaacagaatcaaaatcaaaatcagaaggatccacagaatcggcaacattcggataattatccccatcaacctagtcatagttgtagcaccgccacaaacacagcaccactatccgtttttggccacggatgttggatgccccagcagccagcgaacgccgtgccgaagccaccgcgatcccatggcctccagtggtcatcgagcgcctatcctgccacacatgccaccagccaccaaccggtcatctttcgcgtccaatcgtcactgcccaacgggagctttactaacgccaccaccaccacaaccaccaccactgactacgtgcgtcacgtgacccgcgttaacttctacgacattgatacttcgcaggtcgaattcgaacccaaagacgacgaggaaagcaacgaggtcacggcaagcaattgcgatacagaagctattaccaaagaaggtgagttcaactag

SEQ ID NO: 29784 - protein, 198 aa, DROSOPHILA
MHLQPAAAAAATPTTTPMIPATHHPSTTTNTTSTTNTNNTTKTASTINNQNNHHRWLEVEIPAAAMSLHRHPRATQPFRLDICSCTTRNRIKIKIRRIHRIGNIRIIIPINLVIVVAPPQTQHHYPFLATDVGCPSSQRTPCRSHRDPMASSGHRAPILPHMPPATNRSSFASNRHCPTGALLTPPPPQPPPLTTCVT

SEQ ID NO: 29785 - DNA, 3235 bp, DROSOPHILA
cttttccaccgattgtctttaatgcggagataaataacagacaatcaaacaaaaagaaataacagtacatcgatgcaaaacgagacgggacgacgcgaaaagccaagcgagttgtactctattcgctcgctcaacggcaactgatcgagttattcaaaaggcaaaaagaggagctctgcggcggcagcgacgccagcagaggcagaggcagcgactgcgactgcgacgacagcgggatgcagctccaaaaacaacaccaataactttcgaatgagcttggaagcaacaaaaacaacagtaacaacagagctgagtgaaaaaaaagagaaaaacacggttaggacccacaagtgtgaatattgctactgcgttagttacatatatttgtgaaaacttgcaattggaattcgaggaattttgtagaacagtctatcggaggttcaaatggtactttttaaaattaatatattttttttgttttcctttggttcatggcgttgggtgtgcactgtacaacattgaaaaaaaaaacaactacccagtgctgctacattgttgcttttcacgccgaattgatttttagttatttacgccaattttcggttcggcttctccacagtcctgtctccgattacaaaggcaaaaaacacactcgaagaaatgtgttttgaatggctataataaataaattaaacctggctcaagataaattggatttattactggtactttcgaaataactcagtgaaatgactaactgtttttcaatacaaatttaaaactgtccgaatttaatccatcgtgtgataaacaatagattgcacatttaatggctgatctggctactgatcttgggctgaaccgctcctgttttcgtttaacccaaccggtcttgggtcgatcttcttcttgttcggagcggcgagtggagcagagcggcgaatggtgctgagcgccactcgtgatggagatgaaaatatggtgaggccgatgccgaagcttaggcccaagatgaatagcacttcactgtggggggtcggaggtcgggagtgggcgctagttccacgaccgagttgaagttgcgcccatcgggccccttctaataagaaaattggagctgtttcccgccaaatgcttcgctttaaaagcattttaccgagaatccctttttcttgatggatctcttggtaaattggaaaataaaactaatttgtaataagttaatgggatacagaaggggggaactacttgaaagtatatgtacgtgattgcaggcttcaaacatcttaataaacatgaattgaaacccacaccgattggatcataagtacccacctgatctgtaaagtcgccgtgatgctgtacgtcctccgtttcgtggtagtccttgatctcctcgtgcgatatgaccctcttgtcgtccgtttgacgcaccagtccatccaccggacgcggaaccatgcgcttgaccagctttccggctccatcggccggtccgaagacctcttgaatttgggccaactgcgtttcatttatggcgcccgcctgcagggcggccacgtcgatcagctgggcattgccatcgaggtcatccggcaggtcaaggtcgcgtttctgaggcaaaaattaagagaagcggaaaatggggatttaatggtaagcatatgaataaataaatcttagaaatgcaaaccattcgttatgacaatgaaatagaatcactgaacacccacctcagtggtttccgtttcctgtttgtcggtgtcctcggtggtgttggtggagacaatcggccccgaatcctcgatcactttgccatcctgcagcttcacctgtcgcttcaccctcgtctcgatctgtctggtagttgttagttctgtcttgcgcttcgttatccactcctctgtaaaatggggtttaattaaattattcttactaatttattgaatatatgttatattatccttccaaaacatatacacatctttgaaatttccccatttcgagctatatttgtttattgctaaatttatatacacatattacgtgaataaatattgtaattatcaataattatttataactaataatttatttatatttataatttcaagttattttcaaacttttgcacttagtttcaatgatttttatacacactagctaaagctttgaaattgattttgggctgcatcccaaaaggcgactacccaaactggcggattgattggccatttgaagcttgggtttaggccaaaattaaagctcttgcgagccgagcttttgggggcagccaactgcagatttgcagacaggaccagatgttgcccaatgactctcgtgcggcaatctgctgttgttttttttttggtttttttttttttggcaccaattgcaacagagccaactgcccaagatgcctcatttgcatgtggataatgcccattttgagatctactccgtcgcttctaacaaaagaagccggaaagtcggaggggcgtgaagcgctccagcgcatttgagctgctcgccaaattacgtaatccagaccaagttggtctctcggctaactgtactttgagcctagtgctgtctgttttttttatttgcattttagaaaaaaaaggctaaacttaacctggcacgttttcatttttaaacgcaaagaaaaaacctaaattgcagctttaattgtgttgaaaatggggggaaatgaaaaaaacaagctataagacggatgattaaacaagttaaaaaaaattcaacaatattgcatttgtttcacatggttttcgaaactcaagttgaaaaataaaatagcatatgtacatatgtacagacatggtcaaaagtctttcgagttcaaaaacacctatgggtttttccataaaattaaaacttaaatggtacagatattacctaagtaagcaaaatgttgatttttaggtagagtacttaaagtattattattttatttgtaagtaccataggtaccactcggtaccaaaaactagagaccagaaatctgggatttggaagcccagagctccgagcacggacatccgcgagattttcccgctgctgcagctttttgcttccttcatctcgtggatgcaaaacggagcagtgcctgggctccatctctggccattttccactaccatgcacccccccccccctctgcgacccatctggatctcggctgcattgagatcgctggaccattaaaggtcgc

SEQ ID NO: 29786 - DNA, 570 bp, DROSOPHILA
atggccaatcaatccgccagtttggaggagtggataacgaagcgcaagacagaactaacaactaccagacagatcgagacgagggtgaagcgacaggtgaagctgcaggatggcaaagtgatcgaggattcggggccgattgtctccaccaacaccaccgaggacaccgacaaacaggaaacggaaaccactgagaaacgcgaccttgacctgccggatgacctcgatggcaatgcccagctgatcgacgtggccgccctgcaggcgggcgccataaatgaaacgcagttggcccaaattcaagaggtcttcggaccggccgatggagccggaaagctggtcaagcgcatggttccgcgtccggtggatggactggtgcgtcaaacggacgacaagagggtcatatcgcacgaggagatcaaggactaccacgaaacggaggacgtacagcatcacggcgactttacagatcaggggcccgatgggcgcaacttcaactcggtcgtggaactagcgcccactcccgacctccgaccccccacagtgaagtgctattcatcttgggcctaa

SEQ ID NO: 29787 - protein, 189 aa, DROSOPHILA
MANQSASLEEWITKRKTELTTTRQIETRVKRQVKLQDGKVIEDSGPIVSTNTTEDTDKQETETTEKRDLDLPDDLDGNAQLIDVAALQAGAINETQLAQIQEVFGPADGAGKLVKRMVPRPVDGLVRQTDDKRVISHEEIKDYHETEDVQHHGDFTDQGPDGRNFNSVVELAPTPDLRPPTVKCYSSWA

SEQ ID NO: 29788 - DNA, 6607 bp, DROSOPHILA
taagccgtcaggaacataatcagtctattaaaaaccaataaatatactgcaaatagtaataaaacaaacaacaactagtaacgatcgcatatacacagttcacacagtatacaaagttcagttatctatttttgttacgacgagtggatcttatatccgatctcttatcttttattcccatatctgcgcacataccctagtgcccttcgtcactacgtggaataccatccagttgtgaaaaaatcgaacttctttgtagaaagcgtataaaaacacgaattgatcgaacccaagattttctttattttggcactttatttaaattttaattgcaatttgtttattaatcgaaattgtacaataatatcgaattaatattagttattttagttagtttattcatttaacggtatctatacaacaaacgttaatattagtagtaaaaaaaaaaaaaacaaaaatgatcaaatagattatgtaattagacgtaggcattatagtattatcaaattacgattggaagaggcgtggcaggacagtgggattggcttccacataacatatgtatagattttgttcacttatttaacatttaattcaatttgcatttcgtcttccatgtaccgtcaactttagcagcttttataacccatttattttattcaattggttgattggccttatatttatatttgctgcttgtcaaatgaaactaaagcccacggccgagcatttgttagcaaatagttagggattaggatgacctggcggggattcatggatatgtatgtagtcgatccgaaagtcagttccaaaacggcatatatagcatttatataatttgatttagagaaataaattcctgcctttagtctctacgttttgttcaattatttataattcactttgagctgtgaaacagttcgacatttcagttatgcatgttcgatttcggaatatatagttcaagatgggaagatcgattcgaagggatgacgggtcacttgcgatggcgcagctcaatgatggtggcacccgaaccacgccttaggttctgctgctggtggctctggatgtggtgctggtggtgctgctggttgtggtgatggctctgctggtggtccacctcgctgctgcgccgcacaatgctcgccgtatccttgttgagctccacggatggcggggaacgcgagtccagcgaatacttggcctgcagcggatactttcgcgacccgtaatcttcgtcgccatggatcacccggtataggtctggcgcctgctggtgcaggccgcgcagatacaactgcttcttgtcctgctccggatagcccacgtcatcctcatcgttaccagcaatcttggttaggtccttctgactacgactgatgagattcacaatcgatggactcttgaggccgcttttcagcgagttgtccttgccagagaatagatgcggattggacttgtaattggcattgggtccctggccaaggccgtagccaaagctcggctcctgacgctgctgatagttgttccttgtgagcttctcgatgtaaatgggactaggatcgttgctgccgttcatgccgtgcacattgaagctcttgctgcggttcaggaccttggcgtaggtgcgagccggcttggccggtccttgctgtgcctgcattggatttggattgccgttgatgctcgggcttgggttaggattctgctgattttgctgattctgattatggggaatcccccttgactgctgctgttgtccggaagcagaaaggtagctccccctgcccggagccggttgcttctccatggcattcccaaatctctgggtgcgctgctcgtgcagcttgcgtggcaacgtctgagccgagcggtaatcttgctgctgctggtgcagattgggcgtggagccactgaagcgctggccatgcttctggtagcgacccaaggtgtgcgcagccgtcactggtggtggtgccctggactcgtagtagtcatcctcccgctctaagcgctccaatcgttccattcgctcatccgtgcgctccatgttactggaatttaattgaatttaattagtgcaaaaagaccttaaaggaggaatcattgtagccttaccgctgacgtggtcgtcgttcgtagtgattctccttgccatagagcgtgctggagtagggatcttcgcccaggtagtaccgctgcctgggacttatggcctgctccaggtgctgcagttggggatccgcggattcggcacgcttgaaattttgtcgcgactgggactcttgcttgagaggatcacgctcccgttcccgttcccgctctctttcgcgctccctctcccgctccctgcgtcgctgattgtcgctattggaatcctcggaatcgtggctaccgatatgcccatcgatcacattgtactgctgataggtggtcaccggaggaccaacgccccgcggatcttgtcctggactgggcgattgctcgcgcgacttgctggcagccgatttcatgcgaaacttacgctccgcactggccgaacggattttgctgaccagcttgcgcagcgaattgccaatcacctgacccatgcggctcgacttggacgtactgacgccgccgctcatggccgatagattcgaagtggacaccgaggtggctccaggtggccggaggttaccagtacctccagttgccggcggataactggatgtgggtgcaaatcgggtgcgctgctgctgcttccggctgagcgtcattgtgctggcaggcatctccctatgtatatttgttatatatataaataattattaactgtttaaaacaatttgcaaacatacaaaactaaaaaacaaaaactaaaaacaaatggatgcttatttagttaacaaaaatgttaaaaatcacagttatttattaaaagtaaattctttaaaaattttcaaagagtttataaataattattatatttgctttacattgctgtaagggacactgggttcctccagtaaatcaccattttgttaccgtcgttaaatatttttaaaattgagaccatcggaattaaattaaaagattcaaacaattattcttcttatcaaataaataacctacatatgtatgtagatatcatatcagaatcatagcccacctggtcatcaggtaatcgacctgcggcgatgacgaacgactgcgactcctgggcggcggcgagtagtccggaggaggctccaattggttaagctgcgacggcattggagcctgcgacttgactggcagatgggcgctatgcgatgtgtgggatgagtggctgtggctgtggctgtgggtgtggctgtgctcgcccagcttcttttcgatggcacgtcgtcgctgcgggacagtgggtcgcggattttggcccagctggctgccaccgccgccaaattctagtggaggaactgcggccggcggaggagctggtggctcatagctctttccccggccattgaccagagtgggagccactccattcaaagcatggccattaatgtgggtgccattgttgccgcgatgaccgtaggccacccgtttgtgcgagggctcttcggcacgcggtgatatcatggatggacctggtcccggtcccggtatggcctccaggtcgtccagagcatcgcgcgagccacgcatcgagcgggccaggaactgggaggacaggctctggcgcttttgctgcagtatatcctcgcggctgacatagctatccttgggctggaccaccgtctcctgagccagggctgatccctgactggagccgggaccgctgaccttcttcttgaggccattgcgacggatggtctcctgcagatcgtcgcgaaaggcctgcgacgagaagtgattgaccggcggaccgggatccttgcgttccgaccagttcgagatgccctggaagtacttggagcgaccgccagccgaattggccggtgccttgcgctcctgcgaggcggatgcggtcatggccaggggatggcgatccctatcccgctcccgttccctttccctctcccgctccctttcgcgttccctctcgcgctcccgttccctctcggcgcttctgggcaaagtctgtggatgatggccatgcgagatgtgctgcggatgcgaatgctgctgggtggccaggtgggattgggcatggctctgcgacttgatcgtcacattgaagtaactcttcttggtgggctccacctcggcatcggcctcgtcgtcgcgggaatcgttggaggcggtggactcgctgccaaagtgcgactccagccacttcatggtctcgcccttgcgcgtctcctcctcgcgatcaaagtccaggggtcgcttggtgagcgcatccttgcgatccgccagcaaagccacctctgcaattggttaacacaaacatgctattaatcaaatcgaatgctacaagattacaaatgattttaaaaccctaaactaactaattaacgtgcttaactaaataaatgcgaactcttatattctcgattgccatctgaaatgtattgtacttatttcaattatataatatattattttcaaaactaaataaaaacgagtttgtcgctaattcaactaatctgatatcatcgtttataaccttgtcgattatgtgagattaaatgcggaacaagcattttatacaaatatcataattggtgagttatagaacatacatctcaaatacataatacattttaggaacttttctttccttaatatgtactcttttgtacatatgtatgtacatatgtatatcacttatcatgtcaaaaagtccttacccttctgttgctgctgctgggatcggcgaagcttgcgcatccggtcggatagactgtcccagtcacctggtcgctccagatcggtgggaccgtccttgtccatctgggtggtctcggcggcgtagcgcatctcggtggattggagccgaccgttggctagcacgtccacatgctgctcgtcccgttggcggaagaaccgctggttggccgccgtcgttgtcacctgctcgcccacctgcagctgcaggccaagatcatcggaggcgccgttggcaggcgggtcgggcagttcgtcgtcgacgatcaactcgtgctcggtggtccgtcgactctcggtgaccagggtgccgtcctcctgggccaggcagcgcttctgtgtgtcctccgaatcgatggtctttcgcgacttgctccggttggcaaccaccttgggtccgagcggcaccaactgccgctggctctccggcgaacagagcacggcctctaggttctcgactccgtcgcgaactgcgttcacgtaggtctgcaaaataaattgattaaatataattattactgtaaatgtaatagatttacattgaatttgccataatatccccgattcgcttggcggattttcccaatcgggtaagccaatattatctgtagcccattccccccactcccctcacaaagggttgcatcacttttgcagcgatgcagtcactgcacatggtgggctcctagcccgtttagcccaagccccgtccccatcgccaccttccttctccttctcctccatcccgatcccctactcctcactttagtattcagagcaagacagcaagtaaccacaaaacaaatccgcacaatccacttactttttcgagttgccaacgcggatggggcaacgtcattgaggtaacggtaaaagttaagaatgcgactcaagaatgagcggtaaaaaatgggtgggggtgcaccgcgaaaaatatttaggtaagaagttactatgcgaaaatacaatgccagcaaaaaagaatcttgaaatcgtaggaacacttaccgcaagaaaataatcactaaacaatattgttataaataaaatgttttcaaatctttaggctagcttgtaaagctgacatatattataattgaacacaaagaacacatgatatgaatcttaattaaagtgaacatcatgtagatacgaatcgaatcggatgattaactatacagtttacatttatttaggaaaatgttactatcagcctcaaggtaaataaatttctttctgtgtacgggagattgcagaagggatcgcttcgccatggacagctcaaggtcgaattgcaatgggtatcgcatcttggatttcttggatgacgagcagatgacacgcctgggtgacgctggccagtggataaagagctgaagagttagttgtatctcttcgtcattcgaagccacagtcgaacccccttgtaccgccgtccctgaacctgttgtttttttagttttttacttttttttttgtcttattttatttttattttgtgttgtttgtcgacgaccttgcgttaacggtaacgcgcgtagaaagtgttttgttgttgctcagccagttgatttttgccatctctctcgctttcagccagaaacttgatggtcagtcagcctctaagccatatttatttacccatcccccctccgcaacactcaaaaccactaatcccgtcggttttctttttttttttttaagcccgattggacgcatacatatacatacatatacacatatg

SEQ ID NO: 29789 - DNA, 3564 bp, DROSOPHILA
atggaggagaaggagaaggaaggtggcgatggggacggggcttgggctaaacgggctaggagcccaccatgtgcaacctacgtgaacgcagttcgcgacggagtcgagaacctagaggccgtgctctgttcgccggagagccagcggcagttggtgccgctcggacccaaggtggttgccaaccggagcaagtcgcgaaagaccatcgattcggaggacacacagaagcgctgcctggcccaggaggacggcaccctggtcaccgagagtcgacggaccaccgagcacgagttgatcgtcgacgacgaactgcccgacccgcctgccaacggcgcctccgatgatcttggcctgcagctgcaggtgggcgagcaggtgacaacgacggcggccaaccagcggttcttccgccaacgggacgagcagcatgtggacgtgctagccaacggtcggctccaatccaccgagatgcgctacgccgccgagaccacccagatggacaaggacggtcccaccgatctggagcgaccaggtgactgggacagtctatccgaccggatgcgcaagcttcgccgatcccagcagcagcaacagaaggaggtggctttgctggcggatcgcaaggatgcgctcaccaagcgacccctggactttgatcgcgaggaggagacgcgcaagggcgagaccatgaagtggctggagtcgcactttggcagcgagtccaccgcctccaacgattcccgcgacgacgaggccgatgccgaggtggagcccaccaagaagagttacttcaatgtgacgatcaagtcgcagagccatgcccaatcccacctggccacccagcagcattcgcatccgcagcacatctcgcatggccatcatccacagactttgcccagaagcgccgagagggaacgggagcgcgagagggaacgcgaaagggagcgggagagggaaagggaacgggagcgggatagggatcgccatcccctggccatgaccgcatccgcctcgcaggagcgcaaggcaccggccaattcggctggcggtcgctccaagtacttccagggcatctcgaactggtcggaacgcaaggatcccggtccgccggtcaatcacttctcgtcgcaggcctttcgcgacgatctgcaggagaccatccgtcgcaatggcctcaagaagaaggtcagcggtcccggctccagtcagggatcagccctggctcaggagacggtggtccagcccaaggatagctatgtcagccgcgaggatatactgcagcaaaagcgccagagcctgtcctcccagttcctggcccgctcgatgcgtggctcgcgcgatgctctggacgacctggaggccataccgggaccgggaccaggtccatccatgatatcaccgcgtgccgaagagccctcgcacaaacgggtggcctacggtcatcgcggcaacaatggcacccacattaatggccatgctttgaatggagtggctcccactctggtcaatggccggggaaagagctatgagccaccagctcctccgccggccgcagttcctccactagaatttggcggcggtggcagccagctgggccaaaatccgcgacccactgtcccgcagcgacgacgtgccatcgaaaagaagctgggcgagcacagccacacccacagccacagccacagccactcatcccacacatcgcatagcgcccatctgccagtcaagtcgcaggctccaatgccgtcgcagcttaaccaattggagcctcctccggactactcgccgccgcccaggagtcgcagtcgttcgtcatcgccgcaggtcgattacctgatgaccagggagatgcctgccagcacaatgacgctcagccggaagcagcagcagcgcacccgatttgcacccacatccagttatccgccggcaactggaggtactggtaacctccggccacctggagccacctcggtgtccacttcgaatctatcggccatgagcggcggcgtcagtacgtccaagtcgagccgcatgggtcaggtgattggcaattcgctgcgcaagctggtcagcaaaatccgttcggccagtgcggagcgtaagtttcgcatgaaatcggctgccagcaagtcgcgcgagcaatcgcccagtccaggacaagatccgcggggcgttggtcctccggtgaccacctatcagcagtacaatgtgatcgatgggcatatcggtagccacgattccgaggattccaatagcgacaatcagcgacgcagggagcgggagagggagcgcgaaagagagcgggaacgggaacgggagcgtgatcctctcaagcaagagtcccagtcgcgacaaaatttcaagcgtgccgaatccgcggatccccaactgcagcacctggagcaggccataagtcccaggcagcggtactacctgggcgaagatccctactccagcacgctctatggcaaggagaatcactacgaacgacgaccacgtcagcgtaacatggagcgcacggatgagcgaatggaacgattggagcgcttagagcgggaggatgactactacgagtccagggcaccaccaccagtgacggctgcgcacaccttgggtcgctaccagaagcatggccagcgcttcagtggctccacgcccaatctgcaccagcagcagcaagattaccgctcggctcagacgttgccacgcaagctgcacgagcagcgcacccagagatttgggaatgccatggagaagcaaccggctccgggcagggggagctacctttctgcttccggacaacagcagcagtcaagggggattccccataatcagaatcagcaaaatcagcagaatcctaacccaagcccgagcatcaacggcaatccaaatccaatgcaggcacagcaaggaccggccaagccggctcgcacctacgccaaggtcctgaaccgcagcaagagcttcaatgtgcacggcatgaacggcagcaacgatcctagtcccatttacatcgagaagctcacaaggaacaactatcagcagcgtcaggagccgagctttggctacggccttggccagggacccaatgccaattacaagtccaatccgcatctattctctggcaaggacaactcgctgaaaagcggcctcaagagtccatcgattgtgaatctcatcagtcgtagtcagaaggacctaaccaagattgctggtaacgatgaggatgacgtgggctatccggagcaggacaagaagcagttgtatctgcgcggcctgcaccagcaggcgccagacctataccgggtgatccatggcgacgaagattacgggtcgcgaaagtatccgctgcaggccaagtattcgctggactcgcgttccccgccatccgtggagctcaacaaggatacggcgagcattgtgcggcgcagcagcgaggtggaccaccagcagagccatcaccacaaccagcagcaccaccagcaccacatccagagccaccagcagcagaacctaaggcgtggttcgggtgccaccatcattgagctgcgccatcgcaagtga

SEQ ID NO: 29790 - protein, 1187 aa, DROSOPHILA
MEEKEKEGGDGDGAWAKRARSPPCATYVNAVRDGVENLEAVLCSPESQRQLVPLGPKVVANRSKSRKTIDSEDTQKRCLAQEDGTLVTESRRTTEHELIVDDELPDPPANGASDDLGLQLQVGEQVTTTAANQRFFRQRDEQHVDVLANGRLQSTEMRYAAETTQMDKDGPTDLERPGDWDSLSDRMRKLRRSQQQQQKEVALLADRKDALTKRPLDFDREEETRKGETMKWLESHFGSESTASNDSRDDEADAEVEPTKKSYFNVTIKSQSHAQSHLATQQHSHPQHISHGHHPQTLPRSAERERERERERERERERERERERDRDRHPLAMTASASQERKAPANSAGGRSKYFQGISNWSERKDPGPPVNHFSSQAFRDDLQETIRRNGLKKKVSGPGSSQGSALAQETVVQPKDSYVSREDILQQKRQSLSSQFLARSMRGSRDALDDLEAIPGPGPGPSMISPRAEEPSHKRVAYGHRGNNGTHINGHALNGVAPTLVNGRGKSYEPPAPPPAAVPPLEFGGGGSQLGQNPRPTVPQRRRAIEKKLGEHSHTHSHSHSHSSHTSHSAHLPVKSQAPMPSQLNQLEPPPDYSPPPRSRSRSSSPQVDYLMTREMPASTMTLSRKQQQRTRFAPTSSYPPATGGTGNLRPPGATSVSTSNLSAMSGGVSTSKSSRMGQVIGNSLRKLVSKIRSASAERKFRMKSAASKSREQSPSPGQDPRGVGPPVTTYQQYNVIDGHIGSHDSEDSNSDNQRRRERERERERERERERERDPLKQESQSRQNFKRAESADPQLQHLEQAISPRQRYYLGEDPYSSTLYGKENHYERRPRQRNMERTDERMERLERLEREDDYYESRAPPPVTAAHTLGRYQKHGQRFSGSTPNLHQQQQDYRSAQTLPRKLHEQRTQRFGNAMEKQPAPGRGSYLSASGQQQQSRGIPHNQNQQNQQNPNPSPSINGNPNPMQAQQGPAKPARTYAKVLNRSKSFNVHGMNGSNDPSPIYIEKLTRNNYQQRQEPSFGYGLGQGPNANYKSNPHLFSGKDNSLKSGLKSPSIVNLISRSQKDLTKIAGNDEDDVGYPEQDKKQLYLRGLHQQAPDLYRVIHGDEDYGSRKYPLQAKYSLDSRSPPSVELNKDTASIVRRSSEVDHQQSHHHNQQHHQHHIQSHQQQNLRRGSGATIIELRHRK

SEQ ID NO: 29791 - DNA, 4343 bp, DROSOPHILA
gtttgtcaggtatacatggctgccaaggccggacgcatttcgttctacaaagatcagaagggttataagagtaatcccgaattgaccttccgcggtgagcccagctacgatctgcaaaacgctgccatcgaaattgccagtgattacaccaagaagaagcacgttctgcgagtcaagtgagtagcagaaatgatcagtatttggcatatactcatatacttatcgaatatactttctttcttcattaaccattccccacacaggctcgccaacggtgccttgttcttgctgcaggcccatgacgacaccgagatgtcccagtgggtgacctccctgaaagcccagagcgattcgacagcggtggccgccagcagatcccagactctgcccgccacctcacaaaaggacgaaccaaagcgcagatcgttttttactttaaagaaaaagtaaagtaacagccgtaacgcaaccataagcaagagcagctaattaaaacaaataacaaataacatgaaatgatataatacaaatgcaaaacgacaacaaattatacagcaaaaattaagaagaagcaaatatatatatttttttttcatatatttaaaacttatttcgtaatgagaaaaaaacaaaaaccgacaaaaacttgcaagagaagaacgagcaaaacataaacaattattatgcttatcaaatttgcacgataaatactgctattatgattaaacgtatgtatcttatttatttaaacaaatacaaagtaatataaagattaaaaaaaaatacaaaaaacaaacaaaaaatttgaggaaaccaactcgtgtatgcatttcaatgtattcgataaataaacgaaatattcctttaaagtacaccaattgccggcgaattgatcaattaccgctatcgcctatcgattttggctatcgaagtgcaatttattgcgaaggtttctcgattgctattttcaaacaaaatattcgtcggtttcggggatgatttactggcttttcttttttgctggagaggatctagaattaatcatcacactggtcagccgattgaaaggaatctcgaagagcaccgtcattactatggcccaaaggtaacagaccactgaacaggagatagccagcattatctagaagcaaaaatagtggattgatcaaatggagccccataaagatgagtgagatttgtgattgactcaccatcatggtgttgtccggatacacttcattgctaaaggagtggtagacgtacatgattacaatcggattcaataggtagatggcgtaggtgaacttgctgatccgctgcacttgctccgactgcaggagcgccagcagccagcgggtaggagcatatgagtcgctgttgtccggcttggtgccgcaaatgatgaggtggctggccgccgtgctcaccagaatccgcagaacgaccatgaagctgagaatgatactgatggccggcagttgatccatggtcacttgccttgccagccagccaatgcacgcaatggcccccagtctgatccaccaattaggcattaccaaatcaaagggagtgcccgtacccttgacttggaagaaggcataggagccacctattatgtaggcgagcatgcggatcaacggactcatgtacgaccactcgttggtgtgatacatctcctcgaaattggcgcctacctcgttgacctccatgaagacaatcgaaaacaaagcgctgatcactaccagcaggcggactatccacttgaccatgtttgggtgcttggtgtgcatgaagagcagcagcatcgccgtcatgtggagctgcatgtcgcagcccagcgaccaggtccacgatccgcacataaactgaatgggaaacaaattctggatgaagaaaacgttgcgtacggcattgagtcggcacagctcgtcctgcggatcggttatttgcatgacggacacttgacgctgatactctataaccaccacgcccatcagaacgatcacgaattgcagcggagccagccggcagtatcgatggatgaactctctgaggtagcgacgcatgttacccaggattccatcgctggcgatatccttttgcagttgttcatccctgatgaaattcaaaaccgtcaagtagccactgcgatggtaaaaagagttacgatcaattgcttgcttgagcatgcatgcgttactcgtgtcgaaggactattttttatctaaagaaactcgcattccatcctcacctgaccacaaaaaagatctccaccatggtgggccagtaggtatgccgcatggtcatggacgacaacttgccgagcatctcgaccgagggatccacggagaagtacttgtaccagatcacatggacgccaatcaatgagaaggcggtgagcaccctcagtccgttgacgggtctgttctcctggctgggattcaccggcttccaggccagtcgccagttgtcggcgaaatcaaagcaggccaggatgcgtgagtatttgcccagaccactggtggccgcgagggtcaatagtagggtcacacctaacactacaaaaaaaatttgcacagctccactatcaaagaaattggttttaagctccggcttcttggcataagccaacttggcatccatatcccagcaatgaaatgactcttccttggccatcgattttcggatgagttgctccacctccggcacgtcacagctcgcaggcagacagaggccaatgtgcagcaggggattcgctttgatggtcacctccagctgccacggcgaattggattcaatgtaggcgaccaaatagtggaattgaatgggcgacatctcgcgcagcagacgctgatttttgatggtcatatcctggagcatcggttcattgacggcgcggcatgtgaatctgttgcccagccaggctctctggcccatcataaagttggcgtagccctcgccggaggcgtcaatagctagtgattaagaatttattgtactttaattcaaaacttttctgattttaaataactaattaattcattaatttgttttcatttcgcttgtgatgtaaaaatattttgtccaaccttcagtgtttgatagtttgtatctaaggaataggattattgcccatcctcccatcctcacctttcagtgcccaggactggtgatcctgccaagctcttcgcagttccagcagctgttcctcacacttggacagtgtggtgttttcgcgttggggaaccatttcgatcaggtccttggccagggacttcggttcacagttatcgacatcgccgagcgcagcgataatttgaagaaggagcagaacgaggagcatgattacgatcgatggattgggggcagaacacctcagtactccacgacagacgtcgcacaactaattctgtgcccgggatgaagcaaagtctatgcgacccacataacctccgtttagttaggaccgagtgatccgtgacgctttttaagatccgatcagtcgatttatggtcacatatgtactaaaccttagcttgtttttcagttagcaccaatgacagcatgttggactcctcgactaaggtttacgggcacccatttgtctcggaaattacttttacttttattggtttaaacaatgcttgaaatcgtaaaaaacaaatactaagccgtcaggaacataatcagtctattaaaaaccaataaatatactgcaaatagtaataaaacaaacaacaactagtaacgatcgcatatacacagttcacacagtatacaaagttcagttatctatttttgttacgacgagtggatcttatatccgatctcttatcttttattcccatatctgcgcacataccctagtgcccttcgtcactacgtggaataccatccagttgtgaaaaaatcgaacttctttgtagaaagcgtataaaaacacgaattgatcgaacccaagattttctttattttggcactttatttaaattttaattgcaatttgtttattaatcgaaattgtacaataatatcgaattaatattagttattttagttagtttattcatttaacggtatctatacaacaaacgttaatattagtagtaaaaaaaaaaaaaacaaaaatgatcaaatagattatgtaattagacgtaggcattatagtattatcaaattacgattggaagaggcgtggcaggacagtgggattggcttccacataacatatgtatagattttgttcacttatttaacatttaattcaatttgcatttcgtcttccatgtaccgtcaactttagcagcttttataacccatttattttattcaattggttgatt

SEQ ID NO: 29792 - DNA, 1962 bp, DROSOPHILA
atgctcctcgttctgctccttcttcaaattatcgctgcgctcggcgatgtcgataactgtgaaccgaagtccctggccaaggacctgatcgaaatggttccccaacgcgaaaacaccacactgtccaagtgtgaggaacagctgctggaactgcgaagagcttggcaggatcaccagtcctgggcactgaaagctattgacgcctccggcgagggctacgccaactttatgatgggccagagagcctggctgggcaacagattcacatgccgcgccgtcaatgaaccgatgctccaggatatgaccatcaaaaatcagcgtctgctgcgcgagatgtcgcccattcaattccactatttggtcgcctacattgaatccaattcgccgtggcagctggaggtgaccatcaaagcgaatcccctgctgcacattggcctctgtctgcctgcgagctgtgacgtgccggaggtggagcaactcatccgaaaatcgatggccaaggaagagtcatttcattgctgggatatggatgccaagttggcttatgccaagaagccggagcttaaaaccaatttctttgatagtggagctgtgcaaattttttttgtagtgttaggtgtgaccctactattgaccctcgcggccaccagtggtctgggcaaatactcacgcatcctggcctgctttgatttcgccgacaactggcgactggcctggaagccggtgaatcccagccaggagaacagacccgtcaacggactgagggtgctcaccgccttctcattgattggcgtccatgtgatctggtacaagtacttctccgtggatccctcggtcgagatgctcggcaagttgtcgtccatgaccatgcggcatacctactggcccaccatggtggagatcttttttgtggtcagggatgaacaactgcaaaaggatatcgccagcgatggaatcctgggtaacatgcgtcgctacctcagagagttcatccatcgatactgccggctggctccgctgcaattcgtgatcgttctgatgggcgtggtggttatagagtatcagcgtcaagtgtccgtcatgcaaataaccgatccgcaggacgagctgtgccgactcaatgccgtacgcaacgttttcttcatccagaatttgtttcccattcagtttatgtgcggatcgtggacctggtcgctgggctgcgacatgcagctccacatgacggcgatgctgctgctcttcatgcacaccaagcacccaaacatggtcaagtggatagtccgcctgctggtagtgatcagcgctttgttttcgattgtcttcatggaggtcaacgaggtaggcgccaatttcgaggagatgtatcacaccaacgagtggtcgtacatgagtccgttgatccgcatgctcgcctacataataggtggctcctatgccttcttccaagtcaagggtacgggcactccctttgatttggtaatgcctaattggtggatcagactgggggccattgcgtgcattggctggctggcaaggcaagtgaccatggatcaactgccggccatcagtatcattctcagcttcatggtcgttctgcggattctggtgagcacggcggccagccacctcatcatttgcggcaccaagccggacaacagcgactcatatgctcctacccgctggctgctggcgctcctgcagtcggagcaagtgcagcggatcagcaagttcacctacgccatctacctattgaatccgattgtaatcatgtacgtctaccactcctttagcaatgaagtgtatccggacaacaccatgatgataatgctggctatctcctgttcagtggtctgttacctttgggccatagtaatgacggtgctcttcgagattcctttcaatcggctgaccagtgtgatgattaattctagatcctctccagcaaaaaagaaaagccagtaa

SEQ ID NO: 29793 - protein, 653 aa, DROSOPHILA
MLLVLLLLQIIAALGDVDNCEPKSLAKDLIEMVPQRENTTLSKCEEQLLELRRAWQDHQSWALKAIDASGEGYANFMMGQRAWLGNRFTCRAVNEPMLQDMTIKNQRLLREMSPIQFHYLVAYIESNSPWQLEVTIKANPLLHIGLCLPASCDVPEVEQLIRKSMAKEESFHCWDMDAKLAYAKKPELKTNFFDSGAVQIFFVVLGVTLLLTLAATSGLGKYSRILACFDFADNWRLAWKPVNPSQENRPVNGLRVLTAFSLIGVHVIWYKYFSVDPSVEMLGKLSSMTMRHTYWPTMVEIFFVVRDEQLQKDIASDGILGNMRRYLREFIHRYCRLAPLQFVIVLMGVVVIEYQRQVSVMQITDPQDELCRLNAVRNVFFIQNLFPIQFMCGSWTWSLGCDMQLHMTAMLLLFMHTKHPNMVKWIVRLLVVISALFSIVFMEVNEVGANFEEMYHTNEWSYMSPLIRMLAYIIGGSYAFFQVKGTGTPFDLVMPNWWIRLGAIACIGWLARQVTMDQLPAISIILSFMVVLRILVSTAASHLIICGTKPDNSDSYAPTRWLLALLQSEQVQRISKFTYAIYLLNPIVIMYVYHSFSNEVYPDNTMMIMLAISCSVVCYLWAIVMTVLFEIPFNRLTSVMINSRSSPAKKKSQ

SEQ ID NO: 29794 - DNA, 4181 bp, DROSOPHILA
gaattgccaaaagtttgtgtacaacagcaacaaaatacaaaaaaaaaaaaaaaagagaaaacattaacaacacaaaacccagcagctaccactaaattttgtattttcacagccgcccaaagttggaatgctaattttttcattgccacgcaattgctgtttattggggtatactcgactacgggcttaatttaatttttagatttttattaaaaatataaaacttatttcgaatgctttcattgttcgctactgatccagaagaattttatttctttgttatttttttaatgggcaccgcttcttcgaacccattcatttccagtttcctggctttatttgtattgccagttggccagaacaaagcggctaaacaattaagagacagcacgagaggctcgaagtggttggcccatacagtcagagccatttaagatggttatatgttttttttttgcgtgggcataaactcgaaacggaattaacaaacagaaacaagggatgggctggctgaaaataatcattcgaagatgcgactgaagatggcctttgtttacaacacacatgtcgtcgaccttctgtgggtggggggcgtgcaccagaaatattaataaaaaaccattaaacaacaattattaatacacctatattagccaaagagagcttaatgttttatatgttgatatcgttatccaaatggtgtaaattcgcttcgtctgaagggattatttctttcctgtgtaggcgggatgatatcgagggcacccagaaatgcccaaaaatggcaacttctccggtgcgacaggcgactaaacccgtttctcagaatatgaaacgtttttcgaaaacgcgatttcgatgacttcatcgagcttcacacacttaatgccaattgtttcccccccaagtcgagccactgactcatcctaacccactctttctccccatctcttccagcgtttgggagcagtcgtcgcaaaatcacagaacgggacgcatcatgactttctactggtggtcacactggttctggataaccctgatcctgagtggtaagtgcaatacaataatgatgtatcaatagattgaagtcacttacatttctcgcagttaacttgctgtccagccatgtccacacatatcccagccaggaggcggagtcactgacctccagcccgcatacccaatcccaaacgcagcccgtgcgcaccaccaagctctaccaaacgacggtcacccagatgtggggcccagccacccagagcaacatcatggacctgacccaccgacccaccaccacacggccggtggtaacccccagttatggtggtggcccccaattggcccaggtccatgatgttgaacaggcagtggagctgcaggaggaggatgaggtggtggaggaggaggagctgccgctcaacgatcgtgaccagcaggagcaggatgagattcccgatcaagagcgccggcaggatgaggcagatgcagatccagatgcggatgcggatatcgaggacgctgtagcaaacgaggagctggctcaattcgagttcaagcgatcggcggacttcacctccgaccagctgaataactttacgaattttagcagtagcactaggtgagtttgctaacaaaataaacttaattaaataattcgaactgattggaaatatttcacttaagtacaaatggcagcagcagcagtagcaccaccacaaaaccagttgcaatcagcagcagtagtccggccagcacaacaaccaccaccgcgaaagtgttggcaacatcgccggcagctgcaataacaccacgggccggaggcagtgcatccacttccacgccggctggttccgcggctacgccgtccacgccaaagatccacacggaatggctatccgatgagctgctggcgggtgcgactggtggcctggggtcagcggtcacggtcgagggcgaaaaggcgccgttcaccctggaaaatgccaacaaggaggatgaacttaggcgtgccgaaagcgagcatagatcgcgaaaatcgaaggttctatccgcggagtataagcacatcaatcgctacatcaacttctccggcgacaccaagagtcttctgaccagatccgcctccgcggcgcccagcgtggcggggggcgtggccggatccgggttctacgacggaggcgtcggcgacgagggcaatatctcatccgaggcactggccattcaggtaggtgaaaactaatcattgctaaattcgatatcatttgaaaaattggtttcaaaagtaacatgcttttttttccatttccagcgaacgtacttcctggatgcgggtgccatttcggcgatttgcttcactgtcttcggcgtctgctgcacagtgggcaccattgggatcgtactgtaccgtcgtcggtatctgaacaaaccgcaggcgctcagcgaaccagactcgagtgtctatatcgatgatagcacgatgcgggtgagtgtaaggattcgttgaccaattgccagtggcgcttgaatgtcctatgcactaaatagttctctctcttgattttgcaggacaattcggatgagatgtacagcctggacaacgactcgtttctcaattcgctggaggcgatgacaatacagaactactggacggatacggtcaaacatacaaagctttaatctccggccttccccgttggaagtccaatcccctctatcatttattgtacgtctttggttcgatttcgattacgattctgtttcgtttcgctgttaaaattccattcctgatttgacaaccagacatcataatcattaagtagcgtagtttttaagcgcgtgtatgtatttactaatgttaggcaaccaaacgagcaactagtttaagcccaaaactaccaaaattatgtttagtgtacgtgtagatcctaagtgcgcaatgtttttgttggccttgactgttagttaaagcctttccctaacaacttccccactaacccgatttttgtaaaccaacccattgtactcgtatctgttagttaattattaaaccttatttatattgttgactattttatcgcccttcccaacccaagtctaattttagaaaacactatttattaagtttccaactttgtgtccaacaattaaatgcaatcattccttccagtttagcctatagagcaactttacactgtaattaatgtattaaaagcgaagcaagcaaacaacaattaaaagaaaacatcacacaaccacacaccggtgttgctagaatttttgggaaaataatccgtgtctaattcctaacttaattcattaagttttcgatggaaaaacaaaacttgctgttaaaattttaattgcttgataaatcttgaacgaacgaattattatcactgaaattctggcaagactgcaagaaattgtttcaatatacacaaatatataaaacgaattataagctaacgaagaacaagaaaaactgtttactgccacacaatccttgtcaattttgctcatcgaacttttatacaccacttgtacttgtactatccgttcgaatgttgcaaatattaaacgaaaaacaaaacccagatggagtacattaatcattaaatgctaaactgatattattcgaaaaagtgttatcaattggcgcgggaaattcatcgtacaaggagtgttggaaaagtagacggtaccgcgtaattagggcaaggtacaggagaaagggtaaagtcaagtaaagctggggtggagaaggaaacatatttaaatatgtttaaaatggcttttagcacctacttaggtacgaattgaatagtaccctctaacgctgctcaacactgtccggctgttcgctgtcgatagcaatcgataggccatcgatgttctagcagagactatctatattgctgccaatcgctctgcgccaatcgagttgctgaaggagtagtgcaataaatatgaattaaatggtaaatataaaaccgcgacaggtgttgttttcgtgcctatttgctggccgtgttgttgttgccgccgtttcagttgttgttgctcgagtgcgctgcgtgtgtgcgtcgttatgcgacgagtgtgtgcatgagtgtgttgtgttgtgcggtgcccccaccaaaaaataacgaaacgaaaagcaaaggagctgcaaaaaaaat

SEQ ID NO: 29795 - DNA, 1380 bp, DROSOPHILA
atgactttctactggtggtcacactggttctggataaccctgatcctgagtgttaacttgctgtccagccatgtccacacatatcccagccaggaggcggagtcactgacctccagcccgcatacccaatcccaaacgcagcccgtgcgcaccaccaagctctaccaaacgacggtcacccagatgtggggcccagccacccagagcaacatcatggacctgacccaccgacccaccaccacacggccggtggtaacccccagttatggtggtggcccccaattggcccaggtccatgatgttgaacaggcagtggagctgcaggaggaggatgaggtggtggaggaggaggagctgccgctcaacgatcgtgaccagcaggagcaggatgagattcccgatcaagagcgccggcaggatgaggcagatgcagatccagatgcggatgcggatatcgaggacgctgtagcaaacgaggagctggctcaattcgagttcaagcgatcggcggacttcacctccgaccagctgaataactttacgaattttagcagtagcactagtacaaatggcagcagcagcagtagcaccaccacaaaaccagttgcaatcagcagcagtagtccggccagcacaacaaccaccaccgcgaaagtgttggcaacatcgccggcagctgcaataacaccacgggccggaggcagtgcatccacttccacgccggctggttccgcggctacgccgtccacgccaaagatccacacggaatggctatccgatgagctgctggcgggtgcgactggtggcctggggtcagcggtcacggtcgagggcgaaaaggcgccgttcaccctggaaaatgccaacaaggaggatgaacttaggcgtgccgaaagcgagcatagatcgcgaaaatcgaaggttctatccgcggagtataagcacatcaatcgctacatcaacttctccggcgacaccaagagtcttctgaccagatccgcctccgcggcgcccagcgtggcggggggcgtggccggatccgggttctacgacggaggcgtcggcgacgagggcaatatctcatccgaggcactggccattcagcgaacgtacttcctggatgcgggtgccatttcggcgatttgcttcactgtcttcggcgtctgctgcacagtgggcaccattgggatcgtactgtaccgtcgtcggtatctgaacaaaccgcaggcgctcagcgaaccagactcgagtgtctatatcgatgatagcacgatgcgggacaattcggatgagatgtacagcctggacaacgactcgtttctcaattcgctggaggcgatgacaatacagaactactggacggatacgtttagcctatag

SEQ ID NO: 29796 - protein, 459 aa, DROSOPHILA
MTFYWWSHWFWITLILSVNLLSSHVHTYPSQEAESLTSSPHTQSQTQPVRTTKLYQTTVTQMWGPATQSNIMDLTHRPTTTRPVVTPSYGGGPQLAQVHDVEQAVELQEEDEVVEEEELPLNDRDQQEQDEIPDQERRQDEADADPDADADIEDAVANEELAQFEFKRSADFTSDQLNNFTNFSSSTSTNGSSSSSTTTKPVAISSSSPASTTTTTAKVLATSPAAAITPRAGGSASTSTPAGSAATPSTPKIHTEWLSDELLAGATGGLGSAVTVEGEKAPFTLENANKEDELRRAESEHRSRKSKVLSAEYKHINRYINFSGDTKSLLTRSASAAPSVAGGVAGSGFYDGGVGDEGNISSEALAIQRTYFLDAGAISAICFTVFGVCCTVGTIGIVLYRRRYLNKPQALSEPDSSVYIDDSTMRDNSDEMYSLDNDSFLNSLEAMTIQNYWTDTFSL

SEQ ID NO: 29797 - DNA, 3221 bp, DROSOPHILA
ttttggggcccagggaaatcgcatcttggcattcgccattgttgctatggggatttttttcttttttggcggggggtgtacaataaatatagggtggaagttgcgtaaaacgatgatatgatattcacacatagatcgggcgataacatcaataactaaagatgatgtggaaatcagaaggttcaaatgatgtgcctataaggttacatacataaataaatagataaatacatactcttacatacatacaaaggttgttttctagtctagcaaatgatgttttaaataagagaaatgtatttgtaagagtacataacttgtatcataaattaataatattattaagactcaacaatggtttggtctaaaataatccaccatttgattcagtgttttgaatccaaattaagttaagtttgtttttgttttgatttatatccagtgttgaataagcttttcatgtactgtgtgtgtgtgtgtgtgtgtgcatatgtttatgttcatcttatcttgtttatctagcattgtataattaggtttagattttgttagaataagtttagatacatccagtgctgtataatgttccaataactacatatttatctagtattgcataattcattttagtgtttaaataagtttagataaatccagtattgtttaatttgctgatgaacttagcagtgattggccgaaagtgggaaacctaacctcatgttctagaaaaagaatcgccaacaaatttcaagtaagcagtgccttctgtcaactcgaatgtcatttggaattgcctgagctctattcagtttcgtatacctccggattacacgtactaacgtttgaaaaaaaaaaaactaaaattccaatcaaaatgccacacaaaaaatttcccagaatgtcacaggcgcaactcaaacgtttgatcaaatcacaaaatcagaacatagcaaaggccgcgtgtattttggaacccccaaaaattatacagcagccgtcgatgaggcagtccatcattccaccgaatcctgcttatagcaagaaacagggcaaaaatgcggctcgcccaaattccgagcgagctggaaaggtgccaatgcaggggctgaaccacgtggtgccggaggacactgtgaaacaggtgaagcaataagtatagtgcaaaaagcgggcttatcgcataaaatagtactttcagcataatcaatctaagcagatgcaacgcaatcgaaggaatccatcgtcgaagatgcaacaaaatggcaatgaagcatccaagcaggagaagcccaatcagcacgaggacaagagccgtcccaagcagttgtattcaagcgttgtggccaataagcaagacgggcccaccgcagtgaatgctcctccacccaaggagggctcatctgtcaatcaaattggatcgtgttgtcatcatggcaatgtttcgggcgaaaagcagaaatgtccggataccagctcatcatccgccacgttcacttggcccagtcaatcggttaaaagccaggggtttttcggaactagcgattcttcagctgacccattcagcatgcagaatctgaagaagattgcccgggatttcttctcatatccggagtttcatccaccggaggccagcgaaaacattgccgctgccaatggctccaagaaagctgagccctcgaggacgaaatcccagccgggtctcaactcttcgccgagaggctctgccttgggtgccgataggtcgggccatcctcaatcgattgcgggtggaacgaattctcgccggaaggattatccattggaggaggccttcatgaccgtaatccgcaatctgcgcgaaaattatccgggcaatgattcgatttcatcttcaaatcgcccgaatatccaatttgataactaccaatcggcgcaaggtttcggctatggttccaattcctattacaacgctcaatcgacatccgcttacggctatcctccgactggttttccgatgtcccagcagtcaggcttcatgccaaagtataaccaaatgccgacggctaatggttcaaatttaaatcaaccgccattgattagcgaaacttatcaggccgaagcgcagcagcatccttgctggccggtatatattccggaatatgtttcgcattttatgttcggtgagccacaggacgccaatgccagctgctctcgtaattcaaaccacggcaacaagatgtaaaatagaatccggagggaaatcggaatagtgtagcatttaaaaatctattcatcattcaacaccattcgaaaaaaattgctaatgtaatacacagaccaattccgtaatcctaatcatttattttgcatctatgtattaataaacatttgtaatgttacaaatattttccatatatttgtaagccaattacacttaaccatcttttgtaatgatgcaatccgaagataaacaaaaaatgtatgcatctcaactacctcaattagaatttaagtaaaatgtgtaatgatgatgatgtataaagaaatgccatcaaatttcactttcaactcggcggaagaaagtgaaaaacatgcgaaaaaagaaattaatgaaaaaatcgagcagcttaccaacaattgaaataaaggaaaaaatcaactagtcagcgtcgattgtttggtggtcagttgtttggttttctactattaccaaaccaatgccaacaaaagaaatttttttcttttttcttttttggccaagtaaaataagaaatcaaataagatgaatcttgccttataaaatgtgaaattttcctgccattatgattagaatttgggcttaagctcattatctaatcaaagatattgataacacctgcgaaaaagcaattgaagaaacttacgattgattgatatacttaatgtgatcgaatttatttatatggctttatatacaagctaatacatgtcaaattatatattatagaaagcgtgttggtcattgaacgcggtaaattattcaagtagttggatatcaaaaccattaatgtaaatgcaatagggtaattaaattgtaaaggggtatttatttacatatctttgtaattactctgtaatcgtttaaatttgttgcgcaatcttgaacatggagaaaactatatctgatttgaacaaaaggatcttttgtgccaaacatttacgttacttggaggataatatgtaatattgtacaatagttagca

SEQ ID NO: 29798 - DNA, 1146 bp, DROSOPHILA
atgaggcagtccatcattccaccgaatcctgcttatagcaagaaacagggcaaaaatgcggctcgcccaaattccgagcgagctggaaaggtgccaatgcaggggctgaaccacgtggtgccggaggacactgtgaaacagatgcaacgcaatcgaaggaatccatcgtcgaagatgcaacaaaatggcaatgaagcatccaagcaggagaagcccaatcagcacgaggacaagagccgtcccaagcagttgtattcaagcgttgtggccaataagcaagacgggcccaccgcagtgaatgctcctccacccaaggagggctcatctgtcaatcaaattggatcgtgttgtcatcatggcaatgtttcgggcgaaaagcagaaatgtccggataccagctcatcatccgccacgttcacttggcccagtcaatcggttaaaagccaggggtttttcggaactagcgattcttcagctgacccattcagcatgcagaatctgaagaagattgcccgggatttcttctcatatccggagtttcatccaccggaggccagcgaaaacattgccgctgccaatggctccaagaaagctgagccctcgaggacgaaatcccagccgggtctcaactcttcgccgagaggctctgccttgggtgccgataggtcgggccatcctcaatcgattgcgggtggaacgaattctcgccggaaggattatccattggaggaggccttcatgaccgtaatccgcaatctgcgcgaaaattatccgggcaatgattcgatttcatcttcaaatcgcccgaatatccaatttgataactaccaatcggcgcaaggtttcggctatggttccaattcctattacaacgctcaatcgacatccgcttacggctatcctccgactggttttccgatgtcccagcagtcaggcttcatgccaaagtataaccaaatgccgacggctaatggttcaaatttaaatcaaccgccattgattagcgaaacttatcaggccgaagcgcagcagcatccttgctggccggtatatattccggaatatgtttcgcattttatgttcggtgagccacaggacgccaatgccagctgctctcgtaattcaaaccacggcaacaagatgtaa

SEQ ID NO: 29799 - protein, 381 aa, DROSOPHILA
MRQSIIPPNPAYSKKQGKNAARPNSERAGKVPMQGLNHVVPEDTVKQMQRNRRNPSSKMQQNGNEASKQEKPNQHEDKSRPKQLYSSVVANKQDGPTAVNAPPPKEGSSVNQIGSCCHHGNVSGEKQKCPDTSSSSATFTWPSQSVKSQGFFGTSDSSADPFSMQNLKKIARDFFSYPEFHPPEASENIAAANGSKKAEPSRTKSQPGLNSSPRGSALGADRSGHPQSIAGGTNSRRKDYPLEEAFMTVIRNLRENYPGNDSISSSNRPNIQFDNYQSAQGFGYGSNSYYNAQSTSAYGYPPTGFPMSQQSGFMPKYNQMPTANGSNLNQPPLISETYQAEAQQHPCWPVYIPEYVSHFMFGEPQDANASCSRNSNHGNKM

SEQ ID NO: 29800 - DNA, 3791 bp, DROSOPHILA
gaaatcggtggaaaaattgtgagtggagggggggggggggagcgttgctgctttccgtccaggggagcaataaatcgaatgggtaaataaatggaaaagttaaattggaaatgtgtgtgcggcgagtggcgccatcaattggcaggtactctaatctgagtggcgtcatctggtgagtttcttaagtttatgatggcgccacctatagtgttcgaggcgtaaccttgagacatctagcggcaattttcattttacatggagcgctttttacaatgtatatataagattacatatgtagaaaaaggatttcccagcttaacgtactaaattttccaaagtctttgtaaaacactatcaatttattaattagcacctgaggctaattactatttagacttagctgaaatacgcttctaatatactctgttaaaaatatttatatctataaagggctatgattttaaggacttagtatttagattgctggaaagttgtctacgcctaaagcagaaagcagtctatgagcagaacgagcaagccgttacccttttaaatacgagtgtacattttatttcacgcaatagctccacctatgtataagtagcaatagtgaactaaactcaaagaagcgccacctttcgttttcttcgtttatattcaaatgctagtataacagttgtttattccataaatgtctaaaaattatctctaataaactttttctggtttttcttgtatacttttatatgcgtatgtaaattgagtaagcttttatttatcgaacttgaatttaaaattttgaatttaaaaattaacggcgtgctcgataaccttttatataagattttccaagcaagtaaagaaatgtagggaaatcagagagagtaactaactaagggtaaataacatcgatttttagctccacgcttagcacataaaagtgtttctttttggctaatgggaaatatttgtctttgtagcaaggaaatatgaatgagctttaacttttagtgatgaactcacccgataagcccgtatcattgatgctcgacgttgaggtggagaaacccggcagtttccgccatcctttgcgactccagaagctccttgccttcgattccgttgcggtggtctgaaccgtttggatgccattgccgcctgcaatccggtgattgggtcccggatcctcggcggctcgtatcctggcgcagctaagtatcctgcgaccacacgaggctcgcgtaaggaagctgctgccgctctggccaccaccaccactcattccagcctcatcgtatacagtggccgctcgctggaacgaacgacagctttgtgtgcccacggtgggcgtttggcgggcgcacttgatgtgctgcgttttgctcagacgaaggctgccaatgtaactggcaccgctgctgccgctaaaaccgctgtccaagtcgccgcatgtggtggtcagcagctgctccactccgccgccaggacagccaggagctgttttggtccttttccccgcctcaccgccgctatcacagatgttgtccgccgaggcggaggtcagtcgggccaaaatcgtcggcggttggccactggctgccgttacgctcacactgggctgcggtggagtggcctcagctccgccagatccccccgatcctgaccccagcggttgctggtctatagacttgggcggactctccggcatcagcatggcctccacactcaaattgagttcgcccaatatcttgtggtgtctgttctgcactcgacgcagctcctcctccaccagcgtctgattgagcgagccagccgaatgggagcccactgtacttcgcagatggtgcccgctgctggtctgcagggcagccgcattgatctcctcgtagaagttctcgctctgacccatgcccgatttggtggtcaatttgtggtagcgcgtttggtaggactgcaaggtcgccgggctcactagctgtttgttcttcttgccctttgagagcagcgctcgaatggagttcggtggtggctcagccgtaggggaggatgatgagctggtgtccaccaccgacgagactcgtccagcgcctcctcctcctccgccgccgcctgaagaaactgcacccggtacattggagtgcctcatggcggcaccgggttcgtagtaggcatacgagtagtcatgatgcaggtggactataaaagagttttaaatattacagtacatttggagtgcaaccacattgtatttaccagtgtgatggtggtgcggctgatggccgagattcctgcccaaagtcttgctatgccgcgccgccagctgcttgagatgatatggtgatgtctccaaggtcgccgattcattgcaaatctcaatggcatccggatcgggatcgggataccggggcaattgctgtctcctgccaggcgttgtgttcaccggcgaaccaccaccaccggtgatgggtggtggatagtccggcggtggtggaaactgcaggcactgcttagccacgcccccgtgcaccgcctccagttgctgttgctgttgttgttgctgctgttgctgcaacttttgctgctgctgcttgagtcgctgcaattgcgtctgctgttgcgtatagtaattctgattcgagtgctgctgctgctgctgctgttttagctttgtgtggaccaaaaccttgccggccacgccccctcccccaaccacgcccccctggcccgtcgtgggggcggccgtcgagttgctgccattgttgcgtctgctgcccaggcccaggctctccatggcacatggtgtggctgatccgccaaaagctctacgatctacaaagaaaggaaaagcgggaaaactattatacaaatcttgggaaatgagatgaacgatttaaattgaaaaatatgaaataaaaacaccttcttatatgcttttttcaaaaaaaaaaaaacttaagcttatgaaatgttcaacacttgcagttcaaatagtttcataaatataacaattaaataattaataaagccaacacctcaaggtggcattaattaacgagcataacatttagttgaatagaaatatgtacacattgcagcagctgttcctggcaacggagaaaatgaaaacaagttcctggaactttgaccactaaactggcttagtaaatgcggtattagtggtatttggcattcgcgccgcaagattcgagttcagagagccattccttgccacaatccacatgtcgccgtgattaattgccgctaattcagcaaagtctctacttctgatggccaaagggtcggctggctggctggctcctttttttgtggactcgcttcaaaggcccagccgagcggtaattgaaaagccggactaaacgagaaatgagcctggccaatggccacaaatgagtcaggtggagtcatggccaagatgatggatccccatctgtcacaggtgagtatgccatatataaatgggctaagagccccaatgcggaggttaagtcgaagttcgacatggtttatgaaattaaattcatcttgcagttaggattcatgaaacgtaatatatttgagagggaacatactacaacaaggattgcaaaaatctagtgacaatcgcacctttgacataccgaaatagaaacacatctgtgacgaaaagtaatgttataacataaatttatttataattctaagcgaactccctcttttctgctggaaattggataattgagcgctctattccctttgccaataattttagctattctactgcgaaaataggc

SEQ ID NO: 29801 - DNA, 1734 bp, DROSOPHILA
atggagagcctgggcctgggcagcagacgcaacaatggcagcaactcgacggccgcccccacgacgggccaggggggcgtggttgggggagggggcgtggccggcaaggttttggtccacacaaagctaaaacagcagcagcagcagcagcactcgaatcagaattactatacgcaacagcagacgcaattgcagcgactcaagcagcagcagcaaaagttgcagcaacagcagcaacaacaacagcaacagcaactggaggcggtgcacgggggcgtggctaagcagtgcctgcagtttccaccaccgccggactatccaccacccatcaccggtggtggtggttcgccggtgaacacaacgcctggcaggagacagcaattgccccggtatcccgatcccgatccggatgccattgagatttgcaatgaatcggcgaccttggagacatcaccatatcatctcaagcagctggcggcgcggcatagcaagactttgggcaggaatctcggccatcagccgcaccaccatcacactgtccacctgcatcatgactactcgtatgcctactacgaacccggtgccgccatgaggcactccaatgtaccgggtgcagtttcttcaggcggcggcggaggaggaggaggcgctggacgagtctcgtcggtggtggacaccagctcatcatcctcccctacggctgagccaccaccgaactccattcgagcgctgctctcaaagggcaagaagaacaaacagctagtgagcccggcgaccttgcagtcctaccaaacgcgctaccacaaattgaccaccaaatcgggcatgggtcagagcgagaacttctacgaggagatcaatgcggctgccctgcagaccagcagcgggcaccatctgcgaagtacagtgggctcccattcggctggctcgctcaatcagacgctggtggaggaggagctgcgtcgagtgcagaacagacaccacaagatattgggcgaactcaatttgagtgtggaggccatgctgatgccggagagtccgcccaagtctatagaccagcaaccgctggggtcaggatcggggggatctggcggagctgaggccactccaccgcagcccagtgtgagcgtaacggcagccagtggccaaccgccgacgattttggcccgactgacctccgcctcggcggacaacatctgtgatagcggcggtgaggcggggaaaaggaccaaaacagctcctggctgtcctggcggcggagtggagcagctgctgaccaccacatgcggcgacttggacagcggttttagcggcagcagcggtgccagttacattggcagccttcgtctgagcaaaacgcagcacatcaagtgcgcccgccaaacgcccaccgtgggcacacaaagctgtcgttcgttccagcgagcggccactgtatacgatgaggctggaatgagtggtggtggtggccagagcggcagcagcttccttacgcgagcctcgtgtggtcgcaggatacttagctgcgccaggatacgagccgccgaggatccgggacccaatcaccggattgcaggcggcaatggcatccaaacggttcagaccaccgcaacggaatcgaaggcaaggagcttctggagtcgcaaaggatggcggaaactgccgggtttctccacctcaacgtcgagcatcaatgatacgggcttatcgggtgagttcatcactaaaagttaa

SEQ ID NO: 29802 - protein, 577 aa, DROSOPHILA
MESLGLGSRRNNGSNSTAAPTTGQGGVVGGGGVAGKVLVHTKLKQQQQQQHSNQNYYTQQQTQLQRLKQQQQKLQQQQQQQQQQQLEAVHGGVAKQCLQFPPPPDYPPPITGGGGSPVNTTPGRRQQLPRYPDPDPDAIEICNESATLETSPYHLKQLAARHSKTLGRNLGHQPHHHHTVHLHHDYSYAYYEPGAAMRHSNVPGAVSSGGGGGGGGAGRVSSVVDTSSSSSPTAEPPPNSIRALLSKGKKNKQLVSPATLQSYQTRYHKLTTKSGMGQSENFYEEINAAALQTSSGHHLRSTVGSHSAGSLNQTLVEEELRRVQNRHHKILGELNLSVEAMLMPESPPKSIDQQPLGSGSGGSGGAEATPPQPSVSVTAASGQPPTILARLTSASADNICDSGGEAGKRTKTAPGCPGGGVEQLLTTTCGDLDSGFSGSSGASYIGSLRLSKTQHIKCARQTPTVGTQSCRSFQRAATVYDEAGMSGGGGQSGSSFLTRASCGRRILSCARIRAAEDPGPNHRIAGGNGIQTVQTTATESKARSFWSRKGWRKLPGFSTSTSSINDTGLSGEFITKS

SEQ ID NO: 29803 - DNA, 4167 bp, DROSOPHILA
ttgcttgtttcgtgcttatttattgttttcggtcgcatttcgacgacacttcgcatggcttgttgcgctattgccaaaaacgataaagcggcaaaagcaaaacatttaattggcggctgccccatgtccagctcagtttttttttttttttttttttttttgtcagctaactttctttccgcaaaaaagcgaaccgaaataatgaaaaaaaagcggacacccacactcccgctagcatacaaatgaagagtaatagccgctgcccccccctgaaaacccagcccctgcttagttgcttatgcaaagttttacacaaaaaacaggtacaagaaaaaaaaaattgagtcaaaaaactaccgcaacaaaaggcattcgcgagcgatgtgaaaaataaaagcaattaaaaattataaataaatattgtaataattgtcgtataatcgccgccgtggaaggcagacgaagaaggcaacataattaaataatttcagctgctggcatttaagtgttatataatattgcccgattatggggggttattgtttttcacggccttaatggcccccctttcattgtctttctttctttcggctattttttgctacctcttttttcccgcgcttcgcttactaatttagccattgcaacatttggggccaacgctaaatgctgtgaaaatccaacacttttgtttccaagtgctggcgtgggagaattcgcatttaaccagtttttagctttattttagcttttgttatctataaatatctaaattgagaaaaaattatcatagaaatgcatttctctcgaaaattatcgttactggacttaaaaccattgctcaacatttattcgtaaaaaagagtatcatcatattgaatgataaaaaaaaacttgcgcctaaattactctaaacttgttgctcttagctttatattccatcaggttgaagtgaaatgtagagctaagagcaactggtcgagcaaataaaataactagactatgtgctactcattgatccctgcgagctattcgatgtgatggtgctgacgggacttcgtttccgggactttcgcttgttcccatccgactgccggatccgctgtaatgccagatcgtagttattaacgttgatgcagatggctatataggccaccagcttgggcgcctgcagttcgctggccaactgactcgccttcgccagcgattcctttagcctctcgaagcgattgagcacggcatgcacctggcagcccaggaagatgctgttgaatcgccagatcagacaattgcaactgcgggcctctgggggttaatgggcagaaggtgggcgttaatggaggcgccacaaggtgttaagtggcatgtaacccaccgttaaaggccttgcgggccaccacgaggcacttgtcgaaacgcgactcctggaagtgacagcgcgcgatctcaaacaacaaataggatcgctcgatcgcaaagcgggagtgacgcagccgattctccagttgctctagcttctggctgaaaatttgaaatatatatataaaaaaaaataaaatgtatgtttttgaagagcacattcgaaaagcttggatacagcttcccttacactcacctaattcggctgtgccgctcatcctccttctcgatctccacatagatgttgggacccccgaactgtacgctcatgtcgtgcagcttctccgtccgcagtaggtataagatgggtcgattctgggcctgcaggaagtcgacattggctggcaccgcgcacttgtcgcaataggccagtgccaggatattgtagacttcgttgatgaactcaaacttccagggcagcgtgcgatgggttttatactctatgaatcccgacattatgttctccacgtaatcggacagcttctccacatcgccctcccggcgccgcttgtgcacctcgtgcagcatccgcatgcagtcgcgtcgcgtctggtactgcgcatggaacaggtgcatctcctgccaccgacgccgctcctggtccgcaatcggaccgtgccgttgttgcacgtaccgccggttgtacaacggatttcgggcttgaagcattttctaagtgaattcatgagaagtggtgggaaatgctagtaaagctcttgatttacacgaaagtaatatgtttagtaaaattagaaagcaagtaagtatatagtctaggattctcttaaaagttcatttaatcttactaaacatgtttatagatgacatgtttgcaaattgtttaactgcaactgttaatcaatttatattatatttagagtattccctctttaaactttgttctcgactcagagatggttttccctgaaaaagttcaattgccaagtggtgttttcccctgaattggactcaccataagccgtcgcacaatcgtgaactgccttctggtcagcttgcgcattgggggcgtggtggcaagcctcaggggatcgaggaagttgcggtcgctgcgcagttgacgcagcagcgcgatatcgacggcgctgcggcccaagtagttgtggttgtacagactctcactcgcccgccggcgggccttttccagtaaggtcaactgcggccgctccttgataatgatactctggacgtcgcactgctgttggtcgcgcagcttcttccaaagtgggcgggacacatgggcggccagctccttctggcgtcggttgatttgctccaggacgtccctgtgctgatgcataaagggacgcagggattcgcccaaggtgtcttcgaagacggcgaggctctaatggaaggtgatatttcaaaagctattttcttttaagcaatctattaacaaaatacagtgagatattaacaatgaccctcaccctttgcttgatcatctcgaaccgcccgtgggcaaactgtccgccaaagggacgtccgtccgtataaagcgtggttagggcgttctcaaattcgttggcattgaaaagctcttcgcacttcttggcaatgatgtcggcggtatgtgaatgattgaaactcaattcccttcgatgaccgaacatcgtttcaatggcccgcttcgatatctggatgtccaggagggcgagatccggacgcaccagcgattgctggctccgaaggagcaaggacttgtacaggccactcgtccatgacatgttgaattttgtacggctaatttcatgcaaacgcaactggaatttggcaagatactaagtgaaaccagtgaacaaaagtgtaagtttaactggtggagcaaagccaaaatgatgggaataatgtagagatcagtgaaaaaactattattagcagctttcgattttgcatttggcttcagggcagcttaaccaccgaatacagatattaaaataccaggagttgtggcttaaatttcaaccaggcaagcctcgaaaaatacctgttgttaacttggaatctcagtgattaaattacaattaacgtttatttcgcttgagtttggctttgagttggtttcaataaatacaataaatacgtattaattaacaggcttcaacgtttagcattaacaattcattaacaattacgaattacaataaattaagctaaggagtggggcctaatggtgtttcctcagggggcgcggcaggcggcgggtgcgcagacggcgacgtcgggacaacgacttcgctgccggcgtcgcatttgcatttccatatgcatttccacttgcattttcattcgcatttgcataggcattttcatagccattgccattttcatcaattttcacagcgctttcttcgggctttgctgcttcagcggattcttcagcagcgtctacctcgccttcttccttttcatcgtcctcctcatcttcttcctcctcgtcgtcttcatcttcctctccttcttcatcctccccatcttcttcttcttcgttatcttcatcttcttcagcggctgtgtcatttggattgaccttttcttcatgacttgccttcacctctttctccggctctatctcctctttctgcacgccctcttcggacttttcttccgctccctcttcctgtttcttctcctccttcttcacctggcttgggggttccttcacccggttttttttctccacctcatcatcatcgtccacgtttatctcattatcactatcatttt

SEQ ID NO: 29804 - DNA, 1617 bp, DROSOPHILA
atgtcatggacgagtggcctgtacaagtccttgctccttcggagccagcaatcgctggtgcgtccggatctcgccctcctggacatccagatatcgaagcgggccattgaaacgatgttcggtcatcgaagggaattgagtttcaatcattcacataccgccgacatcattgccaagaagtgcgaagagcttttcaatgccaacgaatttgagaacgccctaaccacgctttatacggacggacgtccctttggcggacagtttgcccacgggcggttcgagatgatcaagcaaaggagcctcgccgtcttcgaagacaccttgggcgaatccctgcgtccctttatgcatcagcacagggacgtcctggagcaaatcaaccgacgccagaaggagctggccgcccatgtgtcccgcccactttggaagaagctgcgcgaccaacagcagtgcgacgtccagagtatcattatcaaggagcggccgcagttgaccttactggaaaaggcccgccggcgggcgagtgagagtctgtacaaccacaactacttgggccgcagcgccgtcgatatcgcgctgctgcgtcaactgcgcagcgaccgcaacttcctcgatcccctgaggcttgccaccacgcccccaatgcgcaagctgaccagaaggcagttcacgattgtgcgacggcttatgaaaatgcttcaagcccgaaatccgttgtacaaccggcggtacgtgcaacaacggcacggtccgattgcggaccaggagcggcgtcggtggcaggagatgcacctgttccatgcgcagtaccagacgcgacgcgactgcatgcggatgctgcacgaggtgcacaagcggcgccgggagggcgatgtggagaagctgtccgattacgtggagaacataatgtcgggattcatagagtataaaacccatcgcacgctgccctggaagtttgagttcatcaacgaagtctacaatatcctggcactggcctattgcgacaagtgcgcggtgccagccaatgtcgacttcctgcaggcccagaatcgacccatcttatacctactgcggacggagaagctgcacgacatgagcgtacagttcgggggtcccaacatctatgtggagatcgagaaggaggatgagcggcacagccgaattagccagaagctagagcaactggagaatcggctgcgtcactcccgctttgcgatcgagcgatcctatttgttgtttgagatcgcgcgctgtcacttccaggagtcgcgtttcgacaagtgcctcgtggtggcccgcaaggcctttaacgaggcccgcagttgcaattgtctgatctggcgattcaacagcatcttcctgggctgccaggtgcatgccgtgctcaatcgcttcgagaggctaaaggaatcgctggcgaaggcgagtcagttggccagcgaactgcaggcgcccaagctggtggcctatatagccatctgcatcaacgttaataactacgatctggcattacagcggatccggcagtcggatgggaacaagcgaaagtcccggaaacgaagtcccgtcagcaccatcacatcgaatagctcgcagggatcaatgagtagcacatag

SEQ ID NO: 29805 - protein, 538 aa, DROSOPHILA
MSWTSGLYKSLLLRSQQSLVRPDLALLDIQISKRAIETMFGHRRELSFNHSHTADIIAKKCEELFNANEFENALTTLYTDGRPFGGQFAHGRFEMIKQRSLAVFEDTLGESLRPFMHQHRDVLEQINRRQKELAAHVSRPLWKKLRDQQQCDVQSIIIKERPQLTLLEKARRRASESLYNHNYLGRSAVDIALLRQLRSDRNFLDPLRLATTPPMRKLTRRQFTIVRRLMKMLQARNPLYNRRYVQQRHGPIADQERRRWQEMHLFHAQYQTRRDCMRMLHEVHKRRREGDVEKLSDYVENIMSGFIEYKTHRTLPWKFEFINEVYNILALAYCDKCAVPANVDFLQAQNRPILYLLRTEKLHDMSVQFGGPNIYVEIEKEDERHSRISQKLEQLENRLRHSRFAIERSYLLFEIARCHFQESRFDKCLVVARKAFNEARSCNCLIWRFNSIFLGCQVHAVLNRFERLKESLAKASQLASELQAPKLVAYIAICINVNNYDLALQRIRQSDGNKRKSRKRSPVSTITSNSSQGSMSST

SEQ ID NO: 29806 - DNA, 2271 bp, DROSOPHILA
acattgaattgaaagtcgaaatcctgggatttctgtgcacgttttttaaccgaaagcgcgggcgactgctgaaatcaaatatacaatatataaacaccacttgaataacatagacatagccactaacctgttgatttttccgagccgacgactttacagtaacattcagtgatatattttccaccattttggcacaattgatgctcgcaaccaaagaagaatcgcgaaacttttgtaaataataacgaattgaataaaacgtgcgtggctcttcttcttcgtttgccactcacagcgaaaaggtatggttacatctgttagcgcgccagtgctacccatagaaaagcacatagcgctgccagatgaggaaaaaaagaagcataagcgctaaattcaaattgcacaatatatcgtttaaacatctttagttgaatttggcaaaacacaagagcccgttatatttaatattgtatattaatatatttcgtatttggcaaattcagtaacatgtttgtattttaaagtaactttctctaaatataatatgcttacaacgagtttcgcacgcgacatttgacgacgaccaacaaaaaaaaaaaaaaatagtttcacgcattcaactgccttgggcagcgaagcgcatggggttccgtagtaattgtggtttttggtgggtggtgctgggtggaatgggctggtggttctgtggtctggcggctgggtggccctggtggtttacatacgtgggtgtctgctctccttcgtttttcacatccatgtgggcatgtcagccccagctgcgggcacagatgtcgaccacagaccaatgcatgacggtgacggctgcctgtgatcctgctggcgatggtgatactcccccgggactggcctcaggaaccccgacagcgctctgcgatttgccagctccctcctccatgcccatgacctcatcccgggtatgcccctgctgctccgtcgtttggcaggccgcgtacaacaactatgcggtcacgtagtactcccgctgcctcttctggcacttctcgcgcgcaatgtagcacaaggcgatcgtgatcaggagcactatggtcacgcccatgccgatgcttacccacatgatctcctcgttgatgcccacataggagcgtcctggagaaaacataacataacatacaataaatcaatgttaggggaataatccacatacagaacccaccattgtagtagtgattggagtagccggccttgccagccactcgacccgctggcattttgcgaaaagttcgggtcaagtaataaataaatgtgcgcgccctttatttatgtttggctacttggctcgctggccagcaaagtttcaacgggctatttgttgctattgcagctggttgggatattttattgggtttctccttctgttcttcaatttctttgcccttgtttaattggaatttatgtgtgcaggcgcactcttcgcttctcaaggtctttcggtggcgccagcaggacctgaaattagcgaagagaaaacaaaattagagtaaaatcattgctgaagttgatattttgtcgcgttttgagtgccattcaaatttgcgcgggctgtagtgttttgcagcactgctctgcccgttttacatcactgctgagaaagagaaagagcactgctgtcagctgtttttaagtaaataaacatattagttttcgacgatttgattgttgcttatttgtggagtttcaggtcaaaattaattgttggaaattgtaagatggatagtttggagtctaaggaactggcaagcatcagcaaagtgatggaaaacaatgataaagcgagcgaaaatgacaaaatcaccggcattaccaccgaagaagaagaagaagttgttcccgtgaagaagaagagaactgaagagggagggggtgagcttaaggaggtagcatgcgagaaagagacagtgcaacgcgaaaagtgccaagacaagaacacctgtagatgctgtaagtccatctctttctctgacacatatatcagtctctattgcactatttgttttttagggaaaagtgaactttcattttattgaaataaatatattcaactattatttactacttttaaagtagtaaaaaaaaaattgaatagagtaagcgacatgggtttttgttagttcataataacaaccttatctttaaagctctctattactcattctataatttgagtagtgataatgtttctgtttgttaaatacgttttcttggtatgta

SEQ ID NO: 29807 - DNA, 204 bp, DROSOPHILA
atgccagcgggtcgagtggctggcaaggccggctactccaatcactactacaatggacgctcctatgtgggcatcaacgaggagatcatgtgggtaagcatcggcatgggcgtgaccatagtgctcctgatcacgatcgccttgtgctacattgcgcgcgagaagtgccagaagaggcagcgggagtactacgtgaccgcatag

SEQ ID NO: 29808 - protein, 67 aa, DROSOPHILA
MPAGRVAGKAGYSNHYYNGRSYVGINEEIMWVSIGMGVTIVLLITIALCYIAREKCQKRQREYYVTA

SEQ ID NO: 29809 - DNA, 2522 bp, DROSOPHILA
gatttgaggtgcagtcatccaaaatcgtcaccgatgggcgttcatccaagaccaagaacatccgttcgccggcgcatataaaagctgtgatcccctcgaagaatcggccaaacaaaatgcaggtgcttaatgtgcaattgtttatttgggcaatagtttttgcggctttagtacgtggtcatgctgtggagaaggagcagccggcgagccacggtgcgtatgagcgacgctatttgatgtacttcccttatttgtgtttttattatatctgcagcttatggaccacccatacacatcagctcaggtgtactccagctagctccggatacggaacaaccccatctgctgctggtgcccagctcgtactccatgtcactgggaaatccctggccgcattactatgtggacaccttgaccgcatcgcatttgccacattcagtgattccatcgattccatcgataccttcgataccttcgatccacgaaccccgcatcgtggtcaatgataatgtggacttttcgcaactcaaattgccccagcatcaagttgtccactcccacggccgctaaatgggttcattgcgaaacaatttataaactatcataaataactacttttcggcggtcttattactttaagttaagtttttttttgtttgttttcaatttattattcaataaaattgctataaaatatattggtttttaaggttgacgaatgcatggacaatatttatatgtgtgccaaaaacacaatttttaaatatgtaacatttttaaacatgcagattttgtaattaattaaaatccaggacatctttttaacttatttaaattttcataaatacttgaccatatttatttataggttgtgcccccaagagagcttttcaattcaatttaacttacatttattttaataatcgttaaaaaaaaaacacttttataataatataatctttgagcattttgataggtcttgtgtgcgactatcacagtcttagtagagatgttccagctggtggtgctccgccaggtggtggtcgtgctccgcctggtgctccacctgctgttcgagtgcctggtgctggatgtggtgcagttcgtgctcatcccgatccttgaactcgtacagggtgctgtagctgaaggcgcccttgccatgatcgatgccgggcacagccttgtggtcctcgtagtgggagtgcaactcgctggcctcggcgtactcctcgccggcatcgctgctgccgtaatctgacgggaagctctcctcgcccaggtgatcgccgagggagcccaagtgatccgcctccgcggaggctccgaattcgtgcgaagatgagctgaagtccagcttggacaaggcctcgccgccagtcagaccgccggcgtagtggcccaaaagtcccgccgaatggaccactgcattggaggacacatcatcccccaaaggataacattggatgcctagcagcagctgacccagaaggatcatcagtttcaggcgataggtgaacatggttggatgtggtagaagtgttttaaccgacgcggcgaaatgtttcgagtcaactaatttactgctaccaactgcattggattttatatgctcggagcactcacattcgaccgcaaatacatgccgcattttcctgcattttccgtcgacttttgcacacagtcttttgttttgtttggctaaaagcgaaaaacacagaaaaaaaaaaatgttgcaacggacatctgcctgctggccgctcgttcggctggagctgataatttgctgcacttactccgcattacgtcgacgtctaagtggcggggccattgaaaagcctgttgcaatggtgcgtatacgtaataattttggtcttctcaattattttttggctttttggccattaggcccgttctcggtatatggaccatattgcgtcatctgtggcatccctgtgggccttaaccctccgcctatttgcacttaaggcggaagctcgctagatttttggcacaggccaactaattgggtttatcaacagcaaatagtggaagtagaatggcaaatataaagagtcattcacatatacgagtatgtgagttgaaggtgtatatttatcgggccaaacaatgcagtgagatgtgtccattgtgcaaagtggccaaaaagtgcacttaactcattgagaaactgtttggataggtacttttatatttgataaatataaaatagtcaaagatgtagagtacaaacttatttgaaacatatttcgcaaatttattaaatcacgaaaaggatttaaatacattgccaaaaatattctctaagaacagcatccgtttatcaagtcttttattttatatatttctctcttaacttatcatcagcgagtcttacataaatctataactcaaactaactccaaattatagtctaatggatatagagcaatctgaattgatttcgatttcatgagtctctctactgcaattaaaagcacaagaagccagcagagcgagaa

SEQ ID NO: 29810 - DNA, 522 bp, DROSOPHILA
atgttcacctatcgcctgaaactgatgatccttctgggtcagctgctgctaggcatccaatgttatcctttgggggatgatgtgtcctccaatgcagtggtccattcggcgggacttttgggccactacgccggcggtctgactggcggcgaggccttgtccaagctggacttcagctcatcttcgcacgaattcggagcctccgcggaggcggatcacttgggctccctcggcgatcacctgggcgaggagagcttcccgtcagattacggcagcagcgatgccggcgaggagtacgccgaggccagcgagttgcactcccactacgaggaccacaaggctgtgcccggcatcgatcatggcaagggcgccttcagctacagcaccctgtacgagttcaaggatcgggatgagcacgaactgcaccacatccagcaccaggcactcgaacagcaggtggagcaccaggcggagcacgaccaccacctggcggagcaccaccagctggaacatctctactaa

SEQ ID NO: 29811 - protein, 173 aa, DROSOPHILA
MFTYRLKLMILLGQLLLGIQCYPLGDDVSSNAVVHSAGLLGHYAGGLTGGEALSKLDFSSSSHEFGASAEADHLGSLGDHLGEESFPSDYGSSDAGEEYAEASELHSHYEDHKAVPGIDHGKGAFSYSTLYEFKDRDEHELHHIQHQALEQQVEHQAEHDHHLAEHHQLEHLY

SEQ ID NO: 29812 - DNA, 3592 bp, DROSOPHILA
tctggcctggaatcggttctccaggtccactttatcgtgctctaccaagttgctaaactatttaggactaactgacaaaaaattggtttatttcgccttagcagcaggtttctgtggctcctcctcgctgtcgtcgtcctccgcttcggagtcgaactcagagtcttcgtcgtcctcgtcggaatcgaagtccgaatcatcctcgtcctcgtcaccatcgccggcgagattcaactgcttgatcttgtccagcagctcatcgcgcgtgtgcgccacccgtttggccttctcctggctctctagctcctgctcgtccagctgctcctcgcttgggtccttctcttgcttcttacccttccgcatgtagcgcaagaaggcgcgacgcttgcgctccgagaacgacttgaccagccggtccatctctgactgcagttgctgctcctcgcgcggcgtcggctgcggctcctcgatagccacctcagtggcgcttttcaggcacttggcgcaggcattcgccttgatggcgcagtccctgcagaccacatggtaggccttcttcaccgaccgctccttgcagtgggcgcagaccttggcctgcgtcagcggcttgtacttcttgtacttgatcttccactcgatctgctccttgcaccgctggcacaccgtggacacgtgcatcgcattcaggcgcagctgctgcggcgtcttgtcgtgcagatcgtttttgaaaacatgacgatttttgtgcttctgcgcacgtgtgcgacttacattgccgcgctggctgctcatctttggctcctctggctggtttgcgctgcagatacatggggcattagctaaacattcggttagttgaccgtttttcttaatttacctgcttaacttggactatttcgatcacagactgttgcttgccacttattttgcgtgcaatttttattttattttgtacagtgtggccgtttcttgttgctgcgaaaacattgtaagctctggcatgtttccagacacagtggctctcaaaggtctaagcggtgactcaaaccaacaatataactaaaactgtaacggatattcagctttgaatttacaagttttaatttagatttctaattcttataaggggtacattagaaacttatgtgttgttttaatctttgcacttaaaataaaagacatctatagaatatgcagttatcgtacataaatatatacacttattttgagggatattgattcttattattaactttaaaacgcattttgatttgcagaaccccatgtggccatgcgtgacctcaagcagcgcctcttcgatctgctgcgctccggcggcaacaacaacagcagcagcagcaacaacagcggcagcaacggctgcaacagcaacacgaacaacagcagcaattcgcatcagaacaagtcgaacaatcagcaaacatacgcgccgcccgcccacaaaccgaagaaactgcacgagtacacggccgccgattgcaatgcggcattcctgcggaaataccacgacctcagcattagcagggatcgggaaatggacagggatcgggagcgagatcgagagcgggagagggctggacccggtcaggtgcagtcgcccaatgtgatctacttcaacgagaacctgtcgatggccagcaaatacaatgtgcgaccctttccgctcgcccgctatccctcgtgtccgttgagcagcttcggcctctcgccgggatccggacgcccggagggcagtgccggcagcagtttgggggaggaagaggacacggagagcgagccctatcacttctgttccgacgaggatcatagcagtcacacgcaaaccatcaagttgcgacgccatcaacatggacaccacggccatcatggcctcgatctgatggagccgtccgtcaacgaggacgccgacctggaggacgaccaggccgaatcgcagctggactcgttctgcacgctctgcacctcgaccttcagctacaacaagtgctgtcgcttctgcgagaactcgctctgcggctccaagtgcaactcggagcgcggttcgcacgccagccggatgagccgcatcagccagattagcaggaacctggacggcggctatccgcccgatccggacctcgaatcgcaccagaatcaactgcagccgcaccgattcgggggcagcatgcgcatgttggcccaccatcagtcggcggccatcaggttagttagaaattgtttatttcatgtaaatgggttccctttcccttcccgcctataaattatctgttgtattattaaatttaagatcttgatatacatatatcttccattaaatggaagagtttcttgcaatttggatttgtgggttagccataatgaaatccattaagaaattaagcaattgggcaatcggtgtcaattattaattaagcttgtagcaatttgcgatgcctaatctttgatttcactgatgtaattcacgcaattatgctatcgactgcaattcgatgcactttgcaccacggcagagttcgaattttgaacttaaagttgaagtggaagccgggcgacaaagtaaacacgtcgtaaaccgatgctgcctcattagtgccggcgctaatgaagtgttttcgcatttctattaaattgcatcggctaattagccgtaagtcattgattgattgcatttaaatgggcttctttctgccgcgatacgtacaacaaagagccaagagatgaaatgccatggagccagagcaacgaacgactcaagccaaacaattatgcacaaaaccttaaactggccataaaccaccgttagcgatgaggtttccgcgcatgacgcgccgccagcttgaccataaaaaagcataaattctattgaataaaattatacccaccacagctacgcagaagcacagcaacaacaacagcaggagcaagagcaaatgaaatgaagaaaaattccagcattctgatacaacaaaaaggcgagcgagaaaaagtctagcagtgtgcaaaaagcgcatcgaaaatcaactaagcacaagcgcattactcgaatgagtaatgtttacatcaatagcggccgtgtcgccacgagtttcaaatgctctttcaaatgtggtttcaacatgttttttaaaacgattttaacctggaaaaaaacttgtgcatgatgttctaataataaaatgtttggtaggtttagtcaatcagtaattataagttatttcaaaatattcaaattgcaaaacagtaacgagtataatagatgaaatataggatatccaaagaaagaagtaagaactgctttccatccgtataataactatttattcatatttaagtatcataataatggttcaatttagaaatgtgcatctaattcaacgaccaataccttttaattccatgcaattttattttacaaaagaaattaaaacaatacttcctaaattgaaaaaagctttcctccacaaagcgtacataactcagagatgccgcaaaatacccgcagatagtgtagatgtaaacatataagcatcagcgggaacaacaagaaggcttggacgagagctttcacgct

SEQ ID NO: 29813 - DNA, 1044 bp, DROSOPHILA
atgtttccagacacagtggctctcaaaggtctaagcgaaccccatgtggccatgcgtgacctcaagcagcgcctcttcgatctgctgcgctccggcggcaacaacaacagcagcagcagcaacaacagcggcagcaacggctgcaacagcaacacgaacaacagcagcaattcgcatcagaacaagtcgaacaatcagcaaacatacgcgccgcccgcccacaaaccgaagaaactgcacgagtacacggccgccgattgcaatgcggcattcctgcggaaataccacgacctcagcattagcagggatcgggaaatggacagggatcgggagcgagatcgagagcgggagagggctggacccggtcaggtgcagtcgcccaatgtgatctacttcaacgagaacctgtcgatggccagcaaatacaatgtgcgaccctttccgctcgcccgctatccctcgtgtccgttgagcagcttcggcctctcgccgggatccggacgcccggagggcagtgccggcagcagtttgggggaggaagaggacacggagagcgagccctatcacttctgttccgacgaggatcatagcagtcacacgcaaaccatcaagttgcgacgccatcaacatggacaccacggccatcatggcctcgatctgatggagccgtccgtcaacgaggacgccgacctggaggacgaccaggccgaatcgcagctggactcgttctgcacgctctgcacctcgaccttcagctacaacaagtgctgtcgcttctgcgagaactcgctctgcggctccaagtgcaactcggagcgcggttcgcacgccagccggatgagccgcatcagccagattagcaggaacctggacggcggctatccgcccgatccggacctcgaatcgcaccagaatcaactgcagccgcaccgattcgggggcagcatgcgcatgttggcccaccatcagtcggcggccatcagagttcgaattttgaacttaaagttgaagtggaagccgggcgacaaagtaaacacgtcgtaa

SEQ ID NO: 29814 - protein, 347 aa, DROSOPHILA
MFPDTVALKGLSEPHVAMRDLKQRLFDLLRSGGNNNSSSSNNSGSNGCNSNTNNSSNSHQNKSNNQQTYAPPAHKPKKLHEYTAADCNAAFLRKYHDLSISRDREMDRDRERDRERERAGPGQVQSPNVIYFNENLSMASKYNVRPFPLARYPSCPLSSFGLSPGSGRPEGSAGSSLGEEEDTESEPYHFCSDEDHSSHTQTIKLRRHQHGHHGHHGLDLMEPSVNEDADLEDDQAESQLDSFCTLCTSTFSYNKCCRFCENSLCGSKCNSERGSHASRMSRISQISRNLDGGYPPDPDLESHQNQLQPHRFGGSMRMLAHHQSAAIRVRILNLKLKWKPGDKVNTS

SEQ ID NO: 29815 - DNA, 2714 bp, DROSOPHILA
tctgtaatatttatatacacttgccttctaggtggacatggaggcggtggccaaggaggttggcagaagaacggaggaggtggtggacaaggaggctatggaggtggcaatcaaggtaaatattaagttcaattagtttaatccaagattacaatgcttttcttaacctgtatattcatttcaggtggccacggaggacaaggaggttatggcggcggcggtcatggaggcggtggccatgcaagcaagtccttggccggcaatcgcggtagttccgtgtcctggcagggcggaaatggaggcaacaagaacggaggcggcggaggaggtggtggtggcctgtacggtggtggtggcggtggaggtggcaaacaacatggcggtggctggtaatcaaaccaccaggagcagctaatccaccgtctgatgctgacttgtgttccatggcatagagatagagacaatccctagattcttctatttttcttctatcgaaagcccaatttttcctgcttttaatgttttttatactaataaatcttgtttatgcattttgtaattatatttgtttttctatggggcacattacattatctactacattatcggggaagtaaaattatatgaaaaattataatctgttgcaaaaattgtatcattttcaccaaagaaataaaaatagttaatttagatgcaaaaattaaaaaagttggcggcaatggcaaataatatacgcccaaaatatatttactatacatactagctctttacattttcaaacaaaaattttcccttaattttcttgattcattttttaaattataaataattgaataaactcacccataaaaataaaaacgtgggataaaattactttcttgtaagatttattcacatagttagatacacaaaaaaaaaaaatggttaatttaagggcagaattattatgtacaggttgagcagtggatagtggtgtcgcctcgtcgccgatttttctcggatggatgccgttttctttccaggatctgattaccagctccagccgctgcctccgcctcctccggcggaccaaccaccgccacctccaccagaggaccaaccgctgctaatcttgctgggccaagcggaggaccctccggaggaccaaccaccagatccaccgccgctcttccagccgccgcctgaggaaccaccagatgaccagccacctccaccgccgccgcttttccaaccgctgcttaagcttcccaaagcttgggatttccaactggagagactggacagtgcactggataatcccgagctgcctcctgacttccagccagagctgccggaacttggccagccggaggatccaccggaggaccagccacctgagccgccgccgctcttccagccacttgagccgccgccgctcttccagccacctcctgatccaccagatgaccagccgcctccgccgtcaccaccgctcttccatcctccagatccgccacctgaggaccaacctcctccgccgctggaaggccaagcactgataatgaccttactgccacctgatcctccagaggaccagcctccaccaccgccgccactgctccagccatgtggtttgccctgggcgactatgcagcccagcaccaccagcagaccgagaaggccaagtcgtcgcgttgtaatcgtggtttgcatctccgcagctgccgtgcactaactaatgccccactgcagccactctcgactatttatacccatccaagattctgagccacagcttcgccacagccgctgcctcgtataatcagatgtaattgccaaaactgccagcgaccagcttacaatggccagtgcttgggcgcttcggggtggctccgagtggttcaaagtgggccagagtggctcgggtggtggctcaactcacctcagtactcgggcctcattatgccggcatcaactttcggtttcgtacgctttgtgggcccacgtaggtcggctgttttgtgcccagcaaacgcccccagatggagcacctgatttactttactatatagatgacactctgtaacaatggattcattacctcaggataatggatacgatcagctcatgaaaacagtgggaaaatgtcaggtgttatgaatgcaaattgaagagctgtgtgggcatttaggtgaagctcacttaaatatatattaaaaaaaaacgggttgtttaaaattacaaaaggacttttttaagcaagtctttataataaggtaaatatattttattcaattattcaaaaattatacttattaaaatcattttataaatttcagcccaaggcatacttttattttgcagtctagtgtagcccagtagccgataccgcatcatgatcgccgatctaatggctctccatttttatgtagcaaccgcaaagtacttaattgagttcgcccgccggcggttggatggatactatagatataggtgccagggattgatctgacgatcggttctttatgtctgcccattattcagaatggcgatggcgatacagatggaattggtaatggaatcggtatagaaattggcactgcagacggcaggtggaggaggtgtgccatggaattggaaatggagatcgaggcagctgcgtgtttgtctttttggctaccgtgctaccgtgcggttgcacataattcgtgctgtcttgaaaatcgggtcaccgc

SEQ ID NO: 29816 - DNA, 714 bp, DROSOPHILA
atggatgccgttttctttccaggatctgattaccagctccagccgctgcctccgcctcctccggcggaccaaccaccgccacctccaccagaggaccaaccgctgctaatcttgctgggccaagcggaggaccctccggaggaccaaccaccagatccaccgccgctcttccagccgccgcctgaggaaccaccagatgaccagccacctccaccgccgccgcttttccaaccgctgcttaagcttcccaaagcttgggatttccaactggagagactggacagtgcactggataatcccgagctgcctcctgacttccagccagagctgccggaacttggccagccggaggatccaccggaggaccagccacctgagccgccgccgctcttccagccacttgagccgccgccgctcttccagccacctcctgatccaccagatgaccagccgcctccgccgtcaccaccgctcttccatcctccagatccgccacctgaggaccaacctcctccgccgctggaaggccaagcactgataatgaccttactgccacctgatcctccagaggaccagcctccaccaccgccgccactgctccagccatgtggtttgccctgggcgactatgcagcccagcaccaccagcagaccgagaaggccaagtcgtcgcgttgtaatcgtggtttgcatctccgcagctgccgtgcactaa

SEQ ID NO: 29817 - protein, 237 aa, DROSOPHILA
MDAVFFPGSDYQLQPLPPPPPADQPPPPPPEDQPLLILLGQAEDPPEDQPPDPPPLFQPPPEEPPDDQPPPPPPLFQPLLKLPKAWDFQLERLDSALDNPELPPDFQPELPELGQPEDPPEDQPPEPPPLFQPLEPPPLFQPPPDPPDDQPPPPSPPLFHPPDPPPEDQPPPPLEGQALIMTLLPPDPPEDQPPPPPPLLQPCGLPWATMQPSTTSRPRRPSRRVVIVVCISAAAVH

SEQ ID NO: 29818 - DNA, 2736 bp, DROSOPHILA
agttaactaccgacctcaatggcagcctatgatctagaaacttgttgtttatagcccaagttataatttaaatacacatatcaaccatcacgtagacattgaatgtggttttgttcggggctttcccttgtccttcggctgactgtcaggatcaggaaatgtcatcgccaaaatccagttattttttttttttttgcccccttcacttgggatctgcatctgcatcggcatctccatctccatctccgtcttcataactatctgcaagtgtctccgtttgcggcttaagctgccagtttgacaaatgactcacctgacgccaacttctcggtttcagcttaagcttaaagctagactgcacaaaacactgtttaaaataccgataatttagagatatttctctagaagccttgctaggttagctttaagagcgtgatgacactatagtctggatgatatacataacatttatcaaatttcacgcacacctttattactttatattcaacccttattccaaacgtctagttatttctcgcagtgcaggctctgctgcagtttccgccagcagcgaggcgaggaaatgatccatcaagcgtgtgagttatgtacgaattttgcaactttgccacatggttggctgacttggcttgatggctacccagttgtggcttctgcctctgcttgtaaagcagacccagttgaccctggtcaagaatcggacgctcaaagtggtttaataaactgcaattacccgacctggccgggccgggcctggcctggcccagccacccgccactggagatttattttgtggattctcgtccagattagtctgggccacgcagtttgcagttcgccagttatttttgcgataaatagcgagtggtgatccagtggttacagcattcgagtgccacacttcgagacgcacagcaaaacaaaccaggatctactctccgagtcaggactaaaagcttaaaatcccaaaccacacataatgaaggtattcattgtactctgcgcactggtggcctgtgtttcggccggattggtccgatcctcgggctggggatcgaatccttggggcggcagcagctccggatggaatagtggctgggttgcccagcagccgcaagtcatcaaggtcataaagatcggaggaggcggcggctccggatggggcggaaactctggatggggcggtaactccggatggggtagcaactccggatggggcggcaactccggatggggtggaaactctggttggagcagcggcaactccggatggaacagcaatggatggtccagttccagctccaatagtggatggtggtaaagaatcgaagagctaccatctctaggagacgaaaaatccaagcacaatcccaatcccgatcccctctctccgcacctggttcacaatccacccgattttataacatagtttttaagtaccatttttttttgtgtaacaaataaataaatgaataaatcaaaggcataaagttaacatttttatgatgcatcatctttaaattatggatcgttagcaattaacattctaagcctgggagccgactatatatctgactgagcagttattaatattttatgcatcgcgcaaatgattgtggaacagcgtcttggtggccaaggtggtgatgcgattggagttcagcggagatcatcatcatcatttggaggtggaggcactgtggttacacttttaggtttatgaaaatataaatgtcaagtatatttgcgaatcgatttattattaaaacgaagcataaaatttaattttcgggacttaattaaatgatttatttaattcagcttttggttatttgacctttataatatgaaatgaaaaaaattatcgttacattctaaaatcactataaagtaaactttcttaagaaagaaaatcaagcatagataaaattgtatttttttatacattaatcaaagccacagagaacttcccttatttcaacaacaaacggtttcatataaaaatgaaggccggattttataatctttgacggaacgacatgttttatatatatttatattttttaatgaaaatgtaaaataccagcttgttagtgtcttcttatgaaccttaattattgtaacggaatatttaaaaaatataagacaaggattgaaattaattgtaactttgtataatattttgtctataataattcattttactggttattggtatcaattatatgcatttgtagcttactttgccagtttccaacttaaaattgtacactgtacagacaattttcctaagctcggtggttttggctctgggttaagcccccaactaaacaaatgttgtttgcgcatatctgcagcacgcgttgggagccaagaaaagcaatatgttcacattcacggtggagttgatgaaatttatggtaagtaatgcacttgagcgatgcagccagccatgtttgcacgccaattgacattgaaccagtgtctgcggagtcgtgtctcctccatttggcgattcaattgcggctgctgtataaatgaagattaatcgccgcatacattgcatggctgtagtgagaaacgaagccgaaattaaacataagtacgaaatgaaaattatattaacatttttcctttttaacagcaccgttttaatgctctgcgaaaattcaaattggtcgatttaaatatccataaaaatgtttgaagtagtaa

SEQ ID NO: 29819 - DNA, 429 bp, DROSOPHILA
atgaaggtattcattgtactctgcgcactggtggcctgtgtttcggccggattggtccgatcctcgggctggggatcgaatccttggggcggcagcagctccggatggaatagtggctgggttgcccagcagccgcaagtcatcaaggtcataaagatcggaggaggcggcggctccggatggggcggaaactctggatggggcggtaactccggatggggtagcaactccggatggggcggcaactccggatggggtggaaactctggttggagcagcggcaactccggatggaacagcaatggatggtccagttccagctccaatagtggatggtgcgtcttggtggccaaggtggtgatgcgattggagttcagcggagatcatcatcatcatttggaggtggaggcactgtggttacacttttag

SEQ ID NO: 29820 - protein, 142 aa, DROSOPHILA
MKVFIVLCALVACVSAGLVRSSGWGSNPWGGSSSGWNSGWVAQQPQVIKVIKIGGGGGSGWGGNSGWGGNSGWGSNSGWGGNSGWGGNSGWSSGNSGWNSNGWSSSSSNSGWCVLVAKVVMRLEFSGDHHHHLEVEALWLHF

SEQ ID NO: 29821 - DNA, 3475 bp, DROSOPHILA
gctgcgtttctatttctatttccatcctcaccggcatcctttccatcctttagcaacttccgcaagggtgacgctcagcatggtgtgattatgcactaagaaaaaattgtccaacatttcaagatctgagaaaatatgcatgttttcctatagtatataggattgaatgaatgaggacaatcaaaaacttttataataaaccatctcaaaatctcaaaataagtttttgtatttccttcctcattttttccagtgcatgtcgtggtgtaggggttttttgtgggagatggtgagtgacttcccttccgcttgcgtaggtgtttcgctcgtggccatcttttggcctcagtttaccatttttcttcatcttttgtgagcgctgatgaattcgttagacgccacccccccccccccttttatccacaacccaccaccacccacatttcccaacccccaatgccaacccgcccatggtcgcacctttggggcaatcgtgcgcaggttgtaaacaacaggcggggtaaaagaatggaaacaaaaaccgcaataagtgaacatttcagtgccgcatccttgacgtcagtggcagcaggaaactgcgggaaaatcagggaaaagctggagaaaagcatcaggagatgaagccgccagaagccgcaggaatgcaaaccgatgacataccggaaggaaagccacaggaatccattggttttgtaagatttccattccggaggttgagcgaaaatgtttatgagaatcaaaagcaaacaattaaaattcaaggaatcatcgtttgatgtttaaatgtttcgaaaagcattaaatgtcatttgctacgctctaacaaaataaaatggcctggttaactaaaataatcattatatttatccttttgctacacactcaattgactcaactgatacagtatattgacgatggtgacacatttgatggctttaactccatatttgaaaagccaaagaagcaacgaagcggtgccatggaggacgatttcgatcgagatcgggatcagtggaaggtcaataccgacatggactcgcaatcgggcatatgtcccgccgaaaatccgaatgatgtgaagtatgaaaagaaggatcgctgcaaggttgacaggaagatggtcaaggacgaggacgatgacgagaatgccgatcctgcgggcaatagtgatgacgatgatatccatgatggtgatgaagacaatggcgatgatgaggcttatgaagaggaggacgacgacattagttttgaggatgaagcttttgtttcgagaattaactgtttgttgggatctctgcacaagcacaccaaagccataaccgataatctgcagatccttcaatcccgcttgtcaaaagcgaaaaatgacaacatatgcagaaacaacaaccaaggcactacgcctacggaacatcctagtctgaaatggtccaagaagccggatttctatgaggcaaccgagctgtgtgctgatgacaactgccatttcgaggacagtgtggataacaaagaggtccagccacaagcttttactgaggatcgtcgagtgatggttccgcctctattgcaactcttccatggtcctgtccagctgcaaaccactttgaacagcggccaggacatcacgggatcaaagtcgagatattggatgacctcaccggaaacatcagaggagtttcaggcttcatcgcaattacagccggatgaaaaaaatcaagaacgatacgaggattacgatgctaaattgcgtcgcctcatggacagtcgggatgagatcgagcgaaatgtgatgagaatgataactccggatttataaaataaatattgtatgaatattaatacttaaagagaccctacaataaagaataaaaccatttgtatgtactcttgctttaaatatgttcacaacttttaaaaaatatattaatactatatgaaatgtgtaatccaagtacgccagcccttcttctgccaaatgtttcagccgcttttactcattccgactatagtcagcactccgacaacttatcgaaaatgacttccgtcgctttactggtgataatctacatttccattgtgattttcgggcgctgtcaagtggacggacgacgtccaccaaagaaaccgaccttctacgactacgatgatgaatcggacatgtttgaaaagatgacggaccaggactatgaggtccagtcgaactgtcgcaaaggccaagatgtggacgccatggacgaggtactggacaccagtgacttggatttgaacccagattaccgcatgggcaagaatatggcacgttcacagcgcaagtcgcaccacaagtttcccgattcgtgggccatgttggtcaaggagggaaaggaggaaatgcagctggagaaagtgaagcgaggcacccacttgggtgccgactgccacacgatcgacgagggggacgaggagcagcactaaaatacactccgcattgaccacttaaattccaattttatatttttattccaatttttatatttgttattcatgttttattcgtcgttcacagaaatacacaaacacagcgcattttttggttttatgatttatagggaaaacgtctttgaacaaatatccttctgaaacaatccttggataaatataatgaataaaaatttaattctaaatatacctaacgttgaactgtaaaaatctcatttgatatttcagtacttttattgcaatggcttttacaattttgagtgaattttgcaaataccactttgaaaactcgtttaaaatcaagcccaaatgtgagtccatatacacatatggcagaataaaatttgttgctcaactttctgccacatcatcgattcgaatcaactttgactgattttcctgttgagtcagctggaagtttccccccctgtttcgtcgctccttcaccgatttcccttgattttccaccatgttcctttgtgtcgacgggatgtgtcgaatggaaccgaatcgtagctggggaaactttggcgaaggtgtcagaggcagtcaatcattcagtgcacccggctgcagcccacccactgattcttgaattctgagctctgtcaaattagtgcagcctatttcagttgtcatagctgccagccacgcccccctcccttgcccgcctccgaaatcacaaaggatatgagaagagctggaaaattgtttcagcttctgtgggattttttggaagaggaaatcaaaacaaactaaatcggtgttttaaatatccttaaatttgggcttgaaacggattgtcaaatagaaaagatgggcttatcatttacatatgtacaatgtcaagagaagtagaattatataaggaacttttatcaagtacagctgaatttttgaatttacataaaacattaaactctcaatactttgttaataccttccatctatcccactagtaacccgttcttttcag

SEQ ID NO: 29822 - DNA, 1140 bp, DROSOPHILA
atggaggacgatttcgatcgagatcgggatcagtggaaggtcaataccgacatggactcgcaatcgggcatatgtcccgccgaaaatccgaatgatgtgaagtatgaaaagaaggatcgctgcaaggttgacaggaagatggtcaaggacgaggacgatgacgagaatgccgatcctgcgggcaatagtgatgacgatgatatccatgatggtgatgaagacaatggcgatgatgaggcttatgaagaggaggacgacgacattagttttgaggatgaagcttttgtttcgagaattaactgtttgttgggatctctgcacaagcacaccaaagccataaccgataatctgcagatccttcaatcccgcttgtcaaaagcgaaaaatgacaacatatgcagaaacaacaaccaaggcactacgcctacggaacatcctagtctgaaatggtccaagaagccggatttctatgaggcaaccgagctgtgtgctgatgacaactgccatttcgaggacagtgtggataacaaagaggtccagccacaagcttttactgaggatcgtcgagtgatggttccgcctctattgcaactcttccatggtcctgtccagctgcaaaccactttgaacagcggccaggacatcacgggatcaaagtcgagatattggatgacctcaccggaaacatcagaggagtttcaggcttcatcgcaattacagccggatgaaaaaaatcaagaacgatacgaggattacgatgctaaattgcgtcgcctcatggacagtcgggatgagatcgagcgaaataaaccgaccttctacgactacgatgatgaatcggacatgtttgaaaagatgacggaccaggactatgaggtccagtcgaactgtcgcaaaggccaagatgtggacgccatggacgaggtactggacaccagtgacttggatttgaacccagattaccgcatgggcaagaatatggcacgttcacagcgcaagtcgcaccacaagtttcccgattcgtgggccatgttggtcaaggagggaaaggaggaaatgcagctggagaaagtgaagcgaggcacccacttgggtgccgactgccacacgatcgacgagggggacgaggagcagcactaa

SEQ ID NO: 29823 - protein, 379 aa, DROSOPHILA
MEDDFDRDRDQWKVNTDMDSQSGICPAENPNDVKYEKKDRCKVDRKMVKDEDDDENADPAGNSDDDDIHDGDEDNGDDEAYEEEDDDISFEDEAFVSRINCLLGSLHKHTKAITDNLQILQSRLSKAKNDNICRNNNQGTTPTEHPSLKWSKKPDFYEATELCADDNCHFEDSVDNKEVQPQAFTEDRRVMVPPLLQLFHGPVQLQTTLNSGQDITGSKSRYWMTSPETSEEFQASSQLQPDEKNQERYEDYDAKLRRLMDSRDEIERNKPTFYDYDDESDMFEKMTDQDYEVQSNCRKGQDVDAMDEVLDTSDLDLNPDYRMGKNMARSQRKSHHKFPDSWAMLVKEGKEEMQLEKVKRGTHLGADCHTIDEGDEEQH

SEQ ID NO: 29824 - DNA, 2333 bp, DROSOPHILA
ctttaaacgcttataaacaaaatcatcgaggccgagggaagtgaactattgctggagtggaggagaactcccatttgaagtggggcgaccacttaagcgacaacgacagcaattcccggcatgcccagatgttccactctctgcaatcccatgccaaacgatccaatccgatcccatccgatctggtggggtctggtccactttagacgctgtcgagagttgaaaagttcagggaattgcaatggaaggaaagcgtagcaatgggagggcccaagaaattaagatcatcaatggagcagtgatgtaaacaactctcaaatgccagatgcttgggagtaagttgggtgtattaagcttttatctactatatcatataaacgcaaaaaccagagagcacagtgccgtcctatggctcgactattgcatacccattccctcaagtaatagatatgtgtgtggttacttaagtactaacagcgttttgcttagttttcagtaaacccaaaagcaacttattaatggtcatattacatcctttgggcatatggtctacaaaattccacagaactgcaaactttgtttattgaatttcaaactcaaacttatctttgttttttagttttctatcagactttctaagctcgccgttgaaaatgtgctgataattgcactcgggcagtttgcgtattgtttattcaaatctctgtttcaatccaactgaataaataatcgactgaaaagcgctgactttgaaagcggaaagtgaaagcgcatctgtgagtgggggaaaaactaatgatgatcgaagaggcgaaccttgttggtcgttcgagaagaaatgcaaacacgtgtctttaatttccgcactctctgcattttttatttgcacttgcctcgttggcacttaattatgtggccacttaaaaattgcgaatacttgggcataatctaagcgtaaattataaatctaaataaattatgagctaattgcacggctagtctaattggagtagtccagtcgcctcctggccagagccaatcggatgagtcggcgctgctccagttcctgcagttgctgctggacaagcaggcgatgcagtagctccactttggcgtactcgtgggattttcgttgcacccgcttttgctgctcctccacgaaggcgtccatggtttttgagatggcacagggttcgttgagttcctcttgctgctgctccttctgtgtgatgtgattccagcagttggtctggatgaactgcagcagtatatggatcagatggctccagaaagtcagtgaggattggtagaattcagagaggctaatggacatgtcgaatgttcagttaactgttgagaagtgtgaggtttcaagcggagttcaagatttatatagcacaagacgttacctgtgaaactcaagcaggtcactactgaaattccaaggggatacctgtaagattaaataatctacgggttaaataacttcacagggctttaatccttcggctatcctaatcaggtatattttaaggacaataagtcacaaagatgttaggataacccggttacctatgttccttagggatagagaggattttctcgctttacctagatcattttctattaaaaatgtcaaattctcatatctactcaggtattatgtatcacgtaaaaatgcatgccttcggttataatcagtttgttatgattagtttaacacgattttctatctctatcctctaggctccaccatggagcaggcgcgtcctgtgcccgctccccgtcgcctctatccagagctgcgtcccgccaactacgagaatatcgagatcagaaggcccaatagtcccagcaacaatatcaaccacaataacattaagaaactcaacataaacgcggagaatctgcacggcaattgtgcggaaaagaagctgccatcgagtggacaaaacaagttgatcctgcaggagaacaactctgatagtcagcagccgatctatggtccggatgccaatgagaatgtccaggagccggtgtatgcgacaccaaggccagctccacgccaacgattgccaccagcgggcgagccggaggattcctatccggatccggacgatgaggtgcccctgaggattttgcgagcggcgccacagattccccccaagccactcaacatcctgctcgaccagcgatcctcgatctgcagcgaggtatccaccaccagtgtccagacaccaggcaaagctgacgaggatcgggaaggatcgcggtacgcgtccaacgcctcactagactgcagcgagagctcccacagcggcaagttcaagtcg

SEQ ID NO: 29825 - DNA, 333 bp, DROSOPHILA
atgtccattagcctctctgaattctaccaatcctcactgactttctggagccatctgatccatatactgctgcagttcatccagaccaactgctggaatcacatcacacagaaggagcagcagcaagaggaactcaacgaaccctgtgccatctcaaaaaccatggacgccttcgtggaggagcagcaaaagcgggtgcaacgaaaatcccacgagtacgccaaagtggagctactgcatcgcctgcttgtccagcagcaactgcaggaactggagcagcgccgactcatccgattggctctggccaggaggcgactggactactccaattag

SEQ ID NO: 29826 - protein, 110 aa, DROSOPHILA
MSISLSEFYQSSLTFWSHLIHILLQFIQTNCWNHITQKEQQQEELNEPCAISKTMDAFVEEQQKRVQRKSHEYAKVELLHRLLVQQQLQELEQRRLIRLALARRRLDYSN

SEQ ID NO: 29827 - DNA, 3008 bp, DROSOPHILA
cgaagaattggagaaagagaggcggagaaagacgcggcgcagaactttctcttttcacaaattctacgcacgcagcgacaacaagaacaaaaacgacaaactgatccacaaaaacaaaaaaaaaaaagaaaaccaagtgcactgatgcgttcaatttgaactggttgttgctatgtttcactaaaattgcaattgaaacaatttgaaacaatacgaatttgttgttttgcgggctggattaaaaaattgaataaaaatccgaactttttgctcggcttaagctaggtgtgaccaagtgcagggacaggccaaaataccatggatctaaattttagtacgttgtatatctacaatactctttagttcacaaacgatgtatggcaaatgtaaaatgtataaaatataatgcaagtatataaacatcagttatagttattgtattaaaatacacacatataaaatcaaatccaataatccaaataatttaatctataaccaaaagaacccatttaaaaatgaaatatttttattgatatttgtgttttttttttgctgcttaaatataacatagttgcatatttagcatggcttacatgtataaacaaaatttttgttctcgataatttgacacgttatttgagcttttaaaaaatacttagcctatgattatagttaaaataaaaatcaaattcattgagtttaccaactaaaattgttatgagaatttgttagcggccggcgtgtcatgaataatttcttcatcgattttcaaatacactagtaatgtataaaatattaatgcaagtatttgacattcttttaaatcttctccgataatcatgagcacacccgccttgcgtcgttgtaatacttttcattgggattaataataaatagatgaggcaaaaaaaaaaaaacgcattcgatttagtgcgctgagtttccggaaccagctccggacttaagatgagtgtagttgctggtctggagcggtggccacttagttgttcttcttcttgggcttcttcggattgcgggagcgcgacttggccttgcagagcggacagatgggcgcgttccggtggatctgctggtggcaggacagacaggacttcatgggcggcggctgctggcggagattcacattgaagtcggagcggaacgagggatggtggccgatgccgatcgaaggcgattgctgcagtcgattgctgggcggcggcggtggcggtggtgctgagaagtcacccttgcccagacgcactgcagcagcagcggcggcggcagcagcactgcctgctcccggcggtgcgggtggcatgaaggcgtgtccaggattgccgccaccaccgcctccgccgcccacagatcctccgccaccgcctgcagcgccgccaccaccaacgccgccctgtccgccgccagaaggcagcgcggtgaccgtggcctccggcatcagaggatgccgggcatgcggacgggccaacgacgagttctgattaaccgaggccgccgccgcagctgcagcagctgctgctgccgccgactgggcggccaccttaaggaagttggtctggaagcgatccttcgaaatgggactgccctcctcctcgtgcagatctcgcagcgggcttagtccgagatagtcgcggcgcatgtgatcaatctggtacttcagggccaggtactcctcgtacacccggttggccatgtcgaaggagcgggtctggttctccttcgtctgcttgatgatgttctccatgtcgttgatgtccgcgtggatctggcgcagctcttccacgtgcgacatcttctcctcgagcaggtgctccatctccttgcggtactcctccaggcacttctcctcgtcgtcgctcagcttcacctccttgatgatccgcactttgagcttctccagcgacagcgtcttgtccctgatgtccttgatggcctccagtttggcgtagtagtgccgctcattggagctcgagatctcgctggtggccattgtagatccaaaacgatccgtgtggtataatatgtgtattttcgaaagactctcgagtgttttctgtatggccccctccactgggcgaatgtttattttgcactttttcactagcctaatagttcgatgtcggattttccggccgattcttaagcatctgatatggatgatcgcgtcttttgggataatcctttggaatggcgcacttttaattgattttttctttatttatttgattttttctctgctaatgctaataccatttttttctggtatacaatgcagtgttaccagagcgtggaagtaatttttacatttaatcacgaccagccgattatttgctatcgatagctggcagtgcggtatatatcgttttttaaatagaaaacaaattccttccaattccaattccttatacgtacaaatttacttaaatgattacactatagttaaagtgctttactgattttaccgtgggcgctgctttaaaatttaaaaatccggtaaattccagttgctgtggcaaaaaacttaaatctggcattcatgccgagataatattcagttaactattgatataaaatgtttcagttatatggaaagaacgttagtattaaaatttacattattacatataactaaaattaataacttgtatcctagctactagtttagtaactagttttgccggcattcgctgtctttccgccaacggtcacactaggcgcgccccgttatattacattatgcatttgtattcttcgatcggtcgcagatcgttcggatcggaaaatccggttcggaaagcgggcattggggacaaaaacaaagaatcttgttctggtcatgacttttccatccgcgaattgtcaacttctgtttagcgaatagttgttgttcccttttggagacaacaacaaaaaaagacatcgatcgcgcgagagagagagacagatgcaaacaatgcgtacgcgcgcgtatgtgtgtgtgaaacattccg

SEQ ID NO: 29828 - DNA, 1008 bp, DROSOPHILA
atggccaccagcgagatctcgagctccaatgagcggcactactacgccaaactggaggccatcaaggacatcagggacaagacgctgtcgctggagaagctcaaagtgcggatcatcaaggaggtgaagctgagcgacgacgaggagaagtgcctggaggagtaccgcaaggagatggagcacctgctcgaggagaagatgtcgcacgtggaagagctgcgccagatccacgcggacatcaacgacatggagaacatcatcaagcagacgaaggagaaccagacccgctccttcgacatggccaaccgggtgtacgaggagtacctggccctgaagtaccagattgatcacatgcgccgcgactatctcggactaagcccgctgcgagatctgcacgaggaggagggcagtcccatttcgaaggatcgcttccagaccaacttccttaaggtggccgcccagtcggcggcagcagcagctgctgcagctgcggcggcggcctcggttaatcagaactcgtcgttggcccgtccgcatgcccggcatcctctgatgccggaggccacggtcaccgcgctgccttctggcggcggacagggcggcgttggtggtggcggcgctgcaggcggtggcggaggatctgtgggcggcggaggcggtggtggcggcaatcctggacacgccttcatgccacccgcaccgccgggagcaggcagtgctgctgccgccgccgctgctgctgcagtgcgtctgggcaagggtgacttctcagcaccaccgccaccgccgccgcccagcaatcgactgcagcaatcgccttcgatcggcatcggccaccatccctcgttccgctccgacttcaatgtgaatctccgccagcagccgccgcccatgaagtcctgtctgtcctgccaccagcagatccaccggaacgcgcccatctgtccgctctgcaaggccaagtcgcgctcccgcaatccgaagaagcccaagaagaagaacaactaa

SEQ ID NO: 29829 - protein, 335 aa, DROSOPHILA
MATSEISSSNERHYYAKLEAIKDIRDKTLSLEKLKVRIIKEVKLSDDEEKCLEEYRKEMEHLLEEKMSHVEELRQIHADINDMENIIKQTKENQTRSFDMANRVYEEYLALKYQIDHMRRDYLGLSPLRDLHEEEGSPISKDRFQTNFLKVAAQSAAAAAAAAAAAASVNQNSSLARPHARHPLMPEATVTALPSGGGQGGVGGGGAAGGGGGSVGGGGGGGGNPGHAFMPPAPPGAGSAAAAAAAAAVRLGKGDFSAPPPPPPPSNRLQQSPSIGIGHHPSFRSDFNVNLRQQPPPMKSCLSCHQQIHRNAPICPLCKAKSRSRNPKKPKKKNN

SEQ ID NO: 29830 - DNA, 2777 bp, DROSOPHILA
ttgcacattgttcccaggattttactgtgagttacacggattttgtttatgagcgttttggcagcaattccataaacttgaaggccactctccaaatcgggctgaggattgtcttttatgtggccagcttgttattgaagaaaagccaatgtagtatgccgaccaaagtttagttgcctgtgtgtccaggtatttatatatttatatgtatgcttcagcgtttcatttctgcacgttaggatcgacaatgccactttgtccaaattgtgaatctttcgagataggactatgcttcagctttaatcgcaacccgaaaagtatgctactgctccgaagcaccctgctccattctcgggccattagggcaagcgaagcccatgcgcttctgctgctgttctggcttttgccttgtttgcgctttatgggcactgcgaagagacgctccgttatcggatagcacggataaggggcgtcgtgtggcagcccgatttgctattccatgacagccatggcctacaaacggaatcggcgaaccaagcccaagtcgctcgattgtccagggtcaagtgcgtttgcttatttttattggctactcgtacactcgttgtcccgcaggcgcacacgacgtatgcgtgatgtgggtgtacgaggtgtacaatgtgtatgatgtgtgcatgggtgttccattgagacgacgacccacttccggacgaatccgggctccgaccttccggattacgcccgccgaatgctgaattgccccgctttagtttattttcagcgttctctactccgtttttttccaaaatgtttttgagggtgctacgatcggtgaatctgaatagcattttagagtatctgcatcggcaattaaacaatatgtgtacaatttaatttggcaattagttaaacaatgcgaatatcgttgactaattggcgagcaattagtatggggctgtataaattgttgcaaccatcggagatcttcgaaaaccacgaaatggagcagtgcatcgcctggatttgtgcctttctatgcattctgcaatcccttcgagggattcaggtataattccttataccctaaaatccttatatattttttataaccacttaacacttttagagcaccacctacgagatactgggcgatgacaggatcttggatattgtgtgcgatgctgccgaggataggggcaatacaccgattcgtcagattttggacattagcggcttgacagtcgatatggccgcagatctggagaccctgtacttcaatggcgacatcaaggtgctgattgatgtgcccaacaatccgatggccatggaggtcgatgtatttcgctgggagcgcagcgagtggattcccaccacgcttgccatgaagagggacagcttctgcatgtccttgtcaaatcccatggagctctggtatcccatatttttgaaagttcccaaggaggagatgatttgtccgccgaaaaagggggtgagttcggaatggatggattttcgaaggagaaaactacgttttgggaaaactctaaggcatacaaactgtattttgtatttagttaccaattaccttgaggaattacatttgttgtccatcttccagcatgtctacaggctggccaatgtgagcaaccacgtgtttgtgagaaacatgccctatgcgaacatcgccggagatgcgaaggccgtggtccatctgacctcgggagatataaagacctgtgcggtgatcttctttaagatctacgcctcgggcgattgacacttggggcgggaacgggaacgggcaagtgtgggtactgcacccctgacactggcctagtggatctcgacgggatcccactgtttgcccactttatagtttgtactttatgatagcaggctgctctggttttatggcctgatttggtggtgtttgctcggcttcaatggcgcgtcccaccgtttatggccctagctaaatgatttacaaataaagcgaaatatttcatattcatgcacccgaaacagaaatcttgtcactcttttcgagcttcccagtcagtgggtcttctttcattttttttttttttttttttggttatttctgatggtgctggcgatataagccccgcactcgaaatgggaacttagcccagtaatccgcttctggtatttgccaaaggatcacatgcggcgccatccccagatcacagtccacatccccatctacatactcatccacatccatctccagatcagcgcccaaattcgctgaactcattcgcaattgcgcgtgacgattgctaagtataaggtgatttcccaccccccaaaaaactgactttgcagtcattctcgggaaatttacaatgtttgtgcattcgggttcaggtggttttcttataaaaaattattttgtttaatgcacgtggtttgcatttgtcatgtgaatcatttgagggaagcaattaaattctgctaatatttgaactcaatggttactttttctgatttaaaagccaataaatatttaaaataataatagaaataataataatagaaaatagaaaataataaaagaaaataataatagaacatgatgtacatggttatatcaattccttgtttcttagaatgtaataaatgctttctatgcaaataagatgttaaatttgaaaatattagttcagctgaggtccttgaaaatacctattgacctgatagctttcgatctagttatcatatatagatgatgatgatgtgtgtgtagtttccgcttt

SEQ ID NO: 29831 - DNA, 588 bp, DROSOPHILA
atggagcagtgcatcgcctggatttgtgcctttctatgcattctgcaatcccttcgagggattcagagcaccacctacgagatactgggcgatgacaggatcttggatattgtgtgcgatgctgccgaggataggggcaatacaccgattcgtcagattttggacattagcggcttgacagtcgatatggccgcagatctggagaccctgtacttcaatggcgacatcaaggtgctgattgatgtgcccaacaatccgatggccatggaggtcgatgtatttcgctgggagcgcagcgagtggattcccaccacgcttgccatgaagagggacagcttctgcatgtccttgtcaaatcccatggagctctggtatcccatatttttgaaagttcccaaggaggagatgatttgtccgccgaaaaaggggcatgtctacaggctggccaatgtgagcaaccacgtgtttgtgagaaacatgccctatgcgaacatcgccggagatgcgaaggccgtggtccatctgacctcgggagatataaagacctgtgcggtgatcttctttaagatctacgcctcgggcgattga

SEQ ID NO: 29832 - protein, 195 aa, DROSOPHILA
MEQCIAWICAFLCILQSLRGIQSTTYEILGDDRILDIVCDAAEDRGNTPIRQILDISGLTVDMAADLETLYFNGDIKVLIDVPNNPMAMEVDVFRWERSEWIPTTLAMKRDSFCMSLSNPMELWYPIFLKVPKEEMICPPKKGHVYRLANVSNHVFVRNMPYANIAGDAKAVVHLTSGDIKTCAVIFFKIYASGD

SEQ ID NO: 29833 - DNA, 6129 bp, DROSOPHILA
tcattttgctttatttcgataataagaatttttgtctacaaattattttattcgtttacattaatcaaaaaaaaaagagatatattttttatgtatggtatacaaactaaatgtttatttaacgcatagtgtgttcattagttgcatagcgtgattttaacttatagtgaccttagttgttatggcttttatacaaagttttgcaatgatttcggaaaacattcaaaaacagattacaataaatagaacaaaataatacatatagtgtgtgcaggataaaacatatagctaaggctaaacgaaggatccttcgtttctatcgatatcgatacagtatttatgtattttactgcccctaagactaagtggtgtccgtagcgcctctacactcgttttttttatttacataggttttcgaatatatatattcaccgcatagggatatatgtaggtacttaattgtggtataaatatatattaactctgtcagcgattggcgatatatatgtatctgcatatcgatagttgatcgccatcgagaggtgagcagcaggaccaaatcggggtttatttcttatatgaccagctctacataacgtaactatttgttagtggtggcgaagaaagtggattaatggatttattcggttaatcggaaaaaatttaatttcttttaaaagctttgtagtacaagaaatattctgtcagaaaaactcgatatataatgtagaaaatatagaaatgttgaatgaacaaaagtgagaccatattaaaagatttgggtgtatggaatccaaagaccgttatgaaatggtataaaaagaaagcatttctctataaaaaaaatggtcgacttccatctcgtattgtctacgctgggattcgatagcgggttcggcttggcctccgtatagatcacattttgacactacgtttatcaatgacatagaaccatcgttatcgacatgattactcagattatgatatagtacgtatattattactgctgctgctgctgttcccttgactgccttaccgatcgctccctgtcccgatcccgttccctttcggaccacaagggctggccactttgggcctgataggaaagcggaggaggcggtgccgccaactgggcctggggcaccagttccgcctgcggattgaactggttgtttgtgttgtaattgaccaggatatcgccggcgagactgtgaccgatattcacgcttcgatcgggatagccctgattctgggcctgcacctggatgggctgtgattgcacctgctgcacttgcggctgtttgttcctccagtgcttgtgctgggccacgggcaccagacggtataggggttccgccgccggagcactgggatacccaggcacatagtacggcggatagtgtggatgcggatgcgaatgggcaaggtgtccctgtttgctgctcggacgcacccgcttgaattgcggcggaggtcgctgccaaaactgcagcggattggactggacaggagaaggtggcctcaattgctgttgatcctccacaaattgcggtatcggagtgctgtagatctgcggctcatagatgggttgctgctggtgctgtttgcccacgcggtagtgccgacccggtaggtaggaatccggctgagtggcatccagattgggatccaactggagctgctgtttgccgacccgcaaatgacgctgacgctgtccaggaggctggtaaactatcgccttgaaggcgttctgatcgtgctcatccgcactgtagttcaccatgggcaggaagggctgcttgtcaaagtcgggggcctggaaatatggaatattaatatattacatttacaagatgcaatcaatcaaacatagtttaagcttaaaaagtaactaaaacacgcactacaagtagcattgagcctgaaactatgcagcatttttattcgactgtcaatagctttttcaggcagcccatagatggcgctgtggtgaaattgcttatcgttttgcatttgcctacatagcagcaatcaatgttagtcttgatcttctgatcaaaataaaaggcaagaattaaaccttattatataacaatagcttacttaatatttaatttaattcctgactcacctggaatcgccccgcatttgctcctcctgttggcgaaataaggttgcttctaagaagctgtcccagtgatgcctcgtactctgcgtgtagctgcagctgggcattcctgggcttgggcgtaatgttaacaacctcgggggccacatcgttggcgggacttggcgatgccttgtagtgctgcagatgctcacgctggtgaagattattgttgtgatggtgccgcttgggcggtttggtggccagaaagtcgtcgatggcattggatttgattgagcccggttgccgcttggcctcgaagtactcgtagtaaatgggattagacttggagagcggcggatcgagtgactgatcctggcgagagccctccgtggagctgggcacaaagaccagctggggtcgcggtgtgtagttcacgggatagatcggaatgggcacggccaccggcacaggcactctttccacatatttgggtgaactgtgtctgggcggcggtggcaagtaggtgattccattgtacttgggcttatacgacgttcggatggcgggcaagtgcactggaggtctggaagtggtggtggtggtggtggtggtactggtcgtggtactgctggtcgtactactcgtggtgctgctggtcgtagtcgggggtcttctcgtcgagacaccgccctcgagtcggctgaagtgatccggcggcggtggtaggactatgcccggtaccagcggacctggtggcacgggattcgagtagttgctcctgtacacgaacgtataggctggcggatagtacaacgagggatcatcctcgtcgaaatcgctgacattgcctggaagtggggaatcccctatgagcgaaccattgccattcagtccgttgatcagccagggtcccaggagcggcggagttctcagcaggcccttggacgccaccgtgtcgttagaggggtagagcagccagggggcatagggcgccggatagacgtaggccggaccggtagccggaccggcggcatccgcggacttagctgccggagatgctgcagtcgctcccgtccgggcaacaggatgcgatgcgagattttcagcggcggcgccttggtggccctggtagttggctcccttagcggatagcgttgcattgccagccgccggacggaggatctcgagttgattatctcggataagctgcagcggcccgttcggttcgagctgcacgggaaatggaggcggcactgccggatttgctggcaacttaatctgtctccctggagcatcatagtcatcgatggccggccacgggccctgctgattatcatcagcctcctcgttgagagagccacccttaatcaccagcagatgatcctcggccagccagatgtcctcctcgttcagtccaccgtagttccgctcgttatccagcggcacctccgagttgcgggcatagctcagcacccctggtcgcttgggaatgcggcggaagagctccttttcgatcagcccatacttgccatccctcacctgatccgccagcgttttcttttggtcctctttcgctggctttttggccggagcatcggcttcctttccggatcctgcgctcagccgcaggatgccattgtcccagttgtcgaagtcgtcgggctcattgagcaaagcctcatcatcgtcggattcccgttccttgttggaactcggagtattggatctgggtggaggcagcggagttgtggatctcgagatgctcggcggattactaaatctcgtcgtggctaccgtgctggttaatctcggcctaatcgatggcttggccagtcggtagctgctgctcgctttgctacgcaaaggagtttgcttcgtcgtcgtggttgttgtggatgttgaggtgctggtcctttccgtcgtggaaggaccgaaactggagaaggagctgttggcactcaccgccgacacctcgtaggtggagtgcccctgggcattgtggatgtgaccggccaccaggcgctgaatcattcggggcctgtcaacgaaatcggattgggaatcgcagtcagggatcgggaatatcacacatctgtgccatggcacataaatcaaaaggcggcacccaaaatgggcaggcgcctggcaagatctcaaaaggcaaagaccacaatgaaggtggcggactcaggtgaaccgaaggtttaaataccgtgcacttgaagctctcaactcacatttaactattaattcgaatatttttttgattttattgttgaaattttcaatattatcaatatattttttatatcttttacactcatatataaactaactaaccatccctagtcttcctattgtagggtattactcacgtttttagtgcgccgcgactggaagtggtgctggaagtggtgccggcgctgtcactggaactggggctggaagtgggcgagtgggcgtggtagggaatgacggtgggtggcacggactgccagctgcgtcgtatactcgactcgccacttaaatccggggtatcacgcggttgtctggggccacgcacactgccccgatccctcgacgatcttccagctgaagcaggagctcccgttgttgttgttgctgctgttgctgctgctgctgtgctgcgtcgccgctgcaagagcctaccgcttgttgttgttgttgctgttgctgctgctgctgtgagcggcggcagaggcgtcgctgcgctgccactgcggccgcgactgcgaatcggggtcaccgtcaccgttaaatcgatcgactgcgtcgtgggcggacgacgctgacgtggcgccctcagcgttggcgcctctgtgctggttgtggataccggcacgccccccgccccctggaaaacgaccaagcctcggccgcgctgtcgcgtcgctgccggcgtcgcagttgatgctgttgttgttggtgtcgtcgccgttgacagcgccgtcgacgccagcagagctatcactatcaagtgcaaggttaacgatgccatatctacggatcaaacgaaagtcaaataagttttttatgtaaaaatgtaacgcataaaacatagtcaacctacgcattaaagctttacattccaaagtatcttaagtttctaaagatttatatattgtatttcgcagtttattttcttgcctttttcttatgtttaagcatttcttaagtgttctaagtcatttataattaatttctttttaaaagtgcagtgatcataataattgtataaatttaattagtacaaaggatagtattgttgtattatattaagtgaaatatctttatctatagaaaaagataacgcatctaataaacctcataagacagcaatcactttgctggccgaaagaaaagcaatgtgaattgatttggcacacaaagtggatttaattataaatctcctaaaaaccataacccttccgattccgagattcgatctcaaataatccctgtagacaatggacgtaaagcaggcgcattcggccgtaaatcaattgaaaatagcaacaaatgtatggcaaaaaaaccgttcactatcgtgtttgtagttgttgttgctgcgagcggttaattaacatgaatgagcagataacaataacaaaaatcagccgtaaagtttgaagcacgcgtcgcttgcaaaaaaaccaaaaaccaaaagccaaaaaaaaaaaaggtgaagacaagcgaaaaaaaaacctgaagtcaaaaacgtttttgttaccaaatgcacttgagcgcatcgttggaaaaaaaagagaggggtgcgattcgtgaattttcagcaattcgattgcacaattaaaagcaggaaaagctgggaaattcatgaacgcagagtggtataatataattacaaatttaacaaatttatgaaatatgtaatacgtatttagatggcacaattggatatgagaattcatacgaataatttaaggaactttaagtgtaactacactatgcaataaagaagttctaattcttcaagttat

SEQ ID NO: 29834 - DNA, 3477 bp, DROSOPHILA
atggcatcgttaaccttgcacttgatagtgatagctctgctggcgtcgacggcgctgtcaacggcgacgacaccaacaacaacagcatcaactgcgacgccggcagcgacgcgacagcgcggccgaggcttggtcgttttccagggggcggggggcgtgccggtatccacaaccagcacagaggcgccaacgctgagggcgccacgtcagcgtcgtccgcccacgacgcagtcgatcgatttaacggtgacggtgaccccgattcgcagtcgcggccgcagtggcagcgcagcgacgcctctgccgccgctcacagcagcagcagcaacagcaacaacaacaacaagcggtaggctcttgcagcggcgacgcagcacagcagcagcagcaacagcagcaacaacaacaacgggagctcctgcttcagctggaagatcgtcgagggatcggggcagtgtgcgtggccccagacaaccgcgtgataccccggatttaagtggcgagtcgagtatacgacgcagctggcagtccgtgccacccaccgtcattccctaccacgcccactcgcccacttccagccccagttccagtgacagcgccggcaccacttccagcaccacttccagtcgcggcgcactaaaaacgccccgaatgattcagcgcctggtggccggtcacatccacaatgcccaggggcactccacctacgaggtgtcggcggtgagtgccaacagctccttctccagtttcggtccttccacgacggaaaggaccagcacctcaacatccacaacaaccacgacgacgaagcaaactcctttgcgtagcaaagcgagcagcagctaccgactggccaagccatcgattaggccgagattaaccagcacggtagccacgacgagatttagtaatccgccgagcatctcgagatccacaactccgctgcctccacccagatccaatactccgagttccaacaaggaacgggaatccgacgatgatgaggctttgctcaatgagcccgacgacttcgacaactgggacaatggcatcctgcggctgagcgcaggatccggaaaggaagccgatgctccggccaaaaagccagcgaaagaggaccaaaagaaaacgctggcggatcaggtgagggatggcaagtatgggctgatcgaaaaggagctcttccgccgcattcccaagcgaccaggggtgctgagctatgcccgcaactcggaggtgccgctggataacgagcggaactacggtggactgaacgaggaggacatctggctggccgaggatcatctgctggtgattaagggtggctctctcaacgaggaggctgatgataatcagcagggcccgtggccggccatcgatgactatgatgctccagggagacagattaagttgccagcaaatccggcagtgccgcctccatttcccgtgcagctcgaaccgaacgggccgctgcagcttatccgagataatcaactcgagatcctccgtccggcggctggcaatgcaacgctatccgctaagggagccaactaccagggccaccaaggcgccgccgctgaaaatctcgcatcgcatcctgttgcccggacgggagcgactgcagcatctccggcagctaagtccgcggatgccgccggtccggctaccggtccggcctacgtctatccggcgccctatgccccctggctgctctacccctctaacgacacggtggcgtccaagggcctgctgagaactccgccgctcctgggaccctggctgatcaacggactgaatggcaatggttcgctcataggggattccccacttccaggcaatgtcagcgatttcgacgaggatgatccctcgttgtactatccgccagcctatacgttcgtgtacaggagcaactactcgaatcccgtgccaccaggtccgctggtaccgggcatagtcctaccaccgccgccggatcacttcagccgactcgagggcggtgtctcgacgagaagacccccgactacgaccagcagcaccacgagtagtacgaccagcagtaccacgaccagtaccaccaccaccaccaccaccacttccagacctccagtgcacttgcccgccatccgaacgtcgtataagcccaagtacaatggaatcacctacttgccaccgccgcccagacacagttcacccaaatatgtggaaagagtgcctgtgccggtggccgtgcccattccgatctatcccgtgaactacacaccgcgaccccagctggtctttgtgcccagctccacggagggctctcgccaggatcagtcactcgatccgccgctctccaagtctaatcccatttactacgagtacttcgaggccaagcggcaaccgggctcaatcaaatccaatgccatcgacgactttctggccaccaaaccgcccaagcggcaccatcacaacaataatcttcaccagcgtgagcatctgcagcactacaaggcatcgccaagtcccgccaacgatgtggcccccgaggttgttaacattacgcccaagcccaggaatgcccagctgcagctacacgcagagtacgaggcatcactgggacagcttcttagaagcaaccttatttcgccaacaggaggagcaaatgcggggcgattccaggcccccgactttgacaagcagcccttcctgcccatggtgaactacagtgcggatgagcacgatcagaacgccttcaaggcgatagtttaccagcctcctggacagcgtcagcgtcatttgcgggtcggcaaacagcagctccagttggatcccaatctggatgccactcagccggattcctacctaccgggtcggcactaccgcgtgggcaaacagcaccagcagcaacccatctatgagccgcagatctacagcactccgataccgcaatttgtggaggatcaacagcaattgaggccaccttctcctgtccagtccaatccgctgcagttttggcagcgacctccgccgcaattcaagcgggtgcgtccgagcagcaaacagggacaccttgcccattcgcatccgcatccacactatccgccgtactatgtgcctgggtatcccagtgctccggcggcggaacccctataccgtctggtgcccgtggcccagcacaagcactggaggaacaaacagccgcaagtgcagcaggtgcaatcacagcccatccaggtgcaggcccagaatcagggctatcccgatcgaagcgtgaatatcggtcacagtctcgccggcgatatcctggtcaattacaacacaaacaaccagttcaatccgcaggcggaactggtgccccaggcccagttggcggcaccgcctcctccgctttcctatcaggcccaaagtggccagcccttgtggtccgaaagggaacgggatcgggacagggagcgatcggtaaggcagtcaagggaacagcagcagcagcagtaa

SEQ ID NO: 29835 - protein, 1158 aa, DROSOPHILA
MASLTLHLIVIALLASTALSTATTPTTTASTATPAATRQRGRGLVVFQGAGGVPVSTTSTEAPTLRAPRQRRPPTTQSIDLTVTVTPIRSRGRSGSAATPLPPLTAAAATATTTTSGRLLQRRRSTAAAATAATTTTGAPASAGRSSRDRGSVRGPRQPRDTPDLSGESSIRRSWQSVPPTVIPYHAHSPTSSPSSSDSAGTTSSTTSSRGALKTPRMIQRLVAGHIHNAQGHSTYEVSAVSANSSFSSFGPSTTERTSTSTSTTTTTTKQTPLRSKASSSYRLAKPSIRPRLTSTVATTRFSNPPSISRSTTPLPPPRSNTPSSNKERESDDDEALLNEPDDFDNWDNGILRLSAGSGKEADAPAKKPAKEDQKKTLADQVRDGKYGLIEKELFRRIPKRPGVLSYARNSEVPLDNERNYGGLNEEDIWLAEDHLLVIKGGSLNEEADDNQQGPWPAIDDYDAPGRQIKLPANPAVPPPFPVQLEPNGPLQLIRDNQLEILRPAAGNATLSAKGANYQGHQGAAAENLASHPVARTGATAASPAAKSADAAGPATGPAYVYPAPYAPWLLYPSNDTVASKGLLRTPPLLGPWLINGLNGNGSLIGDSPLPGNVSDFDEDDPSLYYPPAYTFVYRSNYSNPVPPGPLVPGIVLPPPPDHFSRLEGGVSTRRPPTTTSSTTSSTTSSTTTSTTTTTTTTSRPPVHLPAIRTSYKPKYNGITYLPPPPRHSSPKYVERVPVPVAVPIPIYPVNYTPRPQLVFVPSSTEGSRQDQSLDPPLSKSNPIYYEYFEAKRQPGSIKSNAIDDFLATKPPKRHHHNNNLHQREHLQHYKASPSPANDVAPEVVNITPKPRNAQLQLHAEYEASLGQLLRSNLISPTGGANAGRFQAPDFDKQPFLPMVNYSADEHDQNAFKAIVYQPPGQRQRHLRVGKQQLQLDPNLDATQPDSYLPGRHYRVGKQHQQQPIYEPQIYSTPIPQFVEDQQQLRPPSPVQSNPLQFWQRPPPQFKRVRPSSKQGHLAHSHPHPHYPPYYVPGYPSAPAAEPLYRLVPVAQHKHWRNKQPQVQQVQSQPIQVQAQNQGYPDRSVNIGHSLAGDILVNYNTNNQFNPQAELVPQAQLAAPPPPLSYQAQSGQPLWSERERDRDRERSVRQSREQQQQQ

SEQ ID NO: 29836 - DNA, 2511 bp, DROSOPHILA
cttttttacatactatgtatatcgtacgttatataaatttatatgctactacctaactactaccttatacaataaaaataaaaacgaacaaaaaccaagaatccaaatcttgaatcatgacaccaggtttcaataactttcgaatggaatttcacataaccattatcttaactggttaattatccattgagaataaccggatgagttctaatttatgcaatgccatgattttggggcagtatttttcgaaagccccccaaaagatgcgaaaactatgtgcttggatttcaataaacttaataggaattctttatttctggaaagcaactctgaacgttttccgacatttgttggcaatcgacatcgctatcgatgtggctataataaaagtagttgtaatcgaaatatacatacatagttatatacaggcgttacgctaagactaagactaattactaccctgtagttttgttgcttgattgccgccctgccctggcattaattcaataatatacaatatatgtgtttaaaactgatatgagcgcatcatgtgtggttccgttatttctttttcggctatatacaactttggactagatgctgtgcgtttcaaaaaaaaaaaactctatgtacactgcgagagaatcgatatcgtttttgataggctctgcgagttaaaatactatctgcttaaaatcaaagtaaatacaatgccattatgctatgacaagctaatagttagcttacaatttataataagacatacggatatatggcggtattcagctaaatgctctgggaactttcgaaaacaccagagtttccagaacaccacttatcgatgtcgttgttacagttttttttgcatatggttattttaagtgggtcaagtacagaaatccgttgcgctgccagttgggaaaaaatctcttaattctctctcctccatctactgctccattagttccattcaactccctccctcgccaccacttccaccctagatgtgcagggtggacccgggcggggagttggatccaccagctcctcgcttggctgaggtctgtgccggctccagatccttcgaccgaccccagctgatgaccaggcattcgtaggtcggcggcggtagctcgaacttgaccacgctttcgtaacttggcggcagtgagtcgacaatgcgcagcacatcgttctgggagttgatctggaaagttgtttcggattattaatggaatatttacatataatccatagacatcctgcttggcactcacatgtggcatggctccattggtggccctgtttcccgcctcgtcgatgggtcccgcccaaatgcagacgcccatgcggtgcgtgacataaccgcagatgatcacgctgatcaccagcatcccgatgcccagggcgaaaaccaaccagcgagactccacgctattgtcccgcagattcttctccaactgcagggcgcagaggataagcaccggcacggccaccatggccaccaacaggtcgataatgggacgttgggtgctgggtccggcgttcaggggactacgtccggttccggatccattgggcgttccagctggatgttgggagccaaagttctggctgctgctgttcggcgtcaaggtggaacgggccaccacagtgttgtggttttgtagtaccattctgggaaattagacacaaatccaggattatacggaggaaaactaaggggagtgttgattaaagatttaaattttgtttgtttctattttgtgaaatatttactttgttacctaagcctacttatttatattacaacatataaatgtatattattgttatgatatggtgttattttttctagtgtagtctagacatctcatgtttatttgatgggaacttcggctaattggtgactctcaattgttaatccccccaatgaatactcatgagatttttgcatttgaagctgttccgatcactaactgtaatcactgcactatccagacaatgggttattatattgtacatatgcagcatactattagatctgagctaatttcataagaattcatgcagatgcattacacaagaacaaaatatttaatgtacataattagatttgaatcgatttgtacccagtatgtgagaaataaatccgaatagaactggataactaattgttgcaaatacaactggattgttactatagttttattgctttttattttattttaatgagatttttttgtatcgtgttaatggatccgatatttttccatttacttcgccgagaacactttcctgcctaattgctgtattcgatttgtttggcaaatatttagcgtgtatcgcattgggttaataatacaataaacatttgataaacgccccatctttgtcaataaaatcaactgcgtcactgaggcgcagacggtgaaaatcaaatatttgctaagcatccctcgtttagagtccaattaacattggttagcattcaattaccggccaagatgt

SEQ ID NO: 29837 - DNA, 606 bp, DROSOPHILA
atggtactacaaaaccacaacactgtggtggcccgttccaccttgacgccgaacagcagcagccagaactttggctcccaacatccagctggaacgcccaatggatccggaaccggacgtagtcccctgaacgccggacccagcacccaacgtcccattatcgacctgttggtggccatggtggccgtgccggtgcttatcctctgcgccctgcagttggagaagaatctgcgggacaatagcgtggagtctcgctggttggttttcgccctgggcatcgggatgctggtgatcagcgtgatcatctgcggttatgtcacgcaccgcatgggcgtctgcatttgggcgggacccatcgacgaggcgggaaacagggccaccaatggagccatgccacatatcaactcccagaacgatgtgctgcgcattgtcgactcactgccgccaagttacgaaagcgtggtcaagttcgagctaccgccgccgacctacgaatgcctggtcatcagctggggtcggtcgaaggatctggagccggcacagacctcagccaagcgaggagctggtggatccaactccccgcccgggtccaccctgcacatctag

SEQ ID NO: 29838 - protein, 201 aa, DROSOPHILA
MVLQNHNTVVARSTLTPNSSSQNFGSQHPAGTPNGSGTGRSPLNAGPSTQRPIIDLLVAMVAVPVLILCALQLEKNLRDNSVESRWLVFALGIGMLVISVIICGYVTHRMGVCIWAGPIDEAGNRATNGAMPHINSQNDVLRIVDSLPPSYESVVKFELPPPTYECLVISWGRSKDLEPAQTSAKRGAGGSNSPPGSTLHI

SEQ ID NO: 29839 - DNA, 3521 bp, DROSOPHILA
gttcgcgttctccagctgctgctctggggtttcctccttgcacatgtagacgttgccgttcaggagcgtcgccttgacgcggaatgagcgattatcatactgcaggcacattatctgccgcaaaataccgcgcagtgttacaaagtcgctgtccaggcgtagatttctcgcatcggagctactctgacggagcagctccttctggtgttgcttaatgtaggtcagcataatttccagatcccgtttgccgttctcgacgggcttacggatcacatcctctatacccccgttaagatcgaacggcagcggtggccacggttggccagccaagtagctggcgcagctggcgtcgtccacaaattcccggctagcgtttatgctgcacacaccgatgcacttcgggcggcttatcgagggaaacggcgtattgtacatcgcgcccagcttgtgctgcccccagggcacactgatgaagcccgcgttctcggccatttccttcgcctccgcggattttccaagttcaaactataattatccggaaaataacgctaatatttattagaggtggagaaaaatcgcaaacatcgatgtttttcgaggaatcatcgattattttctttctccactgcgcaactaaatgggctaagaccttgggaaatggttgtggtgagaatcaagtgtaggcgattagtatcgaaagctaaattgtattaaaaatgggatgatgatgtgcttattaattttaatgtaataagtgaacgctaatgatgatagtacctcgatgaagagaaaaaattttgactcttagatttgctttatgttctgtttgagcacgtctattcaccacgaggtatttgcaagcttaaatcaaacaatttgtgtgaccacagtcatgggaatctaagaatatactaaataccaaaataacacgaaatccgattcggttttgttcatagatttgtttttatgtttatttgtaaccaccaaacgtggctggccaatgaagcatctcctggaggatccctcggtcctggccgagctgcaggtgctgccggataagaccggtggtgtacaggatcgacaggaggccgccaagaatcctgcagagaattccgtgcccgacgaagatttgccggctgcaggaggcgatttgctacgcgttaaggatactctgggccagctggcctgcagtctgcacaagctgtccaaaaacgatcacatagtcatcgatcggtgggtagtaatccctattttttggagctttcattcaccttctctgatcacgttccgtgatcttttattcctgtgcagaaagcgccatcaggtgattcgcacagatgcggctacgcaacaattaacgatttaccgctgtccggatcccgccgtcatggggattcgcccggcgatagagaaaaatgcccagaatccgcctgccaaagtgggtagaccatcgaaaagagcctgttcggttgccaccgctcctgtggcgaagaaaccaacactagcggagcaaaaacctgctcccgacacccatcgcactagatccggtcgccaggtgcgcagcttgatgccacagcccgctcccgtgaccagtggctcagcggttgagccaagttctgcccgcatgcttgagatgctggtggccgacttgcgggacaaggactaccgggcacccatggcagcgccgaaaagcacgagtgtcagcagcagcgtcagtataagccaggaaccgaccacaacgacaaccatccaacgagccgtgcccaaaaatgccgtttgtcccggctgtggaaagatctttttgggacgccgtctgcagcgtcactttgtcaaattcccagagcacatgccgcgtccgggcgagcagacaccacctgtagctgtagctacagtaccatcaacggttcatcctccctccacgccgtcgctgttcggccttctgaccgcccaactgcagcggcattcccatctcagcgaggaacagcgctctgatctctttcttaacgaacttaacgactttgtggagcagctgcaattgcgcagccaacggcttatacggaatacctctggactgcattttgtaaatgcacgaattgcacgagttttgggcatacccgagggtcagtatgcgttggatatgtccgccatggagtcgccgctggcaccgatgccggaatcagagggagcggccttggttgccggcagcggtagtgaaggagcccgcaatctggtggtctacgcagagttgagcatgtcgctggacgatccgctcacagacgaggctgcacagcgtctcaatctatcggcgggcggtcaacttcatccgccttccgaggagagtctgcttagaaacgtcagcgatcttatgcagccgccagtggcaactgctcctccgactgtgaaccatggctacgatcatgccagcgataatgccgtggaggccctgaccatgaaggaaacgcccaacacagaggctattctcgatctcaacgtggacttcttccagttcaatccgaattagaagggacaaatgtatagaaagcgcttagctagcaatggagatgaagaattctatgatagagtgaaaggtatttcaactactttttaacttgaacactgaaaaggttctaaaatatgaaagtttaaaacatttattttatttatcgtgcatattgcatgaagaaagtctctgaaaattgaaacgaacttttctaagtagattaaaatgtattaatggagtatgtaaatatagaaatagggatctcttagatacattttggtattgtattttgaatttttactgaatattaatattgaaattgtataatttgaaaagtaacctcatataacctccagccaaaaatctatgcaattagtacgcaaatgtaaatggttgagtggcaaaaatgccgcatgcggatggagattatttatgaagtacttaactggctaacgaaagatgcctattaaatgaatttatcttccttgatttttgaaattgttgcgttattatttgctggaacatttggaagtgaataaaaatcctggccaatttagtttaatgtatatatgcttgtggtttctagcagcttttcatacttttcatttgtgtttactgcaagtcaattaaattgatcgcaattttaatggcgttcagctaaatggtaaatttctgtgaaaaattattattgcttttagtacaaagctgctgcttaaataaatccctttcaatacctgtgtgtattacaatatctagaatatctttattgaaaagcgtgcgtgtatctatgtttactttcaggtgtaaagtttatttgccacgatgtaatcatattttctggccatccacttgattttcaaaatacgtggaggatggcaagggggtggctaaaatcaatttggcagttatcactgcaaatggacgaccgtgtttgccttggttcaatatgattaaagctgatgaccgccatggaattgcacctaaaagtgcagtcagaaagtgacctataaatagcggagat

SEQ ID NO: 29840 - DNA, 1443 bp, DROSOPHILA
atgaagcatctcctggaggatccctcggtcctggccgagctgcaggtgctgccggataagaccggtggtgtacaggatcgacaggaggccgccaagaatcctgcagagaattccgtgcccgacgaagatttgccggctgcaggaggcgatttgctacgcgttaaggatactctgggccagctggcctgcagtctgcacaagctgtccaaaaacgatcacatagtcatcgatcgaaagcgccatcaggtgattcgcacagatgcggctacgcaacaattaacgatttaccgctgtccggatcccgccgtcatggggattcgcccggcgatagagaaaaatgcccagaatccgcctgccaaagtgggtagaccatcgaaaagagcctgttcggttgccaccgctcctgtggcgaagaaaccaacactagcggagcaaaaacctgctcccgacacccatcgcactagatccggtcgccaggtgcgcagcttgatgccacagcccgctcccgtgaccagtggctcagcggttgagccaagttctgcccgcatgcttgagatgctggtggccgacttgcgggacaaggactaccgggcacccatggcagcgccgaaaagcacgagtgtcagcagcagcgtcagtataagccaggaaccgaccacaacgacaaccatccaacgagccgtgcccaaaaatgccgtttgtcccggctgtggaaagatctttttgggacgccgtctgcagcgtcactttgtcaaattcccagagcacatgccgcgtccgggcgagcagacaccacctgtagctgtagctacagtaccatcaacggttcatcctccctccacgccgtcgctgttcggccttctgaccgcccaactgcagcggcattcccatctcagcgaggaacagcgctctgatctctttcttaacgaacttaacgactttgtggagcagctgcaattgcgcagccaacggcttatacggaatacctctggactgcattttgtaaatgcacgaattgcacgagttttgggcatacccgagggtcagtatgcgttggatatgtccgccatggagtcgccgctggcaccgatgccggaatcagagggagcggccttggttgccggcagcggtagtgaaggagcccgcaatctggtggtctacgcagagttgagcatgtcgctggacgatccgctcacagacgaggctgcacagcgtctcaatctatcggcgggcggtcaacttcatccgccttccgaggagagtctgcttagaaacgtcagcgatcttatgcagccgccagtggcaactgctcctccgactgtgaaccatggctacgatcatgccagcgataatgccgtggaggccctgaccatgaaggaaacgcccaacacagaggctattctcgatctcaacgtggacttcttccagttcaatccgaattag

SEQ ID NO: 29841 - protein, 480 aa, DROSOPHILA
MKHLLEDPSVLAELQVLPDKTGGVQDRQEAAKNPAENSVPDEDLPAAGGDLLRVKDTLGQLACSLHKLSKNDHIVIDRKRHQVIRTDAATQQLTIYRCPDPAVMGIRPAIEKNAQNPPAKVGRPSKRACSVATAPVAKKPTLAEQKPAPDTHRTRSGRQVRSLMPQPAPVTSGSAVEPSSARMLEMLVADLRDKDYRAPMAAPKSTSVSSSVSISQEPTTTTTIQRAVPKNAVCPGCGKIFLGRRLQRHFVKFPEHMPRPGEQTPPVAVATVPSTVHPPSTPSLFGLLTAQLQRHSHLSEEQRSDLFLNELNDFVEQLQLRSQRLIRNTSGLHFVNARIARVLGIPEGQYALDMSAMESPLAPMPESEGAALVAGSGSEGARNLVVYAELSMSLDDPLTDEAAQRLNLSAGGQLHPPSEESLLRNVSDLMQPPVATAPPTVNHGYDHASDNAVEALTMKETPNTEAILDLNVDFFQFNPN

SEQ ID NO: 29842 - DNA, 2715 bp, DROSOPHILA
catttatgcatatatatacatatatactttactgtactatatttacctaacaaaaatttggcaatcttgcgatttcggttatatatgggtatactgtacctatatttacctatcggcaatcatccgtataaatggtgataggttctttaccaaccgaaaaccttttaacctttcgataaggcctattctgtatatctaaaacccccttttcgtagttctcatgactttatttcgtcattttctccactctggacttttgttttttgctgctggctgatgatgcgctttatttgtttgatcaataaatttggctttgccatttagcgaacgcttagccccatctctttctgccggagggttgcctcatcgggcggtgtttattaattaattcttcaacggtttttggcttctccatttccaagtttgattgtgtcatattatttacgtgcgctatcactgcgattgaaatgggtgggggttaacaaaaaaaagcggggggtggtgcaaggatggattgttgtggtgccacaaccctaaccccaatgacccaggctatgaataaaggcacaactggatgaatgagtgaatgaatcgcgtaattatactcttcaaaactaaagagttgcaacgactatcgcacgcatttcgacgaacagtgcataaatatttagttattgtttcaaattttaagtttaaaatcttgtagtctctattgatacttaatttatatacttaaataataatgtaccagaagactacatttaagccaaattttcaattataaaatagaaggagttataatttctttacaaattattaatcaaaatagggtatttaaaaatgcgttctaaaagcattgtaagtttcctatttttggcattggccttgagagctctgccttcgaaaaaggaattggagtgggtggctgggcgttttcggggcttgggacattgtgtgcagttccccgcgggctaagaaaatttgcgtgacggcagcccatatgaaagccaatgccaacagctccccggacacctctttcccggagaaaacgtcaaaaagctgatgcaataactcaactttatctatagagagaacattcatgaatacgggagttacatatattagagacatcagcgatgtctgtcaaagcaataacaagagatactctcttattgtaactttaaatcataattgctattagatctaattagcttgattcttgtaggcccctaagcctgagtgattccccgtataagaagaagattctggacggacatcgccacctaaaggagcgccagaagcagcaacagaaattacgacccggcggcaatgagggtttcaaggaggtgaaggacctgcatggtcccgatggccaggaacgttaccataatgtaaggaatgcactagagcatcgaagcgattcgcatccgctgaccgaacgtcaggagcaggcaatgctggagcgggcgcagctggagcgggacaagcagctggtgatcaactgccgcgagaagcgtcgtctgaaggagcagataggagagcagccgccaccgcaggatagcaaccacaccaagaatccaactactccccccagatccactgatccctggaagcaggtcctccaagatcgcgaccgctttcgggccaactgcaatcgcagctgtttctacaacaattcgcagagctcagcgctctggaaaatatatgccaagtaagatatataagcttataaaatatatactattttataatacctaaatcgtccacagagtggctagcaagttgagctcgcagctaatcgaaagcgtggatgtcgaattccatcgcagtgtaataaattatatcaacgacattgtaggccacaaagtgaactaattattgcaacatcctgcgattcttatctctactgccaatctttttatcagattttacaaaactgaatgtagagctttgtactacttcttttatgggatctcaaatagtaacattatatcgccacaaggtgacaaattatgagtgtagtaaaattaacacaattttcaaattgcaagaaccaaaaatcatataaataaaaaattatagtgtgtacagatgacgagagtatatattttaatatttaattaaagtgaaccctgaaagtaggcaatgatttgtagcacattcttaagattcttcaaaagataagacgtttttctgattagattaagttgtccaagaaggataatagtacgctagtcaattaaataaaataatttcgataatacaaaaaagtttttctcttgatatgccacattttttcttttaaagttaatttgttaatttctttttcaatctatatatgcagcagttctacaaatactaatttaaagaaaaaaaacttcactgtttcgaaaggattttggtttgttccatgacgaccccaaacaattataagttccctttccaattgtgtgaaaagtcattcgcatttaatggttcttcaaaaatcaaattcaatcaatttatacagggtggcagacggcgcttagcaactaactaagttatggctatcgaactagactaaactaggcgtagggttcgtacttaagccgacttgctgccccacttggttacttcgtgtccaattggagcagattgcgaatgtgtggcgtgatgtcaacagtggctagtcaatgtcaagtctgatccttcatggttaagctacgtgctaggctt

SEQ ID NO: 29843 - DNA, 540 bp, DROSOPHILA
atgaaagccaatgccaacagctccccggacacctctttcccggagaaaacgcccctaagcctgagtgattccccgtataagaagaagattctggacggacatcgccacctaaaggagcgccagaagcagcaacagaaattacgacccggcggcaatgagggtttcaaggaggtgaaggacctgcatggtcccgatggccaggaacgttaccataatgtaaggaatgcactagagcatcgaagcgattcgcatccgctgaccgaacgtcaggagcaggcaatgctggagcgggcgcagctggagcgggacaagcagctggtgatcaactgccgcgagaagcgtcgtctgaaggagcagataggagagcagccgccaccgcaggatagcaaccacaccaagaatccaactactccccccagatccactgatccctggaagcaggtcctccaagatcgcgaccgctttcgggccaactgcaatcgcagctgtttctacaacaattcgcagagctcagcgctctggaaaatatatgccaagtaa

SEQ ID NO: 29844 - protein, 179 aa, DROSOPHILA
MKANANSSPDTSFPEKTPLSLSDSPYKKKILDGHRHLKERQKQQQKLRPGGNEGFKEVKDLHGPDGQERYHNVRNALEHRSDSHPLTERQEQAMLERAQLERDKQLVINCREKRRLKEQIGEQPPPQDSNHTKNPTTPPRSTDPWKQVLQDRDRFRANCNRSCFYNNSQSSALWKIYAK

SEQ ID NO: 29845 - DNA, 3694 bp, DROSOPHILA
ccaacgcggcgtatgagcaatctgcaacctgtttgaaaaacgcccacgccggagattggggattcggatttgaattggctttgggttttgggtattgggcccagccagctgggcgaccagttagttggaaagtgatttgaatttggagcacccagcctcccactctgcccactcttttcgttgcccgatatggttatattatttcacttaccattttgtgtgctgttttttgttgtttctgctggcttgtgcgcttctctgtgttatttacacactacaaaaaatttgaaaaaaaaaaattcagttgacattagtgttgagcgaactgatatgcacggggaatgggaagcactgagtgaatgggaaaatatgaacaaaaaaagacacaggattatcacagcctactaaaaaggagttttgctacttcaaaaaaaaaacctttattttatttaattttataatttattttattttatttatttatttttttttattgtgaaaacctatctttctgaaattgctcgatcgcacctcgttcaatcaaaacaaagtaaccctcatggcaaaagctgtcaataaaagtctagtttgaaatacagaaagcagacggcatcgaacaatttaagtaattgtagaaaatattaataagttttcccctcaatttttgcgaacatattttttgtttatttcttagtataccgtataccgtgcaaatttcagttgaaaaccgggatagaaagggcagtgtcggcaacaaaaacacgcgaaacgtttgcagagcgcgaaataaaaaaaatcgaaaaacactgcgattcgtatttggtgggttatatagtgtggttatatatatatatcgaagtggatcggatcgaagcgaaccgaaccggcgaacgtcggccaagaaactgaaactgaaaccgaaccgccgaaccgtcggcgtgcgtggcagcgcagcggcagcggagcgactgaggagcggcagaggaggagctgcgacggcatggaattggatatggatatgacggggccggagcagctgctgccgtcactgccggcgtcctcgacgcgtcagttggtgcgcaggcgcactggtcacgcagcggagagttcgagggtccagcggtgcaggaccaccattaccgcccacgcacacgcacccgccacccaatccgcatctaccggcaagcggagccggctcccggcctccagttccggaaacatagccgtggtgcgaccaggtagcaatgacaaccgagtgcggcaggatcgaaagaatccacgggagtcatccgtaagaccaacgcggcaagttctctccgccagggtatgtatcctaatattctaatcattattcatgatatcaactatacatgcacatacataatcctaagattaaagtcggctaacgtgtatatatatattatagtatttatatggtcatatctgataaatagataaaggcagttaaataagtaaaatagatctctgtttctataataatgattagttagcattgtaaattaacatttgagtgaactttcaagatacatatacattatatatttatctacatatataatattatttagctaatttaaatatttccctaatgtcaggttcttgctcactccaatccttatacggttaagcagccgcccaaggagcggcgttctgggacccagcgaacgcgtaaccagcagcaccccactctggccacctcccgatcgggattcggtggccactgcactggtcctccagcgccggccactctgcgtagagctgctccactgccgcctgccagccagatgcgtccatgtctgcgctcggtccgcgccaaggtcgactcgcacctgtgtccccatctttccaatcgccaacgtccgacccccaagaaccctgaacatgcccagccgagctcccaacgatcttgccagtccacgaagggcaaatccttggcggcggcgcaccagcagttggagctgatgctttcgaagatcgagcgtgtcaccgattatcagccgccgccgacgcctgcagcgcaattcaagcgaaggggcagtggcgtcaaggtcgccaagggagtgagccgccagatggcgcacccacctccagtgccagctggaacgccaatgctcagcgcccgtagaaacaagaacatcgccatgagaacagatggcggaggcggtgctgaattggaggaggatcgcaatggggatggagaaggcgatgggtttgggcatggagaaggggatcacattgacactgccataccacttgtccagaatccgcagtgtctgccgccagcaaagcgggatgcactaatgcagctcctgcagcggaccgagcagcacgacaagggcatcgtggatatggtggccaccaccggagactccaaccgggacgccatgctcatgctgctccagatgatgtgagtatacacatttgagtcttaaaaaccctttattaccggaaacttttagtaactattctacatagagtatattaaaaatggtagagaagttttagaatttacccttttcagttacggttgtaaaattgattcggttatttcggttgaaacggtataatggctacggtttcgcttggctacccaggtggcagcaatatttgaaaataataatcaaataatgttcctccagatgctgtaggtgccccaaacagctgaggtactgagtatagcatctagaaatatttaaaaactttgtagctgtcgcaaatacgccacaattttgatatgtaaagtatgataagcttaacattacaatttctttataaattaacatagtcttattttagaagcgaaacattttatggtatagcagaattcttcaaatactaatgtttccttaaagatttttgttgcaacaaatttaatttttttaataatgtgcaatcatccttagtggtgctatttgacttacctttattgttgacgaggtggcgacgtttggggcgctgcgactgcgccgcggcagaggcaatggcagcgccagaatgatgtcatcgccggtcgtcagctgagagagagtgtgggggagagtgcgaaagagatgggagggagggggagtttgtggggaatggcgagagtgggagagtgggagtcagctggcaatgctcctccgctgacgccatctgctctgtcggcgccgctgctgatgctctgcccgcgtggagttactcataaacacacacacactaatgcaccttagccggcgtctaaatcaacaaaaccaacaacaacagctaaagaagaactaaaacaggagcaataagaacaacaacaacaacaagggccaccaggttgttttggtatttgttttgatttcctttgttgttgtagttcaagacctctctctttctcactctcttttcttttgacccttttttgtgggtttaaacttactcgacagtcccagtaccctgtatttaatttaaaagttgaaaaaggtattcaaatcaatcaaactatgatattttaaacgcaattcgaatttaatttagcttaacgtgtctatttatataaaagtttaatgacttaaaaacttttatggacaatttgttgattctaatttgattattttcgcgtattttttattattcacttatcaattttattgcactccaaacagtgccataaagtaaaaattggcaacggcataataagcaataatat

SEQ ID NO: 29846 - DNA, 1170 bp, DROSOPHILA
atggaattggatatggatatgacggggccggagcagctgctgccgtcactgccggcgtcctcgacgcgtcagttggtgcgcaggcgcactggtcacgcagcggagagttcgagggtccagcggtgcaggaccaccattaccgcccacgcacacgcacccgccacccaatccgcatctaccggcaagcggagccggctcccggcctccagttccggaaacatagccgtggtgcgaccaggtagcaatgacaaccgagtgcggcaggatcgaaagaatccacgggagtcatccgtaagaccaacgcggcaagttctctccgccagggttcttgctcactccaatccttatacggttaagcagccgcccaaggagcggcgttctgggacccagcgaacgcgtaaccagcagcaccccactctggccacctcccgatcgggattcggtggccactgcactggtcctccagcgccggccactctgcgtagagctgctccactgccgcctgccagccagatgcgtccatgtctgcgctcggtccgcgccaaggtcgactcgcacctgtgtccccatctttccaatcgccaacgtccgacccccaagaaccctgaacatgcccagccgagctcccaacgatcttgccagtccacgaagggcaaatccttggcggcggcgcaccagcagttggagctgatgctttcgaagatcgagcgtgtcaccgattatcagccgccgccgacgcctgcagcgcaattcaagcgaaggggcagtggcgtcaaggtcgccaagggagtgagccgccagatggcgcacccacctccagtgccagctggaacgccaatgctcagcgcccgtagaaacaagaacatcgccatgagaacagatggcggaggcggtgctgaattggaggaggatcgcaatggggatggagaaggcgatgggtttgggcatggagaaggggatcacattgacactgccataccacttgtccagaatccgcagtgtctgccgccagcaaagcgggatgcactaatgcagctcctgcagcggaccgagcagcacgacaagggcatcgtggatatggtggccaccaccggagactccaaccgggacgccatgctcatgctgctccagatgatatgctgtaggtgccccaaacagctgaggtactga

SEQ ID NO: 29847 - protein, 389 aa, DROSOPHILA
MELDMDMTGPEQLLPSLPASSTRQLVRRRTGHAAESSRVQRCRTTITAHAHAPATQSASTGKRSRLPASSSGNIAVVRPGSNDNRVRQDRKNPRESSVRPTRQVLSARVLAHSNPYTVKQPPKERRSGTQRTRNQQHPTLATSRSGFGGHCTGPPAPATLRRAAPLPPASQMRPCLRSVRAKVDSHLCPHLSNRQRPTPKNPEHAQPSSQRSCQSTKGKSLAAAHQQLELMLSKIERVTDYQPPPTPAAQFKRRGSGVKVAKGVSRQMAHPPPVPAGTPMLSARRNKNIAMRTDGGGGAELEEDRNGDGEGDGFGHGEGDHIDTAIPLVQNPQCLPPAKRDALMQLLQRTEQHDKGIVDMVATTGDSNRDAMLMLLQMICCRCPKQLRY

SEQ ID NO: 29848 - DNA, 2884 bp, DROSOPHILA
acgtacatcctgccatcgaagatggcgtcgcaggcgatcaaggtgaatgtctgcgaggcgcagaatgccagttccctttcggcgtacgaattcatggagcaatatggcacagtggagccagagccagtcgtgcccttcttccttgaggacagcgatctggagcacgagtatgcggatcgtcagggctatatgcgctatgtggagcccaagccacagtatacgtccagtgattccgatgaggatcatcgggccgggaataccacgcacccggtttttgtggagatggaaaggcgaccccatcggctcagcttgcttaagagtcttgcgcccatgagatacacatcgcagaagtcggaggagacactacgcacccagggtcaggaaacccaggtgccaccatcggagctgtccaatgcaccaccagcatccaggcggggcaaccaaaggacgtcagtagttgatgctggtccgaagactagcaagcctcgcaggactaatgtcttggccacgggctatcaaaagaatgctcccaatccaaggacacggcgcaccttgagagcgggtggtggagatgagcctgctgccgtgccacaaagctcacaacatccagctaatccgccgaatcttccaaatcctccgaaggaagtagtaaccgcacccgaaaggctaaacagacggcgcaaacccaaacccatggtggtctacagcaaatccctggaggatctaaagttcgaaaagttggccatctacaacaagatcaccctgacccaagagcgaatcattaacgcgctggacaagctgcagaccagtctgctccaccttcaggtgcccaatagcagtgcccaggagcggcagaaacgccagcgaaatgctttcgagttctgcgtgcgcttctcgagaaacttcctctatcctttgaagggaatgatcgacgatgtgcgctacaccacggtggccagctttaacagtgccacctccaacgaggcctgccagagggtcgtctgtgtctacggcctgatgcagcagtctattcagacgtaccaaaggcaactacgctacttcctgctcgagaaggtgccgcagaaactgagcgctctcattgagatgatctacacgatgaccaactgttgcctggacaagggcatgctggatcgccaggatcctgtcgttgagtgcctgcaagaacggtgcacccgattccttagcttcatcgaggacatgcaggaggagcgcttcaagttggcccgcgaggcgatgcggcgcctacagaagggtcactcacagggtaataaccatcagagtgtccagaaacatagcaagaagagatccgcaaagcccccgagggcacccactcagcccaggcaggagaagctacgatcgcacgagcggtacgatctcaagatgtgcctgaatgaccggaagctctacgagccgcgtctggtgcccaaggagcgtcagcagccggagaagcgacccctacgaatgcgtcgtcccagaaacactcaaaatgtagccaccactctagggaatcctggtgagcatgctaatggacagatagaacagccctgtgacatggatatgcaatcccttggacccgacgatatgcaaacccagattcagatgaccgccgatgttggcaccagcagttcggtgagcctaatgcccactgtgacttatcagcgtgctcaccctttcgaggacggccaggtggagagatcaaagccaccgtcccgagatgagcaactgcgtcgcgttttgctggatgcctttcacatggtatcccgttcgcaggtgaaacaggtgcttgatccactcatgcgatcgctgggcgttatactcgctgaaaagacagcaaaggcaggaggtgtacaccaggagcagtagatcctccaagcatcgatcattttatccatctggctgtcgtctaaattgctcattttccaaaattgtttaattattattcactagttccgcttgtgtcggtcaaatgcgagactaaattgttaagtattgttcgtgcaaataaaatgctaacttcgaacgaattaattaatttatttaattttttaatatatgtacataattcgatctatgaaccagaaaaatgcaatcagtgcttgtttgtattttgtttatttgtaagagatatcaacaatgattcaaagattatttttttatataccatttatcagatatttttgtgcaagtggagaatcgtagtgggtggcgtggttgtgggcgtggctctgggcgtgggcgtggtcgtgtgagtgagtgagatagcaaaagagaaatgtaattaatttaagcattaacaatccatctacgcccaccaacagctccacaccatttgaatgcacttctcgtgttcctgtaaaatttaaaaacggaattttccaaattttccaaatttcccaaattttccattttcacatccacgaccttgctgctgttgctgcgttccccggcgattggatcaacaaattggattactacaaataccataagaatagataatatacatggatagcgatgtgaaatggttgcgttccggattctttaatcggagcaggccttgcacaacggttggttatcctccacgacaaaggaactggccgtgatgggtgttttgcatttctgaaatcatagatattaacgtaaccaattatacactcctcgttcgattagcagtattagtagtaaaaggaggttatatatgtacataccttgcacttgaagcactcccgatgccacttggcgtcgagggccacgatcgcgttctccgtaatgggagctttgcaattgccgcagcgggcggcgaacatatgctcgaagtctgtccggcagtagggaagcccatcgtgctcgtagaaggaggagcccg

SEQ ID NO: 29849 - DNA, 1863 bp, DROSOPHILA
atggcgtcgcaggcgatcaaggtgaatgtctgcgaggcgcagaatgccagttccctttcggcgtacgaattcatggagcaatatggcacagtggagccagagccagtcgtgcccttcttccttgaggacagcgatctggagcacgagtatgcggatcgtcagggctatatgcgctatgtggagcccaagccacagtatacgtccagtgattccgatgaggatcatcgggccgggaataccacgcacccggtttttgtggagatggaaaggcgaccccatcggctcagcttgcttaagagtcttgcgcccatgagatacacatcgcagaagtcggaggagacactacgcacccagggtcaggaaacccaggtgccaccatcggagctgtccaatgcaccaccagcatccaggcggggcaaccaaaggacgtcagtagttgatgctggtccgaagactagcaagcctcgcaggactaatgtcttggccacgggctatcaaaagaatgctcccaatccaaggacacggcgcaccttgagagcgggtggtggagatgagcctgctgccgtgccacaaagctcacaacatccagctaatccgccgaatcttccaaatcctccgaaggaagtagtaaccgcacccgaaaggctaaacagacggcgcaaacccaaacccatggtggtctacagcaaatccctggaggatctaaagttcgaaaagttggccatctacaacaagatcaccctgacccaagagcgaatcattaacgcgctggacaagctgcagaccagtctgctccaccttcaggtgcccaatagcagtgcccaggagcggcagaaacgccagcgaaatgctttcgagttctgcgtgcgcttctcgagaaacttcctctatcctttgaagggaatgatcgacgatgtgcgctacaccacggtggccagctttaacagtgccacctccaacgaggcctgccagagggtcgtctgtgtctacggcctgatgcagcagtctattcagacgtaccaaaggcaactacgctacttcctgctcgagaaggtgccgcagaaactgagcgctctcattgagatgatctacacgatgaccaactgttgcctggacaagggcatgctggatcgccaggatcctgtcgttgagtgcctgcaagaacggtgcacccgattccttagcttcatcgaggacatgcaggaggagcgcttcaagttggcccgcgaggcgatgcggcgcctacagaagggtcactcacagggtaataaccatcagagtgtccagaaacatagcaagaagagatccgcaaagcccccgagggcacccactcagcccaggcaggagaagctacgatcgcacgagcggtacgatctcaagatgtgcctgaatgaccggaagctctacgagccgcgtctggtgcccaaggagcgtcagcagccggagaagcgacccctacgaatgcgtcgtcccagaaacactcaaaatgtagccaccactctagggaatcctggtgagcatgctaatggacagatagaacagccctgtgacatggatatgcaatcccttggacccgacgatatgcaaacccagattcagatgaccgccgatgttggcaccagcagttcggtgagcctaatgcccactgtgacttatcagcgtgctcaccctttcgaggacggccaggtggagagatcaaagccaccgtcccgagatgagcaactgcgtcgcgttttgctggatgcctttcacatggtatcccgttcgcaggtgaaacaggtgcttgatccactcatgcgatcgctgggcgttatactcgctgaaaagacagcaaaggcaggaggtgtacaccaggagcagtag

SEQ ID NO: 29850 - protein, 620 aa, DROSOPHILA
MASQAIKVNVCEAQNASSLSAYEFMEQYGTVEPEPVVPFFLEDSDLEHEYADRQGYMRYVEPKPQYTSSDSDEDHRAGNTTHPVFVEMERRPHRLSLLKSLAPMRYTSQKSEETLRTQGQETQVPPSELSNAPPASRRGNQRTSVVDAGPKTSKPRRTNVLATGYQKNAPNPRTRRTLRAGGGDEPAAVPQSSQHPANPPNLPNPPKEVVTAPERLNRRRKPKPMVVYSKSLEDLKFEKLAIYNKITLTQERIINALDKLQTSLLHLQVPNSSAQERQKRQRNAFEFCVRFSRNFLYPLKGMIDDVRYTTVASFNSATSNEACQRVVCVYGLMQQSIQTYQRQLRYFLLEKVPQKLSALIEMIYTMTNCCLDKGMLDRQDPVVECLQERCTRFLSFIEDMQEERFKLAREAMRRLQKGHSQGNNHQSVQKHSKKRSAKPPRAPTQPRQEKLRSHERYDLKMCLNDRKLYEPRLVPKERQQPEKRPLRMRRPRNTQNVATTLGNPGEHANGQIEQPCDMDMQSLGPDDMQTQIQMTADVGTSSSVSLMPTVTYQRAHPFEDGQVERSKPPSRDEQLRRVLLDAFHMVSRSQVKQVLDPLMRSLGVILAEKTAKAGGVHQEQ

SEQ ID NO: 29851 - DNA, 1823 bp, DROSOPHILA
aaaattaaattgagtaaaattaaaatattgattacatttttgttattactttttgtttatctaaagcttattctttaaaaaaaaaactgattttctttgtgctttaacaaatcttaccaaaaagttgacaaataatacccttaaatacaatgacctttgctggcaaaaggtttattattaaaaatataatggttgcttgtaacaataatgtagaaagggaatcaaatcctaatctctgtgcacctacgtataacatcttgttgacttcgcagcgcttggagggcattgggcccatgggtcccggcggagtgccagtgggtggtgtagtgggtcccggtgggctataccgccccattccgtcgccgcagcattaccgcccacctgtaccgccctacgcgggcgccgcctccagcgatagtggcatattctcgaccatcagcaatggtttaaacagcctgtactcaaatatattcggctaaggaacggcgatttcgaggatcttcattaaggatttttttattttcttttaagcatgcctagaacttaagttacaaccttcgacgtactatttattgtgaacaggaagagatgggaatggatagacccaaataaagcgttcaaccagtgcaatctattctataagataattgttttttcctttttactgaatagaacttaagctgggaacattcacaattctttaaaacttagcagctcgacaaaagcagtcagattttatgcttagctaaatggcaagctgtagactttggaaaactaggtcgatcagaacgttcattcaaaaactatcaacagaagtcttatctcagaccttttcttacaatttttttgtttttattttggaaaaaacgttcagagcaaaattctattcggttttaaggttcctcgaaaataagaaaacccactgagatatagatgcaacaattgtgaaaaaatagaaaaaacgctaacacttaacagacgtataagaagtacaaagaagatgagctatcaagatatgttcggatgcaatttcgattcacaatcggctggtcgaggaagcaactttgagtttcgggtaagattgatgcagtaatataaatgtttctaaagcaaatggtaacccaactaattggttacttggttacctagttctctggaccggaatccattccgaatgcggtaaggcgttataatgccatgcgaggtgccgaattggctcaaatgaagcggcagcgggaaatgggcagatcccatgtgcccagcatgccgcgattctgtaaggttcgtcgtccgggtcaggatgtgaccagcatggtgacctcacgcgatttggatgtggttacccagctgtccctcgattccgatcccatctgcaatgatgataatgataataatgatgacaatgatgatgaagagtatgttggtagtgagccaaacgactttcagtaccaaacaaaaccttcgcctcgtctttgtggtggttccgaatcaccaagaattgtaaagagtaaattcaagggtcgaaaaaagcagactcgcacgagccgaaagaagaatcatcatgggcaggtcatgcagcagggtcatacctacgaaagattggaggaactgcatcgcgaggtctgcgctgagctccagacattgggagagtctaatccagttagtcccgatgccactccgcgtcccaaaatgttggccaaacagcaaagaactcggacgaagaagcagaggaagacacaggattcgtgggtagatgtagatggttcgccggcccatctgggacaagtatccttcgaggactatcataagccgcagcccaactg

SEQ ID NO: 29852 - DNA, 666 bp, DROSOPHILA
atgagctatcaagatatgttcggatgcaatttcgattcacaatcggctggtcgaggaagcaactttgagtttcggttctctggaccggaatccattccgaatgcggtaaggcgttataatgccatgcgaggtgccgaattggctcaaatgaagcggcagcgggaaatgggcagatcccatgtgcccagcatgccgcgattctgtaaggttcgtcgtccgggtcaggatgtgaccagcatggtgacctcacgcgatttggatgtggttacccagctgtccctcgattccgatcccatctgcaatgatgataatgataataatgatgacaatgatgatgaagagtatgttggtagtgagccaaacgactttcagtaccaaacaaaaccttcgcctcgtctttgtggtggttccgaatcaccaagaattgtaaagagtaaattcaagggtcgaaaaaagcagactcgcacgagccgaaagaagaatcatcatgggcaggtcatgcagcagggtcatacctacgaaagattggaggaactgcatcgcgaggtctgcgctgagctccagacattgggagagtctaatccagttagtcccgatgccactccgcgtcccaaaatatggttcgccggcccatctgggacaagtatccttcgaggactatcataa

SEQ ID NO: 29853 - protein, 221 aa, DROSOPHILA
MSYQDMFGCNFDSQSAGRGSNFEFRFSGPESIPNAVRRYNAMRGAELAQMKRQREMGRSHVPSMPRFCKVRRPGQDVTSMVTSRDLDVVTQLSLDSDPICNDDNDNNDDNDDEEYVGSEPNDFQYQTKPSPRLCGGSESPRIVKSKFKGRKKQTRTSRKKNHHGQVMQQGHTYERLEELHREVCAELQTLGESNPVSPDATPRPKIWFAGPSGTSILRGLS

SEQ ID NO: 29854 - DNA, 2405 bp, DROSOPHILA
accacgcaggcgaaacccatgtaactggatgagctgaagtacatgcagctggcgaggccattgaacaaggtctcctggaataagagcaatcaccatatcgttagatcagaaaaaattaaaattaaaatgcatccttcaatttgaattgaattttgtgttcgagcaagttagtagagaatctattcttcacttggaaaagcgctccaagtcaacctacgaatagtgactgccgaatgagactgtaggatttgtcggagaaggcgtagcacagtagcaggatgccagtggtggtgaagcagtggccggttgtggccaggaagctggttagcgcctggccaatggaatcggcgtatggtacgccgtagcggatgagcagtccctcgcagagcatggccaggcccagttgcatcagcttcaggaggccgatccgcgacagaacgaacccgaaattgatgcaggtgcagacgcgacaacagcatatccgaatgcccagcggctggcccattcctcgaactccaaacgaggccatggtctgattgcaactgatccggcgatgcagcgactccgctttgttgtatgttgtcgtagtgccagccaaccaggttctataaatagctgccgatacacatggaccccaagtggtgcatttccttgcatttccagcgacgtggcaacaaatccaccccaatctccagctaaatttagaacagcaattcacaatgggcgaggatttgtctatgcggaaggtatcttccttaaatatccgatttaatttctctgaaactacatgatatatatgttaaaatattgatacaacttggatatcaaccttttcaccttttaatttgatccatttacccaagtgtttgctatcctacgttcagtttgattttcgatgccatccaaattctagtcgccaattcgaatcgttccaaaaaaaaaaaacgttaagcataattccccaaatttcgagctcacgcgaacgtgaaccactgccaggatgtgcatgccgtatttgagtaagctcttcggtggaggcgatcgccggcagcgtcgcacccgcgatggaggcgtcaccccactgcccagcctggccaatgtgacccaggtctccatggacaccgtcaagtccgccaagtcagcgaagtcagcgaagtcggctaaatccggcaagtccgccggtcgccgtagtaccaccgctgccaatcctcctgagtccagtgtcagcagcaatgaggataatgcggagcaacctctggcgaccgcctcccgaggagctgtgcgcaacgccaccgcctcgatggccaccagtgctgctccagccgacgaggcgaggtcgcgccgctcctggtggggatactttggcatgagcaagaacaagaagtccagcattgagtcgctctagactgccaaggatcgggattgcagcgaattgcaatgcatatattcaataggagttgatggtcatcgaaatttggcttgcagtagtcccctatacacttatcaaaaatcttttgcttttttcgctttcaagatattagttaaataaaaatgttccatttcgaacctttggaacaccaaaagttcttaagtttctatatggtaattatggcaacctattatagcattttaaaacgttctctcaactacaataatttattttaataatagttttcaaaaattcgtgttaggcttccagatctcgtcaaactgtcagtacatttaaaatagataaatttttagatgagataatgaaactgggggaatcctgcaaaacatgaataatctaaactgaaataaagttgccaactaaattggtcaataaatcagggaagttatggccaagttatatgtatgtatgtacatatgtactttcactttccccgtcgatctctacgcccctgagctttctttgtgcccgctctgttctccgatttctttagccgatcggttggcgctctagaagatcgtgttgtgtccgggaagggggcgtggcaggggcagggacaggagcgggatgcaaacaaagctcaaacgtcggcaccgccagcgattagtgtaatttatcagtcgcagcggcaatttatgtggctaagcccgatcggtgggattatatacattcatatatctatatagatgtacatgtttgtgggattgtttgttgtgtgtgggggggtggggggtgtggtgctcgtgcgggggtggatgctttttgacaataaaataatgtggctgttatcacaagtaattgttgctgccggcagttgttattgttgctcctaccgctattgttgtgcgctgtcgcttgcgtcaatgggcggctacactgcgagaaattggggctaagcgaaaggcaatttatgtaaaaatataccaataataataagattacaaataagacaata

SEQ ID NO: 29855 - DNA, 405 bp, DROSOPHILA
atgtgcatgccgtatttgagtaagctcttcggtggaggcgatcgccggcagcgtcgcacccgcgatggaggcgtcaccccactgcccagcctggccaatgtgacccaggtctccatggacaccgtcaagtccgccaagtcagcgaagtcagcgaagtcggctaaatccggcaagtccgccggtcgccgtagtaccaccgctgccaatcctcctgagtccagtgtcagcagcaatgaggataatgcggagcaacctctggcgaccgcctcccgaggagctgtgcgcaacgccaccgcctcgatggccaccagtgctgctccagccgacgaggcgaggtcgcgccgctcctggtggggatactttggcatgagcaagaacaagaagtccagcattgagtcgctctag

SEQ ID NO: 29856 - protein, 134 aa, DROSOPHILA
MCMPYLSKLFGGGDRRQRRTRDGGVTPLPSLANVTQVSMDTVKSAKSAKSAKSAKSGKSAGRRSTTAANPPESSVSSNEDNAEQPLATASRGAVRNATASMATSAAPADEARSRRSWWGYFGMSKNKKSSIESL

SEQ ID NO: 29857 - DNA, 2748 bp, DROSOPHILA
ccagttgatgatgcaactgctggtcttccagctgctgtgcatcgcccaggagattggtataccgctgctggcggtgctgcgccagaagtacgccgagttccgtcatcgcgaggtggccgaggagaagctgcgatccatcagtgatctgccgcgctacgagcaatcgttctacgaatccggactagatgaatatcattccacgtacgaggactacctgcaggtatgcatccagtttggattcgtggtcctgtttgccgccgttgccccatttgccgccattggagctctgctgaacaacgtctttgcggtgcacattgatatgtggaagctgtgcaacatctttaagcgaccatttgcaaggcgcgccaagaacatcggcgcctggcagctggccttcgagctgctctcagtgatgtcgttgcttagcaactgcggtctgctcttccttcagccgaatgtcaagtgagttttggcctttttctgactttcttactgataatcatcctttttttaatccatcagggacttcttctctcactggctgccatcggtgccggatctttcgttcgtaatcttcgaacacttgctgctgggcctgaagtttctcatccacaaggttattcacgaaaggccgcgctgggtgcgcatcggactgctaaaggcggacttcgagaccagccaggctctcaagcaactcaagtgggtgtaaaacgaattcaatggagaaacaataaaacatctaacgaactatgtacttgcagaaaattcaaggcggaggccaacaagatggcctgatgggccacaagatcgccggatctcccactccactccttttggtgctaatgaaaccagtccattttaaatgttattatttataaacatacgactaatcgcgtttaccgcgaatgttcgagaccaacggaagtaaggtgccttaaacctaaaactcatataaatatgtccacagagtacttaagatactgcttttgtctggccgggattagcgtgcgcctcggaagtgccggaacgccaagtaggcatccagggcatgcaatattcccgctgcatagcccatgtactgaaagttaaggagtttaaagggatttttggttaaatataggcatattttttatttaaatcagcagtacttacatagcaggctgtcatggccggatatgcccagaatccgggtcgcaccaggaactgcggatgtagccataccacgcaggcgaaacccatgtaactggatgagctgaagtacatgcagctggcgaggccattgaacaaggtctcctggaataagagcaatcaccatatcgttagatcagaaaaaattaaaattaaaatgcatccttcaatttgaattgaattttgtgttcgagcaagttagtagagaatctattcttcacttggaaaagcgctccaagtcaacctacgaatagtgactgccgaatgagactgtaggatttgtcggagaaggcgtagcacagtagcaggatgccagtggtggtgaagcagtggccggttgtggccaggaagctggttagcgcctggccaatggaatcggcgtatggtacgccgtagcggatgagcagtccctcgcagagcatggccaggcccagttgcatcagcttcaggaggccgatccgcgacagaacgaacccgaaattgatgcaggtgcagacgcgacaacagcatatccgaatgcccagcggctggcccattcctcgaactccaaacgaggccatggtctgattgcaactgatccggcgatgcagcgactccgctttgttgtatgttgtcgtagtgccagccaaccaggttctataaatagctgccgatacacatggaccccaagtggtgcatttccttgcatttccagcgacgtggcaacaaatccaccccaatctccagctaaatttagaacagcaattcacaatgggcgaggatttgtctatgcggaaggtatcttccttaaatatccgatttaatttctctgaaactacatgatatatatgttaaaatattgatacaacttggatatcaaccttttcaccttttaatttgatccatttacccaagtgtttgctatcctacgttcagtttgattttcgatgccatccaaattctagtcgccaattcgaatcgttccaaaaaaaaaaaacgttaagcataattccccaaatttcgagctcacgcgaacgtgaaccactgccaggatgtgcatgccgtatttgagtaagctcttcggtggaggcgatcgccggcagcgtcgcacccgcgatggaggcgtcaccccactgcccagcctggccaatgtgacccaggtctccatggacaccgtcaagtccgccaagtcagcgaagtcagcgaagtcggctaaatccggcaagtccgccggtcgccgtagtaccaccgctgccaatcctcctgagtccagtgtcagcagcaatgaggataatgcggagcaacctctggcgaccgcctcccgaggagctgtgcgcaacgccaccgcctcgatggccaccagtgctgctccagccgacgaggcgaggtcgcgccgctcctggtggggatactttggcatgagcaagaacaagaagtccagcattgagtcgctctagactgccaaggatcgggattgcagcgaattgcaatgcatatattcaataggagttgatggtcatcgaaatttggcttgcagtagtcccctatacacttatcaaaaatcttttgcttttttcgctt

SEQ ID NO: 29858 - DNA, 531 bp, DROSOPHILA
atggcctcgtttggagttcgaggaatgggccagccgctgggcattcggatatgctgttgtcgcgtctgcacctgcatcaatttcgggttcgttctgtcgcggatcggcctcctgaagctgatgcaactgggcctggccatgctctgcgagggactgctcatccgctacggcgtaccatacgccgattccattggccaggcgctaaccagcttcctggccacaaccggccactgcttcaccaccactggcatcctgctactgtgctacgccttctccgacaaatcctacagtctcattcggcagtcactattcgagaccttgttcaatggcctcgccagctgcatgtacttcagctcatccagttacatgggtttcgcctgcgtggtatggctacatccgcagttcctggtgcgacccggattctgggcatatccggccatgacagcctgctattacatgggctatgcagcgggaatattgcatgccctggatgcctacttggcgttccggcacttccgaggcgcacgctaa

SEQ ID NO: 29859 - protein, 176 aa, DROSOPHILA
MASFGVRGMGQPLGIRICCCRVCTCINFGFVLSRIGLLKLMQLGLAMLCEGLLIRYGVPYADSIGQALTSFLATTGHCFTTTGILLLCYAFSDKSYSLIRQSLFETLFNGLASCMYFSSSSYMGFACVVWLHPQFLVRPGFWAYPAMTACYYMGYAAGILHALDAYLAFRHFRGAR

SEQ ID NO: 29860 - DNA, 3916 bp, DROSOPHILA
ttcgattcgcatgcaaatcatgtgggggatctcatagaaaacaagcatactgtgctaatcagacgggcctttaaattccaatcatgaagccaaatcaatttaccttttggaactctccctacctccctccctccccctctccaatcatttggagaagaaacacggaataataggtgacaactggagatattccccatttggcagcttctgatggcacataaaagggttttagtgcctatcttattttagatacttttccagacacgattctccttccaatttttttttttttgttttttggtggatacaaccaacgcctaattggcaaacgtgacagataaaattcctaactaatttgaaagcatcagcagttacagtcggtttttttgtacgaaaacaagtaatatatatttacttggaaaatcttaattggtttctctgaatattatatagttcagtttacttccgcacttaacttgatataaatatattttttaaggggaaactagtttttgagtatatttccaaagtgtttgcacagcttttgagtggctgaatggatgtcttatcaaatgtccacagtgaaacctcgccaagttgcgacccatacatagactattaacgtatgtatgtatattgtttttgggaaaatgttaaaccagccctaccatatattggccttgtttcaagaattcgcactatttgtataaaccaaatcaagttttggatgccggaagagaacatttgtattcatacgatagagtcttactgaggaagtcatactgttttgccagcagagttagtgagtgagttgtcactcacaattaaccgaagaacatcgctttcaaagcagcgctgtaaacaataaaatcaaattaattatggccaaataaatcactggcatcccaactcggggggcagaattattgccctctgctgataagcgacatggcatcgcatcgcatcgcttagccgagctcctccaggcaacagccaattaatgagtgcgtcgacagcggcggcagcagaggcagcagcggtagcagaggcagcgacagtagcagaggcagcggcggtagcaatggcagcggcggtagcagaggcagcgacggtagcagtgacagcggcggctattggccaaccaatgttcgttgccgaggcggtgaagtcgagcgagaagtcgagcgggctctgcgctttttcatctgccccgctgcgcatgcgcatgcgtctgcggtttctgcaactggggcagtacggtcgaaattccgcggtgcaaaccgatttggaaaattcaagctgcacagttgaaaatttagaaaattcgaaatctatatttgcgaaatttcaacatttcaatcagatcagttcaaaattgcaagttttaattattaaatctttttacataaataagcggttttaagcaatcaaaaaaaatcataatttattgcataaaaagctcagcttaataatgattctttttggttttggatagagcacacaaattataaacagatgcgtaccatgtttttattttgttttgcttatcaaacccaaagatcatttgtagcgacgctccactgtatttcgatcaattagtgtttgatcactgcagttagctaactgcatttacacagatgtttcacggcctcctcttatttttacccaacttgtgcaccgaaaaaaaaatatgatcactttgaatttaaacttttgaacgtaatataattgcagcatcgtctgctgcagtgctattaaatatactcatttatttatttgttaaatgagacattattggttttctcttataattcattccagaacatggacttgaaaatggagctgggcggctacgtgcactccgcacccaacaccaagcgcttcgttgtggaggactcgagtgagtgagatggccagggggtttccccgaggcggggggaaaggggttctgccttccggtttagaaagttgaggaagtgcgtcggcctgcctgccagcggcagttaaataaacctgctgcccgccgttccacgcattttaaatcgactcagatcggattgcgttcagagatcgccgtcaagttgaagttcaaagcactctgaaaaataaccagtacttagctacaaggaaaaggcttaagaatttaaaatcctattacatttgaaatcttccgcattgatataatccaaaaatacatgacgtcaccatattatttatattatggaaacctccgttttggaacttactcgtacattcttgaattttgtatcaacagaggattgccttttacgaaaatcgtcaatacatttatgcatttttaaggccgtttagtgcggtgaagtcatgtctttacatatatatgtttattttttagagtttgctttagctttacagttgaccttgggtcaatttacatttcacacctgccaaattggagcagcacgtcacctccagtagtccgtcaatcaatcattcactcgctcactaaccggcggctttctctcggttttgcagttaccaaggtgacctctgatggggagccgcacggcatgatgaccatggtggccggattatccggccttttggcggccatcatcattttggccgtcctcgtgtccatggtatcttgtcgcaagcagaagaggtaacagcatacatacatacatatgcttagccaattatatagataattgcatataatattctgatttttgtcgtttaaaaaaatgcagcaccaaccggaagagcaattcctccgccaatgtggtggccatgaccagtgtggcgcaggatcagccccagttggccggtaacttgaacgcagcgttcgctgagagcactctgaccttggacaaggtcaagcaggacacagaggatcaatggcgacccacagccgtggtggtggagcggtactagtggaagcaggaagcaccaagcaccaccgtcaaccagcggcacatgggcacgtgatgtttattgtaaacgtttgagactgacacttagaataaggatttccatcaccatcttataattaatctatataacatatgacaccttatttttttttttttgcttgttaaaatattatactgctatactatgaaatatgtgaaaatatatatttgttagaattaaagggaaaaccgtaaaactgtttcacattttccagagaaagatatgatttttgcatgttttggatgcagatacaagtattatatgttcatccataaagacacaaacaattaaccgaaatggatcaaatatattcgtatgcagctgcgtacatgtgtggtataaaaaagatagtatacaaaaataatagtagagagtcaaagattgtgggttttccatgggtaaatcctctagagcgccgtattgcgtccaccaacgaccatggccagcaaggccatacggatgtacatgccgtactccgcctgccggaagtaggcggcccttgggtccgagtcgatctcccggctgatctcgttcagacgcggcagcggatgcagaacaatcgaacgcttcttggcccgcatcatatgctcgggcgtcaacaccagatggccacagcactgtcgaaggaaagcagtgggaatgagcaagtagtatagcaagtaaaattgagaccctttttaccttctcgtaatcttccacgttatcaaaacgctcgcgctgaatgcgagtcatgtagagcacatccgtgtcgggcagcacattctttaggtcgcgtgcaaataactgcttgacgccgcgctgatggacgaactggacgacctcatcgggcatctgcaggctattcggcgccacatactgcaggttcacattgtacagggtcagcaggcgggccagcgagtgcacggtccgtccgttcttcaagtcgcccaccatggtgatggtcagcccgttcacagtgcca

SEQ ID NO: 29861 - DNA, 666 bp, DROSOPHILA
atgagtgcgtcgacagcggcggcagcagaggcagcagcggtagcagaggcagcgacagtagcagaggcagcggcggtagcaatggcagcggcggtagcagaggcagcgacggtagcagtgacagcggcggctattggccaaccaatgttcgttgccgaggcggtgaagtcgagcgagaagtcgagcgggctctgcgctttttcatctgccccgctgcgcatgcgcatgcgtctgcggtttctgcaactggggcagtacggtcgaaattccgcgaacatggacttgaaaatggagctgggcggctacgtgcactccgcacccaacaccaagcgcttcgttgtggaggactcgattaccaaggtgacctctgatggggagccgcacggcatgatgaccatggtggccggattatccggccttttggcggccatcatcattttggccgtcctcgtgtccatggtatcttgtcgcaagcagaagagcaccaaccggaagagcaattcctccgccaatgtggtggccatgaccagtgtggcgcaggatcagccccagttggccggtaacttgaacgcagcgttcgctgagagcactctgaccttggacaaggtcaagcaggacacagaggatcaatggcgacccacagccgtggtggtggagcggtactag

SEQ ID NO: 29862 - protein, 221 aa, DROSOPHILA
MSASTAAAAEAAAVAEAATVAEAAAVAMAAAVAEAATVAVTAAAIGQPMFVAEAVKSSEKSSGLCAFSSAPLRMRMRLRFLQLGQYGRNSANMDLKMELGGYVHSAPNTKRFVVEDSITKVTSDGEPHGMMTMVAGLSGLLAAIIILAVLVSMVSCRKQKSTNRKSNSSANVVAMTSVAQDQPQLAGNLNAAFAESTLTLDKVKQDTEDQWRPTAVVVERY

SEQ ID NO: 29863 - DNA, 4992 bp, DROSOPHILA
ccagcgtactggatgtcaccggtcccttcaacatgcagctaattgccaagaacaacgagctgaaggtcatcgaatgcaatgtccgtgtgtcgcgatccttccccttcgtctccaagacgctggaccacgactttgtggccacggcgacgcgtgcgattgtgggactcgatgtggagccactggatgtgctccatggcgtcggcaaggtgggcgtcaaggtgccacagttcagtttctcgcggctcgcgggcgcggatgtacagctgggcgtcgagatggcctccaccggtgaggttgcctgcttcggggacaaccgctatgaggcgtatctcaaggccatgatgtccacgggcttccagatacccaagaacgccgtacttctctccattggcagtttcaaggtttgttggccactccattgattattgatattagttactccattaataactccattcatctgcagcacaagatggagctgctgccttccatacgggatctggccaagatgggttacaagctatacgcttccatgggcactggcgacttttatgccgaacacggagttaatgtgagtatatttatgtctgtgtgcttattgtatatcatgcaactttaatcaaaatccattggagatgcgagtcaacaaagttgagtagtttcaatactcatttcctactatttgttttccctgacttggtttacaaattgaacggttgtttatattgcattatttattttccatgacattggtttacaaattcaataacattattatcatagagaaattacgttgatttcaagattactaattacgaaaatatatatggcgcacatggtatggacaataattatggcccataactatatatatatttctatctctatctctaaccgcccttatcacaactggtttatctgttatcaatatatcaatatatcactaatcgccgggatttagcaatttggctactatatggtagtattatctttagtgtctctagttgaatgcgcccttgagcttctgtgcgttgcgcttgaggatctccttgagttcatcccgcttggcctcggatggggctactctttggaccagttgctccgttttgctgcccagcatttgcaccttatccgtgtcgagggagagcctttgaaggattccgtttagcgagagaaatgattcctccttggctgtttcctccgattttgatttgattcccgtttgcggcttaaggctatccacttcaggagaatctattggttctctatctctttggacattgggtttttcttctatgcgactttctatttcccgaagcaacgcgctcttgatctcctcctcctgtaggggttcaatggcgttcgcatcctcttggtggtgagctcttagaatcccattgagctgatggttttccagatggggcatatgcttctgcatggccagcggttctggagtgtgtatctgcacgacatgctcctggaacttgatggatttccttggcgctggcggagattcaaccaccgtggagggactgccgcccgatgacgttggtatatgcgattcacacatgcgttccatatcgctggctgcgttctgtagttcctggacgaagtgctgtgcctgctgcgagcaaccgaggtgctgataaaggcggcacaatctttgcccatgctccagataaagctgtgcatgtccacggttgccaaaccgaatggcacgagccaacatggccagcgaatgatccagcagaagttcgatcagattgctccttcgcaggatctccaagccgttgttcagttgcggtttcgctgcttcctggctcttggaactttccggattggagcgtgccaatagcaattggcgatccagggagtcgagcgagcaacgtctttgttccgtcgccgagatttgaaattgctgagtcgtggcccttaagagctgtgtcttcctgcgcagctttcctctcgagcgctcctggtgctgagccaatcccaagagtcccttggcatcggtgatctccgtcctttcggttttttttttcgtttccacctgctgcccgccattgttttcttcacagttctgcagagcgggaaatccctgacgtggacgcgagaacttgccccgtccgtgcagctccaggtaatcctggctaaagagattctccaacagtcgcttgtactccagttgcgggtagaattccggcgcgtgctgaagattcctcagtgcctggatgacatgcagcagcggttgttccgcaattccggccattatgctgcgcagcttcatcagcgtatcctctgggatatgctcgaatagattgcgccgctcaatgaagtagtcgctcaggtgtttcttggccaaacaggcgtcgaaggagcgaatgaatcgaaccaatcgctcgcccagaaactcctctggccaatcattgctgtgctgctcacattgccaaaacatatgggctctcagctgttcgagcaaagctcccggggattggtcacaggatgtggttgattcgtccacaaaggttttgaccagcagcttcattagttggaacaccttcaattgcatgggcgtcaggcagtgccgctcgagaaactgttccgcctggggaaagacaatgcgccattccagttccctgaagggatttcgcgaacgctttggtgcatagcccactggtacaacatggaagcccatggatcgaatacgttttttcatctgctccgttggccattggaattgttcggcagtatggaggttggtcaaacgaggacgagccctcagccaaaactcgaaggcgcaatccggccaggaattgggcacatgaatggcgggcaccagctcctcgcgagcggtatatacactacagccgcgatacgaacacgcggccagctgcgattggctgatgcccaattggttagccaaatgatgacgcagcacctctccaaagtacaacatgaactgctgcgaactgaggtagcactgctgcagttgctccacatgacactggcgaagcacctccaccgtttcatagccagccggtggatatttgcgattatcggaattcgcctcatccttctcgtcctcgtcactgctggaggcggcggaggatgactcctcgtcgtcggtttgctctagccaaggaggcagacaattggccaaacggcgaatgcaattcccaggtaggacattcctctggaaattgaaatcgcgatcaaatcgcagctcctccagcggtcgcggagtattcaacctggccaagtagacataatcgtagtcccccgaactgtagcccgaggatggggagttggatgcggaggatcccacatcaccgtagatgcattcctcatcgctgctggccggcaaagataagctggagctagtgggcgtgcccgcctgcggatgcggcaattggtcgcgcagcttgaggcgaacatagcccatccacctggtcatctccatcaagttgactagctccgaggggcagggcgtggtccggtagtagtccgtctccaggagcaccttgcacagtgccgccacggtgtcgtagttggcatcgtggggtcgcgccacgtcaacgttctcaaagaccacataggtcacgggtttctgcagcagctgtggtggactcttcgaagatctgaaatcggttataaatacatatattaaaaaccaattttaaaatgaaaaaagagaagatcataaaatgtaggcaaaaaagtatagaaaaatctagaaagtatggagagaggataaggaaaagacttacggcggcttgaagagcaggttcctggcgacagctgcatcgatggcgctactttggagcaagctgtgctcggccagcttttcggcggagcagttgcgtcgcctggccacgatttgggcatcgaccacggccatctcggcctcgaagtgcccaaagaactggatacccagaagcaattggttcagcaggaaggtgtgcagttcgcggtccaattggtgtagggtcctctgctccacggtccgctggaactcctcgcgctgctgctccaatgttctggcatacagggcactgacacattcggtggccgtgcttccattgctgccgcccagtagacgcagttgcagggcgagatcaggatggctttttccgttgatgtgtcgtctgtgaatcgatccaccacgaccgaggaaagatcctccggcgctggcagatccagatcctgcgcccttctttcggcgacgtttacgcgcgttacgcttttggagcttctgcagctggcggagatgcttctcctcttggcgccgcctcctctgttggcgctgggcgggaatgcccgcctgcagggcattgggcgtggcactggaatccacctgctcggatcgcgaccaggagcagcccatactcaacggacgatcgctgatttgtgactgaattccggctgataaagtgtacaatctgcgatcggagttcaccaatcaccaattaccaattacctgcgatctgcgatctagtaatggcaatcggaaagataagagctgaacgactcttccggccaccacctccttcggcccaattatccattatcagccagttcctggtgcttccatgaaaacggaattgatttccacttcactgtgccgcacaaacagacaaaaaactcaaggaggcgtctaaaatagatggtcttcaaaggaaatataatataaaaattgatctattgaattcttatcttaaaatagtaacttaagattttcttctgattgcactcttagttcgattgaatatatcttattaccactattcacatatcaaatgttcaaagttcgatttatttggaattattgtgtaagatcgtacatatctgcaccactgtgccattgccatggcctgttgctctattgtcttcgatgtagacatgaaagatccataaataatggtatctatatggtgtactctgggcaaacaattgattggaagtagagttggtggcgcggatgacgatgacatg

SEQ ID NO: 29864 - DNA, 3293 bp, DROSOPHILA
ccggaattcagtcacaaatcagcgatcgtccgttgagtatgggctgctcctggtcgcgatccgagcaggtggattccagtgccacgcccaatgccctgcaggcgggcattcccgcccagcgccaacagaggaggcggcgccaagaggagaagcatctccgccagctgcagaagctccaaaagcgtaacgcgcgtaaacgtcgccgaaagaagggcgcaggatctggatctgccagcgccggaggatctttcctcggtcgtggtggatcgattcacagacgacacatcaacggaaaaagccatcctgatctcgccctgcaactgcgtctactgggcggcagcaatggaagcacggccaccgaatgtgtcagtgccctgtatgccagaacattggagcagcagcgcgaggagttccagcggaccgtggagcagaggaccctacaccaattggaccgcgaactgcacaccttcctgctgaaccaattgcttctgggtatccagttctttgggcacttcgaggccgagatggccgtggtcgatgcccaaatcgtggccaggcgacgcaactgctccgccgaaaagctggccgagcacagcttgctccaaagtagcgccatcgatgcagctgtcgccaggaacctgctcttcaagccgccatcttcgaagagtccaccacagctgctgcagaaacccgtgacctatgtggtctttgagaacgttgacgtggcgcgaccccacgatgccaactacgacaccgtggcggcactgtgcaaggtgctcctggagacggactactaccggaccacgccctgcccctcggagctagtcaacttgatggagatgaccaggtggatgggctatgttcgcctcaagctgcgcgaccaattgccgcatccgcaggcgggcacgcccactagctccagcttatctttgccggccagcagcgatgaggaatgcatctacggtgatgtgggatcctccgcatccaactccccatcctcgggctacagttcgggggactacgattatgtctacttggccaggttgaatactccgcgaccgctggaggagctgcgatttgatcgcgatttcaatttccagaggaatgtcctacctgggaattgcattcgccgtttggccaattgtctgcctccttggctagagcaaaccgacgacgaggagtcatcctccgccgcctccagcagtgacgaggacgagaaggatgaggcgaattccgataatcgcaaatatccaccggctggctatgaaacggtggaggtgcttcgccagtgtcatgtggagcaactgcagcagtgctacctcagttcgcagcagttcatgttgtactttggagaggtgctgcgtcatcatttggctaaccaattgggcatcagccaatcgcagctggccgcgtgttcgtatcgcggctgtagtgtatataccgctcgcgaggagctggtgcccgccattcatgtgcccaattcctggccggattgcgccttcgagttttggctgagggctcgtcctcgtttgaccaacctccatactgccgaacaattccaatggccaacggagcagatgaaaaaacgtattcgatccatgggcttccatgttgtaccagtgggctatgcaccaaagcgttcgcgaaatcccttcagggaactggaatggcgcattgtctttccccaggcggaacagtttctcgagcggcactgcctgacgcccatgcaattgaaggtgttccaactaatgaagctgctggtcaaaacctttgtggacgaatcaaccacatcctgtgaccaatccccgggagctttgctcgaacagctgagagcccatatgttttggcaatgtgagcagcacagcaatgattggccagaggagtttctgggcgagcgattggttcgattcattcgctccttcgacgcctgtttggccaagaaacacctgagcgactacttcattgagcggcgcaatctattcgagcatatcccagaggatacgctgatgaagctgcgcagcataatggccggaattgcggaacaaccgctgctgcatgtcatccaggcactgaggaatcttcagcacgcgccggaattctacccgcaactggagtacaagcgactgttggagaatctctttagccaggattacctggagctgcacggacggggcaagttctcgcgtccacgtcagggatttcccgctctgcagaactgtgaagaaaacaatggcgggcagcaggtggaaacgaaaaaaaaaaccgaaaggacggagatcaccgatgccaagggactcttgggattggctcagcaccaggagcgctcgagaggaaagctgcgcaggaagacacagctcttaagggccacgactcagcaatttcaaatctcggcgacggaacaaagacgttgctcgctcgactccctggatcgccaattgctattggcacgctccaatccggaaagttccaagagccaggaagcagcgaaaccgcaactgaacaacggcttggagatcctgcgaaggagcaatctgatcgaacttctgctggatcattcgctggccatgttggctcgtgccattcggtttggcaaccgtggacatgcacagctttatctggagcatgggcaaagattgtgccgcctttatcagcacctcggttgctcgcagcaggcacagcacttcgtccaggaactacagaacgcagccagcgatatggaacgcatgtgtgaatcgcatataccaacgtcatcgggcggcagtccctccacggtggttgaatctccgccagcgccaaggaaatccatcaagttccaggagcatgtcgtgcagatacacactccagaaccgctggccatgcagaagcatatgccccatctggaaaaccatcagctcaatgggattctaagagctcaccaccaagaggatgcgaacgccattgaacccctacaggaggaggagatcaagagcgcgttgcttcgggaaatagaaagtcgcatagaagaaaaacccaatgtccaaagagatagagaaccaatagattctcctgaagtggatagccttaagccgcaaacgggaatcaaatcaaaatcggaggaaacagccaaggaggaatcatttctctcgctaaacggaatccttcaaaggctctccctcgacacggataaggtgcaaatgctgggcagcaaaacggagcaactggtccaaagagtagccccatccgaggccaagcgggatgaactcaaggagatcctcaagcgcaacgcacagaagctcaagggcgcattcaactag

SEQ ID NO: 29865 - protein, 1084 aa, DROSOPHILA
MGCSWSRSEQVDSSATPNALQAGIPAQRQQRRRRQEEKHLRQLQKLQKRNARKRRRKKGAGSGSASAGGSFLGRGGSIHRRHINGKSHPDLALQLRLLGGSNGSTATECVSALYARTLEQQREEFQRTVEQRTLHQLDRELHTFLLNQLLLGIQFFGHFEAEMAVVDAQIVARRRNCSAEKLAEHSLLQSSAIDAAVARNLLFKPPSSKSPPQLLQKPVTYVVFENVDVARPHDANYDTVAALCKVLLETDYYRTTPCPSELVNLMEMTRWMGYVRLKLRDQLPHPQAGTPTSSSLSLPASSDEECIYGDVGSSASNSPSSGYSSGDYDYVYLARLNTPRPLEELRFDRDFNFQRNVLPGNCIRRLANCLPPWLEQTDDEESSSAASSSDEDEKDEANSDNRKYPPAGYETVEVLRQCHVEQLQQCYLSSQQFMLYFGEVLRHHLANQLGISQSQLAACSYRGCSVYTAREELVPAIHVPNSWPDCAFEFWLRARPRLTNLHTAEQFQWPTEQMKKRIRSMGFHVVPVGYAPKRSRNPFRELEWRIVFPQAEQFLERHCLTPMQLKVFQLMKLLVKTFVDESTTSCDQSPGALLEQLRAHMFWQCEQHSNDWPEEFLGERLVRFIRSFDACLAKKHLSDYFIERRNLFEHIPEDTLMKLRSIMAGIAEQPLLHVIQALRNLQHAPEFYPQLEYKRLLENLFSQDYLELHGRGKFSRPRQGFPALQNCEENNGGQQVETKKKTERTEITDAKGLLGLAQHQERSRGKLRRKTQLLRATTQQFQISATEQRRCSLDSLDRQLLLARSNPESSKSQEAAKPQLNNGLEILRRSNLIELLLDHSLAMLARAIRFGNRGHAQLYLEHGQRLCRLYQHLGCSQQAQHFVQELQNAASDMERMCESHIPTSSGGSPSTVVESPPAPRKSIKFQEHVVQIHTPEPLAMQKHMPHLENHQLNGILRAHHQEDANAIEPLQEEEIKSALLREIESRIEEKPNVQRDREPIDSPEVDSLKPQTGIKSKSEETAKEESFLSLNGILQRLSLDTDKVQMLGSKTEQLVQRVAPSEAKRDELKEILKRNAQKLKGAFN

SEQ ID NO: 29866 - DNA, 2225 bp, DROSOPHILA
ggcccgcggtatcggtgaagttcttctcgcgccaggagaacatctgccgcccattcagaccgtagttccactcgtccgttatggtcgtgtagatgtactcgcgatcggagcgactcagcaggcagaatccctgcggatcgaagagcaagtctagaacgggcggcagacgttggctcagtgcctccactcgcttctggagatccgcatcgacgctggcgtacatgtgatggctccggatcttgctgaccatgtgcgcgacgttgaacaggtacgcctcgctgctgtcctgcatggcctgatagcgccagaagagcgccaattgcgcctcgatcatcgtgcgaaagctgacctcgtcgcgatccgcgtacagttgctccagctgctgcaccagcttctccagcggtcgatggaagtacacgtcctcgatggcgtgcaccagaatgtccctgaccagggcgggctccacactggccgctatgtacataccgtatgtctgaatgctctcctcggcgttcaacagattggccagccgctgggccatgagggtccgcaggtggcgtcgcacctcctgctgcagctcgcaggcagatcgacccgtggagccgctactgcactgcacatcgtcgcgaatatatccgcccagctgactgtacaggcccttcaccttgtccgtatcggtggcgaagtcggagcgaatggcgccccagatgctgtggaatacctgcaatttgtcatcgcgactggcacttcgccgtatggtaatctaagatataaaccgtgtgttatttgttttatatttgagtgtaactcggtgatctatcacacttgactgttgtccaaatcgagttgcaggggcagaacctcgcccacaacgagtggaatagtacatagaagcaactggagcagctggatcatcttgctggccgcttgtgtttgctaactggtcaagctgagagtgtgattggaaagccattattggctatcgccaaacggcatgaggtcagtccaggtccatcttgatttgcttggcctggtcgtcgctcttattctctgcatgcgctcgtttctgtcccactatgacaaccgacttgatgcgctccgctagctgctctatttcaatgggattgaaattgggatcgggacttggattgcgcggcttgcgctctctttttggcttgggaactatgtaattgcggtagatatcctccagacgatccagcggcatatccttgccatcgcccagaaatattcgcctctgaaattgttttttaaaatatttaagccaagtcttaattcaaataaacaaatcactttttcgagctgttccaacatatctgctcgagataggcccaggtccatttcttttatatcatttttgttctccataataaaacggtccccatcggcgtatttaaacaaatttaatatgacttctgaaatttcaacacaactttcgataacacgaggcggtatatgtcaaaaccaaacattattccatagctatcgggaatcgatagtttagcattcaataccgtaaccgtagtatgaccgtaacgatattcaacagaatgcatttgcgaagcgatacggttggtgagaccaatagatgtggccatgtaatgtgaaactttacaacactttcggcggtatatttgaatttctaaattgaaattctacatctatcatccatttttaaatcgaatattaaataaaagaaatacccattttattttaaaagctttatatgctgcattttgtaccaattacatatcaaatcaaaaaatctaagatttcagcactataatctaaaaaacattactttaactgcgccttttttaaaaggttaattttatcttgaatttcagtttcgaaatgaaaaactttcccgtgctgattcattccgtaggcaaatcgacttaatcacaatattgggtcagtaacatagccaatatgcaagctcagcgattttctcgcatcacacttcgtttatttattttgctatttgcagacgtgatgacggtgttattgaatggaatacgccggcgtatttgaaatgtttaactggtttttctccctcttaaaggtcgattgcaccacaaactgtaaatataagccacacctgagcaacgtggaatccaaattaaaattagttttcatactaattattagcaccaaagacgtgacaagaaggcagaatacttcaaatcgactataatcatgcattc

SEQ ID NO: 29867 - DNA, 225 bp, DROSOPHILA
atgccgctggatcgtctggaggatatctaccgcaattacatagttcccaagccaaaaagagagcgcaagccgcgcaatccaagtcccgatcccaatttcaatcccattgaaatagagcagctagcggagcgcatcaagtcggttgtcatagtgggacagaaacgagcgcatgcagagaataagagcgacgaccaggccaagcaaatcaagatggacctggactga

SEQ ID NO: 29868 - protein, 74 aa, DROSOPHILA
MPLDRLEDIYRNYIVPKPKRERKPRNPSPDPNFNPIEIEQLAERIKSVVIVGQKRAHAENKSDDQAKQIKMDLD

SEQ ID NO: 29869 - DNA, 2699 bp, DROSOPHILA
cagcagggcaaatcgcaaatgttgcactcgataacacgctcgttcgttttcctttcttataagaaatcgatagaggcgtgatttgtctgggcttatcgaggagcgattccgattggactgaatgcggtgcggtgtgaccgtttcgcggtgtatggaaatatgaaaactctcagttggatataatataatagggatggaacaaaaagcaactagcagttttattcaaatcggattgaaatttttaacaaatcagtaatttaaacctaaaaacttataatattgtaatttaattcgatgcaataaaacacgacttcttaggttcgtaaataataagaaaaaatgcacggttatattgttaactgaaaattacttcccttttcaaaaaccatagcatacattttgctgcattgacatcaaaataagcccataagaatattttttcttattagaaattatacaatcttaaaaacttaagtattttactatataatccactagtatataaaaataacatctgtatacgtttttgtccacgtgaatgctagttgattaaataaaaatgaaatgtttgatcaactatctgttgtaaacttttgtattctccttatgtagaactcgacctattacaagtatgcttttacaagaggcatatttatccggatgaacagtcaaattcaaaaaggcatatttcaaggctgtgtccacacttataccgaatccgttatattatcgaggaatttacgctatcgatgaaagaaaccacctaaaaaatccacgcttatgtcgaaatacgatactgatttaatattgacgtaaatcttgttattgttttgatgcaacaaatatttaataaagtttaactaaagatcatttatccgccgttacatcggcaacaaacttggtcgaggaatcaagtcgcccgtccgcaaactggacggaagatttgccaccttgaggtggaatcaccggcaaccggcgtgatcgctctcaagtcaaaacaatggtgtccaacagaagtcctcctccgaatcatggtcccttgccggggtccagtggtggcacctccctgctagccctgtgcctgatccacttcgtcctggccgtgatctccggctggggtctgaaacggagcaccggcagcaaggcgatggccgcctttgggatctactttggccacagcctgctctgcctgctgcggcacacgcatcccaatccgggcgcagtgcagcgtctgctgtgcgacaagtcgagacgttactcctgcgtcctatttgtcaccctggtggtgggcgagctgcagaccgtaaatccggccacccgaatgggtgacttcttcggcgccgactgggagcgtctggcctttggactgtggagcgctgtactggcacttgcagtcaccagcttgtggttcggcaacagtcgcagtccactgggtgccacattcataaaactggatgccgcgcaattgggcctctgtgttctgtggaatgtccactgtctttggcgcatcgccatcgtcgacgagcactggtggtcacttggcctggccctgcttgttctgctgaatcactttgtcctgtggcgactgccgctgcactacaacatcagccaattggaggtggccaccgtgggcatgtgctttagcaccatctttgcgctgaatgccatccaggagcaactggacgctgtggccagctgagagtagctggtcgggcaaccagggactggagccttgattgccaagctctaagacaccaacatttaattataagatgcacgttgttgaacaattttttgagtaataaaccagacttcttatttcgaaacaattattgcattgttatcatacatacataaaagtgtggaattatattggattagacggtttccttttgcataagctttttaatacatattttcgttttaaatatagtttaaattacttctctatgcgctttattacatattgatctgggcttggagtttctatactctcggttttgttcgccggctcgaagtgttccacgcaacgagcacggcctagccgaaaactaactctcattgttaaggaaaattaaatgtagcaagtatcgttagaaagaaaactatatatatatatatgtatacgatttaaaagaatgtgaaaacaaatcgtacgcctacgaaactaataattggggcgagagatggttgtggtgggttgagggatgaggttttgggcggggcaatttcctaggcgtgggtgctgtcgtcctcgacgaagtccttggcctcctccctggtcacacaatcaatgtgactgaccttatttcggaatcgcacgccgtagaacttgtgcgcgttctccagcaattccggccggaacgttgtcgtaatgaactgggcagtgtcgctgagctcatggatcatgttcgccaccgcctttcgatgcattgcatccagcgcctgcacaaaacattagtagatcattagtcaatcaaataaagtaatgcgtaattataggtaatgtgacgactcacctgatctatctcatcaaataggtagaagggagctggatcgcacttttggatggagaaaatgagggccagggcgacaagcgacttctgtccaccagacaactggttcatctcacgcatctcagcctcaacgccggtgaacgaaacccgaatgccgatccctgtgaaagcatcggagttttc

SEQ ID NO: 29870 - DNA, 699 bp, DROSOPHILA
atggtgtccaacagaagtcctcctccgaatcatggtcccttgccggggtccagtggtggcacctccctgctagccctgtgcctgatccacttcgtcctggccgtgatctccggctggggtctgaaacggagcaccggcagcaaggcgatggccgcctttgggatctactttggccacagcctgctctgcctgctgcggcacacgcatcccaatccgggcgcagtgcagcgtctgctgtgcgacaagtcgagacgttactcctgcgtcctatttgtcaccctggtggtgggcgagctgcagaccgtaaatccggccacccgaatgggtgacttcttcggcgccgactgggagcgtctggcctttggactgtggagcgctgtactggcacttgcagtcaccagcttgtggttcggcaacagtcgcagtccactgggtgccacattcataaaactggatgccgcgcaattgggcctctgtgttctgtggaatgtccactgtctttggcgcatcgccatcgtcgacgagcactggtggtcacttggcctggccctgcttgttctgctgaatcactttgtcctgtggcgactgccgctgcactacaacatcagccaattggaggtggccaccgtgggcatgtgctttagcaccatctttgcgctgaatgccatccaggagcaactggacgctgtggccagctga

SEQ ID NO: 29871 - protein, 232 aa, DROSOPHILA
MVSNRSPPPNHGPLPGSSGGTSLLALCLIHFVLAVISGWGLKRSTGSKAMAAFGIYFGHSLLCLLRHTHPNPGAVQRLLCDKSRRYSCVLFVTLVVGELQTVNPATRMGDFFGADWERLAFGLWSAVLALAVTSLWFGNSRSPLGATFIKLDAAQLGLCVLWNVHCLWRIAIVDEHWWSLGLALLVLLNHFVLWRLPLHYNISQLEVATVGMCFSTIFALNAIQEQLDAVAS

SEQ ID NO: 29872 - DNA, 3530 bp, DROSOPHILA
gggctgcaccctggggtggcgagggacgccccggttggcacattgaatgcagcgccattgcaggtttattctttggccgccagttggacattcatgctggcggcttggacttgcgttttccgcaccacgaaaacgaggaggcgcagtgctgtgcacggtataaaactgaccagtgggtaaactattgggtgcacaccggacaacttcatatggttggagatcgggagaagatgtcaaagtctctgggcaacacgatctccgtgtcggagctgctgaagaagtacaccgccgatgagtttcgaatggcctgcctgctgtccaattaccgcaatgcaatgccttatagcgatcagttgatggtgacggctcgccagaccctgcagcggtttagaaactttcaggccgatctaagtgcctatacccaattcctgaagcccgtgcacttgttagacgagggagcgttaaaggcccaactgactcatacagtaaccgaattcgataattgccttcgagatgatttcgataccgccagagccatcagcgtgctaatcgatcagatgagcagcataagtcgctgcataaatgagcagcaagtggacgcacaggaggagcccgcctactgcattgatctgctgttggcagctggaaacttcataaaccgtgccatagtcacgtttggtctatcagagttgcaggataaagaatcgttgcaagaaaaggtttcctttacggatcatagcattgatcccaatttgcttgtgaatgatgtgataaacgttcggggaagaatgcgggaaagggccacctccggaaatgttaagaacccgcagcttttagccgcctgtgatgaactgaggagcttgttacaacagcacggcattcaggtccgcgaccacaaacagggcagctcctgggtgtttgccgtgtcctgtgaaaagcaagatgataaaagcaaaagctctgccgaataaaagttaatatattattctttggatggttactacataaatgcatctctcatgcgttgtcggaagggttgatcgggcgctacggcgtgctccgccttgtaaagatctttagtgatgaggtagtctcgcaccagcttgaagaaggctcccatgctggtgaaggcgacgaagctgatggagaggacaaagtgccactcgacgctttctgcgcttagagaccctatttctactagtagcacggcagcctgaaggatggccaatgtggaataaattatggtgggattgtgaaatagtttctgcaaaaattatgaataaactttttaatgataacgttgaacttatgatttaataccccacttgtaagatactcacataaaatcgagcgtgactggcgtttcccggagtggccacagtaaccatgccatgacttctgtacaggcctccgttgtgctttaccacggtgccgtggttgtaggaggagtatttcgaccaggtgagcgcactggcggctactattagctgcgaaggcgctggctcccggtcaatgcgctgccagcagcccaaatgtaaagtagcccgatgtaatgtatcactatacttggcaggatatagaaaaacagcacacagactgaaagcgcccaggcacacaatgatacagtgctgggctgctcggagtacattgtattggacactgacggccagacagcagggcaccaggccagtgtagtaagcattcagcatggaggtgaagataagctgcttgaatcgcttattgaagtcatgtcggagtgtttccacttcgtcccttatgttaaccggattggtggtgcaactatggaccggtaggtcgttgatatacacgcccggcagttcgaatcgtgtgcgcaggaagggttcaagctggaagccgaagatcaacaggtagatgaccacactataaaagagaatatatgaatatctttggatataaaatacttttcattcttacggatagaataagaagagaaggagtatgtatgtgtgcttctggtatagcttcatggcgcagaaacccaaggatagctgaacaaggcctccaaatccgtacttgattcccagtcggataagatgccggctcttctcgtttcttttcctgatcttcaccagcagcaagcagtaaatcagtctccgcgtattgagtatgagcagtagatagcgaagataaggatcgatcagctcgatgttctgagtgcatagatagattatggattaatgtccttgttgatacatatggaaaacctctgcaaacccaccaccatatgcctggtgtgcgcctgtggcagccaccagttggttctatagatgttgatgaactgtacgatggccgaacccatggtaaaggcgcacatgatgagttcgctgagccactcggatgtggtggcgtgctccgggaagggaatgtgtttgggcatcgctgtggccggtgtctgggattggccctgcttggttgccagcaggtgggcgaaggaatcatgtgtttcgctagagctgctgccatcactactgcgctcgtcgtaggtcatatcgattggttcaattgcttgtaccgggagctacatttaaataaattcaagccacaatgtttttgtgcggttggaggaccaaactttgcatcatttacagcactttttctggctcaaaagcagtgttgagcaccgtagaatgttttgagttcataaaaaatgggcgactcctcaacatattaaacggggaataaagatacttcattttatatattttattaattttcagataaatgtgtatataacatattgtttaatatgtgggcggtgttcataaaacagtaaacaaagctgccataaccccttctgatttagcactacacccatgacggcagctgactacgctttgaacgttaatcaacattaaaccggctgtttgtttatcagctgtccagtggttttataactggtccacaaaataatcaaaaatataaattaatatatcgctgtatacatacgaaaatgatgcgctacgagggcaacgagaggctggccgatgagacagcgtgcgcgggagtacgtgcggatctcaagatgtgcctcctggagagcgactgctgcaaaatgggcaaaacgccgcgccagtgcctccaggacaacaacgttccagctgagtgccaggtgctccgcaataccttctacgagtgcaagcgctccctggtgggtctctataaaatatccattattcctaagctaaacatatacccacccatctttcagttggacaaccgacagcgctttcgaggtcgcaagggctactgagttttaaacttaaattatatttttaagcgcttaaaatacaaaaaattacagacataaacgggcttagtccattaattgcgacgtcgacgaacgcgtgagatacgccaggcattgggctcctcgtacttattgtacagtggctccaggcgctgattcttcttgaatttgcttagcttcgtggggtccgagaagcggaagaaggacggagcaaattccaccaaccatttgggatcgatcg

SEQ ID NO: 29873 - DNA, 1281 bp, DROSOPHILA
atgacctacgacgagcgcagtagtgatggcagcagctctagcgaaacacatgattccttcgcccacctgctggcaaccaagcagggccaatcccagacaccggccacagcgatgcccaaacacattcccttcccggagcacgccaccacatccgagtggctcagcgaactcatcatgtgcgcctttaccatgggttcggccatcgtacagttcatcaacatctatagaaccaactggtggctgccacaggcgcacaccaggcatatggtgaacatcgagctgatcgatccttatcttcgctatctactgctcatactcaatacgcggagactgatttactgcttgctgctggtgaagatcaggaaaagaaacgagaagagccggcatcttatccgactgggaatcaagtacggatttggaggccttgttcagctatccttgggtttctgcgccatgaagctataccagaagcacacatacatactccttctcttcttattctatcctgtggtcatctacctgttgatcttcggcttccagcttgaacccttcctgcgcacacgattcgaactgccgggcgtgtatatcaacgacctaccggtccatagttgcaccaccaatccggttaacataagggacgaagtggaaacactccgacatgacttcaataagcgattcaagcagcttatcttcacctccatgctgaatgcttactacactggcctggtgccctgctgtctggccgtcagtgtccaatacaatgtactccgagcagcccagcactgtatcattgtgtgcctgggcgctttcagtctgtgtgctgtttttctatatcctgccaagtatagtgatacattacatcgggctactttacatttgggctgctggcagcgcattgaccgggagccagcgccttcgcagctaatagtagccgccagtgcgctcacctggtcgaaatactcctcctacaaccacggcaccgtggtaaagcacaacggaggcctgtacagaagtcatggcatggttactgtggccactccgggaaacgccagtcacgctcgattttatgctgccgtgctactagtagaaatagggtctctaagcgcagaaagcgtcgagtggcactttgtcctctccatcagcttcgtcgccttcaccagcatgggagccttcttcaagctggtgcgagactacctcatcactaaagatctttacaaggcggagcacgccgtagcgcccgatcaacccttccgacaacgcatgagagatgcatttatgtag

SEQ ID NO: 29874 - protein, 426 aa, DROSOPHILA
MTYDERSSDGSSSSETHDSFAHLLATKQGQSQTPATAMPKHIPFPEHATTSEWLSELIMCAFTMGSAIVQFINIYRTNWWLPQAHTRHMVNIELIDPYLRYLLLILNTRRLIYCLLLVKIRKRNEKSRHLIRLGIKYGFGGLVQLSLGFCAMKLYQKHTYILLLFLFYPVVIYLLIFGFQLEPFLRTRFELPGVYINDLPVHSCTTNPVNIRDEVETLRHDFNKRFKQLIFTSMLNAYYTGLVPCCLAVSVQYNVLRAAQHCIIVCLGAFSLCAVFLYPAKYSDTLHRATLHLGCWQRIDREPAPSQLIVAASALTWSKYSSYNHGTVVKHNGGLYRSHGMVTVATPGNASHARFYAAVLLVEIGSLSAESVEWHFVLSISFVAFTSMGAFFKLVRDYLITKDLYKAEHAVAPDQPFRQRMRDAFM

SEQ ID NO: 29875 - DNA, 9333 bp, DROSOPHILA
atcttctggcttcactggggtgggtctaacaacattatggtactcagttttttccgtgaaagtcatttctccttcactacgaaggttgtccttatgaataactcttgtcaccttatcggcaggcttatatttgcccttttccggtataaccatttcgccctctggttttaagttatcatgaggttttttctgtttaggcctttcagctggtttaaagacctctttttcttgaacgtagaattctccttccaccttcaagttatctttctgccttacaacagttactcgatcggctggttgatattttggtcgatcgggagtaaagaactcgccttcagtctttagattatcaacgggtttcttaggtaccggtcggtctccggccttatatcctggcttttctggagcaaagaatttcccttcgggtctcaaattatcctcaggtcgaacttgcgttggacgttctccaggcctgtaaggttgcttttctggactgtaaaagtctccttccggccgtaagttgtcctctggtttcttttgctctggcctctcagcggtcctgaatcctggcttttccggagtgtagaattcaccttctggtcggagattatcttctggcctaacctgggaaggtctttcgccgggcttgtacttgggtttctcgggactgtagaattctccctcaggcttaagattgtccaatggtttaacctggtcaggtcgtaccacatattgatattcttccctctctataaaagtcatttctccttccgtacgaagattatctttccgaataattctttccgttttatcggccggcctgtaaacttgtttctcaggcttcacgaattcgccttccggctttaagttgtcctgtggttttttctgtactggtctttcagctggcctgaatcctggcttttccggagtatagaattcaccttctggtcggagattatcttctggtctaacttgggaaggtctttcgccgggcttgtacttaggtttctccggactgtagaattcgccctcggggtttcaagttgtcctctggtttcttttgctctggcctctcagcgggcctgaatcctggcttttccggtgtgtagaattcaccctctggcctcagattatcttctggtctaacttgggagggtctttcgccgggcttgtacttgggtttctcgggactgtagaattctccctcaggcttaagattgtccaatggtttaacctgatcaggtcggtaccacatattgatattcttccctctctacaaacgtcatttctccttccgtacgaagattatctttccgaataattctttccgttttatcggccggcctgtaaacttgtttctcaggcttcacgaattcgccttccggctttaagttgtcctgtggttttttctgtactggtctttcagctggcctgaatcctggcttttccggtgtgtagaattcaccttctggtcggagattatcttctggcctaacctgggaaggtctttcgccgggcttgtacttgggtttctcgggactgtagaattcgccctcgggtttcaggttgtcctgtggtttcttttgctctggcctctcagctggcctgaatcctggcttttccggtgtgtagaattcaccctctggcctcagattatcttctggtctaacttgggaaggtctttcgccgggcttgtacttaggtttctccggactgtagaattctccctcgggtttcaggttgtcctctggtttcttttgctctggtctttcagctggcctgaatcctggcttttccggtgtgtagaattcaccctctggcctcagattatcttctggtctaacttgggaaggtctttcgccgggcttgtacttaggtttctccggactgtagaattctccctcgggtttcaggttgtcctgtggtttcttttgctctggcctctcagctggcctgaatcctggcttttccggtgtgtagaattcaccctctggcctcagattatcttctggtctaacttgggaaggtctttcgccgggcttgtacttgggtttctcgggactgtagaattctccctcgggtttcaggttgtcctgtggtttcttttgctctggtctttcagctggcctgaatcctggcttttccggtgtgtagaattcaccctctggcctcagattatcttctggtctaacttgggaaggtctttcgccgggcttgtacttaggtttctccggactgtagaattctccctcaggccttaagattgtccaatggtttaacctggtcaggtcggtaccacatattgatattcttccctctctacaaacgtcatttctccttccgtacgaagattatctttccgaataattctttcagttttatcggccggcctgtaaacttgtttctcaggcttcacgaattcgccttccggctttaagttgtcctgtggttttttctgtactggtctttcagctggcctgaatcctggcttttccggagtatagaattcaccttctggtcggagattatcttctggcctaacctgggaaggtctttcgccgggcttgtacttaggtttctccggactgtagaattctccctcgggtttcaggttgtcctctggtttcttttgctctggtctttcagctggcctgaatcctggcttttccggtgtgtagaattcaccctctggcctcagattatcttctggtctaacttgggaaggtctttcgccgggcttgtacttgggtttctcgggactgtagaattcgccctcgggtttcaggttgtcctctggtttcttttgctctggcctctcagcgggcctgaatcctggcttttccggtgtgtagaattcaccctctggccttaaattatcttctggcctaacctgggaaggtctttcgccgggcttgtacttgggtttctccggactgtagaattctccctcaggcttaagattgtccaatggtttaacctggtcaggtcgtaccacatattgatattcttccctctctacaaacgtcatttctccttccgtacgaagattatctttccgaataattctttccgttttatcggccggcctgtaaacttgtttctcaggcttcacgaattcgccttccggctttaagttgtcctgtggttttttctgtactggtctttcagctggcctgaatcctggcttttccggtgtgtagaattcaccctctggcctcagattatcttctggtctaacttgggaaggtctttcgccgggcttgtacttgggtttctcgggactgtagaattctccctcaggcttaagattgtccaatggtttaacctgatcaggtcgtaccacatattgatattcttccctctctacaaacgtcatttctccttccgtacgaagattatctttccgaataattctttccgttttatcggccggcctgtaaacttgtttctcaggcttcacgaattcgccttccggctttaagttgtcctgtggttttttctgtactggtctttcagctggcctgaatcctggcttttccggagtatagaattcaccttctggtcggagattatcttctggcctaacctgggaaggtctttcgccgggcttgtacttgggtttctcgggactgtagaattcgccctcgggtttcaggttgtcctgtggtttcttttgctctggcctctcagctggcctgaatcctggcttttccggtgtgtagaattcaccctctggcctcagattatcttctggtctaacttgggaaggtctttcgccgggcttgtacttaggtttctccggactgtagaattctccctcgggtttcaggttgtcctctggtttcttttgctctggcctctcagcgggcctgaatcctggcttttccggtgtgtagaattcaccctctggcctcagattatcttctggtctaacttgggaaggtctttcgccgggcttgtacttgggtttctcgggactgtagaattctccctcgggtttcaggttgtcctctggtttcttttgctctggcctctcagcgggcctgaatcctggcttttccggtgtgtagaattcaccctctggcctcagattatcttctggtctaacttgggaaggtctttcgccgggcttgtacttgggtttctcgggactgtagaattctccctcaggcttaagattgtccaatggtttaacctgatcaggtcgtaccacatattgatattcttccctctctacaaacgtcatttctccttccgtacgaagattatctttccgaataattctttccgttttatcggccggcctgtaaacttgtttctcaggcttcacgaattcgccttccggctttaacgttgtcctgtggttttttctgtactggtctttcagctggcctgaatcctggcttttccggagtatagaattcaccttctggtcggagattatcttctggcctaacctgggaaggtctttcgccgggcttgtacttaggtttctccggactgtagaattcgccctcgggtttcaagttgtcctctggtttcttttgctctggcctctcagcgggcctgaatcctggcttttccggtgtgtagaattcaccctctggcctcagattatcttctggtctaacttgggagggtctttcgccgggcttgtacttgggtttctcgggactgtagaattctccctcaggcttaagattgtccaatggtttaacctgatcaggtcgtaccacatattgatattcttccctctctacaaacgtcatttctccttccgtacgaagattatctttccgaataattctttccgttttatcggccggcctgtaaacttgtttctcaggcttcacgaattcgccttccggctttaagttgtcctgtggttttttctgtactggtctttcagctggcctgaatcctggcttttccggtgtgtagaattcaccctctggcctcagattatcttctggtctaacttgggaaggtctttcgccgggcttgtacttgggtttctcgggactgtagaattctccctcaggcttaagattgtccaatggtttaacctggtcaggacgtaccacatagtgatattcttctctctctacaaacgtcatttctccttccgtacgaagattatcttttcgaataattctttcagttttatcggccggcttgtaaacttgtttctctggccgtacgaattccccatctggctttagattgtcctccggttttttttgaactggcctttctgcagattcaaatcctggtctttcgggtgtataaaagtcaccttctggtttaagattatcaactggacgcacttgagatggacgttcgccagggcgatactttgccttttcaggactataaaatgaaccctctggtcttaagttatccgttggcttgacttgtcccggtcgtgtgacatattgatattcctctttctccacaaatgtcatttcaccttcagttctcaagttatcacttcttattattttttctggtctttcggctggggtatatttgggtttttctggtgaaacaaattctccctccggcttgaggttatccaccggccttttttgtgtgggacgatcggctggagcgtatcctggtttctcaggcgtgtaaaattcgccttctggttttagattgtcttggtgtcgcacttgagatggccgatctcctggttgatacttaggtttttctggactgtaaaactcgccttccggctttagattgtctgtaggcttaacgtatcccggacgaactgtatattggtattcctccttctccacaaaagtcatttctccttctgtacgaaggttgtcggtatgcacaatcttttcacgtttttctcccggcttgtatggctccttcggaggaactataaagtctccctcaggtcttaagttgtcttctggcttcttaatgactatatagtccactagaatgtcttcgttttgcttgggaatgtttccattatcttctttcgaccatgtatttgtacgtatccttgtatatgcttcgtcaacgttatctgtggaaactccaaggggttaacttttttataatttatttatacaattacacttaccttcagtttgaataaccgtattttccgtagacttcgttgtactgcttgagcaatggtgccgcctaaaatatgaaggcaattagtatatcagattatgtacgcgtacactgaatcttacccgcatgtgcagatttcacaaatgcatctttcactatgtgttgttgacttgttttttgcaactccacgctaatgatgaaagcacaaaacaaataattagtaagcaatatattttaagctgttattaattcaacaacgtttttctaaacacaaatatttatgttctttgcttaactaatctactcactgttcttgagtcgttcaggcgttgcttatcagtgcgcacataatcgatttcatcataaatattttcggtaatatttttgtgtttcgatgtctccttcaagttcagtgttatgttttcgttgttctccgatatcgatgtgttcttctcaatctccacaaactcgtccacgtaaatggtcttcttgggagcctctacgatcttctcaataacatccgtgtgcaccttctcgtccagaacgcgccagtcgttgatgctcgcatcgaaaatctaattcaacaacaaaaaaaatgacttagaatttaaactaaacacacacccacgacgaggtgctcgatggcatttgggagagtcgaaggaacgcccacacgctgccacgcacaatcaccgacttaccttcgtcacctccgttgtagtcgttatgtttgcaacatcggtattatctttctcgatttcacgagcaatgtcattgggcacaaaagctttcgtatcagtgaacgacttctcgtccacaacagtccacttgccgagcttcgtgtcgtacaccttggtggtgtatgtggttcttgttgtgttaatgacatcatcgactatttcgggatagcccgtgtcggcggtgctatccaccgtccgttcgtccaccacgcgccaccgattgttgcgtctgtcgtagattttcttcttgtacgtcactttggatgtgccatcggattccttgctgacataacgctcaaaggtcggccgggtcttactcgggccatgagaactgccatcgctgtactccgtccaggttttggtcttcacatcgtacacctctttcttggacgacgactttgactgcttgctgctggtggagcttttcaagactgaactctcgctaacctctttggtggacctttggtcgaccatcgacgacgatgacgtagctctatcaacagctgttttagcactggccacttccagtttatcgttgcgtcgcgtcgatgacgtcgcctttgttgtggtcgcgccagacgacgcggcaaccggttcggggtagccttgcgacgtcaccgatgcgggagcatcagctgttccgctcattggcagctttggcacgctctgagattcgctcaaattgctgctgcggctgccgctggtgttgatgttgatgtttgtgcttgtgctgctgctgctgctgttgctgttgctggtggtggcgtttgtcactgtcttggtgtctgtatcgaagccaacctgtttcctcggcccggatgatgtcataccggtagccgtgtcggctctctcgctggcaatcagcgtttcgttagcgctccggctggaactggttgtggcttcaaagtacgagctggagctactggcctgctgctgctgttgactggaagacatcgacgaggacgtgaacattttcgaaacactgcccccgctggcggagacggagagcgttggcgttgcgatctccaccacatcgatgggcaccgagaatactggctccttcttttcactttcgagcagatcaatcgatgatatgatcttctgattggcataatcccgcgagatcttgctgctgtactgctcggactgcagctgggactgagattgctctgtgtaggaggaatgcgactgcgatgccttgctcttgctctggctgctgcggctgctgtagctcctaactccagccgctggcagagaagcacccgaagtgctcggcccgacaggatcaccaccgtacgtcaccgattcgtgctgcatggaactggagctgttgctggtggtcagagtggcgaacgcatcgggacccagttttttggttagcttcgtggcctcggccgacgacgttgatgttgtggtcgatgtggctggcggcggcgacgtagacgactgctgctgctgagacacttgtttctttttattgctttttgataccattttgctggcggagcgctgacacagatgaggtaatcaccgtttgggtgccgttcagtgagtgcacctggctggactattgctatttgaatggccttatgcggctaatttgcggtcgaaattcgtttgtttcgttgttattaatcacaattattgctcgcttcgttgcttttggcactcggatggctttttaatattaacgcgcgaatgaatgggacgtgcttgttgggatctggtatatgtgtgtttgtggtgtgtgtcacataatttccacgacggtatgtcgaaatgcttatttttaaatatatttattagacgcacacgaacatgcgacccatagttcaagttaaggcagcgatacgcacactttggcaaccgttagatgtgcgagcaaaaagcttagcactctcgctcacacacacacgcgcacacacacagcaacacactagggggggagagttacggatgcagcgggttggagccgatcgagatacagatacagatacagatgcagagctacaaaaaataacaccaaaaaccgagagactgcgggcactgttcgtgttcggagcacttttaagatcaccaaccgtcgcgaagcacaactcaaaacgtactgatcgcgtctggagctgctttcgaccgactatctgtgcgctgccggctgaaagcgatggcagcggcgccggcagaagcgttttcagtgggctttcggccattggtgcgagcgagagagccagcgacgccttcgcaaaaggcaaaaaagttaaagccaggccagcgtaggtttttcggataccgacggatgcgtaggccgcttggctccaggcgtggatccaacaaagcgggctgaaacttgggaacacgcatcttagccaaacaaatatcagacaaaggtagatattttgggttgacttaacttgttggttgacttgttttttttccaagaggtctgagttctagatccgctcctggtcacgtctgccacggagaccgagttcaa

SEQ ID NO: 29876 - DNA, 6501 bp, DROSOPHILA
atggtatcaaaaagcaataaaaagaaacaagtgtctcagcagcagcagtcgtctacgtcgccgccgccagccacatcgaccacaacatcaacgtcgtcggccgaggccacgaagctaaccaaaaaactgggtcccgatgcgttcgccactctgaccaccagcaacagctccagttccatgcagcacgaatcggtgacgtacggtggtgatcctgtcgggccgagcacttcgggtgcttctctgccagcggctggagttaggagctacagcagccgcagcagccagagcaagagcaaggcatcgcagtcgcattcctcctacacagagcaatctcagtcccagctgcagtccgagcagtacagcagcaagatctcgcgggattatgccaatcagaagatcatatcatcgattgatctgctcgaaagtgaaaagaaggagccagtattctcggtgcccatcgatgtggtggagatcgcaacgccaacgctctccgtctccgccagcgggggcagtgtttcgaaaatgttcacgtcctcgtcgatgtcttccagtcaacagcagcagcaggccagtagctccagctcgtactttgaagccacaaccagttccagccggagcgctaacgaaacgctgattgccagcgagagagccgacacggctaccggtatgacatcatccgggccgaggaaacaggttggcttcgatacagacaccaagacagtgacaaacgccaccaccagcaacagcaacagcagcagcagcagcacaagcacaaacatcaacatcaacaccagcggcagccgcagcagcaatttgagcgaatctcagagcgtgccaaagctgccaatgagcggaacagctgatgctcccgcatcggtgacgtcgcaaggctaccccgaaccggttgccgcgtcgtctggcgcgaccacaacaaaggcgacgtcatcgacgcgacgcaacgataaactggaagtggccagtgctaaaacagctgttgatagagctacgtcatcgtcgtcgatggtcgaccaaaggtccaccaaagaggttagcgagagttcagtcttgaaaagctccaccagcagcaagcagtcaaagtcgtcgtccaagaaagaggtgtacgatgtgaagaccaaaacctggacggagtacagcgatggcagttctcatggcccgagtaagacccggccgacctttgagcgttatgtcagcaaggaatccgatggcacatccaaagtgacgtacaagaagaaaatctacgacagacgcaacaatcggtggcgcgtggtggacgaacggacggtggatagcaccgccgacacgggctatcccgaaatagtcgatgatgtcattaacacaacaagaaccacatacaccaccaaggtgtacgacacgaagctcggcaagtggactgttgtggacgagaagtcgttcactgatacgaaagcttttgtgcccaatgacattgctcgtgaaatcgagaaagataataccgatgttgcaaacataacgactacaacggaggtgacgaagattttcgatgcgagcatcaacgactggcgcgttctggacgagaaggtgcacacggatgttattgagaagatcgtagaggctcccaagaagaccatttacgtggacgagtttgtggagattgagaagaacacatcgatatcggagaacaacgaaaacataacactgaacttgaaggagacatcgaaacacaaaaatattaccgaaaatatttatgatgaaatcgattatgtgcgcactgataagcaacgcctgaacgactcaagaacacgtggagttgcaaaaaacaagtcaacaacacatagtgaaagatgcatttgtgaaatctgcacatgcgggcggcaccattgctcaagcagtacaacgaagtctacggaaaatacggttattcaaactgaagataacgttgacgaagcatatacaaggatacgtacaaatacatggtcgaaagaagataatggaaacattcccaagcaaaacgaagacattctagtggactatatagtcattaagaagccagaagacaacttaagacctgagggagactttatagttcctccgaaggagccatacaagccgggagaaaaacgtgaaaagattgtgcataccgacaaccttcgtacagaaggagaaatgacttttgtggagaaggaggaataccaatatacagttcgtccgggatacgttaagcctacagacaatctaaagccggaaggcgagttttacagtccagaaaaacctaagtatcaaccaggagatcggccatctcaagtgcgacaccaagacaatctaaaaccagaaggcgaattttacacgcctgagaaaccaggatacgctccagccgatcgtcccacacaaaaaaggccggtggataacctcaagccggagggagaatttgtttcaccagaaaaacccaaatataccccagccgaaagaccagaaaaaataataagaagtgataacttgagaactgaaggtgaaatgacatttgtggagaaagaggaatatcaatatgtcacacgaccgggacaagtcaagccaacggataacttaagaccagagggttcattttatagtcctgaaaaggcaaagtatcgccctggcgaacgtccatctcaagtgcgtccagttgataatcttaaaccagaaggtgacttttatacacccgaaagaccaggatttgaatctgcagaaaggccagttcaaaaaaaaccggaggacaatctaaagccagatggggaattcgtacggccagagaaacaagtttacaagccggccgataaaactgaaagaattattcgaaaagataatcttcgtacggaaggagaaatgacgtttgtagagagagaagaatatcactatgtggtacgtcctgaccaggttaaaccattggacaatcttaagcctgagggagaattctacagtcccgagaaacccaagtacaagcccggcgaaagaccttcccaagttagaccagaagataatctgaggccagagggtgaattctacacaccggaaaagccaggattcaggccagctgaaagaccagtacagaaaaaaccacaggacaacttaaagccggaaggcgaattcgtgaagcctgagaaacaagtttacaggccggccgataaaacggaaagaattattcggaaagataatcttcgtacggaaggagaaatgacgtttgtagagagggaagaatatcaatatgtggtacgacctgatcaggttaaaccattggacaatcttaagcctgagggagaattctacagtcccgagaaacccaagtacaagcccggcgaaagaccctcccaagttagaccagaagataatctgaggccagagggtgaattctacacaccggaaaagccaggattcaggcccgctgagaggccagagcaaaagaaaccagaggacaacttgaaacccgagggcgaattctacagtccggagaaacctaagtacaagcccggcgaaagaccttcccaggttaaaccattggacaatcttaagcctgagggagaattctacagtcccgagaaacccaagtacaagcccggcgaaagaccttcccaagttagaccagaagataatctgaggccagagggtgaattctacacaccggaaaagccaggattcaggcccgctgagaggccagagcaaaagaaaccagaggacaacctgaaacccgagggagaattctacagtcccgagaaacccaagtacaagcccggcgaaagaccttcccaagttagaccagaagataatctgaggccagagggtgaattctacacaccggaaaagccaggattcaggcccgctgagaggccagagcaaaagaaaccagaggacaacctgaaacccgagggagaattctacagtccggagaaacctaagtacaagcccggcgaaagaccttcccaagttagaccagaagataatctgaggccagagggtgaattctacacaccggaaaagccaggattcaggccagctgagaggccagagcaaaagaaaccacaggacaacctgaaacccgagggcgaattctacagtcccgagaaacccaagtacaagcccggcgaaagaccttcccaggttaggccagaagataatctccgaccagaaggtgaattctatactccggaaaagccaggattcaggccagctgaaagaccagtacagaaaaaaccacaggacaacttaaagccggaaggcgaattcgtgaagcctgagaaacaagtttacaggccggccgataaaacggaaagaattattcggaaagataatcttcgtacggaaggagaaatgacgtttgtagagagggaagaatatcaatatgtggtacgacctgatcaggttaaaccattggacaatcttaagcctgagggagaattctacagtcccgagaaacccaagtacaagcccggcgaaagaccttcccaagttagaccagaagataatctgaggccagagggtgaattctacacaccggaaaagccaggattcaggccagctgaaagaccagtacagaaaaaaccacaggacaacttaaagccggaaggcgaattcgtgaagcctgagaaacaagtttacaggccggccgataaaacggaaagaattattcggaaagataatcttcgtacggaaggagaaatgacgtttgtagagagggaagaatatcaatatgtggtacgacctgaccaggttaaaccattggacaatcttaagcctgagggagaattctacagtccggagaaacccaagtacaagcccggcgaaagaccttcccaggttaggccagaagataatttaaggccagagggtgaattctacacaccggaaaagccaggattcaggcccgctgagaggccagagcaaaagaaaccagaggacaacctgaaacccgagggcgaattctacagtcccgagaaacccaagtacaagcccggcgaaagaccttcccaagttagaccagaagataatctgaggccagagggtgaattctacacaccggaaaagccaggattcaggccagctgaaagaccagagcaaaagaaaccagaggacaacctgaaacccgagggagaattctacagtccggagaaacctaagtacaagcccggcgaaagaccttcccaggttaggccagaagataatctccgaccagaaggtgaattctatactccggaaaagccaggattcaggccagctgaaagaccagtacagaaaaaaccacaggacaacttaaagccggaaggcgaattcgtgaagcctgagaaacaagtttacaggccggccgataaaactgaaagaattattcggaaagataatcttcgtacggaaggagaaatgacgcctgagggagaattctacagtccggagaaacctaagtacaagcccggcgaaagaccttcccaagttagaccagaagataatctgaggccagagggtgaattctacacaccggaaaagccaggattcaggccagctgaaagaccagagcaaaagaaaccacaggacaacctgaaacccgagggagaattctacagtcccgagaaacccaagtacaagcccggcgaaagaccttcccaagttagaccagaagataatctgaggccagagggtgaattctacacaccggaaaagccaggattcaggccagctgagaggccagagcaaaagaaaccacaggacaacctgaaacccgagggagaattctacagtccggagaaacctaagtacaagcccggcgaaagaccttcccaagttagaccagaagataatctgaggccagagggtgaattctacacaccggaaaagccaggattcaggccagctgaaagaccagagcaaaagaaaccagaggacaacctgaaacccgagggagaattctacagtccggagaaacctaagtacaagcccggcgaaagaccttcccaagttagaccagaagataatctgaggccagagggtgaattctacacaccggaaaagccaggattcaggccagctgagaggccagagcaaaagaaaccacaggacaacctgaaacccgagggcgaattctacagtcccgagaaacccaagtacaagcccggcgaaagaccttcccaggttaggccagaagataatctccgaccagaaggtgaattctacacaccggaaaagccaggattcaggccagctgaaagaccagtacagaaaaaaccacaggacaacttaaagccggaaggcgaattcgtgaagcctgagaaacaacctgagggagaattctacagtcccgagaaacccaagtacaagcccggcgaaagaccctcccaagttagaccagaagataatctgaggccagagggtgaattctacacaccggaaaagccaggattcaggcccgctgagaggccagagcaaaagaaaccagaggacaacttgaaaccccgagggcgaattctacagtccggagaaacctaa

SEQ ID NO: 29877 - protein, 2166 aa, DROSOPHILA
MVSKSNKKKQVSQQQQSSTSPPPATSTTTSTSSAEATKLTKKLGPDAFATLTTSNSSSSMQHESVTYGGDPVGPSTSGASLPAAGVRSYSSRSSQSKSKASQSHSSYTEQSQSQLQSEQYSSKISRDYANQKIISSIDLLESEKKEPVFSVPIDVVEIATPTLSVSASGGSVSKMFTSSSMSSSQQQQQASSSSSYFEATTSSSRSANETLIASERADTATGMTSSGPRKQVGFDTDTKTVTNATTSNSNSSSSSTSTNININTSGSRSSNLSESQSVPKLPMSGTADAPASVTSQGYPEPVAASSGATTTKATSSTRRNDKLEVASAKTAVDRATSSSSMVDQRSTKEVSESSVLKSSTSSKQSKSSSKKEVYDVKTKTWTEYSDGSSHGPSKTRPTFERYVSKESDGTSKVTYKKKIYDRRNNRWRVVDERTVDSTADTGYPEIVDDVINTTRTTYTTKVYDTKLGKWTVVDEKSFTDTKAFVPNDIAREIEKDNTDVANITTTTEVTKIFDASINDWRVLDEKVHTDVIEKIVEAPKKTIYVDEFVEIEKNTSISENNENITLNLKETSKHKNITENIYDEIDYVRTDKQRLNDSRTRGVAKNKSTTHSERCICEICTCGRHHCSSSTTKSTENTVIQTEDNVDEAYTRIRTNTWSKEDNGNIPKQNEDILVDYIVIKKPEDNLRPEGDFIVPPKEPYKPGEKREKIVHTDNLRTEGEMTFVEKEEYQYTVRPGYVKPTDNLKPEGEFYSPEKPKYQPGDRPSQVRHQDNLKPEGEFYTPEKPGYAPADRPTQKRPVDNLKPEGEFVSPEKPKYTPAERPEKIIRSDNLRTEGEMTFVEKEEYQYVTRPGQVKPTDNLRPEGSFYSPEKAKYRPGERPSQVRPVDNLKPEGDFYTPERPGFESAERPVQKKPEDNLKPDGEFVRPEKQVYKPADKTERIIRKDNLRTEGEMTFVEREEYHYVVRPDQVKPLDNLKPEGEFYSPEKPKYKPGERPSQVRPEDNLRPEGEFYTPEKPGFRPAERPVQKKPQDNLKPEGEFVKPEKQVYRPADKTERIIRKDNLRTEGEMTFVEREEYQYVVRPDQVKPLDNLKPEGEFYSPEKPKYKPGERPSQVRPEDNLRPEGEFYTPEKPGFRPAERPEQKKPEDNLKPEGEFYSPEKPKYKPGERPSQVKPLDNLKPEGEFYSPEKPKYKPGERPSQVRPEDNLRPEGEFYTPEKPGFRPAERPEQKKPEDNLKPEGEFYSPEKPKYKPGERPSQVRPEDNLRPEGEFYTPEKPGFRPAERPEQKKPEDNLKPEGEFYSPEKPKYKPGERPSQVRPEDNLRPEGEFYTPEKPGFRPAERPEQKKPQDNLKPEGEFYSPEKPKYKPGERPSQVRPEDNLRPEGEFYTPEKPGFRPAERPVQKKPQDNLKPEGEFVKPEKQVYRPADKTERIIRKDNLRTEGEMTFVEREEYQYVVRPDQVKPLDNLKPEGEFYSPEKPKYKPGERPSQVRPEDNLRPEGEFYTPEKPGFRPAERPVQKKPQDNLKPEGEFVKPEKQVYRPADKTERIIRKDNLRTEGEMTFVEREEYQYVVRPDQVKPLDNLKPEGEFYSPEKPKYKPGERPSQVRPEDNLRPEGEFYTPEKPGFRPAERPEQKKPEDNLKPEGEFYSPEKPKYKPGERPSQVRPEDNLRPEGEFYTPEKPGFRPAERPEQKKPEDNLKPEGEFYSPEKPKYKPGERPSQVRPEDNLRPEGEFYTPEKPGFRPAERPVQKKPQDNLKPEGEFVKPEKQVYRPADKTERIIRKDNLRTEGEMTPEGEFYSPEKPKYKPGERPSQVRPEDNLRPEGEFYTPEKPGFRPAERPEQKKPQDNLKPEGEFYSPEKPKYKPGERPSQVRPEDNLRPEGEFYTPEKPGFRPAERPEQKKPQDNLKPEGEFYSPEKPKYKPGERPSQVRPEDNLRPEGEFYTPEKPGFRPAERPEQKKPEDNLKPEGEFYSPEKPKYKPGERPSQVRPEDNLRPEGEFYTPEKPGFRPAERPEQKKPQDNLKPEGEFYSPEKPKYKPGERPSQVRPEDNLRPEGEFYTPEKPGFRPAERPVQKKPQDNLKPEGEFVKPEKQPEGEFYSPEKPKYKPGERPSQVRPEDNLRPEGEFYTPEKPGFRPAERPEQKKPEDNLKPRGRILQSGET

SEQ ID NO: 29878 - DNA, 2300 bp, DROSOPHILA
ttctggtatagcttcatggcgcagaaacccaaggatagctgaacaaggcctccaaatccgtacttgattcccagtcggataagatgccggctcttctcgtttcttttcctgatcttcaccagcagcaagcagtaaatcagtctccgcgtattgagtatgagcagtagatagcgaagataaggatcgatcagctcgatgttctgagtgcatagatagattatggattaatgtccttgttgatacatatggaaaacctctgcaaacccaccaccatatgcctggtgtgcgcctgtggcagccaccagttggttctatagatgttgatgaactgtacgatggccgaacccatggtaaaggcgcacatgatgagttcgctgagccactcggatgtggtggcgtgctccgggaagggaatgtgtttgggcatcgctgtggccggtgtctgggattggccctgcttggttgccagcaggtgggcgaaggaatcatgtgtttcgctagagctgctgccatcactactgcgctcgtcgtaggtcatatcgattggttcaattgcttgtaccgggagctacatttaaataaattcaagccacaatgtttttgtgcggttggaggaccaaactttgcatcatttacagcactttttctggctcaaaagcagtgttgagcaccgtagaatgttttgagttcataaaaaatgggcgactcctcaacatattaaacggggaataaagatacttcattttatatattttattaattttcagataaatgtgtatataacatattgtttaatatgtgggcggtgttcataaaacagtaaacaaagctgccataaccccttctgatttagcactacacccatgacggcagctgactacgctttgaacgttaatcaacattaaaccggctgtttgtttatcagctgtccagtggttttataactggtccacaaaataatcaaaaatataaattaatatatcgctgtatacatacgaaaatgatgcgctacgagggcaacgagaggctggccgatgagacagcgtgcgcgggagtacgtgcggatctcaagatgtgcctcctggagagcgactgctgcaaaatgggcaaaacgccgcgccagtgcctccaggacaacaacgttccagctgagtgccaggtgctccgcaataccttctacgagtgcaagcgctccctggtgggtctctataaaatatccattattcctaagctaaacatatacccacccatctttcagttggacaaccgacagcgctttcgaggtcgcaagggctactgagttttaaacttaaattatatttttaagcgcttaaaatacaaaaaattacagacataaacgggcttagtccattaattgcgacgtcgacgaacgcgtgagatacgccaggcattgggctcctcgtacttattgtacagtggctccaggcgctgattcttcttgaatttgcttagcttcgtggggtccgagaagcggaagaaggacggagcaaattccaccaaccatttgggatcgatcgttgttacttcacgcatatactccttggtggtctgcaccagctcgtgatagatgacccactctggctggcgattgaagagagcactcgacggatgaatgtaaacgacctgggagtcgaccagggtacgatatccctcctgcggatccttttttgctgcattgcggaagaatccggagcagattgccttctgaatgcgcacagagttttttccagcggatacgacatccaatttgtgcctgtccatgattcccagcagctgcttcctcacatcctggctgcgttttagagttcgtatctgtacgaagttttcgtagcaccaggcatttgagaatttgttgttcttccaactgttgtaaacggccagcagcgtcagatggtcacctgtgcagaaacgatcgttaggaaatgtttcattaatatgataaggattgacttaccttccgcttgattgaatttggcctttttctgatccgccagtgcctgcttgtcctttggcctgtaaaacacgttctgcacactgagcatcgaaacaatagtcaaaatctcatcggaacactgcagagcgacggacattataagcatcttggatagattcggctcgaggggaaactccgccatgcgtctgcccagtcgagtaagcaggccttcgtcatccaatgctgatagggaatgtagttgctcgagcgccatcaccagcgattccacaggcggggcgtccatgaaatcaaagtgcagcagatcgttaattcccattgtctttag

SEQ ID NO: 29879 - DNA, 240 bp, DROSOPHILA
atgatgcgctacgagggcaacgagaggctggccgatgagacagcgtgcgcgggagtacgtgcggatctcaagatgtgcctcctggagagcgactgctgcaaaatgggcaaaacgccgcgccagtgcctccaggacaacaacgttccagctgagtgccaggtgctccgcaataccttctacgagtgcaagcgctccctgttggacaaccgacagcgctttcgaggtcgcaagggctactga

SEQ ID NO: 29880 - protein, 78 aa, DROSOPHILA
MRYEGNERLADETACAGVRADLKMCLLESDCCKMGKTPRQCLQDNNVPAECQVLRNTFYECKRSLLDNRQRFRGRKGY

SEQ ID NO: 29881 - DNA, 4360 bp, DROSOPHILA
ttagtattattatcagcgtcgatttttaagtagtactttactttataggtaataagtttgtcggaaacttttaacagtttctaggtgaagaatttatgaagaaactatgacagaccaaaaatcaatttactcgaattgtaaaggaatttcttttcggccttgggtttttttttattttcaattcgaaatattgtattaatcaagaacacacgcaatagttttcaacattttgtacaatccgtttttcgatatttttttaatgatctaatgatccttttaccttccagaagcgaaacgatgagcagcaggtgaatcaacattttgccattccgatcgcagctggtgaactgaaaattccgaagtaagcgtttcgccgagactggcatttggtttcaataacttcacaaacacaaacacatttgcgatcgtcacgcggagaaaaaaaaaacagtttcactgcactaaaaaaatgttaaaaaaaatattcacccaaatgtatatgctttagagtatttttttttttttatattaataattatttcttaaagacgcgagtattccgagagtgcagcttcgagttccgtttgactgtttttcaaccagccgacagcgccgacgttgatcaactgaagatgcagctgccggaataagcatcctgtggcctcgaggacgaccgaaaacgaacaaatcgacggcaccgaaatggcacgagcttcgaacgaagcgacacgaagtcctgtcgtaatcgttagccgttggatactgtaaaaccgaacagccgtcccgaatgtcctgctgacgaaccctcgttgccaattgtcgaagtggatgttcgaatcgaacgccgtccaccatgtgccgaatgcgatccacatggcgggcacgtggtggaacgcatagctcttagatgccggcggggggatgtcctggcggcgcaggcgccgtgtccttcggaggaggagtgtcatccacattcgtctgacaaatggtacgacaattgctacaagctgtggtggcatttggccaccgcctggcagaatctgaatctcctgcgaccacagcgtccaaatggagtgacaggagggtccgcgcgttgggcgccagttgtgaagaactcgagattgcgacaggtccctgggatacaacatttcaccaagaactcaagtcgagttagtgagaccactaaaaatttcagcaagcactatgtgctatatatgtgcacctttctttagaaagcctcatcgcaatgggcctcatcaaaggttaagggctaccgattttgctaaccgatataatttccacgcagataatacagttttataataatattattgctaatagtgacatgcaaaatatctaaccaaatacttttatgtcacagaaaacgtaaccctacgatttgaaacaaatgaaatgatatattctcagctgcagatcaattacttgatttgcattattgaaccctgacttttgtgccaaatttgttggtacaaccacttagccacattccacatcgatttacgtatgcaatttggtctacaaaatgcgcttgaatcattttgagtttcgcatatgcatggccaattacttttcccggaggtcctcataagttgtccgtttcgaactggcctccagctgacattcggtggttgatcaaccaccccaacaataccccatttccatttggccatcgaaaggagcaactttgccagcgttgggcggaaaaagtttcgaagtgcattctgcattctgtcagataagcaggcgacacaatcccaatcgaaatcccaattgacataattttcaatatttcaatgtcgggaaaataggtagattgcactggaatttaattgaactttaactgtcagttttttgggtcctcagaggcgtcacaaattcgctgggggagggaccacatctttggccacgatgtgacaggaccgaaagtcagggctgtcaaagctatcacaaagtggcttaattatccaatagacgctagattctaaatgtcagcggatgccagtcatcttaaattgtggatagtgtcttcaacttttccattaaataactcaattacgcctcagacttttgctgatgaatgggtctggggtagagaaatggggctgaggcataattatgccattacgcaatttttaccacccgatccgcttaaatgaattgcagctgctccgccatcagctgaaatgcgctgcaacaaatcaaagtgcgattccttgaatgccacgacgaaaacttttcggcaattatccacaggaaaagcggagaatagcgaagaaaatcgttgaaagtgcgaggaaaaaagtttgataggagaatttaaaattaccagaaagctttgaggatgatccaaattcccattagttacaactgtccgaaagagttctacaaattatttagatattgacatccgaaaatatgaactactgcaagtggccagggtgccttgtttaacatgggttttaattaacaatctaaagtttttatttcttcctctcaaattagattttaccgaatagatcgacttcttttataatctcagttcgaaagtccccaatttaattttgagattattaacacctatacaatgtggcgcaaataagtcctcgccaacaacacacatggttaactaatcctagtctttttccttcacttttctacaaacttctgggacaacgaagaaaccaaaaccaaaacttttgtttctaaaactcgtgttccaagtaccatgcacaaaggaggcgattctgggcgtggatggggccaggtgtgtgtgaattttgaatttgaatcccacccccgctttcgtccttgtctggcagacacctgctggagctgtaataagtatgcagcgactacaatttcctgacatatcctggatgtagatgactgtagaggggtatacactttggatgcgactatgttttttttttttgtggaaaatcatacatcacataattgttttagattagattttcaagaaacataagtactacagaaaacgaaatggtattgcttggtatgtaagaagtgaaatgaaattaaacggtattttatagtcagaaatgtgtgggctaggaattgttcttgttttttggttgttaggtgttaaagcgggcgaaagttggaggccatgtagacaaggacgattgcgggcgggagaatggggggtgtttgccgaagaaggcaggaagcagctgcatgtgtcgcgtacgtacgtgtgtgacaacaaacacaaaaacagcactgcgaacaagcgacaacagtgtgaccaaatgtgcatgtgagtagcgacgtaggtacgactgtgtgcctgtgtaaatcgcacatttcaatttgcatgtgttagcgacaaacttttgataagtgttactcacattacacaaagggatggaaaaggagagcagatccacaaacttattgtcaaacacgaacaggaaccatcactcccacgcccccccccccatacatatgcaaatttagttgccacatacacaaacacacaggcacacgcacacatatcaatatttttcagacactacgtgctcggcgattttcgcacacctcgggatcgatggataatgaaatagcattgagtatattatggtgaaaattttcaaattatctgcgaaattggtttcgctgtcgagcaataaaacggctagcaaaaaaggaccaaagcaaaaagtcaaagtcatggctatcatacaggtatatatcatgaacatgtagaccttaatttttgatgcaattactttctattaagttcttggctaacaaattatagaaacatttaaataaatcataagcgacaagttttcctaagcaatccctaactcactgataaattcgtgacaataagccctctcaactaggccaacatatatatacaatatgtatgtatagggatcacttgcggatgtgattctcctgtgtgccaccaactaaacccaccaaaaatttcccaaatcatttcccacacaatctttctccgctcgttgaacgttgatgagtgctccggttatctggcatcccttttcccatgttaactgtcgcctttagcgggtaaaagctgggaaaacgggtggtagtaaagggtgtgtatgtcagtttgggtccttacagaattatgaacatatcctgtgaattgaagaacgtcatcaaggcagacaaaaggcaaaacaaattgagagcaatgcatatgctctgcacgacgctcttttaaatttagtcagtcttggatcgttttagctattttctgctagcagaaatttaaaacgaagaaattaagacctatttttactgaataatgcaagataactagcattagtttttaatgatt

SEQ ID NO: 29882 - DNA, 186 bp, DROSOPHILA
atgcaaattgaaatctccagcaggtgtctgccagacaaggacgaaagcggggggacctgtcgcaatctcgagttcttcacaactggcgcccaacgcgcggaccctcctgtcactccatttggacgctgtggtcgcaggagattcagattctgccaggcggtggccaaatgccaccacagcttgtag

SEQ ID NO: 29883 - protein, 61 aa, DROSOPHILA
MQIEISSRCLPDKDESGGTCRNLEFFTTGAQRADPPVTPFGRCGRRRFRFCQAVAKCHHSL

SEQ ID NO: 29884 - DNA, 2573 bp, DROSOPHILA
accgcattaacacaatgtcaaaatgttaagaggcgtgattttgccacctaactcctagggtggactccaagaagaagtgctgcactgtaaaacgatccgaaaatcaaatagggcgatgaagaaagagagagacaggggcaggggcaggggcaggacaaacaaacgcagtgccacccacaaagccgcccttgccacacctcttgtgactgccttgatgattgagtgaactgccacatggcagtggagtcaaaagtgcatgggtggggatggcagaacgatgggtaaagctggcaaaaaggggagctgcgaaaaatagaaggaaaatgggagtaggagcagagcacgtgctgcagacagtttgacaaaaaagctgtggcccaccaaagaggggcagacccatctctacctgcaaaaaaaaaaaaaagaaaacaaaaaaaaaaaaacaaaaaacaacaagcaaagacgaagcaggtaatgcccggtatcagtgacaggatttaaacggattacaacaaggacaatcgagttagcacggcacatagagcagcccgagtttaccttctgtcttctggcgtttgccttttatcacaccgcccccgcattattcgcccatttactccttgcgctacctcgatagcttttcgtacaccgaagaaacgaaggagtttgtcgtcgaaattcaaataaagttagcagcccgcttcgttaaaatatttagcaatataaacattgaaggaccgaaaatgatccatactgtaatgggaactttttaattgtaatccaattgttcacacctctacccaaaaatcgcagtgtacgaacgccacagctgccgtggccaaaacccagctggctgactgatgttcatgatggcgtagatggggtagatgatgtgacgggttgcggatgtggatgcagcgaaggatgggcttggatgggcttggatggggatgcaataccaacaccgacaccgaaaagagttgaccaaccgcaggctgctctaattaatggcgcagtgccagaacgaaggtggcaaatactcacagtgtatgctgagggagatgcgctttgagaccgatggcggtactccgttggaggcgatgcacagataggagcccatctcgttcctcgagatctttgatagctttagcacctcgccgcgaaaagagggcgctgcaggtgtgcggaaacgagaaggcgggaacaataaatatacatttagcctggaaaagcgcaaatgtcctgcaaattggatacttacctagggtcttagtgcccacattgtccttcaggacaatttcgttgccatcttcgcggcgccaggtgacaatcggttccggataaccgcgagccctgcaaatgcaacaaatgcgacaagagtacagtgaggaatccaaaaaaaaaaaaaaagaaattgggaactaatagttttatttcaaaaatgcccacaaatggatttacctatgctcgcactttgaattcaaattggctgcttttcagttaacactttctgttctcaactgcggctcaagcacctcaagatcggaaaccatttagggaatccataaaccatgaaccaactggccacgcccccacaatgttgatggcaaatggaaatgggaaacgccaaatggaagtgccgagatgccaaatggaaaatattcaagttcagtggcttattaaatttaatatgacgatgcttctcagccaaaggactccgactccattgtgcctcggttgaagcaaaaacttttgtgcaattgcaaaggctgggcgggaaagcggaaaagcgggcaggcaaaacgcttgaagccagcaggcgctcaagtgtgtggtgcactttgaaaacccttcgaaacattgatcgacatctcgactctctctctctctctctataatagatatcatatcgtaaaaaatatttcattgataaatatctggatctgcttcggtaaatctttaaattatacccataaataatgtacccaaacacttttaatgtcctagaaaacgaaaatctagcaatcgtctagacaacatacccttcaatatcaagcagtagtgggtatgtcgtggagatgcgtgttaagacagcagttgttcaacagcaaaccagacacgggtgtggtaaatttttatgatgccgcaaacagatgcaaaatggctaaaaagaaaatcagccagaacacagatacacagaaactcctatacacatgagcaatacaatgggccaacaacagttagcagtcagcggcagtttcttggccatgtttagtcgggccaagacagtctctctgtttttttttttttttttttagcccaactaagtgcaatttgcatggcccaaggacggctagacaaagcaaatttcactacggttcagcaacttatttcaacaactctcaaagtggccctcgctaaatgaccttcttgggtttgtttaagggaagtcctttgtctttaatctaacaaattttaagggaattatgactgtctattttagaatgaaacgttgaatttcgttcgccaaatttactacctagtattctatttctttctattcaagtaccttc

SEQ ID NO: 29885 - DNA, 303 bp, DROSOPHILA
atggtttatggattccctaaatggtttccgatcttgagggctcgcggttatccggaaccgattgtcacctggcgccgcgaagatggcaacgaaattgtcctgaaggacaatgtgggcactaagaccctagcgccctcttttcgcggcgaggtgctaaagctatcaaagatctcgaggaacgagatgggctcctatctgtgcatcgcctccaacggagtaccgccatcggtctcaaagcgcatctccctcagcatacactgtgagtatttgccaccttcgttctggcactgcgccattaattag

SEQ ID NO: 29886 - protein, 100 aa, DROSOPHILA
MVYGFPKWFPILRARGYPEPIVTWRREDGNEIVLKDNVGTKTLAPSFRGEVLKLSKISRNEMGSYLCIASNGVPPSVSKRISLSIHCEYLPPSFWHCAIN

SEQ ID NO: 29887 - DNA, 3192 bp, DROSOPHILA
atcaaagttgtacaaatcaacaaaaggcagttggaagtagcataaatcaaaagaaattgggttcctcttgttctgtgttacttttctatattaattgacctttcaagagttttgtaaatcggtttgggaaattggaaattggcaagaaggtgtgacagtcaccaaatacaaaatgagaaaaatcaacatagaaaaaagggttgattgataatgagtataatcaaagttgtggacttcaaagcgtgatttctctcctatcgcgccatcttggtataaaactcatttcatatttctgctctaaaaaaaaaaaaaaaacccaaatttcccaatctgatttttcttcagtgcccgcggtacactgtaaatgctttttgggaaccattttaccttaggctagctgtgattcattaaccgtgcaacccccttaaaaatgtctcaataacactagaaattcttgcgtcaaatacattcactaaatatggatgcgtccaaattaccatccctgtttttttttgtttttcacttacgttataaacaatttaacattttctactacaacatgtttgttttatgtacgcgatctcattacgattgagaaactgtctgtgtgaaaatgtcgttgctgaacgatcggttagaatgttgttagaattagttagaaccttggaccttcacactataatttgtgttatctgatcgttaatgaattgcaaaccttttaatgtgtgtgttatgtttcgttgtcgaagtttttagactgcgttcaattaactccattgtatgtgttcgtttcggatgcatatgtgtgttgatgaagtgttgatgagtgttgatatccttaaactgagtgttacacactacaactagcttttcgcttgatagtgtgtgtgctcgttgaatgtcttgtagtacgatccttacgatccacttctttcttcgctgcagtgatgcgttgttgattctcttgtcgaatgtactggtggttccattagactgcgtattataagaggctgagcaaaagtccgggcaggcaagcctgcgacaagcccattaagaacgtatgtcggcagtgccaactcctgaccaggatgagccgcgcgaatggaaggagaagaatgggtaagtggtgacctcgacacaatcgcgagtctccggagcctgagctcatttcgttgttgtcaatggggcctcgcacttccgtattgccaccataatatggcggtggcttgcgggtgatgcctcccatttcgccaccaagtgaacccgcatcaccgccagttgggccaccacctggcccaccactgtgttgctggttgttgttgttgttgttgtggtggtgatgatggtggtgctgctgatgtagatgctgattgccgccggagttgcccggcttatgtgtggccggtttattgccgctggtgtagtaaacgtgcggcgataacggcgtcaggcccccgccctcgccgccttccgcctcgaaatcctcgacggatccgtactgcagctcctcgtcctccggctgataagtgactttgacttgttgtttctgcttcaaaatgtcattggcatccgcatccaggcttccgcccgctccacctccttttccgccgccgttcagcggatttttattacgattcggtccggggatttctgtagggcagcgggaagaaaagaaaaaaaaaaaacgaaaaaacaaaggcgcgaatgagaaaatgtaattgaaacaaaggtgcaaatacgttccatttcgcggattccaggccaaaacaatggaggccaggtaaatagcaatgtattgtagcaaaagaaaaattaacaatttcaaatctttaaggcatattgcacattgccaaactgaaccaaaataatacatttaaatagcactcttttaaaaatttcggtattttatatcaaaccgaaggagtgcacttaattattaaacctctgctgttcggccctcgtttagtgcacattgatgaagaggtgctgaaaaactcaccgtataaacggatactgctgtcgacttcgccgagtgagtttttggcaatgcagcgataggatccgacatcatccttttgaaacttcctgactatcattgacattttggtctcgtacatggactgcgagctctcctgcacatgatacttgcccgatgtcacaatcatctcacctggtggatgaatggttttcatatatgttattcggttttcattcaattcatcattcataatattactatgatttgtccttcctagctctaaatatagctaagagcgtaacttgcttagaaatcatatcaatataaagtaagctgtgactcgaaatccgtcaaatgtaaatatttccaacggatcacaaagctaatttcattttattttcttctatagtgcacatctgaaataattttgttgaaaaataagaacatttccccaaggaaactctactgtggaaacttgggtgagtgaaaactaaataagttttgaatagaatcagttcttgtgtgacctctcctcaactagaagaatacgcacaggcgtactaaaaagacatgaaatttagatattccggggtaaacagtccgctttcgagtactggaaatccccggaccattgccaccaaactgcaccacctgcaacgagcgaacgtgccgcaatctgacaactgactaatgacaatgccaagcgcttcgattcgaatcgatgttggagtaatgatgcgttcggccccggagcccgacatctgcatagatgtgtgtacccatctgtccgtataggcatatatatacatatataaatgaccgtacatatatatatgtatatatatatatcggcagactggtctcggcacccgctcgcactcacttacccgtgtccttaatccagtagttaattgatttgggcgaggcttcgacgtgacactcgatttggacatcagtgccaagtggtgcgccgactaattgattcggcacttggatgaccggatgaactgcaacgagatgaaggtttgcgtatgagttaggtggttcagcacggtgaggtgttcttacttgaagccatcaaattggctcagattggttagctcgattaaagtaattatgctctctagagtttaccaaatccaatcaacacatttatgatgttttttataaacatttcattgatcatctcaaatatcaatcaaatatcaatcatc

SEQ ID NO: 29888 - DNA, 843 bp, DROSOPHILA
atgaaaaccattcatccaccaggtgagatgattgtgacatcgggcaagtatcatgtgcaggagagctcgcagtccatgtacgagaccaaaatgtcaatgatagtcaggaagtttcaaaaggatgatgtcggatcctatcgctgcattgccaaaaactcactcggcgaagtcgacagcagtatccgtttatacgaaatccccggaccgaatcgtaataaaaatccgctgaacggcggcggaaaaggaggtggagcgggcggaagcctggatgcggatgccaatgacattttgaagcagaaacaacaagtcaaagtcacttatcagccggaggacgaggagctgcagtacggatccgtcgaggatttcgaggcggaaggcggcgagggcgggggcctgacgccgttatcgccgcacgtttactacaccagcggcaataaaccggccacacataagccgggcaactccggcggcaatcagcatctacatcagcagcaccaccatcatcaccaccacaacaacaacaacaacaaccagcaacacagtggtgggccaggtggtggcccaactggcggtgatgcgggttcacttggtggcgaaatgggaggcatcacccgcaagccaccgccatattatggtggcaatacggaagtgcgaggccccattgacaacaacgaaatgagctcaggctccggagactcgcgattgtgtcgaggtcaccacttacccattcttctccttccattcgcgcggctcatcctggtcaggagttggcactgccgacatacgttcttaatgggcttgtcgcaggcttgcctgcccggacttttgctcagcctcttataa

SEQ ID NO: 29889 - protein, 280 aa, DROSOPHILA
MKTIHPPGEMIVTSGKYHVQESSQSMYETKMSMIVRKFQKDDVGSYRCIAKNSLGEVDSSIRLYEIPGPNRNKNPLNGGGKGGGAGGSLDADANDILKQKQQVKVTYQPEDEELQYGSVEDFEAEGGEGGGLTPLSPHVYYTSGNKPATHKPGNSGGNQHLHQQHHHHHHHNNNNNNQQHSGGPGGGPTGGDAGSLGGEMGGITRKPPPYYGGNTEVRGPIDNNEMSSGSGDSRLCRGHHLPILLLPFARLILVRSWHCRHTFLMGLSQACLPGLLLSLL

SEQ ID NO: 29890 - DNA, 2333 bp, DROSOPHILA
ctaaatatagctaagagcgtaacttgcttagaaatcatatcaatataaagtaagctgtgactcgaaatccgtcaaatgtaaatatttccaacggatcacaaagctaatttcattttattttcttctatagtgcacatctgaaataattttgttgaaaaataagaacatttccccaaggaaactctactgtggaaacttgggtgagtgaaaactaaataagttttgaatagaatcagttcttgtgtgacctctcctcaactagaagaatacgcacaggcgtactaaaaagacatgaaatttagatattccggggtaaacagtccgctttcgagtactggaaatccccggaccattgccaccaaactgcaccacctgcaacgagcgaacgtgccgcaatctgacaactgactaatgacaatgccaagcgcttcgattcgaatcgatgttggagtaatgatgcgttcggccccggagcccgacatctgcatagatgtgtgtacccatctgtccgtataggcatatatatacatatataaatgaccgtacatatatatatgtatatatatatatcggcagactggtctcggcacccgctcgcactcacttacccgtgtccttaatccagtagttaattgatttgggcgaggcttcgacgtgacactcgatttggacatcagtgccaagtggtgcgccgactaattgattcggcacttggatgaccggatgaactgcaacgagatgaaggtttgcgtatgagttaggtggttcagcacggtgaggtgttcttacttgaagccatcaaattggctcagattggttagctcgattaaagtaattatgctctctagagtttaccaaatccaatcaacacatttatgatgttttttataaacatttcattgatcatctcaaatatcaatcaaatatcaatcatctaatatttcccattcataatgattgtcattaatttggatgattacatttgcctgcagtgtcgaggatgtcggactactcaaagtttctgtccaacttgacggatcagctggcacttctgcctaaagttgcgcccaaaggattgggacgattgggcagcctggagaacttgggcaataatctgggcaatctgcgccccgcccacaaggctctgatgtgcgtgggcgtggccactgtggcttgcgttgtcctcggcttcactgttaagtcattaaagggacatagccgcaaggacaagcaaaggatcatcaatgtacgaatcggtaatccgatcaagcgggaactcgagggggctgataaggacgaaggatcctttgggaaggaagaagaactcaattgatcaagaaaccttagggctgggtgatcacaaatatccccatcactatatattttgatcttgtcttgtgcgatgcaatgttgttatattttataattttagaccgttaacaaaaacgaatttacaaatgatatttgttccaaattaaatgaatgcacattaacattcaaaatggaattttagaataaagccacttctataagatcgcattgcgggaagcacacaaaaatcgatatattacgtttgataataatattttatacacattgctgtgtatgctacctaatgccattcaatgtggcaaccatcatcggccattcaaaaaggactccctttgagggctgaacaaaggttggctagcgcacttgagggccaattgagtgtggcataatttgatggtgtgcgctctcctggcttttcccgcttttcctcgcccgacttccctccgccaaaatttctgcactcattttccagaactcatcagaatgcagttcatgcagaggacgtcgaacggtgctgcattgacaactcttttgccgatggcccaactttcgtatttattgtcacttagtccgggtcctaaagggactggcatttcggggctggggtcctgaccaaaattggtggttttgtaaaacctgccagtggaccgaaatgcgagtaccctgccccgcagctaacagattgcacattgtcttcatccattttccttctacccacatgcccctgcccttaagacatttgcggccatgtgcattgatagttgattgctggtccagcagcgtgcaacttcgtgtttcgtcctggcgcaaggactttcccagccagaggattttaattgatttacatggccgactgcgctctgtctgagccatcaactatctctacagccgcttgtgtttagcccctcttaaatttcatttatgcatataaaataactaggttgcaattttgcttcttgccaaaaataatcaattttttaaaatcttcaatatgcaagcac

SEQ ID NO: 29891 - DNA, 333 bp, DROSOPHILA
atgtcggactactcaaagtttctgtccaacttgacggatcagctggcacttctgcctaaagttgcgcccaaaggattgggacgattgggcagcctggagaacttgggcaataatctgggcaatctgcgccccgcccacaaggctctgatgtgcgtgggcgtggccactgtggcttgcgttgtcctcggcttcactgttaagtcattaaagggacatagccgcaaggacaagcaaaggatcatcaatgtacgaatcggtaatccgatcaagcgggaactcgagggggctgataaggacgaaggatcctttgggaaggaagaagaactcaattga

SEQ ID NO: 29892 - protein, 110 aa, DROSOPHILA
MSDYSKFLSNLTDQLALLPKVAPKGLGRLGSLENLGNNLGNLRPAHKALMCVGVATVACVVLGFTVKSLKGHSRKDKQRIINVRIGNPIKRELEGADKDEGSFGKEEELN

SEQ ID NO: 29893 - DNA, 2537 bp, DROSOPHILA
agctcctctggttccaccaactttaatggcaaagaagacagaagagggttccctgcgggtagtccgcaacggggcagtactagatacgatgccggaggtgacagctctcagagaggtggttcaggtagctccacgagaaacaatgttagtgggtcccgaaacagaaaccgattcggcggcgttggtggagtaagtgtctcctctgagcggggagcaggaaggggaggtgctgccggtggtggaagcagtcgtcgaggaggtggagctggagcctccagggaaggcgactccggcctgggctacctgccgcccacaggtggatcgggcaccagtgccatgagcggacccggggacaattaccacctcaacgatgacgatgtgggcagttcactgcctcctctggtcaccgccaaccaccgaattctagagatcgacagggatcgggagtgggtgcagcgacaccgcgactccaccgtcatcaagaacgtgggtaaatggtacgtgggcctgccgcctggtcaaagtgtgcgtgcccatgtccagaacatcgacataatacccttgggcggaaggatcggactttcgccgtcggaggcactgcgtcaggatgagatcgccgagctgaatgcctcaagggagcactaagcacccattggatctgtagatctgtagtttgtagtgcgtagctctaagtgatcagtgttgagtaaccgaaactgggttgactccacatggaaactaaaacagtatttaaagcggaatacattttttgcctgtatctgtatctcaaactgtatctgtatctctagcgaatagttatttgatatccgtggatccgggtataagcaggttaatctgcacattgcggtttccttgaatccacatataaccccatgacttagcatgctcggagtttagttgtttctgagacttgaacatgatgttggtgcttttcattgcttcgctgatagtttcctgtgctcaaggagcgcaagtgtatatgcagttcaatggacaaggatactcctacaacacggatggcgatagattggataggagtgtcgttaagcctagttttggggcatcttctctggattcctttggtccgctgaactttgtgcatcaatctctgaggacaagacagaatccactttcccggatttcctacaatacacaggataacctagcagtggcaacatcttcgctgagtgcgggctaccaattagcatcgaccaaccacctgaagcaccggcaaagccagcaaaactttgatttcagcaccgaccagatgtcgcatgcccagcacaccgatgaggcgggaaatgttttgggcaagtactcctactacgatgaggctggctaccatgagctgagctacaaggcgggcgccggcatcggattcgtggtcatgggtggcaatttggccaaggccaccaccgccgctgaaccgcactcggaaatcgaaatcggaaacggaatccaaacaaatgccttgactagcctgcaagagttgcataaatatcgtggctacacgtaaataaaatatattagccaaaactattgctcgttctacttgggtgttttgcgttatttactggaagtctttggagatctgacagtgtcacctgtcgtgtttgagacctacgtgatcggggatctgaactgtaaacatatgtcaaagaatgaatgacttgtaaaacagagttcattcaaagaaaagagtgcagctttgcttggttatagaatgcaagcaatagtcaaatattatcgagagctctggatttcataacttctacgcggcacaaaattatctttggatcggaagacattatattaacatttataaataatggtgaaattaaaaaaaaaatgtacgtaaaaatagatgtccaaaaatgtatgaattctttttgtaattgtaaatcttggaatataatattatgctaaataggacggtagaaagaatatttttcttcattttaaaaagaaacataacttgagttccataaaagcggtcatcgcattaatagaaaattttcttgcctggacataatttttaaacgttttacaataaaaatgtttgcataaagtagataagggtaaacattgtcagtttctgatcgtaaatgattgtaagagctttaattgcttgtggcgcgtgctttggcacgatacaactgcggcgatttatgcatgttataaaccctaattgattttccgatcataaaaatggttatattcggtcgcacaaagtcattttacaaatggacagtgcatcccaaagccaaattgagtcagctctgtggcttatttatttttgtttgggcaatttcatgtcggaaagggaccaaaataatacagcatttgaaatgttcgacgcgtgcgcgcacttgccaaataatttgaatcgaacggaaagccttggcgtccacggcgtggcctaaataaaatatatttctggccgcgcgaagccaagaaaagcccataagcaataataatatgcatatttgctaaaacaaaaagttattacatgggcc

SEQ ID NO: 29894 - DNA, 537 bp, DROSOPHILA
atgcagttcaatggacaaggatactcctacaacacggatggcgatagattggataggagtgtcgttaagcctagttttggggcatcttctctggattcctttggtccgctgaactttgtgcatcaatctctgaggacaagacagaatccactttcccggatttcctacaatacacaggataacctagcagtggcaacatcttcgctgagtgcgggctaccaattagcatcgaccaaccacctgaagcaccggcaaagccagcaaaactttgatttcagcaccgaccagatgtcgcatgcccagcacaccgatgaggcgggaaatgttttgggcaagtactcctactacgatgaggctggctaccatgagctgagctacaaggcgggcgccggcatcggattcgtggtcatgggtggcaatttggccaaggccaccaccgccgctgaaccgcactcggaaatcgaaatcggaaacggaatccaaacaaatgccttgactagcctgcaagagttgcataaatatcgtggctacacgtaa

SEQ ID NO: 29895 - protein, 178 aa, DROSOPHILA
MQFNGQGYSYNTDGDRLDRSVVKPSFGASSLDSFGPLNFVHQSLRTRQNPLSRISYNTQDNLAVATSSLSAGYQLASTNHLKHRQSQQNFDFSTDQMSHAQHTDEAGNVLGKYSYYDEAGYHELSYKAGAGIGFVVMGGNLAKATTAAEPHSEIEIGNGIQTNALTSLQELHKYRGYT

SEQ ID NO: 29896 - DNA, 3292 bp, DROSOPHILA
tatttgaatgtattgaaattggatgtaaatataaatataatatatatataaaatattattagcctctagcttcaaaattaggggagaaaagacaaagaaattcagaaccttagatagatataaaaaatagttatgaaatatggaccaagcttttactttttaacgattggctcaataatattatcaaagaaaaactggattatcccaatgcgaatttaattgctaacaaatttaaagaacgacatttaagttgtatgtatgttattgtataatcacatttaaagaaatttatctaaatatcgaatttaatcacataagtcttgaaaataagatgcgatattcccagttcgcataacatattttttttacgacaaacaaaagacttaagagccgaacttggcaagtaccacacaaagagcacttgtaaaggggtggggacgacgaacttgactatcaagtaccgatttaagccataaagctgctttcagtcattagctagtatctacactagaagtgctaggcaaagaagttccaatggcctggccaatcaattgcaaaccggttgatagtccctcgatccatgcaagtacgaggagcatcctgtccgaccaggcaacatgcaattacacacggacacacacagttgcgcagagtaacgttaaatttagaatggactttggtgcggtggcaggagatcggctataaatagagcattggctagacccgtttacagcacttgggctaagaagataataatatacagtagggattcttctacacagaaatattgagtaagcgagacaataattacacttactcacatacttctatgtacacttccaaaaaaaattcaaaattaatctttactcacatatggtttggcaacttatgtacaatatatcataaaaaagtatatatatattaaattatatatcgaattatatacgtattttttaagtatacaccattctttacgaccgaccattcgaccccttacagaatgttcctcctcgcggccttttgtctgtccctggcggcaatgggcggccaggccaggcccctggagccgacggcccagcacatcgtgattgtgacaccgcaggcgcaggttcacctggagcccgctctacgctacgtccacggactgtcgccactggcccgcgtggccactccgcaccaccatgaggagacgattgtgtatgtgcctgctggaactgctgcccaggtggtgccggtggtggatgccgttggatctggccgtgctggcggtgctccggagaccaagcagtgggagaacacgggcgagattgccaaccagatacagcaggtgtcccagcagggcgtcgagatcgtgagtggtcagttgagcgaggcggcagcatccgcagcctccgccggagcgggcttcttcccctcgctgttcccaccaagtgggtccaagaaggaggagcagctgcagggtttgaagaccgagaaaattgagctgatcgaaacgccggccaatactcagccattgattgccaccgaggccaggcatttctaccgtctgccccaggtctatcacactccggtggtggatgtggtgcatggtcccctctacacctggcccatttctaccatccgagcacgcagcatccagcaggaacccgaaccgacgttggcatcggctgaaactgctttaaagcagactctgaaggctgaaccacttgctgagatcaaggcggagccactggctgagatcaagtcagagccgctggctgagatcaagccggaaccacaggccttgtttaaggaacagcccctgctgaaggaacagcccgtgctaaaggaacagcccctgttgaaggaacagcccgggctaaaggatgagcccctgttgaaggaacagcccctgctaaaggaacagcccctgctaaaggaacaggtttttgaacaggctgctcaggagttgaagcccactattcctgattctaaggagcagaagaccggccgtctgctggatcacttggacatgaagcgtgtacaaaaaactttggagattgaagaggagatattgaagcaacaatgtgaggttttttattaagcacactttattggtttgaccatgtcatgtttttcacagccgccaggattgagcagcagaaggagctgatcaaaaccattcaggccgagccggtcaccaagcccatccaggcggagccacagaccaagattcttcccgccgaggcgatccagactgagcagccgaagcagcaggagatcatcgccgatgccattgtgccgcaggcttagagcctcggctggaaccagaactcatctttgaatctcattcatcccttgggcagctttggttctacgactgattcacatagctggcccggcgcaatgacgaccgggtcatggggtttcccctcatccaccatccatccatccacccaccaatcgtacatttaattactaacaagaacacacgcatccgcaacattttccattttccagacattaattaacagcaacgaaacgagaaagagacattcattcataattatcatcacgaaacgttcgtattcatcatcatcattacatattcattaaccataacattgaaaacgtaaaacagaacaataaaaaagtgaatgtaaaatgtagaatgcagggaatggaaattttaggttggattggaatatgtgggaaaattatacgactttttacgaccttagaaaggttttatgaaagaaactattcgaatatgaccggaatacaaaaaaaaaataattaaaatatttatttaagtttctaccatgcaaggcacttattttagcaattgattacgcaatgacaatgacccccaaaaattcgacgaaattcgcagagaccagaaaatccccagcaacatacaaatattgcaactattacacggttgggtaaataaaatcataaagtgcccggattcacaaccctgcatacaaagtaacgtcgaaacgtgccctgatatttgcgaatgagggtgatatatttttaaaaaatatttaaattacagcacttttatcgtcttacatagctagttgaataaatatgtattaaatagcgtgaattctagtctgtatcatcccccactgtaatgtacgcgtcctgctcaccgactgctatcagttcatcatcgttctcggcttttgcagtggttacatccggagaatcatccggcggctgtgtagtaagttcaattcgctgcaatccaccgggtttgcttgtatccgtaaagcgataaaccgaaaaatacgtttgaatgcgt

SEQ ID NO: 29897 - DNA, 1236 bp, DROSOPHILA
atgttcctcctcgcggccttttgtctgtccctggcggcaatgggcggccaggccaggcccctggagccgacggcccagcacatcgtgattgtgacaccgcaggcgcaggttcacctggagcccgctctacgctacgtccacggactgtcgccactggcccgcgtggccactccgcaccaccatgaggagacgattgtgtatgtgcctgctggaactgctgcccaggtggtgccggtggtggatgccgttggatctggccgtgctggcggtgctccggagaccaagcagtgggagaacacgggcgagattgccaaccagatacagcaggtgtcccagcagggcgtcgagatcgtgagtggtcagttgagcgaggcggcagcatccgcagcctccgccggagcgggcttcttcccctcgctgttcccaccaagtgggtccaagaaggaggagcagctgcagggtttgaagaccgagaaaattgagctgatcgaaacgccggccaatactcagccattgattgccaccgaggccaggcatttctaccgtctgccccaggtctatcacactccggtggtggatgtggtgcatggtcccctctacacctggcccatttctaccatccgagcacgcagcatccagcaggaacccgaaccgacgttggcatcggctgaaactgctttaaagcagactctgaaggctgaaccacttgctgagatcaaggcggagccactggctgagatcaagtcagagccgctggctgagatcaagccggaaccacaggccttgtttaaggaacagcccctgctgaaggaacagcccgtgctaaaggaacagcccctgttgaaggaacagcccgggctaaaggatgagcccctgttgaaggaacagcccctgctaaaggaacagcccctgctaaaggaacaggtttttgaacaggctgctcaggagttgaagcccactattcctgattctaaggagcagaagaccggccgtctgctggatcacttggacatgaagcgtgtacaaaaaactttggagattgaagaggagatattgaagcaacaatccgccaggattgagcagcagaaggagctgatcaaaaccattcaggccgagccggtcaccaagcccatccaggcggagccacagaccaagattcttcccgccgaggcgatccagactgagcagccgaagcagcaggagatcatcgccgatgccattgtgccgcaggcttag

SEQ ID NO: 29898 - protein, 411 aa, DROSOPHILA
MFLLAAFCLSLAAMGGQARPLEPTAQHIVIVTPQAQVHLEPALRYVHGLSPLARVATPHHHEETIVYVPAGTAAQVVPVVDAVGSGRAGGAPETKQWENTGEIANQIQQVSQQGVEIVSGQLSEAAASAASAGAGFFPSLFPPSGSKKEEQLQGLKTEKIELIETPANTQPLIATEARHFYRLPQVYHTPVVDVVHGPLYTWPISTIRARSIQQEPEPTLASAETALKQTLKAEPLAEIKAEPLAEIKSEPLAEIKPEPQALFKEQPLLKEQPVLKEQPLLKEQPGLKDEPLLKEQPLLKEQPLLKEQVFEQAAQELKPTIPDSKEQKTGRLLDHLDMKRVQKTLEIEEEILKQQSARIEQQKELIKTIQAEPVTKPIQAEPQTKILPAEAIQTEQPKQQEIIADAIVPQA

SEQ ID NO: 29899 - DNA, 2905 bp, DROSOPHILA
acagcagcttaatcagctgagtgtttcgcgagccgtaatttaaataaattatatacatcatcataaaaccctaattaaagagactgacaaccggagcgagactctgcttaaaaatactccagattgtgatactaattagcttaaattgtgtgtgtgataaatttgtgtaataatcaaacaaatcccgggaacaaaacaaacagaaaattgcgaattaacaaatgtaagtaaagtaacaacgcaagacgacacattaagtaaaccgaaaataacgctgtgtgaaaaaaacgaatcgaaaactggccaatcaagttgaatcaatacagagtgataagacttccgcatgcctaaataatatttacaataaataaaaagcaagaagcagcacgaacaaatttattaacttctgtgctgtgtaagacaaacgcacaaaacacacaaatgtatcgaacagagcaaaggcaaacaaaagactgaaggcacaaacttgaaatgcaactttttttttcactttagccactgttaatagaattctcatatatatttctttagaggggacaattgattgccacaattacgtcaaaagcaaacaatcggcaaagtctttcaaagagaaaggccccagatttaaaagcttgcccacaaaaaataaactgtcgactagccgaattaataatattaaatacaaatcaggcttttagccaaccaagaccggagaccataaatatcaaacaagttggcaactcaaccaaccaatgcaaaacaaagacaagccgaaagacaactcgaaagttcaggttttagatattggattttgatttcttctgatgctagcaccaccaaatggcaggaacaggggaacagagaacgggggctgaggctggggaagaccaaaatgtgtagcgcagaaattgtggagcacattgattgtgtcacgatctgcagaaaattccttaactcaacaatcacaataatattatccaactgtttacgtaaaataatgtctaaccaacatcttttcgatccccaacagatgcaggactattggcacattccccgcgcctcgctggcatcctcctcgagctcggccattagttcggccagctcgtccaagtcctcgaacaaatcgcactccaatccacctaccctaaaccaacgcagttcgcccagtaacactagcagcattcacaataacaataatacaagtgctgcagtaactgcggcagcagcggccgctgttctggcggctgccaagaggggatcgaggagctcccagggctccagcgacagtaacaacagcacgcgggtgagtaagccgagtccacgcaggctccggttgcggagaaccaaaccgtatcgaactgccgtgactcaacaaacattctcctctttttccattcgaattatacagagcgctgcttccggctcactgctgttgacggcagcgaatctggaacgctttgcggagatccacaagaagcaggagcgacacaacaagatgctgatgcccagtaatccctcctcgtcaaactataatgccaacctggccatcggcagcggcaaggatgcggttatcgccatcgagggtcagcagccagccgacgtcgatcccaacttgcagtatgtgaaaaccaaagacctggataccgtatccatcgctagctctatgcacttcacgatggtcaatggagagggtggtccaccgaagaaaccgaagcgcggtctatgcgatcgggggcgccaggtcaccgtgttgatagtcagcatgagtaccatcttcatgctgctcatcatgggcatggtctatgcgctggagagtaagttattccatctatcacctgtgtcagctaaattctaataactattcttctttcagtgcgcgcccgtgacatgcccaagagctaggatttaatacccctgcctagccaattagcttattatttattgtattgtctttgtcccccattattattaattttattattgttatcgtgtcgtcttggcgctagttgtataagatatttatttaaagattgtttggatggagtgtcaagtcagtcgaagctgggaaaattcattagtattaagcgcgctatgctatggagacagagaaacatacaagaaactaaatctggagcggatcggacaatagccgtctggtatcggataatgctgtactttctggttagcaaataagttatttatccctgtgatatgtttaataaagcgaattgtataattgtacacgaagggttgatgaatcacacctgtcgtgggttcaatgacttgggctttcagctatgaccgctgcctagcaaccagcgactaaggtattcgggcaagaaaacaccgattaagtgtttaagtaaattaataaataataactatgtctggcggtactcaaaaaccactagcacaattaaggacatcaattacgcattgaaagattgagcttctaaaattgctagctactgtataactatgacaacacctcactgggccaaataagagaaatacggcgttagcgacgtgcccggacttacctccacctcctccagagtttgggtccaggtgtagttttccaaggtgcagccattgcctgcattcggcatcagcttacccagctcactcttatcggattcatcgtccactttctcgatgggcttggagatgccatctcggttcgaggcagatggctctccaccagcgctatccagcagctgctggcgttttctgtatgggatttagacattataagatatacgaatgctaatgatacaacatatttaggataagaattgagctcggtttcaaactctttctttgaaaaggaatgctaatttgccattttgcaggaatttcacagcttttgccgagttacctgggtattttggtaaatgatctc

SEQ ID NO: 29900 - DNA, 741 bp, DROSOPHILA
atgtctaaccaacatcttttcgatccccaacagatgcaggactattggcacattccccgcgcctcgctggcatcctcctcgagctcggccattagttcggccagctcgtccaagtcctcgaacaaatcgcactccaatccacctaccctaaaccaacgcagttcgcccagtaacactagcagcattcacaataacaataatacaagtgctgcagtaactgcggcagcagcggccgctgttctggcggctgccaagaggggatcgaggagctcccagggctccagcgacagtaacaacagcacgcggagcgctgcttccggctcactgctgttgacggcagcgaatctggaacgctttgcggagatccacaagaagcaggagcgacacaacaagatgctgatgcccagtaatccctcctcgtcaaactataatgccaacctggccatcggcagcggcaaggatgcggttatcgccatcgagggtcagcagccagccgacgtcgatcccaacttgcagtatgtgaaaaccaaagacctggataccgtatccatcgctagctctatgcacttcacgatggtcaatggagagggtggtccaccgaagaaaccgaagcgcggtctatgcgatcgggggcgccaggtcaccgtgttgatagtcagcatgagtaccatcttcatgctgctcatcatgggcatggtctatgcgctggagatgcgcgcccgtgacatgcccaagagctag

SEQ ID NO: 29901 - protein, 246 aa, DROSOPHILA
MSNQHLFDPQQMQDYWHIPRASLASSSSSAISSASSSKSSNKSHSNPPTLNQRSSPSNTSSIHNNNNTSAAVTAAAAAAVLAAAKRGSRSSQGSSDSNNSTRSAASGSLLLTAANLERFAEIHKKQERHNKMLMPSNPSSSNYNANLAIGSGKDAVIAIEGQQPADVDPNLQYVKTKDLDTVSIASSMHFTMVNGEGGPPKKPKRGLCDRGRQVTVLIVSMSTIFMLLIMGMVYALEMRARDMPKS

SEQ ID NO: 29902 - DNA, 3888 bp, DROSOPHILA
ggcgggttagtcagtcagcaaattgcgttgcacttaattcacgtgtactcggtcagcttaccgacaacttcacgccctctttcctagcaccttgataattggcaatccaaaaatcctggcttagcttcttttttttttgcgaaacacccacacactgatgcaaattttaccgctgtgcgaaacgccggttgccaatgttatttgtaccccctaaatcagtcctgcgcggtatgacttttatcaactttggaatctgggatttttttaaacttttttatcaattattacaccggcttgatgcgcgctttttaagaatttcagttttttaacgaatggcggcggaggcgtcaaagtcagacctcagagtgaacgttttggaatgttccagaaatcccaaaacctatcgcttagcctaattggcaatcgatgtttatagcaacatgaataaaatttgaaaatcaaatttaacgaacaaacaggattaattacaagttactccaacttgttggtagaataaatagatgtgaaaatttaattgaaagcatttataattattttaaacaattaaaaaattgcattttccgcacaaacactcaactcttatatagattctttttttatatgcttgatatacgaaaaaaatgtgttcagactaatatgttgtccacactaacaatgaatatttaaatatatttatttacatgtagtactcgatagtttcaccccgttgttccatcactaaagcatctcgatcttgaccatccctagcttgaaatttagcgtcctattgcaggaaagtcgcgaaatagataaaataataacaagaactttcatgttttccaagaggaaaacttgattgagaccatatataggtgaaacggacagcgaaggtttcgcaaaaggcgacagcgccgtggatccggaaatatactcatcgggcagcagggaatgcgatcagtctgaagcgagaaagcggaattcagacatcctgctgcaaggaatggagaatgaaaccgaagctcttgatccggaagtttatgccgatgagacctctacagatgatagctctggtgatgatgaggtaatcctcaatccagttgaaggtctgcagccggcggttgagattgatgaacaacgtgaccagcctggtgagaacgcggaacccgagcaaccgagagttccgcctttaattctggtagatcctccgcatttgcccagtcccccgagaaattcccgccgcaatcaaggcgaagagcaggaggtgatctcattagaaacgccatcaccgcccaagaaacgtaaacgtctctccgctgctgccgataaaagccttaaaaagtcgcccgagggcaaaccaatagttgtagatgacgaggacgatggcatgacctgtcccatttgtctggattcctgggagatgagtggcgagcatcgactggtctcgctgcgatgtggtcacctctttggggaaagctgcattcggcggtggttaaacgaaagccatcgccaatcttctgtgaaggtgtgcccgcagtgcaagacgaaggccacatttagagatatccgtcatctgtatgcgaagcgcattcagatgctggacacggatattagggagcagctggaggcggagcggcggcgtacacatactctaacaacagagctggctaccgcgaagctggctaacacactcaccactgagaagctgattctcctgcagaaggactacgaacggcttaaggagctggtgagggcaggtggtggtcggggagccttcggaggcgatgcatccggccagaagagcattcaacaactagccacctaccgattgtacatggagaagaacttcgagataactcgagatcccggctgccgtgtattgctctattccgccaagcactccatgctggtggcctcgcaaaagagtgcccaaaacctgttccccggctacggcgtacgctttattgatccacctaccttcaagcccctgcaattcctgcacacctcggcactcctaatccgggacattgcttttagtgactcacagcacttgctcactgtggccagtcgggaactaaagatcaagatattcgacataagaacacggctttgctcgtctatgttcaccgctcatgacaagatgctgtggtcttgcgccctggatcgcaacgagcgcgaacactttctatacggcggagatctgcgaggtggagtttatatctacgacttgcggtttcccgagaacattctctgcgagttccaagccgaaggtgagtgtgatgaatatgcaaacgttaatacccgcttaaatcatttacttattccctacagtgaacttaagtcctgtgatacacatagctcctgtgcaacccaataagatttttaccagcggtggcttcctggtctgccaacttacggcccttacattctacgagtacgctgcggccagtgatacggctgtgcccactcggctaaatgtggagggaccctttctgtccatgcaatacgatgccgtgcaggacacggtgctcatatcggcacgatccaatccgaatttcccccagtctcgcttcatacttggtcgaatggacaagattgacggaacgccggtgctgaaggtcaaggccaccatatatggatcgaaggccacaccggttatgacgcgaccgacccaactggccgtcgaggataataccttagtggttggctatctccaggatagtaagcagctgatgatgcatgatgtgcggcgggaggagcgagtgcaaacaatgccggtcaacgaggtgatctacgacatctgccctgtggctacccaggccggatcctatttggccgccctcaccgacaataagtgtagagtttacaaagtgaacagttccatgcgatgatatatgtatgtgtgcattagttttccgtgaaaataaccaaaaaaaattttcttttagctaatttctgtgaaatatgtgactactgatataaacgagcttttaagctaagttattagttataaatttttcattatttccgtttattaaacatttgtcaaccttaaggttcgcgtacaagattaatctgaacataattctatattgtgtgtactccatgtttttgtttttgatttttgatttcaatttgtgaatgctcaaagtctgttgtggataagtcttgtataaagcaatagaaaatgttggttcgattaataatatacatataaagctatacaaaaatgttttatccatacaatatccgatttatatatgtatatgcgtaattatagatactcctaaatgaaatgtggaaatgaacgaatgtttaaatagatgtctaaattcattcctgacagtctcgaaatgtttgcaacacttcaaacttttggaaaagtccttcgatctcagacttgcaacgagtctgacatttccaagcccaagtaaatgtttatgaattcggttttcttctctcttgagtcttgagttttgtaaaattctatcaaaaaatgttcgtcgttggtcgtttgctggttttttctttttttttcgtaaatcaaaaacctctgtggcatttactcctataaagttgtatatggtttatagtattgtatatagattagtgtgttgaatagttgaaagacgcagatctatactttttaagtataattttgtatattttgtgatgttttatttgtgtttttgctgtttgtgtctgtgtgtttatgtgttcgttaatgttaagattagagaatacgtactcgtatgaagaaacgtatggagtcagcataacttaagactttcaacttaaactttaagagaactaaatatccgttacacatatatttatatatatataaacattagattaacttatgctaaactaaacacgaaacgaagtcgg

SEQ ID NO: 29903 - DNA, 1827 bp, DROSOPHILA
atggagaatgaaaccgaagctcttgatccggaagtttatgccgatgagacctctacagatgatagctctggtgatgatgaggtaatcctcaatccagttgaaggtctgcagccggcggttgagattgatgaacaacgtgaccagcctggtgagaacgcggaacccgagcaaccgagagttccgcctttaattctggtagatcctccgcatttgcccagtcccccgagaaattcccgccgcaatcaaggcgaagagcaggaggtgatctcattagaaacgccatcaccgcccaagaaacgtaaacgtctctccgctgctgccgataaaagccttaaaaagtcgcccgagggcaaaccaatagttgtagatgacgaggacgatggcatgacctgtcccatttgtctggattcctgggagatgagtggcgagcatcgactggtctcgctgcgatgtggtcacctctttggggaaagctgcattcggcggtggttaaacgaaagccatcgccaatcttctgtgaaggtgtgcccgcagtgcaagacgaaggccacatttagagatatccgtcatctgtatgcgaagcgcattcagatgctggacacggatattagggagcagctggaggcggagcggcggcgtacacatactctaacaacagagctggctaccgcgaagctggctaacacactcaccactgagaagctgattctcctgcagaaggactacgaacggcttaaggagctggtgagggcaggtggtggtcggggagccttcggaggcgatgcatccggccagaagagcattcaacaactagccacctaccgattgtacatggagaagaacttcgagataactcgagatcccggctgccgtgtattgctctattccgccaagcactccatgctggtggcctcgcaaaagagtgcccaaaacctgttccccggctacggcgtacgctttattgatccacctaccttcaagcccctgcaattcctgcacacctcggcactcctaatccgggacattgcttttagtgactcacagcacttgctcactgtggccagtcgggaactaaagatcaagatattcgacataagaacacggctttgctcgtctatgttcaccgctcatgacaagatgctgtggtcttgcgccctggatcgcaacgagcgcgaacactttctatacggcggagatctgcgaggtggagtttatatctacgacttgcggtttcccgagaacattctctgcgagttccaagccgaagtgaacttaagtcctgtgatacacatagctcctgtgcaacccaataagatttttaccagcggtggcttcctggtctgccaacttacggcccttacattctacgagtacgctgcggccagtgatacggctgtgcccactcggctaaatgtggagggaccctttctgtccatgcaatacgatgccgtgcaggacacggtgctcatatcggcacgatccaatccgaatttcccccagtctcgcttcatacttggtcgaatggacaagattgacggaacgccggtgctgaaggtcaaggccaccatatatggatcgaaggccacaccggttatgacgcgaccgacccaactggccgtcgaggataataccttagtggttggctatctccaggatagtaagcagctgatgatgcatgatgtgcggcgggaggagcgagtgcaaacaatgccggtcaacgaggtgatctacgacatctgccctgtggctacccaggccggatcctatttggccgccctcaccgacaataagtgtagagtttacaaagtgaacagttccatgcgatga

SEQ ID NO: 29904 - protein, 608 aa, DROSOPHILA
MENETEALDPEVYADETSTDDSSGDDEVILNPVEGLQPAVEIDEQRDQPGENAEPEQPRVPPLILVDPPHLPSPPRNSRRNQGEEQEVISLETPSPPKKRKRLSAAADKSLKKSPEGKPIVVDDEDDGMTCPICLDSWEMSGEHRLVSLRCGHLFGESCIRRWLNESHRQSSVKVCPQCKTKATFRDIRHLYAKRIQMLDTDIREQLEAERRRTHTLTTELATAKLANTLTTEKLILLQKDYERLKELVRAGGGRGAFGGDASGQKSIQQLATYRLYMEKNFEITRDPGCRVLLYSAKHSMLVASQKSAQNLFPGYGVRFIDPPTFKPLQFLHTSALLIRDIAFSDSQHLLTVASRELKIKIFDIRTRLCSSMFTAHDKMLWSCALDRNEREHFLYGGDLRGGVYIYDLRFPENILCEFQAEVNLSPVIHIAPVQPNKIFTSGGFLVCQLTALTFYEYAAASDTAVPTRLNVEGPFLSMQYDAVQDTVLISARSNPNFPQSRFILGRMDKIDGTPVLKVKATIYGSKATPVMTRPTQLAVEDNTLVVGYLQDSKQLMMHDVRREERVQTMPVNEVIYDICPVATQAGSYLAALTDNKCRVYKVNSSMR

SEQ ID NO: 29905 - DNA, 2466 bp, DROSOPHILA
tgattcatatggaaacctaaggctttggtcgccaatttggccactttttgagctcgttgagaaggtgtattcccggacaagcagtggccttcgtttggcaatgacccaccacggaatagttgggcgaaacctggcgacgctgcacagcgatttggatgagggttcgggcagcctggagcatctgcgaaggaggtaatccagctgaaatacagacatagtattaaagaaaatgacacagggtaattgaatgggatgacttactctggaagttgccaatgaaagcaatgccaatggactggctgttatagcggggagcatgctcgccacggatgccgaaacccaagccctcgtagattcgaccatccccgccgatcaggaaattatagccaatatccctgaactttctgcgcatatgatcggctcgaatttgcctaagtaccaactggcactgatgcggattgaagcaaggggccgtgactgtatgatggatgataatcagtcgcaccggtaccatgagcctgggcattcgcggcgagatgggcacaggacaccaggagctgcggggaacaatctggcccaaggccagagtcaatccacatagaacgagagccaactgtagcttcatgttgtttacttctggatgtatgtgctctttcggtcaccgatctgcttttatagtcaaccgaaatatctggccaggaatctctatatttactcagatgttttgatcaatgggttcgatcgttgtattactgcagcataattaaatggccagcctttgtgttgccacaaattccgcttgcgtcatctttccaaagatatttatttgtatatacttaaagccctccaagcttcgctggcttctcttctttgggaatgcatagctgcccttggacgaggcggtggcccacaaatggttggtcatccataaaagggtggttgcatttgaaagtcaaatccaatctcggcgtgctataaaagcagcctggttgggttacaaatggacagtcggtcggtgatcgagtggcccaggttacttaccctcatcatgaagagcgtgagtacccttaaggataaatgtacttaaagtgtataatctcagcattatcataatccagctttttgctaccatgttgggctacttgctccttgggttggtgctgtctcatgccagctttgcaactgccacaaatggagttattccagcagtgattccggcagtgcccgctactgttcctcgcctggttcccgtggccaccagccatcagtttgtcactcgaaactggaatcgagttttcgtgccccccgccacggtggccacttatcccaacacctatgttaagtacagcggtggctatccggcgtatcccgcctacaattacccatacgccaccacctatccgtacacctatccctactactatcccacttataacgttggatatggttacaagggtgtctggtgatctgcaacggacatagcctacctttaatacattgtgataacactcgataccaaatgatattatattatgatatatatgacaaatttaatcaaaaacttatttcatattagattcatacaacaaattgtataaaatatatatatatatatatagagagacaatctcgatattataaataaatgtttctttgtccatttattgaacatgctcattcaattcgattatttgttattaaggaatatcacacctgtatacactgtacttggcacgtcgccaaaaaagcaacagtttagccatataccgacttaatagtgacacaatgattgtggttaaccaacttgtacttttatttttgaataacacgacaaaataaggaacaatttcaatgctttctaaaagaaaaatggtgctgccactgcaggagcaaggaaacgagttggctgaatgagtcgggcgccagttgcagggaatggagcagtagccaggatgcgggcaggagcagtcggagcaaaggcggcattaaactggttaaagtagtccaagcgctggctgctggatacggccaggggagatgcacccaaaggattaaccaaaggagcgccagcaaagggaccagcagcataggcgccagcaaaaggtccacctgatcctggatagagtccgaaagtagaggccgaaggaaacagtgctggatccacagctggcttggctgccacactggccagcagtcccagggatacgagaatcaactgaaaacagaaaagagccaaatcttacaaaatccttgccaaagaatttgcttaccatttgctgcatttcaaaagagattgctgctgccacaagatccaaaaactgaatatgcattggcttggatcgactcaaaggttttatagttattgtgggcgtagaagaccacagctggcctggctaattggcgctccaaattgtcaaacacttggctccaaaagcggcctaaatggcaggtgctggcagagcagcc

SEQ ID NO: 29906 - DNA, 405 bp, DROSOPHILA
atggacagtcggtcggtgatcgagtggcccaggttacttaccctcatcatgaagagcctttttgctaccatgttgggctacttgctccttgggttggtgctgtctcatgccagctttgcaactgccacaaatggagttattccagcagtgattccggcagtgcccgctactgttcctcgcctggttcccgtggccaccagccatcagtttgtcactcgaaactggaatcgagttttcgtgccccccgccacggtggccacttatcccaacacctatgttaagtacagcggtggctatccggcgtatcccgcctacaattacccatacgccaccacctatccgtacacctatccctactactatcccacttataacgttggatatggttacaagggtgtctggtga

SEQ ID NO: 29907 - protein, 134 aa, DROSOPHILA
MDSRSVIEWPRLLTLIMKSLFATMLGYLLLGLVLSHASFATATNGVIPAVIPAVPATVPRLVPVATSHQFVTRNWNRVFVPPATVATYPNTYVKYSGGYPAYPAYNYPYATTYPYTYPYYYPTYNVGYGYKGVW

SEQ ID NO: 29908 - DNA, 2617 bp, DROSOPHILA
tagtccccgccttatcgaggtcccacgctcgggcacatctgcctatcttgagcggggaggaccttatctgtggtctcccactaagggactattttaggaggcggggaacgatctcaagtgactgactcatgtagtgtgcacttaaattacatgtttttgagcaatgcacccatgtcgccttagataacaaaatcctaaatataatttatcgctctcgattcatttacataagatatgaacggagcccaaaattgtaagtctttaaatatattcgtgttcatgtgtgaacagacatcgaacgccagatcgcagctttcacctttcttgggcagctccttgcgattaacaccgtaccgtgcggtcattgtccggaggcagaggtttacggaccgcaaggtggccataaagaatccgtgctcgtgcactccttcggagtagaagtggaccagtccgtccaaggtgggccagcctctctgatcgatggcgttgtttttggcatagacgcagtgcagcaggcactagaaatacacaaatgtatactcaacgagggtcttttagttaataaagttaacttaaaattgtttatacaatggaatacacagtgaaaactgttaaaaggcttaaaactaattgcaggctagctaacaaaaaaataatattaacatatgtaatatttttaataaacaatttttaattttgatcaaaactaagaagcagagtagcttcattaacacagtcagattagacacatttgtgtaccaatattttttttcactgcataggtacttctatctgtacattcaatttgctgatgcataaagccagctaatgtgtattaagtgccgccataaagtgcgcttttcagccatcaaattcagcattgctgggaggtgtgcgaaaaatctccaccggaggcgtgtgattttgaatgcaactgaaaatgcatttgcttttctttcgattgtctaaaaaccctgactttaggttttgctgggtgagctaaagtgggggtttagccaattgtttcttgggctgccattgaacttaattgagcatgccttatgcatttcattaacacgagaagaaaagcgatctacaagtctcgcagaagattctcctacttgacttcacttacccccgcaatgcgtttgtcttccagaggcaccagagtgggatgatatatacccgaactggccacatccaaacgtcggatattcctcatcaatctggccacgtggcgctgtggttcgggttcatcgtagactatgtactcgtactggctgatgttgggggaatgatcaagggaaggtgcctcgggcacagaaggccaaatgaagtcgatggagtcatcgttcggatcgatgggtggctgattttgtgacacctgctccttgagtatctcataggcctctaaatggggaccaaaaccgtatagtatttaatatggcttaactaatttgaaggcccaccattaaccaacttgttgcggacctcatcctggcactcccttatgaccgactcgactttcctggccgttctgggtggattcaagcacttggcctttttcgtctcgaagcgaattagatattccacagcgtcgatcgatgtgataaccatgcacgagatgcataaaagttgtgtaatcctcatggttgcgattaattggagtctccacgccgatccgaacgcctgggccgctgtcaaatgaatgtcccccgaagaaatggacgcgatgaaatcgaaagcattttcacttttccaagccaacttggcaggatggcccacacaggccacttatgaatttccagtttagctatactttttttttctcattttagttttgctctttgggtatgtggttcaatggcaaacagcaatactccaagtgcaactgcgactgccacaactggttgcacatttcccatgcgtgcagtccgttagaaacttgtccttaaagctcgaccacatgcctatgaacatggtcattggcagcggccatatatcattgctataccatatctccatggctctccgatcgcgatcgcattgggtttcgttccattgtctctgcggttgtgcgattacaaagcgcttatgctcggaaagcactcgctccgattgagcgcacaattaaccaattggtgaactcttccgccttctgaccaatttgcatatggccaaaaaacaacggctataaagattatcaaaggcggtagtctatgtggatgtaaatatgggctagccagaactataaactataaccagaatcaaaggcaaccaagcggggcggtctaatcagagggcctgacatatccccagcacatccccatctagaacccagaacaatggccaataactgtacttggaagtggccagtagcgtcgccacgctaattatggctcattataatggccaagattcaagagccaagatcctaggcggaaattgtcataaagttctgtggtctcctccagccgacgggtaattgcctttaattgcatacctggccaaaaattgctgctaagacactgacctagactcgctctggatcgaacttgtaataagctccggctaacggaaaactcaaaatggaaaattgattccccagcgatgaagt

SEQ ID NO: 29909 - DNA, 657 bp, DROSOPHILA
atggttatcacatcgatcgacgctgtggaatatctaattcgcttcgagacgaaaaaggccaagtgcttgaatccacccagaacggccaggaaagtcgagtcggtcataagggagtgccaggatgaggtccgcaacaagttggttaatgaggcctatgagatactcaaggagcaggtgtcacaaaatcagccacccatcgatccgaacgatgactccatcgacttcatttggccttctgtgcccgaggcaccttcccttgatcattcccccaacatcagccagtacgagtacatagtctacgatgaacccgaaccacagcgccacgtggccagattgatgaggaatatccgacgtttggatgtggccagttcgggtatatatcatcccactctggtgcctctggaagacaaacgcattgcggggtgcctgctgcactgcgtctatgccaaaaacaacgccatcgatcagagaggctggcccaccttggacggactggtccacttctactccgaaggagtgcacgagcacggattctttatggccaccttgcggtccgtaaacctctgcctccggacaatgaccgcacggtacggtgttaatcgcaaggagctgcccaagaaagataggcagatgtgcccgagcgtgggacctcgataa

SEQ ID NO: 29910 - protein, 218 aa, DROSOPHILA
MVITSIDAVEYLIRFETKKAKCLNPPRTARKVESVIRECQDEVRNKLVNEAYEILKEQVSQNQPPIDPNDDSIDFIWPSVPEAPSLDHSPNISQYEYIVYDEPEPQRHVARLMRNIRRLDVASSGIYHPTLVPLEDKRIAGCLLHCVYAKNNAIDQRGWPTLDGLVHFYSEGVHEHGFFMATLRSVNLCLRTMTARYGVNRKELPKKDRQMCPSVGPR

SEQ ID NO: 29911 - DNA, 2558 bp, DROSOPHILA
gtttgaccatgtcatgtttttcacagccgccaggattgagcagcagaaggagctgatcaaaaccattcaggccgagccggtcaccaagcccatccaggcggagccacagaccaagattcttcccgccgaggcgatccagactgagcagccgaagcagcaggagatcatcgccgatgccattgtgccgcaggcttagagcctcggctggaaccagaactcatctttgaatctcattcatcccttgggcagctttggttctacgactgattcacatagctggcccggcgcaatgacgaccgggtcatggggtttcccctcatccaccatccatccatccacccaccaatcgtacatttaattactaacaagaacacacgcatccgcaacattttccattttccagacattaattaacagcaacgaaacgagaaagagacattcattcataattatcatcacgaaacgttcgtattcatcatcatcattacatattcattaaccataacattgaaaacgtaaaacagaacaataaaaaagtgaatgtaaaatgtagaatgcagggaatggaaattttaggttggattggaatatgtgggaaaattatacgactttttacgaccttagaaaggttttatgaaagaaactattcgaatatgaccggaatacaaaaaaaaaataattaaaatatttatttaagtttctaccatgcaaggcacttattttagcaattgattacgcaatgacaatgacccccaaaaattcgacgaaattcgcagagaccagaaaatccccagcaacatacaaatattgcaactattacacggttgggtaaataaaatcataaagtgcccggattcacaaccctgcatacaaagtaacgtcgaaacgtgccctgatatttgcgaatgagggtgatatatttttaaaaaatatttaaattacagcacttttatcgtcttacatagctagttgaataaatatgtattaaatagcgtgaattctagtctgtatcatcccccactgtaatgtacgcgtcctgctcaccgactgctatcagttcatcatcgttctcggcttttgcagtggttacatccggagaatcatccggcggctgtgtagtaagttcaattcgctgcaatccaccgggtttgcttgtatccgtaaagcgataaaccgaaaaatacgtttgaatgcgttgaatgatattctccagtatgggcggaaacttgtgttccactccatctccataaatccttaggctcaatcgcgtttcgccaccgatgtccgacattttcgagggactcgctttcagagcctgaagaactcctctcagcattaccaggtcctgtaggttactgccactctgattgggcgcccttctgagtattagtgatccattgggtttgaattccaggtaaccgaacttctccgtatccgtgggaagtgcttgggaattcgcttcaattccgtttttgatcagggtcagtggtataatggccgcctgaagggcagtggtgaagatcagccccaatgccagcgtcaaatagatgaactgcatttcggatgatcgaagtcaagagaagatccgctctggcactggactgtgggtgcactaattttggcttcgccttggccaacgaacttattccgactgctgcgctttttctccgcgtattacccgtttttcgtacgcattttgagtgtaagtaactgagcactgtttgtatatttgcctttgttcagtttggttaggcgtttggcttggcttgacttggcctggcacatggccaataagcccaaacccaacttggagacgtgccctgagcagtcgctgcgctttggttttgagttgtttcggctgtttgagttacttatttgcatttatttgtcaattttctgttatattattcttcaactggccccgaaagtgatgtgtattgccaatatcgcaagtcgatattgttatgtagtgaaagtgttatattccccaaagatatatgagaagggttcaaatcacccacaatgaatgaaatgtttgccttgggagagaaatatacatataatttatatatgtacataatatcaaattttatataattaagcacttcactttgaaggatattaatggttccaaaggatatattacgccgtaataatatccaaaaatcccttagttaaaatataagctatatttaaaattaaaatctaagcaatgttaaaaacttgttaagtcccgctcaaagtcttgtattcatatttatcgctcagtctggcaacacgaaaattcaacacctggtcaccccaaaaaatcggttataagttttgaaatctttatggtgacaatatactaagtttggatgcaatgcctttaccaagcacccgtataaaaaacattcattttcgttgataatttattaatttatttagattgaatttcattaaatagttaaggacattgatataatgttgtgtcgcaattatcattattatttgtgtgtgtgtgtgtatttagtgcttcaagtaagcggagtctctaaaataggtaaatagataaaagg

SEQ ID NO: 29912 - DNA, 558 bp, DROSOPHILA
atgcagttcatctatttgacgctggcattggggctgatcttcaccactgcccttcaggcggccattataccactgaccctgatcaaaaacggaattgaagcgaattcccaagcacttcccacggatacggagaagttcggttacctggaattcaaacccaatggatcactaatactcagaagggcgcccaatcagagtggcagtaacctacaggacctggtaatgctgagaggagttcttcaggctctgaaagcgagtccctcgaaaatgtcggacatcggtggcgaaacgcgattgagcctaaggatttatggagatggagtggaacacaagtttccgcccatactggagaatatcattcaacgcattcaaacgtatttttcggtttatcgctttacggatacaagcaaacccggtggattgcagcgaattgaacttactacacagccgccggatgattctccggatgtaaccactgcaaaagccgagaacgatgatgaactgatagcagtcggtgagcaggacgcgtacattacagtgggggatgatacagactag

SEQ ID NO: 29913 - protein, 185 aa, DROSOPHILA
MQFIYLTLALGLIFTTALQAAIIPLTLIKNGIEANSQALPTDTEKFGYLEFKPNGSLILRRAPNQSGSNLQDLVMLRGVLQALKASPSKMSDIGGETRLSLRIYGDGVEHKFPPILENIIQRIQTYFSVYRFTDTSKPGGLQRIELTTQPPDDSPDVTTAKAENDDELIAVGEQDAYITVGDDTD

SEQ ID NO: 29914 - DNA, 2363 bp, DROSOPHILA
attggtgctggtatgacgaacgcggccataggatacgatcgatacaatgtgatcaccaagcccatgaaccgcaacatgaccttcaccaaggcggtgataatgaatataatcatctggttgtactgcacaccgtgggttgtcctgccgctaacccagttctgggatcgattcgtgccaggtgagattgtgtgtgtgtttaaattgaaaaccagggattttttagaagttttatttataaatatctgaaatattctttttttttactggtaatcatttcggaaagttcctaaatacacagtacattttttggataatggttggtgctatcaaaaagtagtgggtgcctgtttggtttgccacttagttccatcgtggggcagaggactcctaatgctgggcgaaataaatgtccagaggcctcgttttcccatgaaggccatgaagttgcccagtagcccttgattgtatctataatcctttggcgtatagaatgtggtattcagatacaatgctggtatctgatatcccaacattatgagtgatagaatgcaggcatagatgttgatgatgaaacttatgttcagtgctattaactcgcagctcattggtttgagaaataggaaaaagcgtgaaaagtgtaatacaacatattgcctccgaatttgttcatcaattataagcagatttacatgcgttgccaatgacaaaagtgatccaatatgcatgtaaactgtgaaccagaaaaagtacctttggaaaggaatggtggtaaagttacaataatatcgctgtcaccagtaactattacctgtaattagtgtggccaacgcaagtcgcagtgaagatgcagtgatgatcccgcctcagaatgcagcattcacacactttgcagtgccaggatctgggctgtattaagtgtcacatacatattttgtaataatgtttagtatccgcacatccactttttacaaatgctttttcgtggatatacagaaatattctatggcaaatactttaccggcactaacatctggcagtggtcacagaagtgccacaggtgcttctcctctgggcacggaatctggcgatccttgggcaaggaagtcaccgccgaggagttgcgatggcaggctagcatatttcctagcagattgtagacaataaatagtgccataagccaggcgatcttgaagaacagtccatcggtgtcgtatatcctgggcaacatatagaacatttccaccgaaaaaaataataccgttcccactagaacgaatcccactgcgctgggatgtacgatctttgcgaaccgcttcggattggcgttggcaatgtacttgcatcctatcatcatgaagcacatggttatataaaagatacaagctgtagtaagaattatgagttttatgtgtaattccaaggcttctttcgaaattagcacatgacaagtatctgagtgaaatagggattgtaaataaaattcaccggatatgaaaccctatccaaattatatatgaaactctaaatgatacgtttcaatcctttattcttttcctaatgtaaatccttaaaacatcaacaccattcttttgaatcatagtgattttgagtagttcattggaattcataggactagcttagcacatgtattaatttaatatgcacttatctaacacgctaacagctaccaatcagcgacgaaagtccaatttataggggggggcagagatacggatacgctaggggttagttggtacgctcctccaccttcctaatgaccacgttcagggcaagattaccgtcctcagagaacagttcgacggtgtgcttattgagcaccaggaagtcggcgttggtgaacgaggagaagttctcacggattgatcttggcttggattgccagcggagagtgcgattataggcctccaaggagatgttatacacgaactcggcggcatccttcatggagccgatcatccgacaggcggtgaagtactgctgacagtcctctcccaaattgatcttctccagcgagaggaggaagtgccgcccatggcaggactgcaccattgtccagtcgagggcaccctccagattcacattggtggccaaaaagatgatgtcgttgccctccatggtgatcacgttctcgtgggagctcatcaggtgctggtatacgtccctcaacggtccctgccaggagcacttgtcatccggatacgggcagaagtacggacggcattcgcaatcctcctcgtgcttggtcttctctgcgtaagagagccgcgctctgcagccgaaatgcgaatgcttgcagggaaagatcagcttggaggccaccttctccattgccaggctgcgga

SEQ ID NO: 29915 - DNA, 363 bp, DROSOPHILA
atgtgcttcatgatgataggatgcaagtacattgccaacgccaatccgaagcggttcgcaaagatcgtacatcccagcgcagtgggattcgttctagtgggaacggtattatttttttcggtggaaatgttctatatgttgcccaggatatacgacaccgatggactgttcttcaagatcgcctggcttatggcactatttattgtctacaatctgctaggaaatatgctagcctgccatcgcaactcctcggcggtgacttccttgcccaaggatcgccagattccgtgcccagaggagaagcacctgtggcacttctgtgaccactgccagatgttagtgccggtaaagtatttgccatag

SEQ ID NO: 29916 - protein, 120 aa, DROSOPHILA
MCFMMIGCKYIANANPKRFAKIVHPSAVGFVLVGTVLFFSVEMFYMLPRIYDTDGLFFKIAWLMALFIVYNLLGNMLACHRNSSAVTSLPKDRQIPCPEEKHLWHFCDHCQMLVPVKYLP

SEQ ID NO: 29917 - DNA, 3349 bp, DROSOPHILA
ttgagaaataggaaaaagcgtgaaaagtgtaatacaacatattgcctccgaatttgttcatcaattataagcagatttacatgcgttgccaatgacaaaagtgatccaatatgcatgtaaactgtgaaccagaaaaagtacctttggaaaggaatggtggtaaagttacaataatatcgctgtcaccagtaactattacctgtaattagtgtggccaacgcaagtcgcagtgaagatgcagtgatgatcccgcctcagaatgcagcattcacacactttgcagtgccaggatctgggctgtattaagtgtcacatacatattttgtaataatgtttagtatccgcacatccactttttacaaatgctttttcgtggatatacagaaatattctatggcaaatactttaccggcactaacatctggcagtggtcacagaagtgccacaggtgcttctcctctgggcacggaatctggcgatccttgggcaaggaagtcaccgccgaggagttgcgatggcaggctagcatatttcctagcagattgtagacaataaatagtgccataagccaggcgatcttgaagaacagtccatcggtgtcgtatatcctgggcaacatatagaacatttccaccgaaaaaaataataccgttcccactagaacgaatcccactgcgctgggatgtacgatctttgcgaaccgcttcggattggcgttggcaatgtacttgcatcctatcatcatgaagcacatggttatataaaagatacaagctgtagtaagaattatgagttttatgtgtaattccaaggcttctttcgaaattagcacatgacaagtatctgagtgaaatagggattgtaaataaaattcaccggatatgaaaccctatccaaattatatatgaaactctaaatgatacgtttcaatcctttattcttttcctaatgtaaatccttaaaacatcaacaccattcttttgaatcatagtgattttgagtagttcattggaattcataggactagcttagcacatgtattaatttaatatgcacttatctaacacgctaacagctaccaatcagcgacgaaagtccaatttataggggggggcagagatacggatacgctaggggttagttggtacgctcctccaccttcctaatgaccacgttcagggcaagattaccgtcctcagagaacagttcgacggtgtgcttattgagcaccaggaagtcggcgttggtgaacgaggagaagttctcacggattgatcttggcttggattgccagcggagagtgcgattataggcctccaaggagatgttatacacgaactcggcggcatccttcatggagccgatcatccgacaggcggtgaagtactgctgacagtcctctcccaaattgatcttctccagcgagaggaggaagtgccgcccatggcaggactgcaccattgtccagtcgagggcaccctccagattcacattggtggccaaaaagatgatgtcgttgccctccatggtgatcacgttctcgtgggagctcatcaggtgctggtatacgtccctcaacggtccctgccaggagcacttgtcatccggatacgggcagaagtacggacggcattcgcaatcctcctcgtgcttggtcttctctgcgtaagagagccgcgctctgcagccgaaatgcgaatgcttgcagggaaagatcagcttggaggccaccttctccattgccaggctgcggatgttggtcatgaacacccggcagacggggcaaatggtcaactttgagcggcaggtggagcagatgaggtggccacgcgggcactgcataattggcggcattatgtagccaaagcacaccgggcactcgagcaaagccattagaaaatcgtctcttgcaccactgcgtgttgtgtccaatggcccagtggccacaattcccgactgcacagccaccgagtccttccgcctagacggcaccagttctccggcagcggctgcgtccggggattgccgcttgaccaccacaacgtgcgtggtctcctccggcggcacgaccaacgctggtgccgattgacgacgagtcaacatttctccggatgccgttggagtgtcaatagtcctttgcggacttacccgctccggccacgataactgggggcgtgagttgcgaacagacatctgtgcttcagccaacaatcaatgcgcaagctattaatcctaagacctaacaaccaaacgattctgaagaatgagagtgccgatggttttactttttttttactttttctgaacactgaaattttgcttaaaagaattcgaaaatacaatctgtaccacaatacaacgaagctaaaagtataatgagctacttttacttcggagcctacttgctttaaatcattttaaaatcagcttaaaaatttatttttgaaattggcctaagtatcctagtaagataccaatccagctaaatctttaagatgcttcggcggtgcaccactaaaaacttgtgccatctattattgcaacgttttaaaacgcattagaagtaacccaagtatctcaaagataatccaaattaaacagataactgatttaaatcgacaagtttataaagtggcgtagctcttctttgtaattcagcttcccccagattaatttcaataattaacgagcattgtttacttttactaatcatgtttatttcagttttgtagttttgtgtctgtgtgagtgatctcatatggtagtggcgcggtaaatcggcgcattaaaagctaattacggtgcagatgcttaaaatcattaatttttcttccgttttcgattgggaaacgttggccgaatggaaatcaaaaccaaaacatgagccaaaccggggagatcgtcttaactagatagaaatttaaacattaacattgctttatatgtttggggggacttggggggaaatgggaaggggcaactgtctttttagcattgcgaaaaaaaatgttttcttttttttttagtgtgtttttgttattttgtgatggtttggcatgaacaaaattgcgggtcgcagtttcgtttaggctgcaactttcaaacaactctcgagttattacagattatcgctatcaaatattacttttctttgtgggttattaggtttgttaatttcgttaaactgttcgttttacttattaccatttacaagtattgtataaaataatttacattaactaaactagactttgcagtacatgttcgagtggatgagtgacctcctcgcctttcttgctgttctcctcgttttggtgagtgggtctgtgtgttcctagcgttcactgta

SEQ ID NO: 29918 - DNA, 1226 bp, DROSOPHILA
gtacagattgtattttcgaattcttttaagcaaaatttcagtgttcagaaaaagtaaaaaaaaagtaaaaccatcggcactctcattcttcagaatcgtttggttgttaggtcttaggattaatagcttgcgcattgattgttggctgaagcacagatgtctgttcgcaactcacgcccccagttatcgtggccggagcgggtaagtccgcaaaggactattgacactccaacggcatccggagaaatgttgactcgtcgtcaatcggcaccagcgttggtcgtgccgccggaggagaccacgcacgttgtggtggtcaagcggcaatccccggacgcagccgctgccggagaactggtgccgtctaggcggaaggactcggtggctgtgcagtcgggaattgtggccactgggccattggacacaacacgcagtggtgcaagagacgattttctaatggctttgctcgagtgcccggtgtgctttggctacataatgccgccaattatgcagtgcccgcgtggccacctcatctgctccacctgccgctcaaagttgaccatttgccccgtctgccgggtgttcatgaccaacatccgcagcctggcaatggagaaggtggcctccaagctgatctttccctgcaagcattcgcatttcggctgcagagcgcggctctcttacgcagagaagaccaagcacgaggaggattgcgaatgccgtccgtacttctgcccgtatccggatgacaagtgctcctggcagggaccgttgagggacgtataccagcacttcctcctctcgctggagaagatcaatttgggagaggactgtcagcagtacttcaccgcctgtcggatgatcggctccatgaaggatgccgccgagttcgtgtataacatctccttggaggcctataatcgcactctccgctggcaatccaagccaagatcaatccgtgagaacttctcctcgttcaccaacgccgacttcctggtgctcaataagcacaccgtcgaactgttctctgaggacggtaatcttgccctgaacgtggtcattaggaaggtggaggagcgtaccaactaacccctagcgtatccgtatctctgcccccccctataaattggactttcgtcgctgattggtagctgttagcgtgttagataagtgcatattaaattaatacatgtgctaagctagtcctatgaattccaatgaactac

SEQ ID NO: 29919 - protein, 310 aa, DROSOPHILA
MSVRNSRPQLSWPERVSPQRTIDTPTASGEMLTRRQSAPALVVPPEETTHVVVVKRQSPDAAAAGELVPSRRKDSVAVQSGIVATGPLDTTRSGARDDFLMALLECPVCFGYIMPPIMQCPRGHLICSTCRSKLTICPVCRVFMTNIRSLAMEKVASKLIFPCKHSHFGCRARLSYAEKTKHEEDCECRPYFCPYPDDKCSWQGPLRDVYQHFLLSLEKINLGEDCQQYFTACRMIGSMKDAAEFVYNISLEAYNRTLRWQSKPRSIRENFSSFTNADFLVLNKHTVELFSEDGNLALNVVIRKVEERTN

SEQ ID NO: 29920 - DNA, 2424 bp, DROSOPHILA
ggcttctcttctttgggaatgcatagctgcccttggacgaggcggtggcccacaaatggttggtcatccataaaagggtggttgcatttgaaagtcaaatccaatctcggcgtgctataaaagcagcctggttgggttacaaatggacagtcggtcggtgatcgagtggcccaggttacttaccctcatcatgaagagcgtgagtacccttaaggataaatgtacttaaagtgtataatctcagcattatcataatccagctttttgctaccatgttgggctacttgctccttgggttggtgctgtctcatgccagctttgcaactgccacaaatggagttattccagcagtgattccggcagtgcccgctactgttcctcgcctggttcccgtggccaccagccatcagtttgtcactcgaaactggaatcgagttttcgtgccccccgccacggtggccacttatcccaacacctatgttaagtacagcggtggctatccggcgtatcccgcctacaattacccatacgccaccacctatccgtacacctatccctactactatcccacttataacgttggatatggttacaagggtgtctggtgatctgcaacggacatagcctacctttaatacattgtgataacactcgataccaaatgatattatattatgatatatatgacaaatttaatcaaaaacttatttcatattagattcatacaacaaattgtataaaatatatatatatatatatagagagacaatctcgatattataaataaatgtttctttgtccatttattgaacatgctcattcaattcgattatttgttattaaggaatatcacacctgtatacactgtacttggcacgtcgccaaaaaagcaacagtttagccatataccgacttaatagtgacacaatgattgtggttaaccaacttgtacttttatttttgaataacacgacaaaataaggaacaatttcaatgctttctaaaagaaaaatggtgctgccactgcaggagcaaggaaacgagttggctgaatgagtcgggcgccagttgcagggaatggagcagtagccaggatgcgggcaggagcagtcggagcaaaggcggcattaaactggttaaagtagtccaagcgctggctgctggatacggccaggggagatgcacccaaaggattaaccaaaggagcgccagcaaagggaccagcagcataggcgccagcaaaaggtccacctgatcctggatagagtccgaaagtagaggccgaaggaaacagtgctggatccacagctggcttggctgccacactggccagcagtcccagggatacgagaatcaactgaaaacagaaaagagccaaatcttacaaaatccttgccaaagaatttgcttaccatttgctgcatttcaaaagagattgctgctgccacaagatccaaaaactgaatatgcattggcttggatcgactcaaaggttttatagttattgtgggcgtagaagaccacagctggcctggctaattggcgctccaaattgtcaaacacttggctccaaaagcggcctaaatggcaggtgctggcagagcagccaaccgccacccatttgcatacgatccgatatggctatatatgttggctatgtatgttgccacacaaaattcagtaatcaaaagtttggaaacgacttgacttgtccaaataaatgaaaccatttgtaatatgcttctcacagtttaattaatagaacaaaatgacgggacaaaaaccaatttttacatcccctacacaaagggacttgacaataactatcgtattcgtataattgcattacatatatatgtataagaataggttcgtatgtataattatcgtatattatttagctgtttgggagttacttgatcgttcagtttcagttgcttgttcagttacgtataaatatatagttatgtataatatatagtcaaatcataaaaacacattgccgtggaattaaactaattagtcgttagttaactatgtaatcaaacaatcatacaaattatgcttgtagtatgcaaaaacataaacgtaccctaggaatatatgtggtattgtatgctagcacaatggttgcactttggataattcgatatatatggaatagacgacatctagcataggcaattaattagttgctttcgatttgcggatcgattgatgattcggggcgggggcgtgagtatttcgttatttgacgagtggggagtagctttaacaaacacttgttctcgtttaagttttctctatggcttgcttggaatcgactgctggataaatctatatatacaatctggctttggaataggatcagagctgtgtgatgttttggcttgggcagaactgggagtaagagggaactctaca

SEQ ID NO: 29921 - DNA, 369 bp, DROSOPHILA
atgcagcaaatgttgattctcgtatccctgggactgctggccagtgtggcagccaagccagctgtggatccagcactgtttccttcggcctctactttcggactctatccaggatcaggtggaccttttgctggcgcctatgctgctggtccctttgctggcgctcctttggttaatcctttgggtgcatctcccctggccgtatccagcagccagcgcttggactactttaaccagtttaatgccgcctttgctccgactgctcctgcccgcatcctggctactgctccattccctgcaactggcgcccgactcattcagccaactcgtttccttgctcctgcagtggcagcaccatttttcttttag

SEQ ID NO: 29922 - protein, 122 aa, DROSOPHILA
MQQMLILVSLGLLASVAAKPAVDPALFPSASTFGLYPGSGGPFAGAYAAGPFAGAPLVNPLGASPLAVSSSQRLDYFNQFNAAFAPTAPARILATAPFPATGARLIQPTRFLAPAVAAPFFF

SEQ ID NO: 29923 - DNA, 4097 bp, DROSOPHILA
attagaagttctcaaagtaatacttacacggggcaatagcgctaacacaaatttcccccgagttttcttcggctttctgaaagcttttcgcattagcagcaatccactcggattctgatcgcgtccttatccctacaattttgtcaatttatctgtgtaaacgaggaggacttgaaggatattgttcttgtttttgcgggggaaattcatgtttttaatatataaatatttttgttaagagaataataattatatattgtttgtttctagtgttaaattgaagaaagagaataaggtggagatatcgtttcgtttcacaaaagaaatccttgaaagtgcctttaatttgctaaaacgtgttttttagataaaaccaatttactaggcttatcaataataatgcattaaagaatcaataaaaaaaaatatacttatactgtaacttatacattttcataccatacgcgagcaatggagaacgaatttctaacgcaaataatgaagcaatttacaaacggcaactaaaactaatttaatatgtgattgcaggatcgtttttctatggcaagtcaagctatatataatgtattattaacttaacttacaagacactcacacacacacacacacacacacatgcatagctatagacagcaattaataacaattatataggcataatgcaattggaaatgcttcgagtggaaagaaatcacctaacaaatacttgaattaatctaatcttatcctgaaatagaagcagcgccaaaggcttcgttttgtgaacgtgttacaaatcaaataaaaatttatgaaaatttaaaactcattgttttcggtacttcagaatcaatgatgtgcattgcaatgccatgcaagtttaataacattccagttacatataaatatgtatatggcatgacttctcgtccagtttttttagcattgcaaagaacataaaaactaatcaaaataaaaatcgtggttttgttcatcttcattattgaatggaagtctcgctcgtgcttttatctgcatttttgctacgatcgctcaatcccttttcgcgagctccaagtacagtttcaaggataatggtcttcgtactgttgatggtgtcctcgaaaaatttggcatctgcgttcttctcctcggtgatatactccagcttctctgtcagcattgtgattttttccttggccagttcaagactgaaaatataagtagttatagttgattaagcgatgggattgccgtgtccgaacttacttattctttagatcctctattctgggctcaggctgtcctgccgaattcagcgtatttgtggactggtactgggactgattttcgaagcagaaggaaccaatcgatccgttaagagaagtgcgactcagcgaactggcgtagtcggccattcgctgggtgcgtttcttcttatcggactgcacatcgagttccttctccaggtccctgatcttgacctccagtcggctgatacgggcctttaacttgccaatctgctcctgagctgcttcgttcttggctctctccgtctccagacgatctcctagagttttggtgagcaacataagctgatttttctccacctctagagcatccaggatgcccacaaattcctcctgcggaatataattaagcaaattaatagcttatgttttagtgtacagagttttacctttcgaaactcgcggcaggagaagaggaatccgccggatagggcgcgcaggtccatttccagcttcttgatcatatcctgcagactggccatggccacatccttctgcttgaccaccgtctgcagctccagatgcataccgctcagctcttccatttgccggcgcgaaagatctcgctcctcggtcacccggaccagctcgccgcgcatgtcgtccaaacggttctcgtactgaatcctctgctggttcagtttgtcattcatggtattgatattggtgccattgaagtcggtctgctcctccagctcattgtatagaatcttgtacttgttcatctcctcgttcagattcttgttcctcacctttagggcgagtgtcttgctgcgttgatcctccagttggttttgcaggctaagaatctccttttccagagcctccaccttggctcgatgaagaatctcacttttacgcacacccggtgtaaagcgatcgaagctggccgttgtggctccgccgccatcgcctccacctaatctctcagagctggcatgatgtgatcgacagctgccggttaccaactccagatccgaacccaacggcactggggcagcatattcggctcgatctacggctcggtcctcgtagaaatccaagcgagccttgagctcgtgcactttctggttgagcgcgatgatctgctgagcacgaccgcgccaattggcctgattaagattgttggccaggatgttgatgttgcagctctcaccgatctcgtgctgcaggcacttttgggccagtttcagttggctttgtagctcggtgttcctgtttcgcgtttcgaagagcttctgctgcatactgttgatcttggcttggagctcatcgggggagcagcccttttttggcagatcctgattatgctgcagcttctcctcgtgcgcacgcagctccttctccagcttctcgatctgagcatcctttttacccagccgactctttgcctgctccaattcggaacgcatctggcggttcttcttgctcagttccaggattttggtgctggcaatggaggagttgcagcgcagctcatcaatgggcacggagttgagcacctcgttgagcgaatcaaccgatttcttcaggtcggatatctcctgattcttctcatgaatggcctgggccagtgactgcttctcctgctcgcattcggatagctttttgcgcagctttttggactccggctttgttggctttggttttaccacagcggtggtcagcaccacatgggcagcggccatggcatcatggtcatgccgacgtcgagaggaacggcccactttgcaccccaacagctcctgatcccgatgggctacatactcttccggcaaagtctccatcgcaatgccctctagttgttcacataaaaatatacacaattgaatctaacaatttcgttggctgggcgaaaataatttgtacgtgtgcctgttcttgttactaaaatattcacaaattttggttgtcatcagttgtttctaggttattcaaatttaaacctcatttgaaacagacaaatcaaaggcaaggcaatttttaaatttggaactcttgtcataatcaggatttcttcaataataggtaagttaaaaataaacagagtttctgcaataataaaattgacattgacaattcttttcttgatctttccaaactgttgttttatttaagacaggataatttacatttaaaccgttattctttttttacatttacattattttattttaaataccccagcaaagtacggccaacgtcaagcaagccagccccccatgtgtttcaaattataatttaaaatataataataaaacaacgataacggcttagctaaaattcaaaaattttaacagtttttctagatagttttaactgtatctagctatttattttgtgactcgagttggcagtactgtttagttggtataatttagcggtcgcaatatggtcatactaaagtgacgtgtaagacacgaaaacaagtgaagatggacggatttatgatggtaaattgcaaaatacacaagtaactggcttaaaatcaaacccaacatgtgctgcaggatatcatcaagggcatgtgcatcatggacaacgatggcaaccgcatcctggccaagtactacgacaagaacatcctgtccacgttgaaggagcagaaggccttcgaaaagaatctgttcaataagacgcaccgctccaacacggagatcattatgctggacggactcacctgcgtgtacaagagcaacgtggacctcttcttctacgtgatgggcaacgcctacgagaacgagctcatcctgctgtccgtgctcaactgcctctacgattccatta

SEQ ID NO: 29924 - DNA, 1983 bp, DROSOPHILA
atggagactttgccggaagagtatgtagcccatcgggatcaggagctgttggggtgcaaagtgggccgttcctctcgacgtcggcatgaccatgatgccatggccgctgcccatgtggtgctgaccaccgctgtggtaaaaccaaagccaacaaagccggagtccaaaaagctgcgcaaaaagctatccgaatgcgagcaggagaagcagtcactggcccaggccattcatgagaagaatcaggagatatccgacctgaagaaatcggttgattcgctcaacgaggtgctcaactccgtgcccattgatgagctgcgctgcaactcctccattgccagcaccaaaatcctggaactgagcaagaagaaccgccagatgcgttccgaattggagcaggcaaagagtcggctgggtaaaaaggatgctcagatcgagaagctggagaaggagctgcgtgcgcacgaggagaagctgcagcataatcaggatctgccaaaaaagggctgctcccccgatgagctccaagccaagatcaacagtatgcagcagaagctcttcgaaacgcgaaacaggaacaccgagctacaaagccaactgaaactggcccaaaagtgcctgcagcacgagatcggtgagagctgcaacatcaacatcctggccaacaatcttaatcaggccaattggcgcggtcgtgctcagcagatcatcgcgctcaaccagaaagtgcacgagctcaaggctcgcttggatttctacgaggaccgagccgtagatcgagccgaatatgctgccccagtgccgttgggttcggatctggagttggtaaccggcagctgtcgatcacatcatgccagctctgagagattaggtggaggcgatggcggcggagccacaacggccagcttcgatcgctttacaccgggtgtgcgtaaaagtgagattcttcatcgagccaaggtggaggctctggaaaaggagattcttagcctgcaaaaccaactggaggatcaacgcagcaagacactcgccctaaaggtgaggaacaagaatctgaacgaggagatgaacaagtacaagattctatacaatgagctggaggagcagaccgacttcaatggcaccaatatcaataccatgaatgacaaactgaaccagcagaggattcagtacgagaaccgtttggacgacatgcgcggcgagctggtccgggtgaccgaggagcgagatctttcgcgccggcaaatggaagagctgagcggtatgcatctggagctgcagacggtggtcaagcagaaggatgtggccatggccagtctgcaggatatgatcaagaagctggaaatggacctgcgcgccctatccggcggattcctcttctcctgccgcgagtttcgaaaggaggaatttgtgggcatcctggatgctctagaggtggagaaaaatcagcttatgttgctcaccaaaactctaggagatcgtctggagacggagagagccaagaacgaagcagctcaggagcagattggcaagttaaaggcccgtatcagccgactggaggtcaagatcagggacctggagaaggaactcgatgtgcagtccgataagaagaaacgcacccagcgaatggccgactacgccagttcgctgagtcgcacttctcttaacggatcgattggttccttctgcttcgaaaatcagtcccagtaccagtccacaaatacgctgaattcggcaggacagcctgagcccagaatagaggatctaaagaataatcttgaactggccaaggaaaaaatcacaatgctgacagagaagctggagtatatcaccgaggagaagaacgcagatgccaaatttttcgaggacaccatcaacagtacgaagaccattatccttgaaactgtacttggagctcgcgaaaagggattgagcgatcgtagcaaaaatgcagataaaagcacgagcgagacttccattcaataa

SEQ ID NO: 29925 - protein, 660 aa, DROSOPHILA
METLPEEYVAHRDQELLGCKVGRSSRRRHDHDAMAAAHVVLTTAVVKPKPTKPESKKLRKKLSECEQEKQSLAQAIHEKNQEISDLKKSVDSLNEVLNSVPIDELRCNSSIASTKILELSKKNRQMRSELEQAKSRLGKKDAQIEKLEKELRAHEEKLQHNQDLPKKGCSPDELQAKINSMQQKLFETRNRNTELQSQLKLAQKCLQHEIGESCNINILANNLNQANWRGRAQQIIALNQKVHELKARLDFYEDRAVDRAEYAAPVPLGSDLELVTGSCRSHHASSERLGGGDGGGATTASFDRFTPGVRKSEILHRAKVEALEKEILSLQNQLEDQRSKTLALKVRNKNLNEEMNKYKILYNELEEQTDFNGTNINTMNDKLNQQRIQYENRLDDMRGELVRVTEERDLSRRQMEELSGMHLELQTVVKQKDVAMASLQDMIKKLEMDLRALSGGFLFSCREFRKEEFVGILDALEVEKNQLMLLTKTLGDRLETERAKNEAAQEQIGKLKARISRLEVKIRDLEKELDVQSDKKKRTQRMADYASSLSRTSLNGSIGSFCFENQSQYQSTNTLNSAGQPEPRIEDLKNNLELAKEKITMLTEKLEYITEEKNADAKFFEDTINSTKTIILETVLGAREKGLSDRSKNADKSTSETSIQ

SEQ ID NO: 29926 - DNA, 2658 bp, DROSOPHILA
agccctcggtgttttgaacccacatccattttacagcaccggtcaagtgcgataagtcggttaattgctgttgaatgatgcagcaacaaattacatcgatccgctgtaatccgcgtgacttccccgacacaattctgatcgaagagatacatacaatatattcagctatatgtatgtacagcaccgtcatcgtcgacctgcagttggtgtaattgttacaatggcccaaaacacttgacattggccctttgcgagggcgacattgaaaccacgcttcgaaggccctcccccgaaaacattaagaaatgaataaatatgggaaaaatgatatttgtagaatggcggaagggaatgaggtatggaatggtatggtctaaggtaatctctaacgataatattgacagattcttcggcaatcaaatagtgcagagcaaatgggcaaacacataataataataataataatctccgaacgccaatcttcagctctttaacgatcaatgaccattgtcagggcccaaaacgtcgaacatatccggctgggagtgtcgaacacgtctgaagacgtcttaacttggccaacggcgtttcgtcaaatatgtgttaatgcggttcgattgcgttcgattgaccatcgaacttctttcggccgccctgctaattttttgtataaatacttaaaacgatttcaacagcagcagcaaaacgcaaccacagctccaatcgattgagcaggtcagatccagatcgcagagcaagtgaagcaaacatttaagttacaacaaagatggtaagacatagtgcagaattaacatttaataaaacacagttaactctttgaagaaagatacacattctgaaatgaaaaacttttttcttatctaaattttaataacttttcattcattttaacagacgaaattctattgtataaaaaactgaagacattttattgttaaatttattttttctttttatttaatgaaagttgatattgttcatgtggcctttcctttgtttccagcaaggattcaaggagatttgcctgctgttggccgtcgtgagcctggccagctgtcgttcagtggttcgccgtgatgttagccacctgccgctggagtatctgcctccagtggagctgccacctgtgcccagtcgcgattacttgccgccggtggagcagcatgccgccaccctgaaccatgtccttcagccgccccgtgattacctgcctccgctgaacaacgagtacttgccacctgtggtggaggaggagcagaagcaagaggtgcccaccacaacccgaggtaataattccagaagaaaccaccacagcggagccaaccaccgaggcagttatcatcaccaccgaacagccgcaggaagcggagataatcacggaaccgcaagaggaggtggaagtgaaaaccgtggaggaggaggagcccgagaagaaggtggagtccgcagtgctcctggacgacggataccactatcgtactccatctgtggttccgaatctgctgcccgtgaaggagtatctgcctcccttggacggcaatgccgttgtggaggagctgcccaatggcgaggaggactcctcggccctcctggacgatggataccattatcgctccgtgaagcgactccgtttctagtccgtaacacttactgtatattccactacgaatttctgtttctgttctgtgcgacaattgttgtttaattttacaaaatacatagacaaatactttcccgactctgttggtttcacacgatattggaaagtggctcaagtgatcaggtgatgcgactataaagtacccagtacttagtgtcgtattagtcaaaagagagcaaaatgtaacattttttattagcatgtttagaaatccttggtaaacaatattaattactcactgtgctcatgcatgtggaattacttcagagtttcacgtcattcctctaactaatatacccatttaaccctactcatacctcgcagcaactcgattgctgccgtgaacatttcatttatattgatgacaggaaattagaaaaatgttttcacaatgcgcacggaacgtcgcaaggaactcttctgcgtgagatattgtcgcagtcctgcgaggtccttgctgcgtgagtcctttgggcctgccacacctccctgaccaccaccactcccaattgatttgcggcggattgtgcccgggttttattgttttctttacgtgtttgccgcttggcatacatttccattaaccaatcttgaggaaagttttcctgttactgcgttttccttacttttccacggacaactttgagtcagttcaataattcagcaaatttccaattggccgtataaatatttgaaaagttttaaatgttattcttgttttggcggcctgtttgtgctgtgcccaaatatatatgggatttttatgtttccggcggttagccgttgtcgattttactaatgaataattcagtacgaggaacaggaaaattgtttgcctacttttacgcgcagttggaataaaattgagaagcaacaagtgtcagaaattttgtggattctttgcacattcgttgttttccttgagatatcaaaaacaaataaaaatccaaaccaaaaagctttaagtgcattgcact

SEQ ID NO: 29927 - DNA, 555 bp, DROSOPHILA
atgtggcctttcctttgtttccagcaaggattcaaggagatttgcctgctgttggccgtcgtgagcctggccagctgtcgttcagtggttcgccgtgatgttagccacctgccgctggagtatctgcctccagtggagctgccacctgtgcccagtcgcgattacttgccgccggtggagcagcatgccgccaccctgaaccatgtccttcagccgccccgtgattacctgcctccgctgaacaacgagtacttgccacctgtggtggaggaggagcagaagcaagaggtgcccaccacaacccgagaggaggtggaagtgaaaaccgtggaggaggaggagcccgagaagaaggtggagtccgcagtgctcctggacgacggataccactatcgtactccatctgtggttccgaatctgctgcccgtgaaggagtatctgcctcccttggacggcaatgccgttgtggaggagctgcccaatggcgaggaggactcctcggccctcctggacgatggataccattatcgctccgtgaagcgactccgtttctag

SEQ ID NO: 29928 - protein, 184 aa, DROSOPHILA
MWPFLCFQQGFKEICLLLAVVSLASCRSVVRRDVSHLPLEYLPPVELPPVPSRDYLPPVEQHAATLNHVLQPPRDYLPPLNNEYLPPVVEEEQKQEVPTTTREEVEVKTVEEEEPEKKVESAVLLDDGYHYRTPSVVPNLLPVKEYLPPLDGNAVVEELPNGEEDSSALLDDGYHYRSVKRLRF

SEQ ID NO: 29929 - DNA, 2258 bp, DROSOPHILA
tgtcgctgtcgagcgcaaaaattggcaatttgtttagaaattagcgcactgcctcttttagcatgtaaaatgaaaatcaattttattctcccactcccttccctgcagcgcaagtggatcgaagcacccagatgagcggtggcccaggagccggatctggtggcgccgtagctggtggagtgggcggtggtgccacccacatctttcgctcgctgtcgtcggagagccagaagcgggagtggtccaagcggctctccctccggggaatgcggcatggaggagctgccggtggtcctggcggatccggcacttcgagcctggccagcagcaaggaggtgagctaattgagtccaacattcaatcacaatatcattgcgtaacagttctctggggaaaagggaaaacgacctttgtgagtgcacttaaggaaatagtatacctttcatcaagtcagatttagtaaatatgattttaagcatttcatttaaaaaaaaaaaaaaaaaacaaatataaagctaaagctctattgtatttattttaaatccatgaatgttaaaataatatacctaatcgtgtatacttttttaaccaatttaagaatttctaacatgcctttagttttaaatctcaacttttcatcttgattctaaatattataagtaatcagccaaaatttacgaatattattattctcttttattggtaaatcgtttttaatattaacattcgttgactgaacgttgtggtttaaatattttcctgttatttgctactatttttcaagcccactctctttctactactttctcctttcatcgctgtactgaccattttcaatatttcctcgcaggagagcaaacacagaaagttcttcagccgctcggcatcgctgcgtcaggcgggaagcggtggaggaggagtaggagttggaggcgtagtaggaggaagtggcagtcaccaggcgtccatggagctgcatgtgcctggccaggagggtaggggcacctcctccggagcgggctcgccacagacgcagacccaaccgtcgacgccaaagaagtccaactgggaggtgatcgaacatttcaatacgagtgccaagggaggcaaggccgtggttagcagcagtttgattgcggtgagttcgaggggattctggaatcaattaatttgcccgcctaatggacagaacgtcgatggcaggcttcatctccgcagcccatctaccttccacccgttgtgggacttaaatatttaattcgattgtaccgcaaataagctgggccgagctaaatttaaatacaatttacaatcgagggctgagtttgttaatgggcattgagaagggacgaagggaccgtcgccctgggaaatcaatttaaagcctaacaatctggcacgagcaaaacgactgcatgtcacaacattttgctttaactaaatttattgtgccatcgcaatcgatgttgaaatttggctcggggccgatgtcctgtggctaattgaaaactcttcaaacttttccagcgcacacgtttgttttaatttcattttgtgtttcattaattcgagctttccttgggttttaagtttaaagttgatttcatagtcaaacaaaacgtataaaatcaaatttatttgcgcaactttttatttggtgttggttggaagctatgatctcctttcttttccattattatgttattattactttctaaaaaccctaagtgtatttccttttaaccatttttaaggcgttctatttaaatgtaatgaaaagttagtttatatgcaataaaaaggtagttcagtttatgctttatgacttacaatgtttattttccaataaaagcaaactgaaagtatcttttctataacttttagtgctatatatggttttagattcgttactttgcacaaacgagttttaatgccaactaacaagccacgtctgggaacttacccacacacttgcaggcagacacccacacacacacttgcatggctaagctgacatgcacagggggccacttaacaactgcacacgtctgcgcgtatgtgtgtgtgtgtgtgagtatttttatttgcgttcgttgtcaagagtcaattgacaaagtttagcaaattgaaaaggaaaaaaaagagagaggagctacaaaaaagcattctggcattcaaatgggcggcaatttgcttaaaaacgccgcggggatccaaacacacttgccgctgtgtgcgtgcgtcggtgcgggtgtgtg

SEQ ID NO: 29930 - DNA, 561 bp, DROSOPHILA
atgagcggtggcccaggagccggatctggtggcgccgtagctggtggagtgggcggtggtgccacccacatctttcgctcgctgtcgtcggagagccagaagcgggagtggtccaagcggctctccctccggggaatgcggcatggaggagctgccggtggtcctggcggatccggcacttcgagcctggccagcagcaaggaggagagcaaacacagaaagttcttcagccgctcggcatcgctgcgtcaggcgggaagcggtggaggaggagtaggagttggaggcgtagtaggaggaagtggcagtcaccaggcgtccatggagctgcatgtgcctggccaggagggtaggggcacctcctccggagcgggctcgccacagacgcagacccaaccgtcgacgccaaagaagtccaactgggaggtgatcgaacatttcaatacgagtgccaagggaggcaaggccgtggttagcagcagtttgattgcgaacgtcgatggcaggcttcatctccgcagcccatctaccttccacccgttgtgggacttaaatatttaa

SEQ ID NO: 29931 - protein, 186 aa, DROSOPHILA
MSGGPGAGSGGAVAGGVGGGATHIFRSLSSESQKREWSKRLSLRGMRHGGAAGGPGGSGTSSLASSKEESKHRKFFSRSASLRQAGSGGGGVGVGGVVGGSGSHQASMELHVPGQEGRGTSSGAGSPQTQTQPSTPKKSNWEVIEHFNTSAKGGKAVVSSSLIANVDGRLHLRSPSTFHPLWDLNI

SEQ ID NO: 29932 - DNA, 3551 bp, DROSOPHILA
caagaatcaggccgtacacagaaaaaaaataagcgttcacctaaataatatttctgtttttaggaaattttaaaaccgcgttatcacttgcaacttctttatattaatctataattacccaatagccattattattctcaaaatattaaaaactacgaaggtactacacttctttgcgcttgctaagttatgttcttttcagtgtatctggcatattctttgcttggccgacgtgtgtctggaatgactaattgaatagtgcatgggctcgtatatctcgcagatacgtatccgccagatacgttagggaaggcgtgtgcccggcctaatggcttagcttagcaacatgttgcaattagcgatcttcgtttggcaacattcgctgccaaaagctggcaacatgcacagagaaacataaacacaccaagattttttcacaaagagagtgcttcataattttctctttatcgaactgcgctcgccggttgcgaagacgatcacaattggaatcgcgcggctcgcaacatgttgccttcaaaccggtctggccatgaacttggtgaaagaagctaccatggcgaagctccagttgggagaaaagtctgcgccgcgttttccgcttggaaatttttaaaagacgctgccatccagcggcctggaacatttgtaatccgacgttagaagtctgcggatcgtggccaaaaatcggagtgtcccagccagctgtcattctgactcctcctgactctgctctgaacttcgcgtgtgtgtctgtctgagtgtccgaagatttggagttactgttagttgacactaatacgagagcgagtgaaatacgagaaatacaagaaaaaaccgaacgtgaatcgcgcgagtgcaaaaagtaaagaaaatagaaagaagaagaaaaccccaaacaaacaaacaaacaaaaaaaaatagtgcgaaaaatcgatataagaaaacctgaagaaaacgaaactcggcaatcgtggtcaaaatggtgcggttaagtgcagcctggagctgctgttttttggccctgattgcgttggtatccactgtcgcctcctccgctgcggattatccgggtgtcatcgaactggtgggttatagcaatcgccgcgcacggacttacttccaagagcaaccccgctccaatcccaatcccaagccgggtttgacttcggccaaaacccgggcggatattgagaccgtgaagcggaatatccgtaaatacgatcgtttgctagagttggatacgaaaaatctgccagagcagcaaaaggatatgctcgccaggattgtggagcgagtggccaggctcaaggaatccctggacattgaggagcagcaatttaaccagcaggaagctacctcctccaggagcagtagtagtaccaccactagtgcatccagtactcaagaatcgcaaacagaagcggaaacggagctggatcaggagccgatcgagcagagcacacagctgcccactggagccaccgaagctgaaacggatcccaccctaatcctagacgaaactacgctgctggagctgcagaacacgatgaacgagcaggctgccatgagcaccataatgaaggaaatgcccacgaccacggatatgagtcagcaggaagcggaatcggaggtccccgacgaggagggagagaccacctcaccaaatctgaccacccaatcggaggcagcgacgaccagtgatgaatccctcaccgattccactgatcccgatgatcaattcgtagctgccagatcgaataacaatatagcggccataacggcagcggatgatgccgatggcaccaccacaaccaccgccaatacgggcagtcagcagcgcacgttgaccaccatgggaaaacttaagaatcgggccaccaagcgacccttcgcccacaaggtcaccgccgccctgaaacgaggaggtcagcgtccgagtagcgtgagtgcggcagctgcgagtgcggcagcggcctcaaaacccagtagcagcaccaccaccgccgccgccgccagcagcaccacccagaaacagaaattggccaccaacagtttccagcagaagcagcagcaagcgaagcccctgcaaaaggtcacaccttcgattggcggtggtggatcatccaacccgtcctcggcatccattccctcggctaccacgaattccgcagctccctccttgcctatcgagcaattgtatacccgtactccccaggccaatatcccattggcagcagcagcagcagcagcaacctcatccgcctcagcagcggcagcagcaggatcagcaggatcgggagccacaccagccacctacagcagccagcatgacagcatggtatacgatggacatgtcaatgcgtcggccttgatcgacagcctgaacacaaacgctcgggaggaatactaccagcagaaactaggagcaggcaacaaggataacaaggtaaggcatttaccacttacctatacttttggaaacttatctttttactattcgctaaaagctaaaagaccatttaaacgctagtgagatatattatttaaaatttctaataaagagagatctttcaaataagaccataattaaggtaaaatttttgtgcactataaatatttataatattaaacccttattgaaagggttaatttgtcatcgtttgcaaaactaggcagccatattgatagtaacaatacattctttttactataaactgaaaatcatccaataaatagctcaataacagggcccaaggtagctgacatattgactcctttccaaaatactgtcccatctttggcttaattagcaatgaccaccaaaaagtaacaaagctcgaaggttaaatgtagaaaggggaaaggcggcgaacgcctgtcaagctagatacatatttcccaagacaatgggctaagtcgccgggacagagacatctctggacaaaaaaaaaaagacggaaaccgtttcgggctatgtaaacaaaaactggaagaaccgaagtaaaccccgttgaatgtcaaatgcagaattattggaacaacttgactctcaaactataacaacaaagcaacaagcgatgacaacgaccatgacaacaccaacaacacgaagctatcgaaggcttagtaggagccacaaaaagttcaaagccaaacagagagaaaaattgtgcttactagaaaatatatgaaagtgttataaattagttacaagctaatttttatcttcttcgtcattttatgcttttgtattcaaattattccaattggaaatatcgatcggcaattgaattttatttgaagcacctctctctgcgcttctcaaagtatgtagtgtgttgctcggcttatcttctttagcttttgatcttatataacacaactaaaacatatgtttctaatctatggatctgaaagccactagatttagatatttagtgtcgttctttggctggttacaagataacattttttgtaactgtaagggggtactgtcttggatagttggccaaagctggccacttgttata

SEQ ID NO: 29933 - DNA, 1551 bp, DROSOPHILA
atggtgcggttaagtgcagcctggagctgctgttttttggccctgattgcgttggtatccactgtcgcctcctccgctgcggattatccgggtgtcatcgaactggtgggttatagcaatcgccgcgcacggacttacttccaagagcaaccccgctccaatcccaatcccaagccgggtttgacttcggccaaaacccgggcggatattgagaccgtgaagcggaatatccgtaaatacgatcgtttgctagagttggatacgaaaaatctgccagagcagcaaaaggatatgctcgccaggattgtggagcgagtggccaggctcaaggaatccctggacattgaggagcagcaatttaaccagcaggaagctacctcctccaggagcagtagtagtaccaccactagtgcatccagtactcaagaatcgcaaacagaagcggaaacggagctggatcaggagccgatcgagcagagcacacagctgcccactggagccaccgaagctgaaacggatcccaccctaatcctagacgaaactacgctgctggagctgcagaacacgatgaacgagcaggctgccatgagcaccataatgaaggaaatgcccacgaccacggatatgagtcagcaggaagcggaatcggaggtccccgacgaggagggagagaccacctcaccaaatctgaccacccaatcggaggcagcgacgaccagtgatgaatccctcaccgattccactgatcccgatgatcaattcgtagctgccagatcgaataacaatatagcggccataacggcagcggatgatgccgatggcaccaccacaaccaccgccaatacgggcagtcagcagcgcacgttgaccaccatgggaaaacttaagaatcgggccaccaagcgacccttcgcccacaaggtcaccgccgccctgaaacgaggaggtcagcgtccgagtagcgtgagtgcggcagctgcgagtgcggcagcggcctcaaaacccagtagcagcaccaccaccgccgccgccgccagcagcaccacccagaaacagaaattggccaccaacagtttccagcagaagcagcagcaagcgaagcccctgcaaaaggtcacaccttcgattggcggtggtggatcatccaacccgtcctcggcatccattccctcggctaccacgaattccgcagctccctccttgcctatcgagcaattgtatacccgtactccccaggccaatatcccattggcagcagcagcagcagcagcaacctcatccgcctcagcagcggcagcagcaggatcagcaggatcgggagccacaccagccacctacagcagccagcatgacagcatggtatacgatggacatgtcaatgcgtcggccttgatcgacagcctgaacacaaacgctcgggaggaatactaccagcagaaactaggagcaggcaacaaggataacaaggtaaggcatttaccacttacctatacttttggaaacttatctttttactattcgctaaaagctaaaagaccatttaaacgctag

SEQ ID NO: 29934 - protein, 516 aa, DROSOPHILA
MVRLSAAWSCCFLALIALVSTVASSAADYPGVIELVGYSNRRARTYFQEQPRSNPNPKPGLTSAKTRADIETVKRNIRKYDRLLELDTKNLPEQQKDMLARIVERVARLKESLDIEEQQFNQQEATSSRSSSSTTTSASSTQESQTEAETELDQEPIEQSTQLPTGATEAETDPTLILDETTLLELQNTMNEQAAMSTIMKEMPTTTDMSQQEAESEVPDEEGETTSPNLTTQSEAATTSDESLTDSTDPDDQFVAARSNNNIAAITAADDADGTTTTTANTGSQQRTLTTMGKLKNRATKRPFAHKVTAALKRGGQRPSSVSAAAASAAAASKPSSSTTTAAAASSTTQKQKLATNSFQQKQQQAKPLQKVTPSIGGGGSSNPSSASIPSATTNSAAPSLPIEQLYTRTPQANIPLAAAAAAATSSASAAAAAGSAGSGATPATYSSQHDSMVYDGHVNASALIDSLNTNAREEYYQQKLGAGNKDNKVRHLPLTYTFGNLSFYYSLKAKRPFKR

SEQ ID NO: 29935 - DNA, 5496 bp, DROSOPHILA
gcgggcggaaagtgggtggaaaaccgaggggggcagaggtgcttttaccgctcaaaggcaaaaaaaagggagatgaaagacacgccatcgaaaggagagtccacccgagctccgttcatccagttgccgctgttcactgcaactgctcggttcggattcgctcctgctcatttcaccgttactcggagcaatccgcttatccggggaatgtcccgtttacccgggaacacattcgtgattacagatccgtcaatataacaatcggatcgtgctgaaatttcaatataatagctgtgcctaattggagcacggtatcggtatctcgctaattgtggaggcaatccccaatttaccgatcgtgctgaaatatttcctagagtgatttagtgttttttcactaggctgcataaaattaaaagttcctaacgaaaaaccttgcgtgctgtttaaaaccttaaaaatttgaaaagtagttgttcttttgagaacaacaatgttaattacaattaacaatttaaatgtaataaaaagttttgagctaggcggtgaactaatttgaaaaaaaccatgattatttttgagacctagtgcttaaatctaatagttaactttacgattataccaaacgtttctgcaaaaaacaacattaaatgacattttgaaattttgcgtttgtcagctgaacgtgctaaaaggttgtagattgtgagatagtgaatgtattactagtggaaccaactaaaattattataagctgaaaaaaccctgggtaatgaacatcgaaaaaaacggcctcattttggtgactttgcatggtttaataaactaccttcagggaaattaggtcgatctcagatagtggattacatttgattacagaatcaaattttataacgcattaggtatgtattaaagaaagtaaatcttagccaaactctgaaattcatagattgtgatagaatatttgggatctactgctcttgaactctcgaactccgacatgtcgaaccaactattcttcctgagcttggcggacatcttctcggtgtatccggccatcttcaaggagcagagcaaaaagttgaagaagaccaagcaaatctacctgcccagcgatgaggagtggcaggacaagatgtactatatgctattggagattcagcgtcatgtgaacgaatcttccgatgacgcgctaaccctacacgacatcaataagaaggagaaaccggtgtttgatcccttgcgcataaccaagattgtatcgccaggagttagtccatgtggtaggcgcagtaggactctcaagtactgtcattccacggcggtgaagatcaaattgaaggccggagcacgctggaccttgcccaccatcgccaatgccgccaaactgctccgcaaacctccgattttagtggactttcagaatgagcacgagatgcgcttggctttctctttgatctacgacgtcttccgatgtgggtttctaatatagtcacttattattatcaaaatgttgtgattttatgttttagataaggttgttatgtccaacgctctggctgatgtctccttctttgaggaacacacagaggtcggtgatctatatatatcagaataacatttgatatagatttggatgaagatagtagatttttgataaagatagaaacttcacatgtttttcaaatgaaatgaaagcacattggctaatccaaaactccaataactcctcccttacaaaagtacaggattttatccttaatttttctcagttaaaaaacgacgaacaaaggatttggctaatgctcttcgaactctacgatcgtcagtttaaaggtcgaaattccgaggaaaaggatttgcaagcaaggctttacaaggagtccgaagttacaggtggatgtgggatacaggataaataagatacattcttctaaattaattcttaatccaaattttaaacagaactcgctgatctcctttggcaacatcgcattcgactggcagcttcgatttcccggatgagaatccaggttggagcactccgactgtcacaactgctgcctatccatctccaaaacgaaaaggtggccatcgcagcagccaatcctgtggtgaccggttggataaatccatttttagtacggttagtaaaaaaaataaatacataaatagataaaaatcattatactagttaacaatagacttctaaaaatgcatttaatttgatagaaataaagaggaggcggataagatcctcacaggaatgggctttactgtccacggaccggacgacgaggagccactgttggtccaacactgcaagtgggacaacatatgtcctttggtcatatcctgtattcccaaggatcgcagcgagttcaccaaatccgtgctgatgagtaaacattactttataatgcaggtgagacataaaaaaaatatataagattattattgttattcttataattattatttttatggaaaaagtagttatgcagctgagaatcttagaatatattatgacttggagtattttatgtctaattttaaattattactaactcatattttgatattgatagccttaactatagtgtttttattacccaaatatttactttcgatctgcttcattttaacaatcgatattgattagaaactaaaacagcttacttccggaaattagactaatagtctcaatgtctataaaatttcgatgtctaaatgtctatacaaattacaaagcaatttgtgtttacggtgaagtttttcccggaaaaagtgcccatagacagacagcttatgactacaacttaagtaagacaacactgcgtatgatcaataagcacgtaaaccgggcgacatgagaaaacaacgttatataaactagttatcggtaatgtgatatgtgaaaaattttgcaagtgccaaaaaaaatatttggttttaatgccagaaggttcaatgcactttttttttaatgtttacacttgtattgaattccttttcaggacaagaacttcacctttggtccggcaatcatgtccaagttgatggattactttgagctggatggcgatatactgcagacgcatattggttctccaagatctacggcatacttggctgccttgttttactccatcaaccgggtgaataacttttatgtttatggagcaggagcaaatctcaaggaatatcgtcgctatatggaatccattggggttaataatatccgtctgtttggtgatgccttcacctcgtttcccatggaatcgaatcgctttcgaacggttgtgggtatcttcgccacaccgccgaattcctttagtgcaatctcggatcccatcgatttgatctgctcccgtggtggcgatctgagcatgctggaggtgctcaccgaatcggaggtcagcgatgagggtcgccagcgggtggccatgatactcgaggagcagctgctgaccctcaccatgtcgatgtcgcgacctcaagtgcaattcgttctctatcaaacgcactcgattgttggcaccgagaacgaggatatggtgcagcatgttctggagctgatcaataagctggcgctggagaagcatcgcaatgcgtacaaggagcagaagcgtctcgaggcgatagctgaagcggaggcagccaacattccggcagctgcaatgagcaaggattcgcccaggaagaaggataaaccctcggcgcagccggaacctccagcacctggacctccgggctgtacagctactccactgccgcgtgtggaaagcattgatctgattgtaacacccgatatcgatgagttcgtgcaggataccgtgccggatatatgcataaatcaggataattgcatcaaacagcaggttacgggcagttacttggccttggtgcgccgcaaaaccctgacacatttgaatgaaaagtacctgattcgccgggcggagcagagaggactctttggtaagcccgaaaaggatgtcaaggagcggtcgagaccgaagactgtgaagctgcaggagcagcaatcggagccagcgccccaggacatgggctatgatccgaggggttccgcccacacttcaagtgcccagcaaattgtgagtaaacaaactatgccaaattcgatacctctgaccgaccaaaacagagatacactagggctgttagactttacactttattgttaacaaaaaaaaaaacagaatttgaaggtgggcgattgttgttaaaaaataggcgattggcggtagatacatatatagggggtaatgtgactggggactgaggtgtggggctatgtacactcgggtcttatgagctaataattaacatgtcgatactgtctgcggattgatcatcatcgatggacacgcgatcgatgtcatcattaccgaagatcgaacatcatgcattcaattatctcgatcggcttaattatcttgtatttcgacaagatcattgctatcagctcgaattagtgattctatacttttagttattttaatttttacttgatagtacatagctatgcacacactttctattattgcaatgcccttactttctatttgcattatcttcatctgtattcattcacatggttttgtttttttttttttatttgcatgtgcaatctagtacgcttaatccatggaggtatttaaattgccgcattgttagttataacattaacatttgtattatttgttttatttgaacattcacatcattatcgtcttagttgtactgatagggattggttatgattatcgcgaaacagggatcagatcacctccatctcgttgcacccagtatggctctctcatcacaatttaatctatattcacatcctataatcttcggccacctcatcgccattagagggtgaggtatcggggtaattagcatgaggtggcaatcactttgccctggcttagtcacaggctccaagggattaggtcatgctcgatacgcttatctcactggaccgccgatcgattggagggtgagatcgtctagccatgtcaactactacttcttccaagcactagccgacgaggtcttcgagtagttctgactcttctgctgctggtagttctgcttgatgtccgacttcttggtactcgagtaattcgatcccatgcccgaattgctgctggtgccattgtagctgaagctggacttaaaggtggggttgccaatgctcttgaacatcggatgattcttgccggcgcccaccggcggagccgactgattgtagtagctcttcgtgctattctgctgtcccttgtcgttggacatttgacgaacgtaggaggagagtcccaaccccacagcgcccatgcccattccgacgcccacgccaacggtgctcacgcccactccgcccattcccacgccgtaggactgctgcttgtggctggtgctgaaggtggccgcctgatggtcactggccagagatccgctctgtgtgtagaa

SEQ ID NO: 29936 - DNA, 2154 bp, DROSOPHILA
atgtcgaaccaactattcttcctgagcttggcggacatcttctcggtgtatccggccatcttcaaggagcagagcaaaaagttgaagaagaccaagcaaatctacctgcccagcgatgaggagtggcaggacaagatgtactatatgctattggagattcagcgtcatgtgaacgaatcttccgatgacgcgctaaccctacacgacatcaataagaaggagaaaccggtgtttgatcccttgcgcataaccaagattgtatcgccaggagttagtccatgtggtaggcgcagtaggactctcaagtactgtcattccacggcggtgaagatcaaattgaaggccggagcacgctggaccttgcccaccatcgccaatgccgccaaactgctccgcaaacctccgattttagtggactttcagaatgagcacgagatgcgcttggctttctctttgatctacgacgtcttccgatataaggttgttatgtccaacgctctggctgatgtctccttctttgaggaacacacagagttaaaaaacgacgaacaaaggatttggctaatgctcttcgaactctacgatcgtcagtttaaaggtcgaaattccgaggaaaaggatttgcaagcaaggctttacaaggagtccgaagttacagaactcgctgatctcctttggcaacatcgcattcgactggcagcttcgatttcccggatgagaatccaggttggagcactccgactgtcacaactgctgcctatccatctccaaaacgaaaaggtggccatcgcagcagccaatcctgtggtgaccggttggataaatccatttttagtacgaaataaagaggaggcggataagatcctcacaggaatgggctttactgtccacggaccggacgacgaggagccactgttggtccaacactgcaagtgggacaacatatgtcctttggtcatatcctgtattcccaaggatcgcagcgagttcaccaaatccgtgctgatgagtaaacattactttataatgcaggacaagaacttcacctttggtccggcaatcatgtccaagttgatggattactttgagctggatggcgatatactgcagacgcatattggttctccaagatctacggcatacttggctgccttgttttactccatcaaccgggtgaataacttttatgtttatggagcaggagcaaatctcaaggaatatcgtcgctatatggaatccattggggttaataatatccgtctgtttggtgatgccttcacctcgtttcccatggaatcgaatcgctttcgaacggttgtgggtatcttcgccacaccgccgaattcctttagtgcaatctcggatcccatcgatttgatctgctcccgtggtggcgatctgagcatgctggaggtgctcaccgaatcggaggtcagcgatgagggtcgccagcgggtggccatgatactcgaggagcagctgctgaccctcaccatgtcgatgtcgcgacctcaagtgcaattcgttctctatcaaacgcactcgattgttggcaccgagaacgaggatatggtgcagcatgttctggagctgatcaataagctggcgctggagaagcatcgcaatgcgtacaaggagcagaagcgtctcgaggcgatagctgaagcggaggcagccaacattccggcagctgcaatgagcaaggattcgcccaggaagaaggataaaccctcggcgcagccggaacctccagcacctggacctccgggctgtacagctactccactgccgcgtgtggaaagcattgatctgattgtaacacccgatatcgatgagttcgtgcaggataccgtgccggatatatgcataaatcaggataattgcatcaaacagcaggttacgggcagttacttggccttggtgcgccgcaaaaccctgacacatttgaatgaaaagtacctgattcgccgggcggagcagagaggactctttggtaagcccgaaaaggatgtcaaggagcggtcgagaccgaagactgtgaagctgcaggagcagcaatcggagccagcgccccaggacatgggctatgatccgaggggttccgcccacacttcaagtgcccagcaaattatcattgctatcagctcgaattag

SEQ ID NO: 29937 - protein, 717 aa, DROSOPHILA
MSNQLFFLSLADIFSVYPAIFKEQSKKLKKTKQIYLPSDEEWQDKMYYMLLEIQRHVNESSDDALTLHDINKKEKPVFDPLRITKIVSPGVSPCGRRSRTLKYCHSTAVKIKLKAGARWTLPTIANAAKLLRKPPILVDFQNEHEMRLAFSLIYDVFRYKVVMSNALADVSFFEEHTELKNDEQRIWLMLFELYDRQFKGRNSEEKDLQARLYKESEVTELADLLWQHRIRLAASISRMRIQVGALRLSQLLPIHLQNEKVAIAAANPVVTGWINPFLVRNKEEADKILTGMGFTVHGPDDEEPLLVQHCKWDNICPLVISCIPKDRSEFTKSVLMSKHYFIMQDKNFTFGPAIMSKLMDYFELDGDILQTHIGSPRSTAYLAALFYSINRVNNFYVYGAGANLKEYRRYMESIGVNNIRLFGDAFTSFPMESNRFRTVVGIFATPPNSFSAISDPIDLICSRGGDLSMLEVLTESEVSDEGRQRVAMILEEQLLTLTMSMSRPQVQFVLYQTHSIVGTENEDMVQHVLELINKLALEKHRNAYKEQKRLEAIAEAEAANIPAAAMSKDSPRKKDKPSAQPEPPAPGPPGCTATPLPRVESIDLIVTPDIDEFVQDTVPDICINQDNCIKQQVTGSYLALVRRKTLTHLNEKYLIRRAEQRGLFGKPEKDVKERSRPKTVKLQEQQSEPAPQDMGYDPRGSAHTSSAQQIIIAISSN

SEQ ID NO: 29938 - DNA, 2560 bp, DROSOPHILA
gtgctaatttaaatcgcgtctctaaactgataagcggacttaattgctatcaacttcgagttggatgactctgtcacttcggctcactgcgaaaacaatccaagccgccttgcaacttgcttgccgctttgataagcaggttcagggacaacccctttaccgccccccccccctcccgaaccaacacccactccacagcaacacacaatgaacccaacaaagccccacccaagcgatccccactcccgcaaccataaataccataactattgtggagttttccgaacttaagataacgatttcttgctcggcaggtgattaatcatctagataatgtcggtatattatcatttcattcacaactgtttataaaatttaaatgataaggattttagcaaactttctgtcttcccagatatagctaaataccaatatctccacaaaaaaaaaatcaaataccttttattgatataaataaaacagcacataaactttgtgtttacggttgtaattatggagtcgtgttcattcgataagcatttttattacaacaggattttggttttctatcaaacgataaatttgtatttcattagggcggaaaaaataatatttgttgatgttccgatttgatctttatggctttatttgcttagtatgtatttactaaatttagacatatatactttagagatatatcttccttttaagaacaacttgaattttggctgctaaaaaaacattaaaagggcgtttttattctcttcgaacaccgcttaaatacgaataaaatagaaataccccatacaaattctactggcatagttagcattgttttcaacagccaggtgtctagtttaagtacaataatatagtaccgagtacacacagttatgggccataattcagctgaaacgcagcgcgattcgaatcatttgcaagccaaatttggcgcgaactcttcgcaaacatttttcgcatattaatttgtgttctcgaaatgtgctcaattgtttggaaaaactaattacgtgcgcgcgcctatttccattcccattttgcagctccagcgtctgcagcgctccaccagcgccagtgcgatccgttcgcacctgaccaaggtgtcatcgacgtaccgccgccccatcgccttcaatttcgttcggcgcgagtgcaagcgtttctacgtcttgcccgtctacatggtgagtgtgtttcccccgttggataccttcttttagggtgcaccataatgtttactactgccatccccacacacaaacacacacccttccacacttattgaatccaatcccctttcgattccagcacagcaccaagcagagcattcgattatggtggcaatatgcctacaagtgcgtcacgccctccgcctcggccggtgccgtctggaatccgaatctgaaattccggctctactgcagccggcagctgcgcatccggaaactgagacgtggtccgtggtccaggaggcagccactccggctgcatataaatgacatcaaactgatgtgccaggtgcgcaggcgcagtaaataaatgaggcgatggcaaagccctaaatgatctgaaaaaattccattatacgaattatatgttatcaaagtttagtcgaatttcacagaaaattctgtttgaaatttgaacaataaacttggcgccatttatcgatagaccaagccaaccagttctgcaaacggtaaaattttatattttataagtaccaattttaaaacactttctattattgtattaaaacgtctcatcattttctttattttgttgaactaatactttttggttcaatagtcttcccaaaaattaaataataagtgcttgtaaataaatatgaacttgtttattttgcctttagcatggaattacatccaaagaaacagaaaataaatatattaattcttaaatagatatcttttatgtagcaaacaagaagtcaaggatatttaattttcaaacaaaaaaagtgggaaaacgaggaacattttatcaatacgattttgaaacaaaatgaatttcgcgcgttgttcataagcaaattggaatcaattattaaggaattataattattatatttaatccctaccaacttataatagctaggcatattacactttaaattgtgcttcattgattgagtacaattgcaagcacttaattcaataaaacgcaattgaaaatggtccgccagtgtcctgtgtccttcagtgagttacacggttgagtaaatatatagtagtgcatatgcgatacgtctatatagttatgttttagtaatgctgatgtcctaagtgaagtctatttaaatgccacaagttcggtgatgtgtgtcccaatcgctcagctataacgaatgtattataaaagataggtaaacatgagtacttttccttcaatgcgtcactggataaaacaatttaaaaaaatgcataaaatacataataaatcctacaatgcttacctggcattcacgactgcagtaccattgattctgacagttggagcacataaaggtggctccata

SEQ ID NO: 29939 - DNA, 384 bp, DROSOPHILA
atgtgctcaattctccagcgtctgcagcgctccaccagcgccagtgcgatccgttcgcacctgaccaaggtgtcatcgacgtaccgccgccccatcgccttcaatttcgttcggcgcgagtgcaagcgtttctacgtcttgcccgtctacatgcacagcaccaagcagagcattcgattatggtggcaatatgcctacaagtgcgtcacgccctccgcctcggccggtgccgtctggaatccgaatctgaaattccggctctactgcagccggcagctgcgcatccggaaactgagacgtggtccgtggtccaggaggcagccactccggctgcatataaatgacatcaaactgatgtgccaggtgcgcaggcgcagtaaataa

SEQ ID NO: 29940 - protein, 127 aa, DROSOPHILA
MCSILQRLQRSTSASAIRSHLTKVSSTYRRPIAFNFVRRECKRFYVLPVYMHSTKQSIRLWWQYAYKCVTPSASAGAVWNPNLKFRLYCSRQLRIRKLRRGPWSRRQPLRLHINDIKLMCQVRRRSK

SEQ ID NO: 29941 - DNA, 4020 bp, DROSOPHILA
gcagcaactaagtttggaggcatcggagaaaaacgaggagcgactgttgctggccaagcatttgtccgaaaagacgaagatgtacgaactgaccaagcagaagctggaggatgttcagggtgactttgaggctacccagcacaagcatgccaccgtgctgaaagagctccatcgcgagctgaacaagtacaaaaggggaattacggaaccgaagacaccaatcagctactgcagcaactgtcagcaggcgatcaatgggtatccaacggagaatcctcaacaacggagtcatagtcgctccagtagccacggcagcatgcacagcggcagtcgacgggccagcgagtcttccgaatcggaaacggtggccagtagtgccaccaccgtgcaacagccgccaccgcagcaagatctccaggcggtaccgtccaaaaaagtcctcgtagagcgaattctgcgactgcagcaggccactgcccgccaaaccgaacggatcgagttcctggagaaccacacggccgctctggtggccgaggtgcagaagaaatccaaggtggtgcagcactacatgctcagggatcagactgccggcgcattaaccacatcgcggagcgatcagaacaaaagcgagttggtcaagtacggaaatggtatcatggcagccatctatggtggtggatcatcgaagacgggaggcgagaataaagccatgtccctcgaactttctctagagattaacaagaaactgcaagctgtgctcgaggatacgctcttgaagaatattacgctgaaagagaacctcgatgtgttgggactcgaagtggataatctcacgaggaaattgcgctccctggagggcagttgcaagtaaatgccagtcttcttattccatagtattccattccagagtctaacccgcgtgtagatagtgtacaaatcaaatgttcgtatgtttaagtgtataatatatgtatttaatatttcaacaacgtccccaggcttataataatccttcgtaaagcttggcgctcacgggtttcggctggcccacaccaagggcaaagttaacagttggcttttctccatccttggctaatctggccattttgttgtcggtcagtttgtagtggaccttcatctggggattggggttgcccgtttcctccgataccagttcgcggagcagaggcggaagttcaatcttggtgggcagtatcactggttcaaccttcttcttgttgttcagatactttgcttcctgatcctgcggcaccagttcgtagtccgccttatagctggtgctgtagatttccacaggctttggctgcgttacgccgcgccacgttttctccacagtgacccgcaccttgcggatctcgccgggctgctcgtccacggactgcaccttcagaatccgcatgtagcagggctccggatatcgctggaacatgttacgtattagcagacggcccacaccccagttgggcaggtttgagaccagctcccacagcgtgttgccgcgaaagtctgtggtgcgaccgatgtacttgatcactttttgggccattttactgggttatttcactattttaattgaatttttgttgcaagttataaaaacagtgagtttgccactcacagggaaggtcgaacagctgtgccggctggcttaacagggctgttaaaacttaacagaaggctgttatgaacagtaaattgtgtgtgttggcaatgctgcgcggcgattttaaaaccagttaaattttgaaaaaattaaataattttttaacttcccaaataataaatgaaaacacacacacacatttaaaattttagtaactaataatcgctttaaaaggttttaatcatgttcttgtctcctagatccagatgttttgtctagtataatatttatttttaaaacaatttggtttttttcagagatttaaagatcacctaatatttaaggaatatttaaataatatttatacatctttaagtgctgataactcacagccgcatgagtctgacttgaatgcattcattatatttacataaatatgactttcaaactaagtttaatatataaaatctagtgatagttaatccctcactaatatggagctcgaatatgttcggatagttcctctcctccgccagtgtgtcccacttccccgccactggtgtctaggtgctcatcgtaggactcctcctcgccacccaactcctgaccatcgtgcccgtgggctgatggattcgtgctctcatgcaatccgatcgtggcatgctgggccgccttggatgcattcacctgagccgcagctgcggaattggccgccttaagggcggactccttggtggccgcatagtctacgcgcgcctggtgcaactgctcctcaacctgctctaatcggttcttggactgacccaccatctgggattgggaggccagttgattgttcacctccgtggaggtttgctcagcctgttcggccacggatttggcattatttaccgcagctgtgagcacggatatgtgatgatgcgccgcttgtgccgtttgctgtgccaatctcgcggagatcttggccgccttcagttgctctagctcacgggacagagatctttgggcctcggctgcctgctgctccaactcctggagaacaacctgcttgcccaccagagccgcttgtgcagtggccgccgcctgagaagccgcttgggccagtgtattctgggctatataggccgcctgcttggcagctgcatgctggttggtcactgcactgtgagcctgatccgccgatccctgggcaatggaacgcaggccgctgccaatgctatagccaccggatcccttgctggaaactgaggagctacctcccgatgtggtgtagtagcttttggtgctatgttgtggcttctctggctcgggaggctctactgccggcagatggggctcaaagtaaccaccttggtggattggtggcggttgctgcggtcggtagtgatagccattcctcttgtgcaggcgacccaaggcattggacaaaaggagcactaaaggtatttggatataaaataagatttaacgtggttttttaaccgaataggaatcctaagttaggacctaagtaggatttaagttttcaatatcctggtgtctttgtatctatttctttataatttgtatctctatatgtatataagacaagttcaagggatgttgaagatttccgaagagaatctattcgattcgggtatgagaatagtaatcttcacttttcaactcttggaatttaatttttaaagaacggatcactacaacttttcactttgttataaaagggtattccccggcttacccaaaacaagctgggcgagaagaaaacgtaatccttggccgtacatttcgctagcgctgctggaactgcattgaacttcaaattgaatggaagtgtacaatttataagtctttcagagccgccagccgagcataaagtttatcaagttgcggaaagtctgttgcggtttttaaatttaactgatcgcgggcatgttatgattttccatctccaagctatttgaatagctctgcccactatttggagagctgggtccacacacatggcacctttacacccatttccatccataccatcccatcgaggaagtttaaagtgaccgcctttgagccacaaaatatggtggcgttttttttttaatggttcgttggcacgcttgtttgaaccaaacggacagtgtaaagtggtcggtctgctcgggtttgttaatgttttaaatttaatttgcattttatgtgctgcactactttgtaattgaaccttaagtggctcttttgacgggattcaaggtgcaacgatgcagggaaagccatttgagggattacgctttcgtttagattaactagcccacgaaatttggcaatttacgaacgggggaattttccaatcaaaatttgaatatttttttaattgaaaaattatataatgctaatat

SEQ ID NO: 29942 - DNA, 1563 bp, DROSOPHILA
atgtacggccaaggattacgttttcttctcgcccagcttgttttggtgctccttttgtccaatgccttgggtcgcctgcacaagaggaatggctatcactaccgaccgcagcaaccgccaccaatccaccaaggtggttactttgagccccatctgccggcagtagagcctcccgagccagagaagccacaacatagcaccaaaagctactacaccacatcgggaggtagctcctcagtttccagcaagggatccggtggctatagcattggcagcggcctgcgttccattgcccagggatcggcggatcaggctcacagtgcagtgaccaaccagcatgcagctgccaagcaggcggcctatatagcccagaatacactggcccaagcggcttctcaggcggcggccactgcacaagcggctctggtgggcaagcaggttgttctccaggagttggagcagcaggcagccgaggcccaaagatctctgtcccgtgagctagagcaactgaaggcggccaagatctccgcgagattggcacagcaaacggcacaagcggcgcatcatcacatatccgtgctcacagctgcggtaaataatgccaaatccgtggccgaacaggctgagcaaacctccacggaggtgaacaatcaactggcctcccaatcccagatggtgggtcagtccaagaaccgattagagcaggttgaggagcagttgcaccaggcgcgcgtagactatgcggccaccaaggagtccgcccttaaggcggccaattccgcagctgcggctcaggtgaatgcatccaaggcggcccagcatgccacgatcggattgcatgagagcacgaatccatcagcccacgggcacgatggtcaggagttgggtggcgaggaggagtcctacgatgagcacctagacaccagtggcggggaagtgggacacactggcggaggagaggaactatccgaacatattcgagctccatattataaaatggcccaaaaagtgatcaagtacatcggtcgcaccacagactttcgcggcaacacgctgtgggagctggtctcaaacctgcccaactggggtgtgggccgtctgctaatacgtaacatgttccagcgatatccggagccctgctacatgcggattctgaaggtgcagtccgtggacgagcagcccggcgagatccgcaaggtgcgggtcactgtggagaaaacgtggcgcggcgtaacgcagccaaagcctgtggaaatctacagcaccagctataaggcggactacgaactggtgccgcaggatcaggaagcaaagtatctgaacaacaagaagaaggttgaaccagtgatactgcccaccaagattgaacttccgcctctgctccgcgaactggtatcggaggaaacgggcaaccccaatccccagatgaaggtccactacaaactgaccgacaacaaaatggccagattagccaaggatggagaaaagccaactgttaactttgcccttggtgtgggccagccgaaacccgtgagcgccaagctttacgaaggattattataa

SEQ ID NO: 29943 - protein, 520 aa, DROSOPHILA
MYGQGLRFLLAQLVLVLLLSNALGRLHKRNGYHYRPQQPPPIHQGGYFEPHLPAVEPPEPEKPQHSTKSYYTTSGGSSSVSSKGSGGYSIGSGLRSIAQGSADQAHSAVTNQHAAAKQAAYIAQNTLAQAASQAAATAQAALVGKQVVLQELEQQAAEAQRSLSRELEQLKAAKISARLAQQTAQAAHHHISVLTAAVNNAKSVAEQAEQTSTEVNNQLASQSQMVGQSKNRLEQVEEQLHQARVDYAATKESALKAANSAAAAQVNASKAAQHATIGLHESTNPSAHGHDGQELGGEEESYDEHLDTSGGEVGHTGGGEELSEHIRAPYYKMAQKVIKYIGRTTDFRGNTLWELVSNLPNWGVGRLLIRNMFQRYPEPCYMRILKVQSVDEQPGEIRKVRVTVEKTWRGVTQPKPVEIYSTSYKADYELVPQDQEAKYLNNKKKVEPVILPTKIELPPLLRELVSEETGNPNPQMKVHYKLTDNKMARLAKDGEKPTVNFALGVGQPKPVSAKLYEGLL

SEQ ID NO: 29944 - DNA, 2252 bp, DROSOPHILA
gcaactttagctatatagaaacctctagcgccaaattagtattggtagtgcctgaaatacactataaataaagtgggcatgtcggttttatgtgcaactgaaagttataaaagaaaaaggggatacctgtttgcttaagatgcttaagatggaaagtcttattagattgttagatttagagtaatacctgcatagagagtattctctagttgttttttttcagctgccagagcaaacaaaatatcgaaccacaaaagttggtggtgcggtgggcgggcggcagaggtgcgaagtggagcggagtggatcaaccttcagcgagttgcgcagacgcagacggcgtcgcatgttgtaggctttgttgttgcggtgctattactacaatatttgcggcgttcggcatttatttatttatatttgttttttttcggtttatttctttacgtaaagctgcgtccaagttgagacactcccacaattgcaagataaccgcgactgcgcgcgtgtttccaacgcttcgatcgcagatcgcgccgttctccagcggctgtgcgagcggggctctaccactggtacctatccaatctacccccttggcatgctccacgcccgcccctgttttgggccagcaactgctccaccgtgatttcatggcacagcaattcacacagcacttcagtttgactttgccactcgctccgccttgtgtttgttacttgaaaggggaacctccagtcctcgcttccattcgatccgttccgcccacctcagttcgtggtccgtggtgttctcagtgatttaccctctccatagtcaacccattgggcttggatcgataccatgcggcatctggtgagtgggacgagtatccccaaacagagtgggtcgctttaaggggctgccaattgggatagacctttactcatctggtttggaatataatgacctgacaaatatttaaattctaacatccctttagttgcttctggccttagtttacatggctctggttttggccaaaccggcgacggaggcgcctcgtctgctcatcgattcagcgccctcagtggtctcctaccagggttcctcacaggcccaaacccgcttcgtcatcgcgcccatgggccgatcattgggctacgtggagcccaccaatctcaatcgaacctttcacacgaaggcaacgcaggagggaggcgccaccggctacgagcagctcaatctgagtccggtctacgtgccgggtagctaggcaatggaatcgcatagttttagttagttaaatgtgtaaataaaggcagcgtgtataacaaaaaaaaaactttatgtgtaagtggttcattctcactaaaactaaatcgttattatttcgaattaagaatttaatgtgtatcatacatcatatcatagaaatgactgcgtattcattcctgttgagattaagtcagtaagcacaagcttgcaatatgaacaaccttatcccaatattcacggaatgcaaatctcatgaaatgcgtgcattcagttttactgacgtatatgttctacgagcacggcttcttatcggcatcatagaacttttcttggattttgcaacaagcagatacttttcagaactacatagaaattttcttgaacttgaacttcaagtgttttgcgctgctggtttctcgtttttccccttctttccccttcagatgcatttggtcatgtgtggatttcaaatttgtgtacagcaaattgcttattaatggaaaatagatatgaattgtaatcaaattaggtcaattcaaatatataaggagcatcgggcaggccttgcttaaccactttttaagtaagcctgataaataaggggaacaatactagttagctgcaacgataatcatgtcgaataccagtcgtcgcgatatttgggtgcccagtcccgccattatactgcatcagatgcaatccaacgaggatgtgtccgatgaatcaactctggaataccatgaggaatccaaccaggcgtggcgcgaacagtatatggccaaaaacgtggccagaatgggagtcggtttcgagttcgtgaactcaacctctcgctacatgagctccttgagcagcacccaggatgacgatacagagaaccacgtgattggtaattcatcttccagcaccacctatcgagtggggcccaccatccgaatcccccgtctcgaaattcagtcttacagttccgggtcggatgacgagaacctgatccagca

SEQ ID NO: 29945 - DNA, 252 bp, DROSOPHILA
atggctctggttttggccaaaccggcgacggaggcgcctcgtctgctcatcgattcagcgccctcagtggtctcctaccagggttcctcacaggcccaaacccgcttcgtcatcgcgcccatgggccgatcattgggctacgtggagcccaccaatctcaatcgaacctttcacacgaaggcaacgcaggagggaggcgccaccggctacgagcagctcaatctgagtccggtctacgtgccgggtagctag

SEQ ID NO: 29946 - protein, 83 aa, DROSOPHILA
MALVLAKPATEAPRLLIDSAPSVVSYQGSSQAQTRFVIAPMGRSLGYVEPTNLNRTFHTKATQEGGATGYEQLNLSPVYVPGS

SEQ ID NO: 29947 - DNA, 2375 bp, DROSOPHILA
gctttaaggggctgccaattgggatagacctttactcatctggtttggaatataatgacctgacaaatatttaaattctaacatccctttagttgcttctggccttagtttacatggctctggttttggccaaaccggcgacggaggcgcctcgtctgctcatcgattcagcgccctcagtggtctcctaccagggttcctcacaggcccaaacccgcttcgtcatcgcgcccatgggccgatcattgggctacgtggagcccaccaatctcaatcgaacctttcacacgaaggcaacgcaggagggaggcgccaccggctacgagcagctcaatctgagtccggtctacgtgccgggtagctaggcaatggaatcgcatagttttagttagttaaatgtgtaaataaaggcagcgtgtataacaaaaaaaaaactttatgtgtaagtggttcattctcactaaaactaaatcgttattatttcgaattaagaatttaatgtgtatcatacatcatatcatagaaatgactgcgtattcattcctgttgagattaagtcagtaagcacaagcttgcaatatgaacaaccttatcccaatattcacggaatgcaaatctcatgaaatgcgtgcattcagttttactgacgtatatgttctacgagcacggcttcttatcggcatcatagaacttttcttggattttgcaacaagcagatacttttcagaactacatagaaattttcttgaacttgaacttcaagtgttttgcgctgctggtttctcgtttttccccttctttccccttcagatgcatttggtcatgtgtggatttcaaatttgtgtacagcaaattgcttattaatggaaaatagatatgaattgtaatcaaattaggtcaattcaaatatataaggagcatcgggcaggccttgcttaaccactttttaagtaagcctgataaataaggggaacaatactagttagctgcaacgataatcatgtcgaataccagtcgtcgcgatatttgggtgcccagtcccgccattatactgcatcagatgcaatccaacgaggatgtgtccgatgaatcaactctggaataccatgaggaatccaaccaggcgtggcgcgaacagtatatggccaaaaacgtggccagaatgggagtcggtttcgagttcgtgaactcaacctctcgctacatgagctccttgagcagcacccaggatgacgatacagagaaccacgtgattggtaattcatcttccagcaccacctatcgagtggggcccaccatccgaatcccccgtctcgaaattcagtcttacagttccgggtcggatgacgagaacctgatccagcacctggcgtaatccaaatgcctattattcacaaaattcccagtgcttgagagccttatccgatttcttcgttttcatcaccaggatactcctgcctgtcctaccgctgccgcatctgagctccaatgaatccggactggaggcgcgatgcccttaattgtggtattttatagtataaaattaagttgcatttcatcttgttttgtttgctatcacgaatcgaaagaccttcgtctaggctctctgaacctgaactaacaatatgtttgtggtatcaatcttttggattattgttcgggctttgaaaacctttttcggaccaacgacaattgattgtcggttgatttgcaagtgagggttcgcagatgcttagtttagcgccgggttcaagttcaatgtaaagcaaacaagtttttgccaattgctcgttagttcgtttttgctgaaggacaatctagctggcgaacttttggccatataaagccgtagacatagtttgaaatcagcatcagtcactcgtcgacttcaaacctcctcaaaccaaatcaacatgttccgcttcgtgagtattggagtatggaatttgtggatatgtttcaggatctaacgtgctgtttttaaattcagattgctatctgtgccctggccaccattgtcgccgctgcaccgggattcattgaggagcaccccgtggccgtcgccccagttgtggccaaagtaggtgccgtggtgcacagtgccccactggccacctcccaccagagcttcacccagtaccacaaccaggcggtgctcactcccgtggtgaagcatgtggtgccagctgttcccgtgattaagactgtggctccagtggttcctgtggtcaagcatgtggctcccatcgtgcccgtggtcaagcaagtggctcccatcgtgcccgtggtcaagcacgtggctccagtggttcccgtcatcaagactgtgcccgtggtgcaccaccagacctacgtcgcacccgctgtccaccatg

SEQ ID NO: 29948 - DNA, 375 bp, DROSOPHILA
atgtcgaataccagtcgtcgcgatatttgggtgcccagtcccgccattatactgcatcagatgcaatccaacgaggatgtgtccgatgaatcaactctggaataccatgaggaatccaaccaggcgtggcgcgaacagtatatggccaaaaacgtggccagaatgggagtcggtttcgagttcgtgaactcaacctctcgctacatgagctccttgagcagcacccaggatgacgatacagagaaccacgtgattggtaattcatcttccagcaccacctatcgagtggggcccaccatccgaatcccccgtctcgaaattcagtcttacagttccgggtcggatgacgagaacctgatccagcacctggcgtaa

SEQ ID NO: 29949 - protein, 124 aa, DROSOPHILA
MSNTSRRDIWVPSPAIILHQMQSNEDVSDESTLEYHEESNQAWREQYMAKNVARMGVGFEFVNSTSRYMSSLSSTQDDDTENHVIGNSSSSTTYRVGPTIRIPRLEIQSYSSGSDDENLIQHLA

SEQ ID NO: 29950 - DNA, 2623 bp, DROSOPHILA
aggagcatcgggcaggccttgcttaaccactttttaagtaagcctgataaataaggggaacaatactagttagctgcaacgataatcatgtcgaataccagtcgtcgcgatatttgggtgcccagtcccgccattatactgcatcagatgcaatccaacgaggatgtgtccgatgaatcaactctggaataccatgaggaatccaaccaggcgtggcgcgaacagtatatggccaaaaacgtggccagaatgggagtcggtttcgagttcgtgaactcaacctctcgctacatgagctccttgagcagcacccaggatgacgatacagagaaccacgtgattggtaattcatcttccagcaccacctatcgagtggggcccaccatccgaatcccccgtctcgaaattcagtcttacagttccgggtcggatgacgagaacctgatccagcacctggcgtaatccaaatgcctattattcacaaaattcccagtgcttgagagccttatccgatttcttcgttttcatcaccaggatactcctgcctgtcctaccgctgccgcatctgagctccaatgaatccggactggaggcgcgatgcccttaattgtggtattttatagtataaaattaagttgcatttcatcttgttttgtttgctatcacgaatcgaaagaccttcgtctaggctctctgaacctgaactaacaatatgtttgtggtatcaatcttttggattattgttcgggctttgaaaacctttttcggaccaacgacaattgattgtcggttgatttgcaagtgagggttcgcagatgcttagtttagcgccgggttcaagttcaatgtaaagcaaacaagtttttgccaattgctcgttagttcgtttttgctgaaggacaatctagctggcgaacttttggccatataaagccgtagacatagtttgaaatcagcatcagtcactcgtcgacttcaaacctcctcaaaccaaatcaacatgttccgcttcgtgagtattggagtatggaatttgtggatatgtttcaggatctaacgtgctgtttttaaattcagattgctatctgtgccctggccaccattgtcgccgctgcaccgggattcattgaggagcaccccgtggccgtcgccccagttgtggccaaagtaggtgccgtggtgcacagtgccccactggccacctcccaccagagcttcacccagtaccacaaccaggcggtgctcactcccgtggtgaagcatgtggtgccagctgttcccgtgattaagactgtggctccagtggttcctgtggtcaagcatgtggctcccatcgtgcccgtggtcaagcaagtggctcccatcgtgcccgtggtcaagcacgtggctccagtggttcccgtcatcaagactgtgcccgtggtgcaccaccagacctacgtcgcacccgctgtccaccatgtggccgccgtgcccgtggtgaaggctctaccccatgccgtctcccaccagagccacacccaggtgcaccaccagaagaccatcatcaccccggtggttgctcctgtggtcaagactgtcgccgtcgccgctgctccagtggcccatgtctaccatcattaggaaaccttttgcttgaacggattgttatgattgcttctttgaataaatttatttgttgatcgtagaaattgtgaaattttatgaattgctctttttgtggcaaaattttgaatagctgatcgatttgatccaatccaattagcatttaaataatcaatttgaatgacttttagtggggtattcattagtattcattggcaatctcgagccggtagccgagtgcgaaaacttaaaaaaaataaaaatacaacacaaaagtaaaactgcctagaggcagcaccaaaaataaattatgcaaaccaattattgtagatctttttttcgtttaataaaaaataaatgaattgtggtcgtgctttcatacatatgtatgagtaaatggctctttaacttttaccaatgttgaacatatcaattcaaatttgacattatacattgtttactcattactagaatcaaaagtatttaacagcttagaaggaagcgtttccgatcacataaagtatatatattcttgatatgcagcactagccgatatgatctgtccgtccgtttatctgtccgtccgtatgaactttgagttctcaagatctcaaaagctgacacagttttgaaaattgttttgattttttttaaattttactattttttgaacaattttcatttatatgccaatacccttactaggcaatgtaacacctttactttttaattaagatccaggaccaggtcatcgcttgaaaacatattttaggtaaatgtagaaattcatacatttcgtacatttctaaagaaatcgaagttaaattaaatttcaattgatttttttattttctcgttcaacaaatttatcataaccatataagttcgctttcaatcgattcacttgtggtaggcggagtagacaactggggcgctgtggacggtgtgaaccagaggggcagctgggatcacggtcttgataaccggagcagctgggatgacggtcttgaccagtgga

SEQ ID NO: 29951 - DNA, 558 bp, DROSOPHILA
atgttccgcttcattgctatctgtgccctggccaccattgtcgccgctgcaccgggattcattgaggagcaccccgtggccgtcgccccagttgtggccaaagtaggtgccgtggtgcacagtgccccactggccacctcccaccagagcttcacccagtaccacaaccaggcggtgctcactcccgtggtgaagcatgtggtgccagctgttcccgtgattaagactgtggctccagtggttcctgtggtcaagcatgtggctcccatcgtgcccgtggtcaagcaagtggctcccatcgtgcccgtggtcaagcacgtggctccagtggttcccgtcatcaagactgtgcccgtggtgcaccaccagacctacgtcgcacccgctgtccaccatgtggccgccgtgcccgtggtgaaggctctaccccatgccgtctcccaccagagccacacccaggtgcaccaccagaagaccatcatcaccccggtggttgctcctgtggtcaagactgtcgccgtcgccgctgctccagtggcccatgtctaccatcattag

SEQ ID NO: 29952 - protein, 185 aa, DROSOPHILA
MFRFIAICALATIVAAAPGFIEEHPVAVAPVVAKVGAVVHSAPLATSHQSFTQYHNQAVLTPVVKHVVPAVPVIKTVAPVVPVVKHVAPIVPVVKQVAPIVPVVKHVAPVVPVIKTVPVVHHQTYVAPAVHHVAAVPVVKALPHAVSHQSHTQVHHQKTIITPVVAPVVKTVAVAAAPVAHVYHH

SEQ ID NO: 29953 - DNA, 2449 bp, DROSOPHILA
aatttaggatcaataatacttttcagaattttattttattttcatataattggttaacaaacaaacaatttgaacgctttagtggtgcagggtgtaggccagaggagcggagtgcaccactgacttgacgaggggagcggagtgaagcaccgagtgcaccacaggagcggagtgaacggagtggacgacaggagcggcgtggacaacgggcacggagtgaaccactggagcagcatggacggcaacggcgggatgggagtaggtggtggtcttcacgataggagcaaccactggctgcaccaccgccttgctgtgcacctgggtgatgctctggtgggaaaccgccgagggagcagagtgcaccaccgatccaaccttggccagaacgggctcgtgcaccacatggtgagtctcgatgagaccagcactggcggtggcgaccaggagagcgatgacgccgatctgtacggaataagccttgattacttcagctccggaggaggattatgaggagttactcacaaatttgaacattttgatattggtatctttaaagcgagtgctgctgattgcgtgagaagattcgtaaggtaactgatgatgtttgggaacagacatcccaacttatatagaacctcgagccaacgctccaaacccaaccgctgaccttcagtacgcccctgcatgacccgactttgatcagttggagattcgaaaaccaaaatcgagtcaaagcaagctcattatgatttctcgttgctgcagctgccgaaagccaaaagctcagatcgttggagcccgaagtatctgaagtatctgttgccttatcaaaagcccctcaaggtggacaacttcggctgccgaagtctctggctgtttgagcccttagcctgcgctgtttagtcgctatataagcctcatctgcacgttccaccagcatcagtcatctctctgagtttatcccaaaaacaaccaaccaaccaaccaaacctaattcaagatgttcaaatttgtaagtccaatggatttgccagaaaattaagaacttcgcattaatatgttactcctaaaggttgctgtcatcgctctcctggtcgccaccgccagtgctggtctcatcgagactcaccatgtggtgcacgagcccgttctggccaaggttggatcggtggtgcactctgctccctcggcggtttcccaccagagcatcacccaggtgcacagcaaggcggtggtgcagccagtggttgctcccatcgtgaagaccaccacctactcccatcccgccgttgccgtccacgctgctccagtggttcactccgtgcccgttgtccacgccgctccagtcgtccactctgtgcctctggtccactcagctcccctcgtcaagtcggtggtgcactccgctcccctggcctacaccctgcaccactaaggacgcaaatgtgatacagtatttacgattttttgtttcaataaatgtttttcgttttgtcataacaagttaacggattgtgttttattatatttaaaccatcagaaaagctttgacaaaaggaatttaaattttataagatttgtcattaattattttaaattccacagaaattagaatttattgttatattgaaaccaagaccaaaagatactttgttttctttgcatccacttcttataaaagtcttatacttgcctttaagatactattcgcgtatacttttgggctgatctaaaaatatgttaaatgaaaaataaatgcaatattttttcgctcgctataacatgtatggtaggtatttattgcttggaatgtattttagtgtctaaacatttttttgtgattttttccttctcattgctgaatttgcttgcattataaacagggcacagaacttgtggttgaagtaatccgcaggaaatgttatggttgaacaggagcgctgattggctggcgtgtgggtgagctatatggatggttggatctccaatgggtaactggtttaaccgatcacaactggtcccaggccatggacgctcttgatcagcagaggagaaggatgcacctgggtgatggcagcatgagaaatggcaccgggcaccacgctcaccacctgaggagcaagcagaggagatccgacaacggtgggtccccagattccaggtgccacaatgccagggccaatgagaccaggagcaggagcaggagcaggagcgggagctggggcagcagcagccaggctaaggagagcaacgaagacgcactggaaaacaatgcaaatatatatacatatattagatggatgtcacttgaatcagcatatgttcactttttttttcatagaatcctttatttgcacaaggaatactcttgattgtcttaaagaactcaccagcttgaacattttgttttgttgatggtttgcaacgatttgacatagaattgcactcc

SEQ ID NO: 29954 - DNA, 389 bp, DROSOPHILA
atgttcaaatttgttgctgtcatcgctctcctggtcgccaccgccagtgctggtctcatcgagactcaccatgtggtgcacgagcccgttctggccaaggttggatcggtggtgcactctgctccctcggcggtttcccaccagagcatcacccaggtgcacagcaaggcggtggtgcagccagtggttgctcccatcgtgaagaccaccacctactcccatcccgccgttgccgtccacgctgctccagtggttcactccgtgcccgttgtccacgccgctccagtcgtccactctgtgcctctggtccactcagctcccctcgtcaagtcggtggtgcactccgctcccctggcctacaccctgcaccactaaggacgcaaatgtga

SEQ ID NO: 29955 - protein, 124 aa, DROSOPHILA
MFKFVAVIALLVATASAGLIETHHVVHEPVLAKVGSVVHSAPSAVSHQSITQVHSKAVVQPVVAPIVKTTTYSHPAVAVHAAPVVHSVPVVHAAPVVHSVPLVHSAPLVKSVVHSAPLAYTLHH

SEQ ID NO: 29956 - DNA, 2939 bp, DROSOPHILA
taaaaaccactgtgaggcttgttaaaatatgaagaaattcattttcatttcgtttcgcgttcgttggccgacgtgatgggcaaacaaattggccagcgagtttgcgcacattcctttctcaacgcggtgacgatagcattaccattaccactacctcctccattaccaccgctattacctccgcctccgttggccttctaccgcagacgaaacagccgaagaggcaaatccccccgcccctccggacatcagagccagttatgttttggccatgacagatacacgcaagtgcgtttccattgaacttggactactttgggcgagttcggtttgcggctgctgtgcgtgttgcagctaggggaaattttcacggtcagttgcgaggaggaaaatgacaagtgcgaagcacattttcagcgacacccgtcttggcctgaagtgctgaaagtggcggctgctggccaactgcccgaatgggccagaaacctaacgtctgtgagctcaacccattcggtcagacattacattttgactggtttctatttcttttttttttgcaacctaatggggtacgatgtcttaggtgggcagtggccaccacactcggtcagttggccatttgggcatttgccgagttgtggggggagtggggtgtgctggtattttctggccaaaaagctggccgaagacaaagcgaatcagctgctgcacatgcaaactcggcgaactccccgttggcgttatttttcagcttttcttaacgatgcttgaaggaggaaaatagcaaatggccaaaaaaaaaagagcaagaaaattattattattgtattttctgcattttaagattcggttgcacatgggctctgctcggctttttgggcactataaaagccgctgcaaatttggagctaaccacacaaatcggcgaggcgtcaacacagaccaacagttcagtagttcagccaatagctagcgcaccaggatcgcaaggattagcaaaatgtacaagttggtgagtctaccctatggccaagtcacatgattctggacctaatgctataattttcatcgaaaaggtggtgttcttcgctctgctcgccgtcgtggctgcccgtccgggttatttggagtctggtccactgctccacagctatgccgctcctgccatcatccatgaaccggctctggccaaggtgggcgccatcatcaagaccgtgcccagtgccgtctcccaccagagcatcagccaggtgcacagctcggcccacatcatccaaccgattgtggctccggtggtgaagacctatgccgctcccatcatcaagacttatgcggctcctgccctccacacgaccctcctctcgtctccgtgggccggacatggttgggctggccatggctgggctccgtcctggtaaatgtgatggaggtcctggatggcattgcgtgggctagcaactttggcttaccctcacctcgatcccatgcttaaactctcaaccctgctgttttgtttttcttctttcacatttcgactgatgtaaataaatccatgtttcatgctcaaaataattctgtggcatatttcttaatggaaaaacactttatgctaccagttcactagaagttagataagaactcggtatcagtgcttttaccttaacttatgtggctggtagttcttatctatcacgatttggttgcttgatgtttatacgtgttttgaaatttatcttggatagtactttattctaaatcgttatcaagcaattattgtttattgttcgttgtttaaattatgctttcaatactctacttataccatttatagtagtacatatatgaacaatagtatatccttaatgaattaattctatctgaatataacatagaaattgatgactgtttaaaaaaattccaaatttcaggcactatgtaagatcaattaatcttcaactcaaaacaagttttgtttagtaatccaattttttttcagtagtaatctacaactataagaaatgtgaacttatattatatatataattatatattatatatataatatatgtatattatattatattatattaatttgtatcttcaatttaaaaaggcatttaaagcccaaattttcaaattgtagctgtatttttgtaagtatggctacagcactatagtaatttcccaatcaaaacaaatgtcaattttttaacaatcacattttactcgcaattaaactcaattatgtacaataggaatcgctattttctaaccgtccagttcgctgggatgagtccccaaaggtctagtctttcgattaccagctggagttgtagacaaccggagaagcggcggcataggaggtgtgcaccaccggggcggcatagctggtgtggacaacgggagcggcagcataggcggtatgcaccactggggcagctgcagcatagctgaccaccggagtggacttcaccaccggggccacgatgtcctccactacatgcgagtggctgtgcaccaccgactggctctggtgggagaccgatgtgggaatgctgctgaccacagaacccaccttggccagagagcgctcctggacaacggttgtggcagctggagcggcataaaccagaggagactcataaagatgaccgggacgagcgacagctacggcgaggagagcagacaacaccacctggacaagagagttggaggattaattgatgatataatgctgtgataaattttgtaacttaccaatttgaacatgtttaaggatttttgtttcttggtctgtgttgtgctgctgaagcgaacaagttgactgataatttgacaaccgcaagtgccgccttatatatggttaaaaatggatgttcacgacgcggctgcaaggcgaagaaagagtggtttaattaaaacatttacgagcagagcag

SEQ ID NO: 29957 - DNA, 330 bp, DROSOPHILA
atgtacaagttggtggtgttcttcgctctgctcgccgtcgtggctgcccgtccgggttatttggagtctggtccactgctccacagctatgccgctcctgccatcatccatgaaccggctctggccaaggtgggcgccatcatcaagaccgtgcccagtgccgtctcccaccagagcatcagccaggtgcacagctcggcccacatcatccaaccgattgtggctccggtggtgaagacctatgccgctcccatcatcaagacttatgcggctcctgccctccacacgaccctcctctcgtctccgtgggccggacatggcactatgtaa

SEQ ID NO: 29958 - protein, 109 aa, DROSOPHILA
MYKLVVFFALLAVVAARPGYLESGPLLHSYAAPAIIHEPALAKVGAIIKTVPSAVSHQSISQVHSSAHIIQPIVAPVVKTYAAPIIKTYAAPALHTTLLSSPWAGHGTM

SEQ ID NO: 29959 - DNA, 2447 bp, DROSOPHILA
taaaccagaggagactcataaagatgaccgggacgagcgacagctacggcgaggagagcagacaacaccacctggacaagagagttggaggattaattgatgatataatgctgtgataaattttgtaacttaccaatttgaacatgtttaaggatttttgtttcttggtctgtgttgtgctgctgaagcgaacaagttgactgataatttgacaaccgcaagtgccgccttatatatggttaaaaatggatgttcacgacgcggctgcaaggcgaagaaagagtggtttaattaaaacatttacgagcagagcagagggcagtcaaaaccaaatgagttgtataaatctgccctcgccggcacaataaaacatgagacttgcatttggtcactgtgagacccaaaatcccaaaaacccgtagcccaaaaccaaaaagctcacgcactgcaagttgaccctgactcacgcccccaaagtgcaagtaatgcagtcgccgaggaatcactgtatctaatggcagtcaaggggctaatggctgtgattcggatcagttttacacagaagaaataagtgaggcaataagtgaggagtgatctattatttaatttaaaatattaaaaaaatatcactatacttaaaactccaaagtatataaagaatgtgttcaaattaaagacgcaatgatatgaaatatttatcataatacgatcactttttttctctgtgtatcacatttccgagtacccgaacaagtagttcgcttgtctccgctgagccgtccaccgacgctaattgcttattgatcgttggccagaatctgatatgggtatgacttcggtccgaattgtgacgcacttttgtgagccggaaggtcaaagccaaatggctgctgtataaaaagatagatgcagcccggcaaacggcaacagttctcgcaagaaactcaaaccgatcactcccaattccaaacagtcaatacagacctaacccatttccaaaatgttcaagttggtggtattgtctgctctgctcgctgtagccgctgcccgtcccggtcacctgttggagtcctccccgctggtctacgctgccccagcagcgacgaccatcgtccaggagcccgttctggccaaggtgggagccgtggtcaagagcgtacccactgccgtcagccaccagagccagtcggtggtgcacagtcacgctcatgttgtcgaggatgtcgttgctcccgtggtgaagtccactccggtggtcagctatgctgctgccgctccagtggttcacacctcctatgccgctgctcccgttgtccacaccagttacgctgctcctgctcccgttgttcacacatcctacgccgccgccgctcccgttctggccacatcctacgcccaagtggccgcctcctcgccgctgacctacaccgccactggtgtgtggtaaatccatggccaggcccactccgaatcctactcctctcactgttgacaggtgaccaggatgcatgtgcatcgctggacggttttgtgatacgaattttaaataaataaatgttttgctttgaaatcgtgcaagttgttttcttcaccctgcgggtcatttatcttcctgtagttcctaaagagtctaaacagatgatagtaacaaatagcttttatcactaatatatagatgaaatatatatactaatacaaaggtactagaactgaaaaagtaaattaactgtggaactcattgttcttggtaaatatataatgaaattcggggctgatttactttgtcttgaaattcaaaatgttaggcgaaatgttgacattttgacgtgaatttagactttttttttaaacattttccggcgcgtgtggacttggtcttagctcgcttggtgtactaaaagtgtcctggttcaatgccctgtgtcacgtatctacttacatcctgctgcacctgtgccgtgggtaaatattggacacccatatgtcggaaaaacgccacatatgtgggtgaaaattagctgggtgacagcgtgggcatcccgctggttgggaattgctgacattttcgggcagtgaactcaacgaaccattagccctcttcaagggcatttctaaaagtcattgtacctctgatttaaacgtttttaataatacaggctaaaaacattttaaatcactttttttacaattaaaacaatacattagttaaaatgtttggtgcggaagtgtgtaatcatgggtatctccatctttaacttggcagcaaaatcagcaaggggctggaaaaacatggttagtgctccactcaatccgcgatccacctctgtcacgttcacctcccttctgactatctcgtggcggccattaacatatccattggtgcagtggatgctcagaaggattagaacaaatatctagaaagaaatccatttaacagagtattttta

SEQ ID NO: 29960 - DNA, 447 bp, DROSOPHILA
atgttcaagttggtggtattgtctgctctgctcgctgtagccgctgcccgtcccggtcacctgttggagtcctccccgctggtctacgctgccccagcagcgacgaccatcgtccaggagcccgttctggccaaggtgggagccgtggtcaagagcgtacccactgccgtcagccaccagagccagtcggtggtgcacagtcacgctcatgttgtcgaggatgtcgttgctcccgtggtgaagtccactccggtggtcagctatgctgctgccgctccagtggttcacacctcctatgccgctgctcccgttgtccacaccagttacgctgctcctgctcccgttgttcacacatcctacgccgccgccgctcccgttctggccacatcctacgcccaagtggccgcctcctcgccgctgacctacaccgccactggtgtgtggtaa

SEQ ID NO: 29961 - protein, 148 aa, DROSOPHILA
MFKLVVLSALLAVAAARPGHLLESSPLVYAAPAATTIVQEPVLAKVGAVVKSVPTAVSHQSQSVVHSHAHVVEDVVAPVVKSTPVVSYAAAAPVVHTSYAAAPVVHTSYAAPAPVVHTSYAAAAPVLATSYAQVAASSPLTYTATGVW

SEQ ID NO: 29962 - DNA, 2533 bp, DROSOPHILA
cagtggtcggattaggtttaaaaatggtcaacaaaactgtacatatatatctaaatccattttcttcctacaaaaaagtttacaagcagtacatatatggcgggatttggcgaaacgtgccgggatctctagcgggatttctggcggggcctttcgggctcccgcgggatttcgggataaaaggtagaaagttgagattaagtatgcagattccagagacatatacatttgttgacccacgttgtaaaaagacgccacacccacagttttgaaaaaactgttaaaattttcatttaataatcaaagaggttgttgaactttctcgttcgcattcccactagctgataagcgggtatctaatagtcgagtaaatatactatagcgttctttctgtagcttttactcactactgttttgaatgaccattttaatcaagcaaaaatcattgcgaattcttggaatttaagtaaatgcgagtaagccaagcgaaagtgttttcctgtcattataaacttggccttgaattgggtcggaagcgattacgattggtttccaattagaagtaatctcggacccttggttctccctccgcaccagaaatcgatcttcaggtgagtacgtgcgactaatgagctccgagttgtgaaatgaaatcaagagtgggtatggcaaacaagtgcgaggccgaaaataagtgaagtaatgagtagtgggaaaggggcaaactcggttgaggaggcgagcgagccgaacagaaattggccacgaataataatctggtttatggccaagacccgagacaagcggccagaatccgttcaggcacgttcgacttatggcttattgtatccgcctcaattgacaaaagccggcgaagtgcgtgtgtgtgtaaaatgtgaagttcaagtataaaagacgttgacagtccctcagctcaacacattcgaagtctgtctccctatccagcgacaccagtcgaagaagccaacaccacaccaatatgttcaaattggtaaggatcgcagggatatccatatggcaccactttggaatactaactcttattctcgtctccagttcgttctcgctgctcttttggccgtggccgccgccaagcccggtcacctggctgctgctcctctggtctacagcgctcccgccaccaccaccgtcgtccaggagcccgttctggccaaagtgggtgctgttgtgaagagcgtgcccaccgccgtgtcccaccagagcctgacccaggtgcacagcacccccgtggtggaggatgtggtggctcccgtggtcaagaccaccgctgtccactccgctcccgtgttggccgccgcacccattgtgaagactttggctcccgtcgcctactctgctcctctggcctactccgccccggtggcctactcctcgtatgccgctcctctgacctattccgcaccggtggcctactcggctcccctctcctacgccgccccagctcccctgctgcaccacgcccctctgacctacgccgctggctcctggtaatgtggtgaggatcgaaagagtttgaactgtgcctttctagttgaaaaaaaataaggaaatcgaaaaaagaataaattaaattgtgaataccaaacagatgatgtgaatttcttaatgatgtggggatatataaattaattctgaagtttacaaagaagcgttctaaaaagtgttcctacatttctgaatgttttaaaaacagaattaaattcatttgaagtacaaaacttatttaacaatggtatcgatgcacaataactaaatacttcaataacattttgaataaaccaaagcttgaattttatttgtatttatttatttgttgtcccagcaaataaacaaaaatttttttaattgaatattaaattcaggttgtctttaaaatcaacaaaatttagacttactgaaatgtgatttaagagacgcagttgcacccagccatattggtttggtatgttttttgattatgtacgtttccagaacaagaactaatgttttccaatattactatatatattccagaggctagttcactaaagctatcataggtactatgatattacctttacgtcgaacgtttttatttattgcatatttgatgtacatttaagtttgcaatacagaagaggtaatatgttacacataaccaaaaatgagattttctgtggagaagggtttctttgttcgttgttctacttcagataaatgctggggtaactggatactccccagattcccggctcgtaccatcccgcactgttgcccgcgtatccaagtggggcatacgagatcgaagtagctggagcataggctgccttcaggatgggcgtgtgatccacaatggggcgccagtagggacgcttctcgtgcaccactgtggaactctggtgtgagacggcggctggaagggcataactctcgtatcctacgacactgggagcatattccacgtgctcatagctgggcaagtagctggggcgagcctggatcaggacagcga

SEQ ID NO: 29963 - DNA, 468 bp, DROSOPHILA
atgttcaaattgttcgttctcgctgctcttttggccgtggccgccgccaagcccggtcacctggctgctgctcctctggtctacagcgctcccgccaccaccaccgtcgtccaggagcccgttctggccaaagtgggtgctgttgtgaagagcgtgcccaccgccgtgtcccaccagagcctgacccaggtgcacagcacccccgtggtggaggatgtggtggctcccgtggtcaagaccaccgctgtccactccgctcccgtgttggccgccgcacccattgtgaagactttggctcccgtcgcctactctgctcctctggcctactccgccccggtggcctactcctcgtatgccgctcctctgacctattccgcaccggtggcctactcggctcccctctcctacgccgccccagctcccctgctgcaccacgcccctctgacctacgccgctggctcctggtaa

SEQ ID NO: 29964 - protein, 155 aa, DROSOPHILA
MFKLFVLAALLAVAAAKPGHLAAAPLVYSAPATTTVVQEPVLAKVGAVVKSVPTAVSHQSLTQVHSTPVVEDVVAPVVKTTAVHSAPVLAAAPIVKTLAPVAYSAPLAYSAPVAYSSYAAPLTYSAPVAYSAPLSYAAPAPLLHHAPLTYAAGSW

SEQ ID NO: 29965 - DNA, 2564 bp, DROSOPHILA
ggcatttatatttcggcaacggccatcaatcagagtcataaggcataaaaaggtgcctggaacgtgatcgcaatgggtttcttgcagctcttgccacttgcttgctttttttttttttgtcttatattttatacttttttgcagctggtggcggcggcagtaaaagttgctgcagtgtagcgcgtgcattcgtaaatgtgatccatggctttgggcgaatgaagtgcacatgataatggcttctgaggtggaagagtttaagatgttgatccgaagagaggggtgtgttaaggtgcatatcttatatctgaggaatttatttagaagatgtctgaaataatacatatgcttattaattttaacaccatctatccgactacagcaattctgaattggaatctaataaaaaataagattggataggttgacttcttgacttcaaacggagtcacaaaagcattcacatctttactttactgattcggagttcttaaactgttaacaattttttttttttcggtaaagtgtgaagttataccttccaccttaattacctcatttgaagttttgaccaccgacttgtggttcgtacttccaccgaatttcgcctgcggatggggcattgcaaaacttgtcgcatgcatttgccgcacgattcgcttgtcgattgcacgtcgtgcgcagatcccttaatggagtttttacctttcggctcctctagtttccagacccctcctccactcctcctccacctactcctccacccactaaatcagcataactcggatcgtggtatatataaacctgcaatggtcagccaaaatcgattcatttcgtgtgaaagtgtcgcggagaagtgacttaatacggaaatcgaaaacggaagaaagcataacgggtgaaaatgttaaatatttcaaaagcaagtgaatcgaaagtgacttttaactgaaaaataatagtttatctttatatatagatacctttgatatgtgttctgatgtgttttggtgctccagcgcttggaagtttccatcatgaaccatcgacggtgggcgttcccgtgggagttccagtcccagtgccagttcctgtgccttctccatatccggttccatctccagtggcggtacctgctccagtagcagtacccgtttccgataccgtcaccgtgccagcggcctttagtgcccatcaaggatttgcgtacggagctgtcgatcactatggtccaccacctccggcgatctttaaatatgctacaacctatgcggcaccacagccagttattaagtactcccttggagctccagtgaccactaccaccaccacctacaccggatttgcagcaccaccaccaccagccgttcattatgctgcagcagctccaccaccaccacagttcatagcccggtttgctcctccacccactggctatcagtttgcagctgctgccccgtcatatggcaggtacaagctccactttgggtcaccacctcatcattctccggccgccgtttatggagctccccctcctgtagcatttagcactcagggctggtaactcgagaagcgccagctgggctctggctcatcatgcataactatgaatgataatttcctcaaattagcaattaattaaatctaaataatgttgttatgtttcgtattatacgcgactggtgaatttatgcgaagaacgcgaagcgtagcgattaaattatgcttatgtcaatacccataaataattcagatgttttcatggctcgaagttattttttggctcagccaattttggccaaaggcgaggcttgactttgagagggcccagaaaaatgaataaataatataaatttgccgctattaaagctatgactacggatcaactgacctaagtcaatgaatgaaagagggaaatagcggagccatccgtcaattgggtcaacagtttaaactttaaagagcctttgagttcacagatagacagcttgattacactacaaatattgttattaaacaaataaatcaagtaaattgtgtatttccgtatttaagtttgaatactaatatatttgggtggcggcttaacatttagatttaatgtttaagaagacagaactgtatttgtccactttttggatattaattggatcttgttatcttgaattagaatacataagtattttcttagatacctacatctataagtcaataaatcaagctattacactataaacagcacattagctaaattactagaagtacaagaacgctatagtcgagttcttcgactataagatacccactactcatctagtgggcgaacgaaatagaaattttaacattttctgttggcaaatcaatgttagtaaaatgaaaaaaaaaaaatgaataagtaagtttctgggtgtaatattaaattaatatatctgaattttaaataaaaacaggaaaagttcctcccttttctttcagtgtaaacctcattcggatccgcatttattgtgagtgtattttactatctaaaggtctacgagtaacgggtataataataataaatttgt

SEQ ID NO: 29966 - DNA, 564 bp, DROSOPHILA
atgtgttttggtgctccagcgcttggaagtttccatcatgaaccatcgacggtgggcgttcccgtgggagttccagtcccagtgccagttcctgtgccttctccatatccggttccatctccagtggcggtacctgctccagtagcagtacccgtttccgataccgtcaccgtgccagcggcctttagtgcccatcaaggatttgcgtacggagctgtcgatcactatggtccaccacctccggcgatctttaaatatgctacaacctatgcggcaccacagccagttattaagtactcccttggagctccagtgaccactaccaccaccacctacaccggatttgcagcaccaccaccaccagccgttcattatgctgcagcagctccaccaccaccacagttcatagcccggtttgctcctccacccactggctatcagtttgcagctgctgccccgtcatatggcaggtacaagctccactttgggtcaccacctcatcattctccggccgccgtttatggagctccccctcctgtagcatttagcactcagggctggtaa

SEQ ID NO: 29967 - protein, 187 aa, DROSOPHILA
MCFGAPALGSFHHEPSTVGVPVGVPVPVPVPVPSPYPVPSPVAVPAPVAVPVSDTVTVPAAFSAHQGFAYGAVDHYGPPPPAIFKYATTYAAPQPVIKYSLGAPVTTTTTTYTGFAAPPPPAVHYAAAAPPPPQFIARFAPPPTGYQFAAAAPSYGRYKLHFGSPPHHSPAAVYGAPPPVAFSTQGW

SEQ ID NO: 29968 - DNA, 2501 bp, DROSOPHILA
tagtgaaaagtggctccccatttctttcagtgtaaattaaattcggatgcgcatagattgtgattccgttccaccatctgaggtcaatctgcgatgagagacaagagacacgcagcgaaagagcggcaatcaaacgccgagatacggacaacaatctggtgcttagcatgcaaatctcgcaccgatccgccaaagtcctccgttttggcctgggctaatggctatggtttttatgtgtgtgcgacttaactagctcctgtcacatgacgctcgattcgatttgtgtttaataagctcaaatgctgtcgacatgcctgaggtatgcagaaaagctgagaacagtggtggtggagtgggggtatttacaaaaccaaatcgtctagttcccccctctggttgtgaccatagggctccactgctaattgtgtgtagttgcatagcttggatgccaataaaaatgaccaacattgatttatatgcaaggcagccaaatatcaatattatcaatagatgaaactgtccggcaaccgctttgttaagccaccagaaataaacaaagtaaataaacaaaggcagctacaaatgccaaaaaagcttcgtcttggcctgcactcaaagtgttggcccaaagccgttcaccaagagccaaaagaagacctgaacagagtgggacagagagagagagaatgagagagagagagagagagaggggtctgagaaccgatcgcagctcctccatacgcatataaaaagcatcttcagctggctcacaaattttaatcagctgccaaagctgcgccagcgcacatcaacgattataagattcggcaaaaatattggcctttaaactgcatttaccccaagaactggaacccaaagaaaagtgaagtgaaatggcgcccaatgtgagagcaatatctagtgtgtgaagagctatcaaggtttaaccctatcaaatcactttcagttgacttgtgtatggattactctgctgcaactcatgagcttggctctggccgatgtctcacacctggattactcgatagcacccagcacccagctgggttactatcactatcccgctcccaacaggccagccgtgcagcggagccagaggaaccagtaccaacagaaccagcagtatccccaagtggcacgacagtttgccgagcccgccttggagcatgccgccttcacccaggctctgaccagccagggttacgtatttggagcaccgtcgtctgccctccaggtggctcccccggcaccacagccccagcaggtggccagagtatcatctgctgcgggatcggccacaggtcgttccatatcctccgcttccgtggatgccaactcgctgaatctcaagctgccagtgccctttggcattgctccactgaatgtggcgcaacttccgctgcaggctggggcaccatatgccagtgtgcccagaaccacggggctaacctcctatggaacaccgcagatccagaggcgctagtccagcaatcctagcccatagaatagcaatagcaatacatttaatagagccagagccatcccgactgatcatcaaactgcgatgacttctgctcttagtgaatacacattgataataaacttgccatctaagcttagcctttcggttgagtctctttttattggccatttttagtctcattgccatcgatggagactgcatttgcataatgttttgaaggttaatacgcgggcacacacaaaaaaaaaagaggtcttcgtccattggatttacacctttcactctcctacgatgggttaatggttgctatttacatacacacaaatcgggccaagagatctccatctccatccgcgcctcataatgagacctcaaacttggcattggcattcggaattctcttgtgaaaacaaaagaaatcgagacaacgactaacttttgacgtatatttatgaaagccaattaaagtcaagtgtcattgatcagatctgggaacggaactgggaactgggatctggatctatctatatatctagacatatttatgcctgccgtatagaacctgcttcccgcgaaaacaaaaacgggaattagaaatatggtctgcataaatttggggcttaaaaatcaattaaagcaaacggtactgacgacagccaaacaattcctaagagggataaagcttctgatgagcctctaaatcagattgcaaataaatttaaaaggttaactaggaagtgagcggatcgcacagctgtgaagtggagtgctgaagacaagaagttgatggcgatggtctatgaagatgaagatgaagatggttaaagatgtactcatttccgtgcttgagtcaccggaaaattggcgcgtcatcggttgagaattcctgtccagaaattgtgaacaagtgaacgagaagaggtcacccttggagttggaatgtactagctgtggttgctgccaagattggatcaatccgatcaaaagtggccacaatgcg

SEQ ID NO: 29969 - DNA, 501 bp, DROSOPHILA
atgagcttggctctggccgatgtctcacacctggattactcgatagcacccagcacccagctgggttactatcactatcccgctcccaacaggccagccgtgcagcggagccagaggaaccagtaccaacagaaccagcagtatccccaagtggcacgacagtttgccgagcccgccttggagcatgccgccttcacccaggctctgaccagccagggttacgtatttggagcaccgtcgtctgccctccaggtggctcccccggcaccacagccccagcaggtggccagagtatcatctgctgcgggatcggccacaggtcgttccatatcctccgcttccgtggatgccaactcgctgaatctcaagctgccagtgccctttggcattgctccactgaatgtggcgcaacttccgctgcaggctggggcaccatatgccagtgtgcccagaaccacggggctaacctcctatggaacaccgcagatccagaggcgctag

SEQ ID NO: 29970 - protein, 166 aa, DROSOPHILA
MSLALADVSHLDYSIAPSTQLGYYHYPAPNRPAVQRSQRNQYQQNQQYPQVARQFAEPALEHAAFTQALTSQGYVFGAPSSALQVAPPAPQPQQVARVSSAAGSATGRSISSASVDANSLNLKLPVPFGIAPLNVAQLPLQAGAPYASVPRTTGLTSYGTPQIQRR

SEQ ID NO: 29971 - DNA, 3378 bp, DROSOPHILA
cgaaaacaaaaacgggaattagaaatatggtctgcataaatttggggcttaaaaatcaattaaagcaaacggtactgacgacagccaaacaattcctaagagggataaagcttctgatgagcctctaaatcagattgcaaataaatttaaaaggttaactaggaagtgagcggatcgcacagctgtgaagtggagtgctgaagacaagaagttgatggcgatggtctatgaagatgaagatgaagatggttaaagatgtactcatttccgtgcttgagtcaccggaaaattggcgcgtcatcggttgagaattcctgtccagaaattgtgaacaagtgaacgagaagaggtcacccttggagttggaatgtactagctgtggttgctgccaagattggatcaatccgatcaaaagtggccacaatgcggatacagaatacagaatatatggaaaagtatacagttacatgcgtggggcaacttgatcaccagatatcatttatatacatatatatatatcgccctctcgactcgtcatcgcgacaaccttgagaccggcgtcatcatcgtatcggatttcagaagcagctataaaataacgaccatttagatactctatacgatttgttagtaagcggtatgagtataatattttgtgactgtactacagaaaaacttcgatttttcataaactcgctctttgaaatcatgctcctaatgggttgttctaccaagtcattgacactaaaatatgctaatttacaaacattcataagtagcaaaagtacccgatcataaagagtaaaacaatgcaaatcgcagacaccaagccatcagatgacgacgatgctgctgaccaggccagcacgtgaccgagagagaccgagagagatggctcattaagtcagctagcaagcaggtttcgactgctcgatcattcggccccgcgccttgttggccaattaagctgaagcgaattgatgagacccactggatgaggatgagggtgcatcacatcctgtggccaggtggcgtcaaggtcaggtcaacacgaaaacaaatgaagacccgtcggctaggatgagagggaaatttacgaccgccttttattggcgtctctgcaagccattaaaaagtgaactaatgagacacttagtgggccggaatcgtggcctttgaggaaggggtaccatttttatggccaatttgacttagattgcggccaattcaatgcgaagcggcgcacattgatggcccaaacagactgcaaattacgacaagacagcccggccaccgagtcagtcttcaattgcatacaaatgtcgatcactgcacttggaaaaatttttataaagactataacttggtatgctatacaaaaagtttacctctgcatgtaaatacactgcactaaatagttaaggttaaaaattttaaataaaatatttatacattgaaatcagaattatatcatatcttttcttataatatttaccaaagctcaaatatttttccaagtgcaaccgaaatattcaagcgacaacttggacaacttccgacagtccattgggcaattgaaggcggagcacgtcttggccaaatggcgatcatgtatgctacttggcactcgaccaggtgggccagctaatgaagaagcgaccaaaaatcggctcagacagaatgtcccccaaagagcacggatatgggcacgagctatataagccactggtctggctccaaatgaacattatcgctcaagtgctttagacaaacccaaccacagcaatatgtacaagtttgtaagtgatcctatggggattagcgcccaaacaatgtggactaagaggtggttaatgattacctatcctattttccagttggttctcgctgccctcatcgcctgctctgcggccaaaccaggagttgtagctccactggctgctcctctggctgctcccctggcctacgctaatgctcctctgtacgccgcaggtggcagcagccaggtggatgtccgcaacaactacgacggcaccctgtcctcctacaccaccgctccgttcgagttcgccggcccctactccagccgctatgtgtccggaatcccagctgcccccgccgtggtggccaagtacgctgctgctcctctggccgccgcctactctgctcctctggctgctcccgtcgctgctcctctggccgctgctcccgttgctgctcctctggccgctgctccctatgccgccgctgcctactccgcctatccctatgcctcgccctacgctgcaccctacctggcatctccctacgccgctccctacgctgcatcctatgctgctcccatcgccgctgctgctccagctccagtggtggtctaaggacacacctgtgaagcaggccaaactataggaaatttttgataaacaaaaaaaaaaactgataataaattacgaaccaacaattagagcgcaccatcttattatttgcagaaatgccttgaataattaacgaaaaacgaaagtactattatttatcggatatttttggttcatgaaaattcaattggacgctcatttcgattgggtcaatatatatatatttcttaagaaaatataaaataacttctttacttaactatgatcaatttttgattagatgattccttttgtgcaagtggttttattaagcatccatatatttccagatttcagatagaggaagttatttaatttttttttagaaactttagaactttccatttaatgctctgaatttctcgtttctcactcatttctttgatatgcaaaataagcttgtttattggtggatatcatttaatacaaattatgcataaattataggtctgcatttaatttttaatggaattttttctaacagctgcattgaattttaaagataatattgacaaagtagcaacatacataagttagggacttagggaagttaaagtcagacaacttggtcaccatgtaaacaatatttgttgtgattgcgttgtcacctaaggcgcaatatcgattgttatttatggtcaaagcaatatttatggattatcataatcatattccactcatgggcaactgtcaatgcctgggcttggttggccccatgttatataatcatgggccgtgctttcgaatcgcccaagaagttattggcccctcgatcgaaggcagtgccattcgcagtcgccgtctcagtcacgacttgctgaccaactaaatgggattgggttgcctccctccaaatgatgcaacccattaagttaggtgagtgggccaagtcgtcgtcgaaagtgaagaaatgcaagtgcaagtcttttgattgcgtaccgccttcaattcgctataaatatta

SEQ ID NO: 29972 - DNA, 540 bp, DROSOPHILA
atgagggtgcatcacatcctgtggccaggtggcgtcaagttggttctcgctgccctcatcgcctgctctgcggccaaaccaggagttgtagctccactggctgctcctctggctgctcccctggcctacgctaatgctcctctgtacgccgcaggtggcagcagccaggtggatgtccgcaacaactacgacggcaccctgtcctcctacaccaccgctccgttcgagttcgccggcccctactccagccgctatgtgtccggaatcccagctgcccccgccgtggtggccaagtacgctgctgctcctctggccgccgcctactctgctcctctggctgctcccgtcgctgctcctctggccgctgctcccgttgctgctcctctggccgctgctccctatgccgccgctgcctactccgcctatccctatgcctcgccctacgctgcaccctacctggcatctccctacgccgctccctacgctgcatcctatgctgctcccatcgccgctgctgctccagctccagtggtggtctaa

SEQ ID NO: 29973 - protein, 179 aa, DROSOPHILA
MRVHHILWPGGVKLVLAALIACSAAKPGVVAPLAAPLAAPLAYANAPLYAAGGSSQVDVRNNYDGTLSSYTTAPFEFAGPYSSRYVSGIPAAPAVVAKYAAAPLAAAYSAPLAAPVAAPLAAAPVAAPLAAAPYAAAAYSAYPYASPYAAPYLASPYAAPYAASYAAPIAAAAPAPVVV

SEQ ID NO: 29974 - DNA, 2680 bp, DROSOPHILA
gcagaaatgccttgaataattaacgaaaaacgaaagtactattatttatcggatatttttggttcatgaaaattcaattggacgctcatttcgattgggtcaatatatatatatttcttaagaaaatataaaataacttctttacttaactatgatcaatttttgattagatgattccttttgtgcaagtggttttattaagcatccatatatttccagatttcagatagaggaagttatttaatttttttttagaaactttagaactttccatttaatgctctgaatttctcgtttctcactcatttctttgatatgcaaaataagcttgtttattggtggatatcatttaatacaaattatgcataaattataggtctgcatttaatttttaatggaattttttctaacagctgcattgaattttaaagataatattgacaaagtagcaacatacataagttagggacttagggaagttaaagtcagacaacttggtcaccatgtaaacaatatttgttgtgattgcgttgtcacctaaggcgcaatatcgattgttatttatggtcaaagcaatatttatggattatcataatcatattccactcatgggcaactgtcaatgcctgggcttggttggccccatgttatataatcatgggccgtgctttcgaatcgcccaagaagttattggcccctcgatcgaaggcagtgccattcgcagtcgccgtctcagtcacgacttgctgaccaactaaatgggattgggttgcctccctccaaatgatgcaacccattaagttaggtgagtgggccaagtcgtcgtcgaaagtgaagaaatgcaagtgcaagtcttttgattgcgtaccgccttcaattcgctataaatattaatttaatttgacaatgcaaagacattagcagccgaaccaacaggtcgagcacatcgatcgagaagctactgccccaaagaaaccgaacttcaaatcccccaagcaagatgtggcaactgacatgggtaaggactgcaaagttcttttgaccaaagatattaataggtaacctaaatatttttaggcctttgcattggctttcctgctggtgggtggtgaggcaaagccctctcatcttcactacaatcacttcgatccccaccatgtcaaccactttgacggacatcatctgagccacttggattctctgcatgctctgccgcaccacttggattacgcggtgcaggaatcggtccttcctccgccagctcctttgcttcctgcggtggctccaccaccagcatttgctccaccacaacctgtatttgctccagcgcctctcttacctgctcttgcaccatttttaccggctcctgctcctcttctgcccgctcctgcaccacttctaccagcacctgcaccacttctaccagctccagcttttctgccagctcctactcctcttttgcccgagttccatgtgcccagtgtcacccatcaagtgctgccgcccgtcctggaggcggtgccctttgcacccacctaccgtgccattcccggaccgaagaccaccacccaccgcgtgtccattggctacgcctttcccaagctgctggccacgccccacgcccatctgaaagccctgcccctgaagttcgctcatcaccatcaccactcgctgtggtgatcatcccgaccttacggatgatgaaaacctcaccaaagagtaattagtgtcagataggatatgtaaagcttaaatctacaagtctacctgcattatacaataatttatcgaataaatatagtgaaataaaaaacgaaacaaataaaattcatgcattatacaataatatatcgaataaatatagtcaaataaaatgaattataaatcaaattacatttatactcaatttaaggctctgttaaccttagaattcaatcattgcgttcttaagcaaaatatatgaaaatatattcagtattcccgcacattcttaccaattatttccaaaaatagaaatcccagagaatgtaactgcggttgataaaatcataggcacaccaaaaaattagcaaaaggaaacatattcgctatctgattcagactctcattacgaaccagacgcctcgtaatgtcgccaaatggggtttcatttattcggccaacacacacacacacaaactattggcaacacacacacacacacactcacaagtggggcacagaaatgttgttagtggatttcgaactgcacgcaacatgaaatcaaatcagaaattccagacacaaacccggcccaaacacgcgacaattgttgcaacaataaacaaaaagcgggtggacgaaaaaaagtggtaattcaattaaatgattgagccaagtaacacgtactctgggtaaataattgcagctcattacaaaagcaccacccaccgaaaatattcgaaaagccccaactgtcataaacccgaccgaaacccaaacgaaatcttgcccaatattaacctaggttatggtcgggaattgcgtgcaattatgaaagttttcgggggcgatcgacgtaagaggctaccgattgattattaagtacatatgtacatatatcgcaccgatccagcaacgcccttcatcagctcccaatatagaaagtcttccaaggtgttttcgtatgcgcgtccatgga

SEQ ID NO: 29975 - DNA, 621 bp, DROSOPHILA
atgtggcaactgacatgggcctttgcattggctttcctgctggtgggtggtgaggcaaagccctctcatcttcactacaatcacttcgatccccaccatgtcaaccactttgacggacatcatctgagccacttggattctctgcatgctctgccgcaccacttggattacgcggtgcaggaatcggtccttcctccgccagctcctttgcttcctgcggtggctccaccaccagcatttgctccaccacaacctgtatttgctccagcgcctctcttacctgctcttgcaccatttttaccggctcctgctcctcttctgcccgctcctgcaccacttctaccagcacctgcaccacttctaccagctccagcttttctgccagctcctactcctcttttgcccgagttccatgtgcccagtgtcacccatcaagtgctgccgcccgtcctggaggcggtgccctttgcacccacctaccgtgccattcccggaccgaagaccaccacccaccgcgtgtccattggctacgcctttcccaagctgctggccacgccccacgcccatctgaaagccctgcccctgaagttcgctcatcaccatcaccactcgctgtggtga

SEQ ID NO: 29976 - protein, 206 aa, DROSOPHILA
MWQLTWAFALAFLLVGGEAKPSHLHYNHFDPHHVNHFDGHHLSHLDSLHALPHHLDYAVQESVLPPPAPLLPAVAPPPAFAPPQPVFAPAPLLPALAPFLPAPAPLLPAPAPLLPAPAPLLPAPAFLPAPTPLLPEFHVPSVTHQVLPPVLEAVPFAPTYRAIPGPKTTTHRVSIGYAFPKLLATPHAHLKALPLKFAHHHHHSLW

SEQ ID NO: 29977 - DNA, 2735 bp, DROSOPHILA
cactcgctgtggtgatcatcccgaccttacggatgatgaaaacctcaccaaagagtaattagtgtcagataggatatgtaaagcttaaatctacaagtctacctgcattatacaataatttatcgaataaatatagtgaaataaaaaacgaaacaaataaaattcatgcattatacaataatatatcgaataaatatagtcaaataaaatgaattataaatcaaattacatttatactcaatttaaggctctgttaaccttagaattcaatcattgcgttcttaagcaaaatatatgaaaatatattcagtattcccgcacattcttaccaattatttccaaaaatagaaatcccagagaatgtaactgcggttgataaaatcataggcacaccaaaaaattagcaaaaggaaacatattcgctatctgattcagactctcattacgaaccagacgcctcgtaatgtcgccaaatggggtttcatttattcggccaacacacacacacacaaactattggcaacacacacacacacacactcacaagtggggcacagaaatgttgttagtggatttcgaactgcacgcaacatgaaatcaaatcagaaattccagacacaaacccggcccaaacacgcgacaattgttgcaacaataaacaaaaagcgggtggacgaaaaaaagtggtaattcaattaaatgattgagccaagtaacacgtactctgggtaaataattgcagctcattacaaaagcaccacccaccgaaaatattcgaaaagccccaactgtcataaacccgaccgaaacccaaacgaaatcttgcccaatattaacctaggttatggtcgggaattgcgtgcaattatgaaagttttcgggggcgatcgacgtaagaggctaccgattgattattaagtacatatgtacatatatcgcaccgatccagcaacgcccttcatcagctcccaatatagaaagtcttccaaggtgttttcgtatgcgcgtccatggatattccgtgggctacagaattataaaagcgttacccagtggacaattggatatcacagttcagtctgccttcaagctaatcacacctagcaaatcatacccaatccccaaaatgttcgccaagattgtggtgagttgcaaaggatgtccggatctatcgaagtggattatagatatataccttcatttacagctcgttgccctctgcgtggcctctgctcaggctggtctccttcctttccatgctccggctccactggctgctccacttgctcctgccttcgcagctcccctggctgctcctgtggctaccgccggagtggtggctccatatgcctccagcttcaatgcccaccgcatcaaccacgccgtggcatacccagtggctcctgctccagctccagtggccttcgctgctccccttcccgctcccctgcccgttccagttgctgctcccgctccagtggcctttgccgctcctgctcctctgccagtggctgctgctcctgctccggtggcctttgctgctcccgccaaggttgccttcgccgctcccgctccggtggctgctcctctgggcttcgcccctgctccggcgcctgttgccttcgccgcaccagccaagttcggattcggacccttcgccgctcccctggctgctccagtcccagcgcctctggctgtggcccccaagttcgctcccgccccatacttcttctaaggacttagctgtaggatcacccagctcatacactcccatccgtcctattagattgtagaaactagcccaaatcttcatctcctagagagcagcaatgcttggcgaataaacaattatccattaatcaaatttacaaacgtgtttctttgaggaagtttacttggtagcctctcagtagtatttcctattatagctgccttggattataccatccaaaatcatatttcaaattaatactgctcttaaaagtcgaacatcattagcggataatatataataccttctaaaaccatataaacggtttctatattttttacggatttttaggtaagttttatagaatcattcatcagtgatagcagcaatgttaaacgtaatgattaaaagaatgattattattattatttgtttttatttataagttaaactatgtttttctagggtatacatcgctagaacctaatgtttttgacatgaccaatcctctggaagagaggaacatgttcgtagggcgtgtgcgaaatgggcaccgaatcgtaggtgacgtgggcaatcttcgtgagaggtgccacaatggtgtagccaggatgctgagccaactcctggggcgttgatgcaaccggcagaggatgatgatagatcaccgggtgatggtagataaccgtggcggcaaaggcaccactcaaaaggccgaatagcacgacgagctaaaataagatctatcagatacagatactaataaaggagtactgagtatctatcctgtttaccttgaacattctctggtgatattgtggtcagaactgcacttggactaagctgaatgcagccgaaggccaatcaatttataggctcgtcttcatcgctggattttcatagcgcttttaaacagttaggaggggtaaaccggttgacaatcccctgagatcagcaactgcatttcccttgctaccaggaacctgttgcaacatccatgtagtgggagcactactccacttgg

SEQ ID NO: 29978 - DNA, 672 bp, DROSOPHILA
atgcgcgtccatggatattccgtgggctacagaattataaaagcgttacccagtggacaattggatatcacagttcagtctgccttcaagctaatcacacctagcaaatcatacccaatccccaaaatgttcgccaagattgtgctcgttgccctctgcgtggcctctgctcaggctggtctccttcctttccatgctccggctccactggctgctccacttgctcctgccttcgcagctcccctggctgctcctgtggctaccgccggagtggtggctccatatgcctccagcttcaatgcccaccgcatcaaccacgccgtggcatacccagtggctcctgctccagctccagtggccttcgctgctccccttcccgctcccctgcccgttccagttgctgctcccgctccagtggcctttgccgctcctgctcctctgccagtggctgctgctcctgctccggtggcctttgctgctcccgccaaggttgccttcgccgctcccgctccggtggctgctcctctgggcttcgcccctgctccggcgcctgttgccttcgccgcaccagccaagttcggattcggacccttcgccgctcccctggctgctccagtcccagcgcctctggctgtggcccccaagttcgctcccgccccatacttcttctaa

SEQ ID NO: 29979 - protein, 223 aa, DROSOPHILA
MRVHGYSVGYRIIKALPSGQLDITVQSAFKLITPSKSYPIPKMFAKIVLVALCVASAQAGLLPFHAPAPLAAPLAPAFAAPLAAPVATAGVVAPYASSFNAHRINHAVAYPVAPAPAPVAFAAPLPAPLPVPVAAPAPVAFAAPAPLPVAAAPAPVAFAAPAKVAFAAPAPVAAPLGFAPAPAPVAFAAPAKFGFGPFAAPLAAPVPAPLAVAPKFAPAPYFF

SEQ ID NO: 29980 - DNA, 2552 bp, DROSOPHILA
ttaaagcgtcaacgccgaagattatcaaagagtcagtgactcttttgtgcacttaattatggcacattgggttggttggttgcttttgttgtcttacatttctcggctttttgtttgtttgttttttttttcttgggaagtatgagttagttggtcacacgtctgcggatttgcctttgtttacccatttgatgtctcttttcaattttaatcattgcccaatcttgtgtttttcgagctattttatgtggctttggaggtgttaagaattgattagtttgactttattcagcggctgttcgagctctttatgctaaagcggttataaacgttgttttagttttaatactagcacactccctacaacgaagttgcttttgtggccagtctgacacatacaaattttgcttaatatatacttgtgttatagattcgtgaaaaatagattttgaaatatatttaaattaaacctacgaatatatagcgtttttttggaggagtctatacttttacttatatagttctcttcttttctatactgaataaaaataaacagaccattgacccgaagttcagatcttagttcttgatcagatccaaccggaatcacatgaaggaaacgaaggaaaaggccacccaccagatttaaaatgcccacaggccaaattaaaaactggaactggaaccattgtggactggtaaatgccaaactcgattgcagattatacaatgctggcccaaaaggcaaaaaaaaacaggtgttggattttctttttatttacagcagctacggatggttttgtggcatgccgctaacttgggcaacttgtcaggcgaattagatttactttgtggcactgctcattagatcaccgatgtccatgtggggatgcaatccactgaactggggtttggtataaaagaggcctgctgggatcaactgcagcaacacaattggttaagccgccacagaagcagccggaaaattacctacagcaagatgaaaggagtaagtggtaccaggatataaaaggataatacaattattaataaaaaatactttagaaaatataagcaattttttttacttaaatcatataaataacatttgtcttttcttcattgaaagctgctactcattacaatcgcctgcttgacgacctccatcctggcagctcctgctcctgaacccgctccagaaccatctccgtctccagctcctgctccatctccatcacccagcattggaatcggaattggtcatggctacggtggatatggcctgggattgggtctaggaatcgggcactacggaggactctacgggcacggctatggcgggcactatggaggtcttggtctgggattgggctaccatgcacccatcatctccaagacgatcatcggcaaaagctacttgggcggctatggctatggcctcggtcacggatatctcggaggctacggccatggactgtacggaggacacggtctgggtctgggtctgggtctgggatacggactgggatatggctatggccacggttggtagaggtactcccaagtcaagtaaagttaagccaaatggagccgggacgagcgtgtgagagttttcaatcaagtcatatacttcgcagtacccaaatcttattcagtcagtcactcagcaagtcaataaatcaataaagacaaagcaaaaaatgtacaaaaaactagaatcatggtcaaccgtttattaaaactggatctttttttctcacggttctttgagacatatttataattgtcttaattgcctatactaaacatatattttgatacttaatgtaagtaaagcacacttttgatgttctgaacaaaatatataacattcgtttacgatttcaaaactttggctataaggaacatccaaatactgaaatctgaaaataaatatctgaaaaacaaaatgaaactgaatatttgaaaattgtcagcacgtttttcatattgcctcaaacgcttgatcaaataaaacagttttaagtttagtttttaaattcaatcgaaatatatttcaacatcaaacccactcttcacaatctgttttttaacaatttgatttcactttacaaaaccttcactgatttctctctctctcttttttctctgtgtatttacatctcatttctgaccgatccaaacaaaacgaaatgcatgcggaaaacgatgatgggtggtatggacctcgtttaccatccatgagcgagtccataggcaggagcagcaagagctgtcttgtagcccagtcccagaggagcacccagagtaggatatgccgacttgtagcccaatcccaagggagcggccagaggggcgtgagctagtcccaaaggaccatgagccaggccaatgggaccgggaccatatcccaatccgtaggcggaaagggccggagcagccagaggagcgtgcgccaaggccggggcggcatagctaagcctgggggccagcccgtaagaggcaatcgagggagcagccaaggcgtgtccataggagatggccggagcagc

SEQ ID NO: 29981 - DNA, 432 bp, DROSOPHILA
atgaaaggactgctactcattacaatcgcctgcttgacgacctccatcctggcagctcctgctcctgaacccgctccagaaccatctccgtctccagctcctgctccatctccatcacccagcattggaatcggaattggtcatggctacggtggatatggcctgggattgggtctaggaatcgggcactacggaggactctacgggcacggctatggcgggcactatggaggtcttggtctgggattgggctaccatgcacccatcatctccaagacgatcatcggcaaaagctacttgggcggctatggctatggcctcggtcacggatatctcggaggctacggccatggactgtacggaggacacggtctgggtctgggtctgggtctgggatacggactgggatatggctatggccacggttggtag

SEQ ID NO: 29982 - protein, 143 aa, DROSOPHILA
MKGLLLITIACLTTSILAAPAPEPAPEPSPSPAPAPSPSPSIGIGIGHGYGGYGLGLGLGIGHYGGLYGHGYGGHYGGLGLGLGYHAPIISKTIIGKSYLGGYGYGLGHGYLGGYGHGLYGGHGLGLGLGLGYGLGYGYGHGW

SEQ ID NO: 29983 - DNA, 2252 bp, DROSOPHILA
catctgacttcctgtatggcactgagttttgataactgagagctttaagaccttcaaggaaattatacaaattataaacgtttttcttttatcatatggattttagcaaatataagatatgtaccctgatacaaccacttttccgaataataaaatcgggaaattaaaagtttgattttgttgtaccaaaccactcttagatatatttttaagttttaagcaaacctaaagattgttaaataaaataaaagatttgtgtttcgatttttataatacttttattatttcgtttatttcggtttgagttgtccttagatttcgttaaagcctggatcactcatcctacttcttcagcagcagaggagcggtgtagggggcggcaacgtagggagatgccacatacggagacgccacgtaaggggaagcgacgtagggagaagccacgtagggagaagccacatagggagatgccacgtagggagccgcaaaatttccgtggtattcccggctgtaaaccgcagccgccggagcagcagccaccagaggtgcggagtaggccagaggagccacgattccgggcttggcggccacgcaggcaatcagtgcgaagagggcgacggcgaagaacttgaacatcttggtggatttggctgtttggatttgcgggcaaacgaaactgatgacaactgctggatgaacacggcgttttatacccaaacgaccacccacaattagccttggcacttaagctttcttggcccaccaatttaattagccaaagtacccgcaatcgtacctaaatccgttcgcagtagccaactgcgaatggtacgtgactggcctgagcaacataattgtgtttttcggccgggagaccttgcaaggtcgctagccattcggctgtggggctataaaagccacaagtctggactgtttaagacatcagttgcatttgttcaatccgacaagtaaaaccaaacaaaaaaccaaacctaccaagatgttcaagttcgtcgccgccgtcatcttcgctctgtttgcctgcgtggccgccaagcccggaatcgtggctcctctggcctactccgccccctacgtggcgtctccatatgtggcatctccctacgtggcatccccctacgtggctgccccctacaccgctgcctacaccgctgcctacgccgccccctacaccaccgcctacactgctccctatgccgcctacacctctcctctgctcctgaagaagtagattcccggaaggatgatcaacttaagaggatagcacacggacacttgcaatgaaactgaaataaactcgcaaacaaacgaacatatttgtcttttactcggaaaatggggtttactgggagctgaagaggaacttcgaaattccatttatatatagtttactatgcatattatactatacttgaagagaagtcatatccaataatgcataataagcaatatggtatcaaatacaagtatttgtattattaactcagtaaatgtataagcaactcagtaaactatttccacgatacattttcaaccaactgatactctactctaattaaatgttcacaaacagcttcttggaatcgcctcataagcagtgaaacgactatctgcattaccatttacaactaatttccaagtggacaaaaagtgttgggtttgccatgaccaggggcaaactattaataattacagataattatccttggggtacacacatgtcgagcggcgtgcagcaatttcattccgggtaaaacacactaagcttagacaatgcaacgtgcggcgtttaaaattagacatcgtggcgtatacgtaatctgcggcaaatcaaaaacagatccaaaccaattcgaacaaagagtttgcatttattgtgtgttatataaaaataattttaattcgaattatattgccatggcccagcccagaagtatgttatcatctggccattgatttagcccagcggattgttaacccttagtccagccattgtagttaaccagactccgactcttgctgaaactgatgctattgaacactcccaggttggctgaccagcccagggtgaatgtaatgttaccaaaggggtcaagaaccaccacgggcttctggtttttctggtggttctttttggcattgctctgcagttggttgaatgcactgtacagggaagacgatggattctgcacgaattcttgaactccgataataaatttgtttacttctcg

SEQ ID NO: 29984 - DNA, 252 bp, DROSOPHILA
atgttcaagttcgtcgccgccgtcatcttcgctctgtttgcctgcgtggccgccaagcccggaatcgtggctcctctggcctactccgccccctacgtggcgtctccatatgtggcatctccctacgtggcatccccctacgtggctgccccctacaccgctgcctacaccgctgcctacgccgccccctacaccaccgcctacactgctccctatgccgcctacacctctcctctgctcctgaagaagtag

SEQ ID NO: 29985 - protein, 83 aa, DROSOPHILA
MFKFVAAVIFALFACVAAKPGIVAPLAYSAPYVASPYVASPYVASPYVAAPYTAAYTAAYAAPYTTAYTAPYAAYTSPLLLKK

SEQ ID NO: 29986 - DNA, 2320 bp, DROSOPHILA
cacccaccgaaaattgcatcactaatgcaatggtgatgccatgaaatacgcaccgcaaaagatcaacgaaaaaaataaatttgcggaaactgcgcaattttttaggcaaataacaaatcaacaaatatttagccgaataacacagttcgaacaatatacttacttaattgatttcggcgtgggagtttgttttcattgctacgaagacaaaaggaaacatggccatttctcgacaccacccgcaacccaccactgaccttgaaagcctcccgatggaaggcgggaaaacaccggaagtgcgtctcaatccaggacgcacttaattgtttattttggggccaagagcaagacgcaatccaaatcgatggaagtaaacagacgtcaaagagatgcctacatttgagcctcagcgaaaatagaacgtacttacacactaaaaggggatgtccctaattgattgaggataaataaaaataaaattaggatgagtttataggttaaggtttctaaaattaattgctagaatagcacacaaatcaataattacgaatatataacatagaaatcgatccgaatgcaacaagtcaattataaaatgtgtgtatttgttttctagcacattctatcctaattatcatgcattttacggggaaaggcaaatctttgtagcaagttggaaggaggacttctctgccgttctagaacccaagaggcatttgtggtttcactggcttgtcagcggactcacgaccatccgattcacatctggattctgagtggcagggaacgagttccgctggcaattgcaattgcaactggcccattcaaagtgagttaagggcttctttcatttgccgcttgctgggcaaatgcctttgaccttggccaccagccaaagtgaaggtctgaatgcgattgggagcagctataaaagcctggagtagcgtggaatggctattcagttggataggtgatcttcaaggaactgcaacgagcgaaaatgaagctggtgagatcggaaaactcttctatataactttgcatatatatatttaaccaatttaattgatctaacagctgatctttgcctgtttgcttgctctggctttggggcacgaggtgtattactatacccccagctatgggtactaccccagtacctttgccaggtcctcggctgtcctgcccttggcctattcccgtttgattgccccggcagccgccgaatcgcatctttaccacagcgtggagaccccgaactccttccagcagcaatatcgcagcgactacaagcccctgacctatgagtacatctactagatgggcggggagcaacaaacctttgcgtgaattgtaagcaagtgaaatttgaataaagttcgaacgctcctcatcgaaggtgttttaactctagatgataagcccccattgtgttgaggtgtctgtgaaaacaactttcctacttcccccaaaaccaaatgacctagcacacccgctgtctgttgaactcggcctccaattgttgttcagttataaagccccaaacaacaatggctatatcgaatgaccccgcccaaatgcccgtccttacacacagttgttcacctatgcttctcggaggcctgtctaaatttaataaaatcccaaaagtggcaacaaatcaagactcatgtcgcacgtcgaacgtcaccgtggcaaaaagaagccgtagagtccaccgcaaggtgcaatgtgactcacacaggctgttcccccgatttttgccctttggcgagtggctcgtcgatcccgaaaggaatcgctccggaacgtgacccgaggccgtcacatggcatccacccatggaacatacgcaaatgcgtagattgctctatggccattgatacttagcattgttaataatgaactcttaatcgggtttattaacacctcgatgtccttggaaaatagcataatctccttggttaccctatataaataaataacaattagtttaatttgcataacaccattagagaagtgataaaatggatcattgatatgaatgattgcatcagccgactaagacttttaagacttctcatcaaatatcactcgactagattcttaataatttctaaattgtttaatattaatttatcctttaccttaataataataataataatacagagcttagttaccttaaataattttaaaaactccattaatattttaataaagtaataatataaaaataaatataaataaaaaacagaatattgataaaaagcttaataaagatatacaaatatttagttatttattgggtttttgttaa

SEQ ID NO: 29987 - DNA, 252 bp, DROSOPHILA
atgaagctgctgatctttgcctgtttgcttgctctggctttggggcacgaggtgtattactatacccccagctatgggtactaccccagtacctttgccaggtcctcggctgtcctgcccttggcctattcccgtttgattgccccggcagccgccgaatcgcatctttaccacagcgtggagaccccgaactccttccagcagcaatatcgcagcgactacaagcccctgacctatgagtacatctactag

SEQ ID NO: 29988 - protein, 83 aa, DROSOPHILA
MKLLIFACLLALALGHEVYYYTPSYGYYPSTFARSSAVLPLAYSRLIAPAAAESHLYHSVETPNSFQQQYRSDYKPLTYEYIY

SEQ ID NO: 29989 - DNA, 2342 bp, DROSOPHILA
aataataataataataatacagagcttagttaccttaaataattttaaaaactccattaatattttaataaagtaataatataaaaataaatataaataaaaaacagaatattgataaaaagcttaataaagatatacaaatatttagttatttattgggtttttgttaagaaaaactcttacgttaaattcctcgaatacatttatcgcgaataaatcaacgtccgttaaaaattatagggtacatagccggccatcaagagccatgattgatgattacgaaaccagattgagttcgcgttaattatgcaaagctaattagaagttactcctccgaccagcagatacatctgattggatggaatggctcgggacggtggcatccgtatcagtttactagagcccataatctcggtggaaaacctgttgctgccaaaggagcaggagctccgccatcagcaccatctgcattggcatctgattcggtccatggggaagttcaaggttgttacagtgtccaattaatggctaaagaaatcgcaggcttgactaggcaggcaaatctatgcgaacaacaatctcacattgctgggcaaaatgagtacacttaaacacgattgaacaatatatagttctggtaaatatattaagcagtgagatatatgtctagtcaaaatattttaaaattgaattacatattttttcatggttttgttagtttcattataataaggagtttaaaatagtttatcaacgtttaatttacttgtcacaagtttccttaagcttgactcgtttttcggcgtgcagctggcaaaagggtgaccagaatttagaacgggctgtgggaagtggacccccgtcaagttgtttacccaatgtaaaaacaggctttggatcccgggagccaaaccttggatataaaaggtctttgggagtgcaaggaggagctcaaagcgagaacggcactggacggcgtagtttgcagtttgaacagaaaatgcgcaattatctctgggtaggcagccaattccattggccaagtatcagctccacttaacttctccaccttctaccgttgcagttagcagtgctcctggtggtggccaccacctgcatcaaggccaagccgctggtctccttcggtgtcagctaccagcagccttacctgggcccccagccagaatcctactactacggaggacggtacccggctggtggctactacaacaactaccacaacagcccgggtccgtacggctacccctatccgtatgccaatcgctatggtgccctcgatctcggaatcggcgccctgtcgctatcgtcgttcctgctctgattccgtataaaagccaaaagccacagcaaatagatgcgcaaatcacacaaaagtcttttcactattttcctcggcacgcactgctaagccttatttttttgcccaggtcaggttgatttatatatatgtatatattgagcataaggatatatatagtgggcggtggactttgagtacgtgccatatccccgggggctctggtgacccactgactgaatttatggattttcgatttcctgtcacaaaaccctttgattcgttctgacagaagtaaatttttaggtgggtgtcttaatttatggtatcaaatgtcatgcagtgaggaaagaactcaagttaaatgctaaatctaccaactgaacaagcttagttttaaaatgtccatttaataccttttaaactttataaatttaattaagtactaagaaatgacaatgagtagtttattgacagcttttgtgctaatgtcaacattattaggacgacatttcctcactttgaatgcagagtattttaagattcgacattttcgatacgctgattatgctaatgtcctcggcggtgtatcaattatttatagatgttgtatcttcagggggccctgcataaccgaaatgcgtttgcaaaacgtgcaggcgcagcttgagtctccggcagatgcaacctgttgggttgggaggagcacataattgcagaacccatcggggattaagggaatcactctctggctttcgccccatcctttcgctttctttacgactcgtgatttgcaaacacatgggttaaagtttcaggtgcggcacctgcacgttgagcatgtggcagttttagccatttcctggcctgaggaactattaaagtgtgtgcgccttgcttgttcatataaaggtgttgcgtgccacactgcacaaaatggggaagtaaaccattttatatcatttcatttaacatatttatttggtaggagagttgtatggctaaagatatacagtttgctgtt

SEQ ID NO: 29990 - DNA, 276 bp, DROSOPHILA
atgcgcaattatctctggttagcagtgctcctggtggtggccaccacctgcatcaaggccaagccgctggtctccttcggtgtcagctaccagcagccttacctgggcccccagccagaatcctactactacggaggacggtacccggctggtggctactacaacaactaccacaacagcccgggtccgtacggctacccctatccgtatgccaatcgctatggtgccctcgatctcggaatcggcgccctgtcgctatcgtcgttcctgctctga

SEQ ID NO: 29991 - protein, 91 aa, DROSOPHILA
MRNYLWLAVLLVVATTCIKAKPLVSFGVSYQQPYLGPQPESYYYGGRYPAGGYYNNYHNSPGPYGYPYPYANRYGALDLGIGALSLSSFLL

SEQ ID NO: 29992 - DNA, 2945 bp, DROSOPHILA
attaaatcttattttgcattttataatctattcataaggtatctaaagttaataactatgactagtaataaaataatagtcattgaatttagcttgatttcattttgcttgccattatttagagatatatatacatgaatatatatattttaatatatgctaacttttatattctactgagtctttcacttcataagtttacaacaattgatgaaaaagaacgtagaataattgtctacatttaaacccaattttaagccaaatgggttattttccatttcattggcagctaattttgtacaaaggtccactgcctccaaaaataattttggcatcccaaattgttatttgcacctgcttttcccagttccttacaaatttctggaagtgtccatccggaacctcgtcgcacggatgaatgacgtgcacggatcacgttcccaatcacgcacaacaatgctaaaaactcaaaagtgcaaccagcgacgcccaaagtgttgttagctggctttgttggcccggttaaaaggggaagcatcagcagtcacgttgagtggaaaaccccacggcaagcaacaggtattcgcctcgcctcgttgcgcttcgagaaggaaccctcgagtggtgtagtgtaatgtagtgtccttctcgacggcaaacagggcactgatttccgacgggtgtgtgtcagtatggcaggcgaacgcacatcggcaccacgaagctagagccgagccacgggatgtgtcctcgtgggggcgaaggttaggatgcgaagctgccgcggcattgaggagctgtataaaagcgggtgccaaacgcctgccactggtagtcttcgtctagacatcaacggttcgcgttatcctgaaacaagttcccttggaaagcaaactaaactgaaagccagaacacgaactgaattactgtgccagtgcaaaaagagtgaactaagtgaactaatattctgaaaaattgagataaaattcaaacttacgccatggatactctgtcacccaataatggctctaagtcgagctccagcggcagttcggcggccagttcctccatggatctcggcaagcagcagcagaaggagaagtttcatcgtcacccaaggaatgggcccaagaagctttcccgctccaggagtttgctgcaattgctcagcaggcacctgggcaggcacttccaccaccagaaccagcagaacgacacggtctacagcagccaggatgatattaggagcagctcaacggattccttcagcttgagctacgagcgtggcagccacgagtgccctatcaatggttcctccctggacctggagcacacatcccggacctcgagcggatcggcctgctccagatactcgcccggtctggattactacgatcagcagggacacatctatgtggaggctgtctacagacccggcagtgccatggagcaactgcatccgcagctgcacttcgaggaagacaccagcgaggagggtagcagcaacgaggcggaggacgaggtggagctgcgccacgacgagaacgagaacgagaacagcaagcctcgatccgcatcagccgcttccgccaagtcatcgggactgcatctcagccgaatttccatctcctcctcggtgagccgcatcctgcatcacttctccagtccgacgggaaatgcatcgatgcgctcgttgtcctgcagcagcactccactgcgtcagcccaagaaatccctgtcgccgaacaactcgaacaacagcagcagcagcagctccagctccaaattctcccgtgctcccgcctccaagaaggaggataagaagcagcagagcatcctgcgaccgccagtccagtacgtctacatgaagggcatgtcgggactgtattcccgagtgcccagctatgcggtctgctatccgtataccctacagcacatgtactaaaacatgtcctgggacaccataaaatggatggaaagctgcaagctggttgggggtcttgaacaatatacttaggaattttctagtgatgtacgagtagtgcctgaaatccagagatttgagtagagggagagagtagtgggaagataggggcataggacaaaaagcagcatattttataaatgtgtccaagctgagttcgcaaacccaataagtgtacctaaagacaagcccagaaaatcaaaaaaaaaaaactatctatgtgctacgatatactcctaagacgatctaattgtcttcggataatttagggactttcagtttacaaacgaatataaattcaatttagcttaatggaaaaccaaatgttatttagaagcccctcacatatctttcgagaatagctctagaaattacattttcggaacaccttagtttaaattaatagttttatttaatgaacaaacgatttttgcacttttgaactagtttaaagtatattttgcactaatttcaacaactattaaaaccaaaacaaaactttacgaatttatacaacggaaaaaaagaacggaaaccaaattctttaagatcacactaatagaggaacattttacaataattcacattccaataaatcgaaactttttgtaaaacaaaaccaattattataaataatacggagatatcatgatgaaatgtatatggtacggtagatgataatgaaaacttagcaaaatgtttagagcctatatatttttagatcctaacctaacctaacaattaagtctagctgtcaataaaataaaatatacaacacaacataaaaagaaacgtcattttaattgcattcaaggtgaagggagaacaaagcgaatgaaccgaactgcgttggccaaggaacttcgattcgtaacggttttggcgaaagcttaaggacaccgttaacgtaggcaaaagctcgtgccgattgagagagcacatcatgccagagagccgcaga

SEQ ID NO: 29993 - DNA, 945 bp, DROSOPHILA
atggatactctgtcacccaataatggctctaagtcgagctccagcggcagttcggcggccagttcctccatggatctcggcaagcagcagcagaaggagaagtttcatcgtcacccaaggaatgggcccaagaagctttcccgctccaggagtttgctgcaattgctcagcaggcacctgggcaggcacttccaccaccagaaccagcagaacgacacggtctacagcagccaggatgatattaggagcagctcaacggattccttcagcttgagctacgagcgtggcagccacgagtgccctatcaatggttcctccctggacctggagcacacatcccggacctcgagcggatcggcctgctccagatactcgcccggtctggattactacgatcagcagggacacatctatgtggaggctgtctacagacccggcagtgccatggagcaactgcatccgcagctgcacttcgaggaagacaccagcgaggagggtagcagcaacgaggcggaggacgaggtggagctgcgccacgacgagaacgagaacgagaacagcaagcctcgatccgcatcagccgcttccgccaagtcatcgggactgcatctcagccgaatttccatctcctcctcggtgagccgcatcctgcatcacttctccagtccgacgggaaatgcatcgatgcgctcgttgtcctgcagcagcactccactgcgtcagcccaagaaatccctgtcgccgaacaactcgaacaacagcagcagcagcagctccagctccaaattctcccgtgctcccgcctccaagaaggaggataagaagcagcagagcatcctgcgaccgccagtccagtacgtctacatgaagggcatgtcgggactgtattcccgagtgcccagctatgcggtctgctatccgtataccctacagcacatgtactaa

SEQ ID NO: 29994 - protein, 314 aa, DROSOPHILA
MDTLSPNNGSKSSSSGSSAASSSMDLGKQQQKEKFHRHPRNGPKKLSRSRSLLQLLSRHLGRHFHHQNQQNDTVYSSQDDIRSSSTDSFSLSYERGSHECPINGSSLDLEHTSRTSSGSACSRYSPGLDYYDQQGHIYVEAVYRPGSAMEQLHPQLHFEEDTSEEGSSNEAEDEVELRHDENENENSKPRSASAASAKSSGLHLSRISISSSVSRILHHFSSPTGNASMRSLSCSSTPLRQPKKSLSPNNSNNSSSSSSSSKFSRAPASKKEDKKQQSILRPPVQYVYMKGMSGLYSRVPSYAVCYPYTLQHMY

SEQ ID NO: 29995 - DNA, 2930 bp, DROSOPHILA
tatgaattcggtttattcaatctcattgaatatgaagtaaactctgaaattttgttataaggttcaaatttttagatgaatgaaagatgaaaaaaattattttaaaaatgcaggcttagtcagagcttgataataatctcacaagcctaagccctagtattttactctcctagttccgacggaaatgtcttgctatacaacaagtaaaagcaatccagaaggaaataaaacacccccttacttaaaaaaaaattacaaaaactctcgattttcggcttcctaaaccggatttcccctttggtttggcattataccaccctatgatacccggtatttgaccatctagaaatgactggaatgcgcctcgaccgcgtgcaatgactccacctggcggccagcgtcgcaggatcctggggcagagcaaacacgaaaccaaacaaaccaacggcggtaaacaaaactcgcttcccgttttattattaggcaacaatgcagggacaaaggatgcggcaagaagaagggtttgctgggggggggtccttgcagaaatattgttatctctctgccgcactttcgctcttcctctcagcactgtcgctctctctctctaaggactctgtgcagagtgccgggcgaggctataaaaggcagcggcttacgatttgccgactcacaagcggcaggacaacgtgcccagtcggttctctctcgctctcgctggaaaaaggcaaaggtaaacagtggacaaagacaccggtagggataacaaaggattcggagattgtttgcaccggaagcggaagtgcagccatttgctgtatcccaaaaacaaggaaataactcatacgcaataccgaaattacgcatacgcacagcagacaaacaaaagaagttggaaaataactgaataaggaaattaagcacacgcacgataataaggaaattactcatacgccaccgtggccgttggatgagctaggattttgtgccagcagaaaatatgggtacacctcatgtctgcttcgctgatgagcagcagcaggaactgcaacaacagcacaggactgccagtaacggcagcctgaacaacaacaacaacaaactggatgtgggctacaacaacaccggtggcactccatcgccgggcggcagtctaagcgtttcgccaacaccgcgctacgaacgcaatctgggcttttttcggcagctgagccgccgcttcggcctgaggtcgcaggatgacctagttcactcggatgacgcagccagcgttgcaacatcgaggagcggcggaggcggctgtggaggtggagtagccggggtcactctccaggaggaggacgcgcacagttcatcgaccgactcgtgctcctcggggcgtggcctcaacgcacaccagtcgcgtctggagctgatgtccatgtcgtgcgcctccagcgaaacgagcagcacgctggacatcgaggagcagcaggagcaaatgcagcaccagcaggcgcagcaatcgaaacggaagccgattagccgagccagtttctcgcgtctccatcgtcgctccacatcctcgctgcgtcgcgccttcgagagcctttcgctaacctcgcgttcgctgtcctgcagcggtccctcacctccgccaccccttcccccagccggcgcacagccagcagctgcattgcctttgaagtcggctctcaaatccgcatcgaatgtcgagctgcacaggcagcaacagcagcaacaaaagcaaccaaccggcaggtcatcatcatcgtgctgcggttcggcgtctaagaacaacaaggtgaagccgccgccacaaaggatcctgcggcagcccgtctcctacacatatctcaaaggcatgtccggcctgccaacgcagcgagtgccgcgcagctctgtgtgctgtcagtacgccaggcgttaaggatctcatgatcaagggtaaatcatctagaacagtatatgcaggataataaggcactgaaagaaatcagctagtcaaacaatcataaaaagtactttcgatttccttttaagccattcgtttttatttttttgtttaaatataaatgttaagcaatacatttagcgctaacatttttcattttaaaaaaattattcgattttatttcatgatacatttaatatcaattaaaattttaagagctgcacaaaaccacgatcgttacatagcttagtactttattagttttaattcaactaaaattcaaaacatttataaaataatttgaatgttttaagacccatcaaatcccttaggtaagtcagcaaacccttaaagaaaaagcaatcatttgtaatttcaggtggttaaaacattattgatataatacatagacaccatcttccactgaatgttccctactcccgcgatccctgaaattcatttcaaaatctgtgatacaacaatcgtaaccctttcccaagccctcccacaaaaatcttcctctccgagtccatcacaacttattcgatttagtaaaacatcatcagaattggtaaagatcttacaaacttacatgataaagttttataacaatttgaataacttttgcacctaataaatatgaattgaatcgtagatgcgtagaatttgtcagatatagagcgaatatacacacatttttcagcgctttgatgctagatcaagatcatttcataccaaagactgtaaacgcaaaacaaaattgagatgaagttaagaagtttgattgaatcgattggaaaagtcacaatagatttcctttttgtataaattcttatacaattcgtgcctttatcaaaaagtcaaagcaaacagagattcgcataataaacatttgttccaggagaaatcacttaagaagtatatatgataagtttaaacaaaaatttcctttttaaatgttaaatgggatcaaaat

SEQ ID NO: 29996 - DNA, 930 bp, DROSOPHILA
atgggtacacctcatgtctgcttcgctgatgagcagcagcaggaactgcaacaacagcacaggactgccagtaacggcagcctgaacaacaacaacaacaaactggatgtgggctacaacaacaccggtggcactccatcgccgggcggcagtctaagcgtttcgccaacaccgcgctacgaacgcaatctgggcttttttcggcagctgagccgccgcttcggcctgaggtcgcaggatgacctagttcactcggatgacgcagccagcgttgcaacatcgaggagcggcggaggcggctgtggaggtggagtagccggggtcactctccaggaggaggacgcgcacagttcatcgaccgactcgtgctcctcggggcgtggcctcaacgcacaccagtcgcgtctggagctgatgtccatgtcgtgcgcctccagcgaaacgagcagcacgctggacatcgaggagcagcaggagcaaatgcagcaccagcaggcgcagcaatcgaaacggaagccgattagccgagccagtttctcgcgtctccatcgtcgctccacatcctcgctgcgtcgcgccttcgagagcctttcgctaacctcgcgttcgctgtcctgcagcggtccctcacctccgccaccccttcccccagccggcgcacagccagcagctgcattgcctttgaagtcggctctcaaatccgcatcgaatgtcgagctgcacaggcagcaacagcagcaacaaaagcaaccaaccggcaggtcatcatcatcgtgctgcggttcggcgtctaagaacaacaaggtgaagccgccgccacaaaggatcctgcggcagcccgtctcctacacatatctcaaaggcatgtccggcctgccaacgcagcgagtgccgcgcagctctgtgtgctgtcagtacgccaggcgttaa

SEQ ID NO: 29997 - protein, 309 aa, DROSOPHILA
MGTPHVCFADEQQQELQQQHRTASNGSLNNNNNKLDVGYNNTGGTPSPGGSLSVSPTPRYERNLGFFRQLSRRFGLRSQDDLVHSDDAASVATSRSGGGGCGGGVAGVTLQEEDAHSSSTDSCSSGRGLNAHQSRLELMSMSCASSETSSTLDIEEQQEQMQHQQAQQSKRKPISRASFSRLHRRSTSSLRRAFESLSLTSRSLSCSGPSPPPPLPPAGAQPAAALPLKSALKSASNVELHRQQQQQQKQPTGRSSSSCCGSASKNNKVKPPPQRILRQPVSYTYLKGMSGLPTQRVPRSSVCCQYARR

SEQ ID NO: 29998 - DNA, 2213 bp, DROSOPHILA
tgacatcgataagtcttttgccgattgcataaccggcttttcaccatcggccgggacttaacctttggccttctctggggttcagggtttttcgttatttccattgtgtcatttgaaactccattatctcagttcttaaaagagatgatagacacatcttagggcttccatttgtgtgttttttgattagacacatttcacatgcacactctgggtgaaagtcctgaatccatagattcctcacctcctcgacactcctgggaacattgctagattttcggctactgaccctgggtcattcccatggaaattcaggagagtacaacagcccccgagatcctgaaataatgccgaaacatttgcgtacggcacgtcaatcatccttgcaccaatgcacccaaaagtatttcaactgcgtggtataagacctgtgagatactcagtcattcggtgttcatattgtaaacatttaaataggaaaaaatgaagttaatgttttctctcattctttaaatatattttaggaatatggaatggaatatttccagaaagatgtaaattaagaataatgatacattcatatttcaaattttcttatcttcttgttctttattctttgaaaagtccatcttgcctagtgaatattgctcaataaaaataaatataaatggatatggatccacaagctgcttcattcaactcaatactcccctgaaatatccttgagaacaggataccaaagcattgcttatttcgtgcgtttgtttgctcatctggtgacgtcagttgaatcatatcctgccatccaacactcaatcagaagtgcagcgtagcgcaaaatctaattggcagccgtctcctctcaatccagttgggattagaccacactccccattcagaatgcgaaacacagtgcttttaggggattggggcttttgttttattgttcaaacccaaagttcggtagcccaattattcgaatcgtttccaatgcagatgcctactttctgtacagcgtgttggtgccatcgaaaagtggataaccccaggtgggatagttcagataggtggacctcaaagcgggtgtcaacagtgatgtagtcctcggaacactgcgatgaacgatggtggaactctggtgcgaaactgcggtgggcacatgctccaccagatggcccaccttggcaaaagttggtgggtggtgcagggtcatcaggggatgatacaattgcagatcggcatttccaagtgccaaaaggcaaagtaagagagcaaaggataagtactaaaggacaaaaattgtttattttacatttaaaatattattaagaagcctaattcctctttgcttaccattctctgtgacatcttcttgcttcagttcacttcacttgactgttgttcgttggccattccatcctccgcttttatagtcgagctgagtactcaagattggagaatggactagccattctaaatgaatggtcccagcccttgaacatgagaacatgagcttgggcgttaacccagaccctgtgccagcctaatcctccagagatcttgattgcacacaatttgagatttcgctgggaacaggggggcggatgtggcatatttattgtggtcgtgggctggtctctgtgttaactttattgatttcctgtcgcaccaacaacgcccaagaatccgagccagataagtgaaaatgcaatgggttcgtaatacgtaaatgcaggacaataattttacataagatgggtaaagacatagatttgactgggctagcaaatttgattgagaagaggaagttttaaaaagttactcaagccataatatacccttctttttggtttattttggaaatgaggtaggaaaagaataaccaataagcaaagcacaaaaaccttttaaatgcaaatgcgaaatctttattgaaagcacgctacagaagaaatctacagaaaatggcagaagaaagaagacgtagaggagaaagctttttgtgggttattaggtccagaaagggagttaagaatagaagtatcatagctttggcgagttcatcgtgttaatctgttgaatggatccttagttgcggatgagaaccactcggggatcggaggccacgctccacagaagtggtggctgctggcgaatcacctgggtggtgcgaacagcgggtgccacaatgggtgtgaccaatcggcggtgat

SEQ ID NO: 29999 - DNA, 213 bp, DROSOPHILA
atgaccctgcaccacccaccaacttttgccaaggtgggccatctggtggagcatgtgcccaccgcagtttcgcaccagagttccaccatcgttcatcgcagtgttccgaggactacatcactgttgacacccgctttgaggtccacctatctgaactatcccacctggggttatccacttttcgatggcaccaacacgctgtacagaaagtag

SEQ ID NO: 30000 - protein, 70 aa, DROSOPHILA
MTLHHPPTFAKVGHLVEHVPTAVSHQSSTIVHRSVPRTTSLLTPALRSTYLNYPTWGYPLFDGTNTLYRK

SEQ ID NO: 30001 - DNA, 4757 bp, DROSOPHILA
aacagtgatgtagtcctcggaacactgcgatgaacgatggtggaactctggtgcgaaactgcggtgggcacatgctccaccagatggcccaccttggcaaaagttggtgggtggtgcagggtcatcaggggatgatacaattgcagatcggcatttccaagtgccaaaaggcaaagtaagagagcaaaggataagtactaaaggacaaaaattgtttattttacatttaaaatattattaagaagcctaattcctctttgcttaccattctctgtgacatcttcttgcttcagttcacttcacttgactgttgttcgttggccattccatcctccgcttttatagtcgagctgagtactcaagattggagaatggactagccattctaaatgaatggtcccagcccttgaacatgagaacatgagcttgggcgttaacccagaccctgtgccagcctaatcctccagagatcttgattgcacacaatttgagatttcgctgggaacaggggggcggatgtggcatatttattgtggtcgtgggctggtctctgtgttaactttattgatttcctgtcgcaccaacaacgcccaagaatccgagccagataagtgaaaatgcaatgggttcgtaatacgtaaatgcaggacaataattttacataagatgggtaaagacatagatttgactgggctagcaaatttgattgagaagaggaagttttaaaaagttactcaagccataatatacccttctttttggtttattttggaaatgaggtaggaaaagaataaccaataagcaaagcacaaaaaccttttaaatgcaaatgcgaaatctttattgaaagcacgctacagaagaaatctacagaaaatggcagaagaaagaagacgtagaggagaaagctttttgtgggttattaggtccagaaagggagttaagaatagaagtatcatagctttggcgagttcatcgtgttaatctgttgaatggatccttagttgcggatgagaaccactcggggatcggaggccacgctccacagaagtggtggctgctggcgaatcacctgggtggtgcgaacagcgggtgccacaatgggtgtgaccaatcggcggtgatcgtgcaccaccgtctgggtctgatgcgaaacggcagtgggcacgtgctgcaccacctcgcccaccttggccacggctggctcctggatggtcaatacggttcgtagtccattacgagcggccaggatcagaggaagaggcacagagacgggaattccggcagagacaagacggccactaatcggatcggcactgccactggatgcggaggagacctgttgctcttccgcctcctcctgggattgatcttccggctgggcagcggatgagctgacggaccccgaactgccatcggccaactcaacggaatcctcgctggcaatcggaagcagctgcgaggacttgaccgaactgagagccacaagattcgagggccactccaagctggctgtatgcgaagctccgatggagaccagcacaatggccaagacgggcaggaactgaaatgttgaatatattgaataaatttttccctcaatgaaagtaagaaataattcaccaatctagacatgattatagcagtcttcctttagatccgcaaactgtgaaatgaatgatgcagtttgagattggaatatctgcttttatagcccttaaatcggtacagaatctcttcgcctgactgatcaaagaaatgcatcattgcgtaagcttaacgtcgaatcaaaaacatttaattagctgacaatttgaaatttgattgggttacatcagagctatatgttaaagaatattctgcggcaatggaatgtcacacttgtgcttgtcgtcaagccaaaacttctgcagataaccgatgggatcgcggggcatttcccgggccaatcccaacatgccctccattagaatgggaaccacctcctgctccagaaatattcgcctctcttctggtggcttgaagcttttcgttcggggacattctttggcctgaaattcttccgacccgccgttcttcttgggcttggcttccttattgggcttatcgccatctggacagaggatcgagatgatggcagatggattcttcttagtcttattcggacttggtttcacattcttgcgggtattaacttttttttggagtgacatgttggtaagttatctgttcgaacatggaaatataacatggaaaagggcagattaaacaatgcatgctttctgataaaaaatatattatgaggaatattttaaaaacagtttggaattacttaactcatattaagactatttatattcatatctagcaaattcaagaaatcatttcattgtttagttttatagtttttattgaaatgcacgaatttatagtcaggcatgaattttactcgacagctgggtgagcacactgtagcatccactaacctgtggccgtaaccgagcacttccttcgctttgcccactgctccaacgctcctctgaccaccagtgggcgattctaagctgattagcatacgtaacccgatcaagcgagacatctgctgcagtgatccaatcgcttggctggacggggcggtaacttaagccgcttagacctgcagccccaacaccctaaccacccaatctggcggggatgtggagagcgtgtagtttgatacgattgcgcaatgcacacgagggtctcaatcaaattccgcatacgcccacgttcgctggactttaggctccagcaggcgttggaagaacttggttaaatccctggagaggccaccaaagagggtgtaccgtatatgttgctccaatagccaaattatatgatccgttcgatagcacagcgacaggaacttaaaggcggtggtcatcaccagtatgtagaccataagttgatgcctgttaatgcccataattattggacttttatagacttccaacatgaagaggagggagatgaaaagtgcaacttttgaagtgctgtaaaaaaggaaatattaagttttcgatttcattatttattagtttagtgtaacagacttgctcaacttcaggtatgccatctggttgtgttgacatctattgattaaaagactcgccaccggtttcagtacttcggctccactgcccatgacggtgccaaccactagcatcgggattggagcatttccgtagacctgtgccgccaaatggactcctcgatcgatcaactgaacctggctaatcgtagacatggcggtggccaggatgcgaaaggccaaagtgctggtcacggcgtgggccaggtcaaagggacagtaaaagatgcagtacctttttgagtggaaacaaagcttcatataaacaaaataaatatgttcctcacgcaccagtgaactatgtaattttaatttattgagcgcaatagatcccactcaccagatcaacgaactgagcatgacatctgcggtattgcacagtggctccaatggaagactacccaagagcaggttgcccagtatatcgccagcgtagttcagcagcaggttggcaagccacaggacgaagggctgccactccagcaccttgtttccaccaccttttaatctgaatgatcctgcagaaactaccagctcgtcccgcagctgctgggagatcagggaatagtgcaggatgcgaaagatcaagtgattgggaagctgcctcaggatcagccgagcattcatccctcgattagctagctgcccgcactccttttcggagacttctgatattgatatcaaattttggcttctcgaatcttgataatttgccgtttaaaagtatttaaactacatttaaaatacttattatattatgaagagaatttgtctaaacgaaaatattgacaagcgaaacttgggtgtctgtacttgtgtggatatttgaatgcaaataataatagttgtcatggttagcaaaaatttgaatagtgcaaaatatcttgaggcttatgattattgctttatctccaaatctcattggatctcaaattaagttgagccttgataaaaagtattcgagttttattcacaagcacttgagtcgaatgtgagtgttaagtgttactgcttgatgttttagtagttgaattgaataaaagcctaaaccaaagctttaatttaatataatatatagcacctcaaacgggtgacaaattccgattcgtatgagtgttcaggctgcgaggtcctgggatcagggaggcgtagctaatgtttcgcactggcttaatccttggcagcatctggtgcaccactggatgggcagcgtaggtgagatgggcgggtgtctgtccagagatgacaggcacctcctccgcctccgccgttgccgcctgaaagaacctctccacctgctgtcgttccactgccgcctggtgatgattaacaatcctggcagagggaacgagcagctgatgtgtttgctttcgggactgcagggttagtggctctgctgaggataatctgctgaagctctggtgggaaatggcactggccacctgtccgttgccatgcaggattgtcgtggctgcgtgactgtggctcaggccccaggtgaatacgaggcaaacaacctgttggtccgaaatgtgggaatcaaaatcagtggaagctgggagctggtagctggggatctctgacaaaactatggagattactcaccgtgatgtgcatgatggtcact

SEQ ID NO: 30002 - DNA, 1758 bp, DROSOPHILA
atgaatgctcggctgatcctgaggcagcttcccaatcacttgatctttcgcatcctgcactattccctgatctcccagcagctgcgggacgagctggtagtttctgcaggatcattcagattaaaaggtggtggaaacaaggtgctggagtggcagcccttcgtcctgtggcttgccaacctgctgctgaactacgctggcgatatactgggcaacctgctcttgggtagtcttccattggagccactgtgcaataccgcagatgtcatgctcagttcgttgatctggtactgcatcttttactgtccctttgacctggcccacgccgtgaccagcactttggcctttcgcatcctggccaccgccatgtctacgattagccaggttcagttgatcgatcgaggagtccatttggcggcacaggtctacggaaatgctccaatcccgatgctagtggttggcaccgtcatgggcagtggagccgaagtactgaaaccggtggcgagtcttttaatcaatagatgtcaacacaaccagatggcatacctgaagttgagcaagcatcaacttatggtctacatactggtgatgaccaccgcctttaagttcctgtcgctgtgctatcgaacggatcatataatttggctattggagcaacatatacggtacaccctctttggtggcctctccagggatttaaccaagttcttccaacgcctgctggagcctaaagtccagcgaacccaagcgattggatcactgcagcagatgtctcgcttgatcgggttacgtatgctaatcagcttagaatcgcccactggtggtcagaggagcgttggagcagtgggcaaagcgaaggaagtgctcggttacggccacagtccgaataagactaagaagaatccatctgccatcatctcgatcctctgtccagatggcgataagcccaataaggaagccaagcccaagaagaacggcgggtcggaagaatttcaggccaaagaatgtccccgaacgaaaagcttcaagccaccagaagagaggcgaatatttctggagcaggaggtggttcccattctaatggagggcatgttgggattggcccgggaaatgccccgcgatcccatcggttatctgcagaagttttggcttgacgacaagcacaagaagactgctataatcatgtctagattgttcctgcccgtcttggccattgtgctggtctccatcggagcttcgcatacagccagcttggagtggccctcgaatcttgtggctctcagttcggtcaagtcctcgcagctgcttccgattgccagcgaggattccgttgagttggccgatggcagttcggggtccgtcagctcatccgctgcccagccggaagatcaatcccaggaggaggcggaagagcaacaggtctcctccgcatccagtggcagtgccgatccgattagtggccgtcttgtctctgccggaattcccgtctctgtgcctcttcctctgatcctggccgctcgtaatggactacgaaccgtattgaccatccaggagccagccgtggccaaggtgggcgaggtggtgcagcacgtgcccactgccgtttcgcatcagacccagacggtggtgcacgatcaccgccgattggtcacacccattgtggcacccgctgttcgcaccacccaggtgattcgccagcagccaccacttctgtggagcgtggcctccgatccccgagtggttctcatccgcaactaa

SEQ ID NO: 30003 - protein, 585 aa, DROSOPHILA
MNARLILRQLPNHLIFRILHYSLISQQLRDELVVSAGSFRLKGGGNKVLEWQPFVLWLANLLLNYAGDILGNLLLGSLPLEPLCNTADVMLSSLIWYCIFYCPFDLAHAVTSTLAFRILATAMSTISQVQLIDRGVHLAAQVYGNAPIPMLVVGTVMGSGAEVLKPVASLLINRCQHNQMAYLKLSKHQLMVYILVMTTAFKFLSLCYRTDHIIWLLEQHIRYTLFGGLSRDLTKFFQRLLEPKVQRTQAIGSLQQMSRLIGLRMLISLESPTGGQRSVGAVGKAKEVLGYGHSPNKTKKNPSAIISILCPDGDKPNKEAKPKKNGGSEEFQAKECPRTKSFKPPEERRIFLEQEVVPILMEGMLGLAREMPRDPIGYLQKFWLDDKHKKTAIIMSRLFLPVLAIVLVSIGASHTASLEWPSNLVALSSVKSSQLLPIASEDSVELADGSSGSVSSSAAQPEDQSQEEAEEQQVSSASSGSADPISGRLVSAGIPVSVPLPLILAARNGLRTVLTIQEPAVAKVGEVVQHVPTAVSHQTQTVVHDHRRLVTPIVAPAVRTTQVIRQQPPLLWSVASDPRVVLIRN

SEQ ID NO: 30004 - DNA, 2535 bp, DROSOPHILA
ggagcatttccgtagacctgtgccgccaaatggactcctcgatcgatcaactgaacctggctaatcgtagacatggcggtggccaggatgcgaaaggccaaagtgctggtcacggcgtgggccaggtcaaagggacagtaaaagatgcagtacctttttgagtggaaacaaagcttcatataaacaaaataaatatgttcctcacgcaccagtgaactatgtaattttaatttattgagcgcaatagatcccactcaccagatcaacgaactgagcatgacatctgcggtattgcacagtggctccaatggaagactacccaagagcaggttgcccagtatatcgccagcgtagttcagcagcaggttggcaagccacaggacgaagggctgccactccagcaccttgtttccaccaccttttaatctgaatgatcctgcagaaactaccagctcgtcccgcagctgctgggagatcagggaatagtgcaggatgcgaaagatcaagtgattgggaagctgcctcaggatcagccgagcattcatccctcgattagctagctgcccgcactccttttcggagacttctgatattgatatcaaattttggcttctcgaatcttgataatttgccgtttaaaagtatttaaactacatttaaaatacttattatattatgaagagaatttgtctaaacgaaaatattgacaagcgaaacttgggtgtctgtacttgtgtggatatttgaatgcaaataataatagttgtcatggttagcaaaaatttgaatagtgcaaaatatcttgaggcttatgattattgctttatctccaaatctcattggatctcaaattaagttgagccttgataaaaagtattcgagttttattcacaagcacttgagtcgaatgtgagtgttaagtgttactgcttgatgttttagtagttgaattgaataaaagcctaaaccaaagctttaatttaatataatatatagcacctcaaacgggtgacaaattccgattcgtatgagtgttcaggctgcgaggtcctgggatcagggaggcgtagctaatgtttcgcactggcttaatccttggcagcatctggtgcaccactggatgggcagcgtaggtgagatgggcgggtgtctgtccagagatgacaggcacctcctccgcctccgccgttgccgcctgaaagaacctctccacctgctgtcgttccactgccgcctggtgatgattaacaatcctggcagagggaacgagcagctgatgtgtttgctttcgggactgcagggttagtggctctgctgaggataatctgctgaagctctggtgggaaatggcactggccacctgtccgttgccatgcaggattgtcgtggctgcgtgactgtggctcaggccccaggtgaatacgaggcaaacaacctgttggtccgaaatgtgggaatcaaaatcagtggaagctgggagctggtagctggggatctctgacaaaactatggagattactcaccgtgatgtgcatgatggtcacttgagtgggcaactaattaccgttagacatgtgccgctgccatttatagccggacttggccaagaggactccttgaccaaaggggtcgccctgtcttgccgctaagagatttatgggccattttgtgtgcagctaattaattaatcaaaagctactccaatacgacagcccctcatgagctgcgtgcacttagagcttccattacgcgcctccggctaatcggctaactgactgactgactcaacattgccggattgctggattgccggcgattgtgcgaagccacgacggcaactttagctatatagaaacctctagcgccaaattagtattggtagtgcctgaaatacactataaataaagtgggcatgtcggttttatgtgcaactgaaagttataaaagaaaaaggggatacctgtttgcttaagatgcttaagatggaaagtcttattagattgttagatttagagtaatacctgcatagagagtattctctagttgttttttttcagctgccagagcaaacaaaatatcgaaccacaaaagttggtggtgcggtgggcgggcggcagaggtgcgaagtggagcggagtggatcaaccttcagcgagttgcgcagacgcagacggcgtcgcatgttgtaggctttgttgttgcggtgctattactacaatatttgcggcgttcggcatttatttatttatatttgttttttttcggtttatttctttacgtaaagctgcgtccaagttgagacactcccacaattgcaagataaccgcgactgcgcgcgtgtttccaacgcttcgatcgcagatcgcgccgttctccagcggctgtgcgagcggggctctaccactggtacctatccaatctacccccttggcatgctccacgcccgcccctgttttgggccagcaactgctccaccgtgatttcatggcacagcaattcacacagcacttcagtttgactttgccactcgctccg

SEQ ID NO: 30005 - DNA, 447 bp, DROSOPHILA
atgcacatcacggttgtttgcctcgtattcacctggggcctgagccacagtcacgcagccacgacaatcctgcatggcaacggacaggtggccagtgccatttcccaccagagcttcagcagattatcctcagcagagccactaaccctgcagtcccgaaagcaaacacatcagctgctcgttccctctgccaggattgttaatcatcaccaggcggcagtggaacgacagcaggtggagaggttctttcaggcggcaacggcggaggcggaggaggtgcctgtcatctctggacagacacccgcccatctcacctacgctgcccatccagtggtgcaccagatgctgccaaggattaagccagtgcgaaacattagctacgcctccctgatcccaggacctcgcagcctgaacactcatacgaatcggaatttgtcacccgtttga

SEQ ID NO: 30006 - protein, 148 aa, DROSOPHILA
MHITVVCLVFTWGLSHSHAATTILHGNGQVASAISHQSFSRLSSAEPLTLQSRKQTHQLLVPSARIVNHHQAAVERQQVERFFQAATAEAEEVPVISGQTPAHLTYAAHPVVHQMLPRIKPVRNISYASLIPGPRSLNTHTNRNLSPV

SEQ ID NO: 30007 - DNA, 2533 bp, DROSOPHILA
ccaccagagccacacccaggtgcaccaccagaagaccatcatcaccccggtggttgctcctgtggtcaagactgtcgccgtcgccgctgctccagtggcccatgtctaccatcattaggaaaccttttgcttgaacggattgttatgattgcttctttgaataaatttatttgttgatcgtagaaattgtgaaattttatgaattgctctttttgtggcaaaattttgaatagctgatcgatttgatccaatccaattagcatttaaataatcaatttgaatgacttttagtggggtattcattagtattcattggcaatctcgagccggtagccgagtgcgaaaacttaaaaaaaataaaaatacaacacaaaagtaaaactgcctagaggcagcaccaaaaataaattatgcaaaccaattattgtagatctttttttcgtttaataaaaaataaatgaattgtggtcgtgctttcatacatatgtatgagtaaatggctctttaacttttaccaatgttgaacatatcaattcaaatttgacattatacattgtttactcattactagaatcaaaagtatttaacagcttagaaggaagcgtttccgatcacataaagtatatatattcttgatatgcagcactagccgatatgatctgtccgtccgtttatctgtccgtccgtatgaactttgagttctcaagatctcaaaagctgacacagttttgaaaattgttttgattttttttaaattttactattttttgaacaattttcatttatatgccaatacccttactaggcaatgtaacacctttactttttaattaagatccaggaccaggtcatcgcttgaaaacatattttaggtaaatgtagaaattcatacatttcgtacatttctaaagaaatcgaagttaaattaaatttcaattgatttttttattttctcgttcaacaaatttatcataaccatataagttcgctttcaatcgattcacttgtggtaggcggagtagacaactggggcgctgtggacggtgtgaaccagaggggcagctgggatcacggtcttgataaccggagcagctgggatgacggtcttgaccagtggagcggctgggacgacagtgtggaccagaggagcagaggagaccacagtcttaaggacgggagcggcagggatcacagtcttgaccaggggagcggcagggatcacagtcttgaccagaggagcggcatgtaccactggggcagcatgaacaaccggggcggagtagaccactggcaccttgcgcaccaggttcacgttgctctggtgggtgatggccgaggaggcgctggtgtccacgtaggcagtcttggcaagaatcgccggctggacaatcgagtgggtctcggcaatcagaccgggggcagcggcggccacagccaggcaagcgaagaaggcgacctgtggaggaggataatgggttacaggactctcagcactcagcttccatctcctagacaactcacgaatttgaacatctttggattggtttttttttggggggtatgctgtgattgctgaatcgattgcaactgctgatgatgacaggccaaacgcggggtttttatagttgcctagtttggtccaaagcccaattgtttgtcgctaagtacttggctgaacttgagccgccaaccggtttgggtttttaagtaaaacacttattcgggttttcagttttcagctggctctggcttctaagcgcttatcaaagacgcagttcgttaactgacctaggttccagcagctttggctctgtgtgtgggtgattgtgaggaagtcgagaagtcgggacaacaagccaggccaatcaatcgacaatgggccaagtaattggccttagatgcggtcgcttacgcaaatgagactgcctgcagatggtgggctatcccattgagtgcgtgggctatccttacatccttacatccgtgtccttgcacttcaatcggcgacactgcatcttcctcctcgttggcctttaacaatcacttgatccggcgcgtaattgagttgcattctcgtcttggggatacatctccatcttgactgctggatgtgtctttgtgggcatgggttgcatctcccagtgctcgttatgcgaccttttaccacataaccacataattaatgagtaagccaatgtgtgcaaatgtgtaaataccatcgatgaggtatccaataagagttgctcacataacaccagtaacattgacagctggaggtaatcaaaggtttgcgaccaggacaattgtctggcaacgaaggtgtgtaattgccgattggtcagcaaatcgtattcaaaggccttgacgtgattacgcgaactcagcgaatgggctaagaataaatgtgccctttgcaaatcaattggttatttaattccaggaatgaaggatagaatctgtggcaagatgttgtaatattttgaggatattcgatggacttggtttaagagcaaacctaatttatggaaacttg

SEQ ID NO: 30008 - DNA, 393 bp, DROSOPHILA
atgttcaaattcccggcgattcttgccaagactgcctacgtggacaccagcgcctcctcggccatcacccaccagagcaacgtgaacctggtgcgcaaggtgccagtggtctactccgccccggttgttcatgctgccccagtggtacatgccgctcctctggtcaagactgtgatccctgccgctcccctggtcaagactgtgatccctgccgctcccgtccttaagactgtggtctcctctgctcctctggtccacactgtcgtcccagccgctccactggtcaagaccgtcatcccagctgctccggttatcaagaccgtgatcccagctgcccctctggttcacaccgtccacagcgccccagttgtctactccgcctaccacaagtga

SEQ ID NO: 30009 - protein, 130 aa, DROSOPHILA
MFKFPAILAKTAYVDTSASSAITHQSNVNLVRKVPVVYSAPVVHAAPVVHAAPLVKTVIPAAPLVKTVIPAAPVLKTVVSSAPLVHTVVPAAPLVKTVIPAAPVIKTVIPAAPLVHTVHSAPVVYSAYHK

SEQ ID NO: 30010 - DNA, 2456 bp, DROSOPHILA
aagaccttcgtttaatttggcgtgtcatttgtcattttggcaaatctattgacaatttggctatataaacgttgcgtaggcctcattgggtcatgagttcttactggagtttcgccgagccaaattcaaactaagactagatccaatttcagctgcctcaacatgcacagaatggtagatacaaatactgcaatttagcacgatttttttttttatattttataaactatatttacaaattgaaatcaatgttaatttgtttgcagctgctctacactttggtaatcgttgcccttgctttggttcaggcctgccaaatccatcataatctgacatttcctgctgtggaccaagtttccgactgttctggccactacctcacttttggtaatcggagtttgacaagggatctgcccacattaaccccaggcaattcgatgtcatctcggcttgaactttgcttttatggcaaaccttttacgctggggcattagccgtgcattgttgttgctttgttattgcttgaataaattgttgtaaattattaattatataaaggagtgcgatttcttttattgctataagtttggatgcctggttcggagtttacagcgaagttttggttacattagataactgtttaattagattaacttcgattgtattaaattatatataaataaacataatataatattttttaacattttgtaatgtgactaatatttggttctggttctaaaggttttatttatttcttttttttattgatttcccattgagtgtgctgataagtattaatttagtatgaaacgatttatggttcattttaaacatgttttagacactcatttttctttacaaatgatttgttttattcaagtcccaagtcatttttctggtaaataaataaatttttcataatttaggatcaataatacttttcagaattttattttattttcatataattggttaacaaacaaacaatttgaacgctttagtggtgcagggtgtaggccagaggagcggagtgcaccactgacttgacgaggggagcggagtgaagcaccgagtgcaccacaggagcggagtgaacggagtggacgacaggagcggcgtggacaacgggcacggagtgaaccactggagcagcatggacggcaacggcgggatgggagtaggtggtggtcttcacgataggagcaaccactggctgcaccaccgccttgctgtgcacctgggtgatgctctggtgggaaaccgccgagggagcagagtgcaccaccgatccaaccttggccagaacgggctcgtgcaccacatggtgagtctcgatgagaccagcactggcggtggcgaccaggagagcgatgacgccgatctgtacggaataagccttgattacttcagctccggaggaggattatgaggagttactcacaaatttgaacattttgatattggtatctttaaagcgagtgctgctgattgcgtgagaagattcgtaaggtaactgatgatgtttgggaacagacatcccaacttatatagaacctcgagccaacgctccaaacccaaccgctgaccttcagtacgcccctgcatgacccgactttgatcagttggagattcgaaaaccaaaatcgagtcaaagcaagctcattatgatttctcgttgctgcagctgccgaaagccaaaagctcagatcgttggagcccgaagtatctgaagtatctgttgccttatcaaaagcccctcaaggtggacaacttcggctgccgaagtctctggctgtttgagcccttagcctgcgctgtttagtcgctatataagcctcatctgcacgttccaccagcatcagtcatctctctgagtttatcccaaaaacaaccaaccaaccaaccaaacctaattcaagatgttcaaatttgtaagtccaatggatttgccagaaaattaagaacttcgcattaatatgttactcctaaaggttgctgtcatcgctctcctggtcgccaccgccagtgctggtctcatcgagactcaccatgtggtgcacgagcccgttctggccaaggttggatcggtggtgcactctgctccctcggcggtttcccaccagagcatcacccaggtgcacagcaaggcggtggtgcagccagtggttgctcccatcgtgaagaccaccacctactcccatcccgccgttgccgtccacgctgctccagtggttcactccgtgcccgttgtccacgccgctccagtcgtccactctgtgcctctggtccactcagctcccctcgtcaagtcggtggtgcactccgctcccctggcctacaccctgcaccactaaggacgcaaatgtgatacagtatttacgattttttgtttcaataaatgtttttcgttttgtcataacaagttaacggattgtgttttattatatttaaac

SEQ ID NO: 30011 - DNA, 396 bp, DROSOPHILA
atgttcaaatttatcggcgtcatcgctctcctggtcgccaccgccagtgctggtctcatcgagactcaccatgtggtgcacgagcccgttctggccaaggttggatcggtggtgcactctgctccctcggcggtttcccaccagagcatcacccaggtgcacagcaaggcggtggtgcagccagtggttgctcctatcgtgaagaccaccacctactcccatcccgccgttgccgtccatgctgctccagtggttcactccgtgcccgttgtccacgccgctcctgtcgtccactccgttcactccgctcctgtggtgcactcggtgcttcactccgctcccctcgtcaagtcagtggtgcactccgctcctctggcctacaccctgcaccactaa

SEQ ID NO: 30012 - protein, 131 aa, DROSOPHILA
MFKFIGVIALLVATASAGLIETHHVVHEPVLAKVGSVVHSAPSAVSHQSITQVHSKAVVQPVVAPIVKTTTYSHPAVAVHAAPVVHSVPVVHAAPVVHSVHSAPVVHSVLHSAPLVKSVVHSAPLAYTLHH

SEQ ID NO: 30013 - DNA, 2421 bp, DROSOPHILA
gaaagtcaattgcaaaagccaaatagacttgaacttgaaatagatctggaacccttctgattgtatttccataccatgtgtgtttacaatggaaatgttgcatgcaacagtggcagcaacaacaactatttatcacctcgattggccaatccgagtgatacgtacatacatacatacatacctacccaccctcgtcgtcccgcttgcatagacatcgacattcatcatctgcttatgcactgatttgcataacacagaaaaatcatttggttgccacatgtagtggcaacgtgtgttgtcaccatgggaaatgtgccatcccccatcgattgtatcgaatggttttttcggttaattactattacccacaggctaattatgtcagctatataaggaagtgattttggtgcgagtttgcggcacagatatccgatcgcatttgacgtcactttgcgtattaattacccacttaaaggaagagaagatcaatttcaattgtgtaagtgcagtaataatattttattcggggtatccggaaatagcgtttaacaagaaatgactgaaactcgagcggaaattgtgattgaatctgttttagccaaagggacttccgtgacacaaaaaacgtgacagatgtacgttagtttgaataaataaaagtatgcatattaattttacctaattaaatacttttacttttctaaaatcttgctatttactaacttttttgtttctttggtgtcaaatccatttaagaactgtgccctccactatcccaagtaaaatcatcactcttaggtgttgtatcttttatgtacagcattacagatagatggaatagaatattcagcagcttacagcgaaaccttcagttggtccttacactggaacaatcgacacacgcaaacatacacagcatactaaggttgcattctccccgtcgtcgtcatcgttaatcagttatcgttatcattcatcagtcaatcgccaggatcgtcgtttagtgcagatggtagtcgtggaagtcgtgatggtgatgcagatggaagggatcgtaggggtggtaggccttgatgatgggcgcaggatgataagccttgatgatgggcggatgcaccactgtcttcaccacagtgggcagcaggaccggcttgattatgtggtgcggcacactgtgcaccaccgtggagctctggtgggagacggcggcgggcagatggtagtgcagtggttccacatgatggtggtgtggatagtaagggatttccggatagtgatggtggtggccatgcaggaaaccaggacgagctgccgtcaaggcgcaaattgagagtagcgacactacctataagtggggtaaaatatcctcagattggttctcgaccagagttaatccgtgatatccttaccagtttcatcatcttgtgggtggtttaatccttggtggttggtcttggtagctcgctgctttcaactgatgccactcgatggtgtggaggtggcttttattcacttgccacctagccaattggccaccagcaacagctgcggattccgctgcagatgcagatgcagatgctctcgttgccatatccgccgctgctgagaggcttcaatgttgtggaaccttgcgtttgcatccgcagtttgcagtttgcagtctgccgcctgaagttgctgccgttgtaattgcagctcgtttcgtttttcatttcaattgttgtttttgcgttgtctgcctttttcgcacacagttttgtcaagcgccgcattgtttatccgcagtctgagtcgctccatgcatcgaccccttccaatcccaattccaatccgaagcgctgaactctgccacggctgggttcaatgaggtggcagacaccacagataacatttatgtggggatactcttataaaagtttcgatgggatctgaaggagaaaagtttactacagtatccaaacagtatcagaacgtaaaacttcaaatggaatcgcatataaaacatatccacataagcgaatatatacatattttcaattattaaattgtttatataaatatttgttacaataaacattaagctttttttaactggtttaatttattttattatttacgttagtttcccaactatatcccatagctaatgtataccaatagatggagagtagctgctcatgtgttcattcagagagcttttcctaaggttgtcgctggttgtatttatttatttggtttttttttttttggcaagtcttttaatactataatgtcccagcgaatgtcgacgttctgttctcgatgctcgtctgctgcaattggtaattgtaattgttgctgcatctgctgcaacttcattgcaatttgcgcttgcaactcgctcgttccgttagaccaatgaagaaaaaactattgcaaatt

SEQ ID NO: 30014 - DNA, 357 bp, DROSOPHILA
atgatgaaactggtagtgtcgctactctcaatttgcgccttgacggcagctcgtcctggtttcctgcatggccaccaccatcactatccggaaatcccttactatccacaccaccatcatgtggaaccactgcactaccatctgcccgccgccgtctcccaccagagctccacggtggtgcacagtgtgccgcaccacataatcaagccggtcctgctgcccactgtggtgaagacagtggtgcatccgcccatcatcaaggcttatcatcctgcgcccatcatcaaggcctaccacccctacgatcccttccatctgcatcaccatcacgacttccacgactaccatctgcactaa

SEQ ID NO: 30015 - protein, 118 aa, DROSOPHILA
MMKLVVSLLSICALTAARPGFLHGHHHHYPEIPYYPHHHHVEPLHYHLPAAVSHQSSTVVHSVPHHIIKPVLLPTVVKTVVHPPIIKAYHPAPIIKAYHPYDPFHLHHHHDFHDYHLH

SEQ ID NO: 30016 - DNA, 2452 bp, DROSOPHILA
tcatcaagacttatgcggctcctgccctccacacgaccctcctctcgtctccgtgggccggacatggttgggctggccatggctgggctccgtcctggtaaatgtgatggaggtcctggatggcattgcgtgggctagcaactttggcttaccctcacctcgatcccatgcttaaactctcaaccctgctgttttgtttttcttctttcacatttcgactgatgtaaataaatccatgtttcatgctcaaaataattctgtggcatatttcttaatggaaaaacactttatgctaccagttcactagaagttagataagaactcggtatcagtgcttttaccttaacttatgtggctggtagttcttatctatcacgatttggttgcttgatgtttatacgtgttttgaaatttatcttggatagtactttattctaaatcgttatcaagcaattattgtttattgttcgttgtttaaattatgctttcaatactctacttataccatttatagtagtacatatatgaacaatagtatatccttaatgaattaattctatctgaatataacatagaaattgatgactgtttaaaaaaattccaaatttcaggcactatgtaagatcaattaatcttcaactcaaaacaagttttgtttagtaatccaattttttttcagtagtaatctacaactataagaaatgtgaacttatattatatatataattatatattatatatataatatatgtatattatattatattatattaatttgtatcttcaatttaaaaaggcatttaaagcccaaattttcaaattgtagctgtatttttgtaagtatggctacagcactatagtaatttcccaatcaaaacaaatgtcaattttttaacaatcacattttactcgcaattaaactcaattatgtacaataggaatcgctattttctaaccgtccagttcgctgggatgagtccccaaaggtctagtctttcgattaccagctggagttgtagacaaccggagaagcggcggcataggaggtgtgcaccaccggggcggcatagctggtgtggacaacgggagcggcagcataggcggtatgcaccactggggcagctgcagcatagctgaccaccggagtggacttcaccaccggggccacgatgtcctccactacatgcgagtggctgtgcaccaccgactggctctggtgggagaccgatgtgggaatgctgctgaccacagaacccaccttggccagagagcgctcctggacaacggttgtggcagctggagcggcataaaccagaggagactcataaagatgaccgggacgagcgacagctacggcgaggagagcagacaacaccacctggacaagagagttggaggattaattgatgatataatgctgtgataaattttgtaacttaccaatttgaacatgtttaaggatttttgtttcttggtctgtgttgtgctgctgaagcgaacaagttgactgataatttgacaaccgcaagtgccgccttatatatggttaaaaatggatgttcacgacgcggctgcaaggcgaagaaagagtggtttaattaaaacatttacgagcagagcagagggcagtcaaaaccaaatgagttgtataaatctgccctcgccggcacaataaaacatgagacttgcatttggtcactgtgagacccaaaatcccaaaaacccgtagcccaaaaccaaaaagctcacgcactgcaagttgaccctgactcacgcccccaaagtgcaagtaatgcagtcgccgaggaatcactgtatctaatggcagtcaaggggctaatggctgtgattcggatcagttttacacagaagaaataagtgaggcaataagtgaggagtgatctattatttaatttaaaatattaaaaaaatatcactatacttaaaactccaaagtatataaagaatgtgttcaaattaaagacgcaatgatatgaaatatttatcataatacgatcactttttttctctgtgtatcacatttccgagtacccgaacaagtagttcgcttgtctccgctgagccgtccaccgacgctaattgcttattgatcgttggccagaatctgatatgggtatgacttcggtccgaattgtgacgcacttttgtgagccggaaggtcaaagccaaatggctgctgtataaaaagatagatgcagcccggcaaacggcaacagttctcgcaagaaactcaaaccgatcactcccaattccaaacagtcaatacagacctaacccatttccaaaatgttcaagttggtggtattgtctgctctgctcgctgtagccgctgcccgtcccggtcacctgttggagtcctccccgctggtctacgctgccccagcagcgacgaccatcgtccaggagcccgttctggccaaggtgggagccg

SEQ ID NO: 30017 - DNA, 390 bp, DROSOPHILA
atgttcaaattggtggtgttgtctgctctcctcgccgtagctgtcgctcgtcccggtcatctttatgagtctcctctggtttatgccgctccagctgccacaaccgttgtccaggagcgctctctggccaaggtgggttctgtggtcagcagcattcccacatcggtctcccaccagagccagtcggtggtgcacagccactcgcatgtagtggaggacatcgtggccccggtggtgaagtccactccggtggtcagctatgctgcagctgccccagtggtgcataccgcctatgctgccgctcccgttgtccacaccagctatgccgccccggtggtgcacacctcctatgccgccgcttctccggttgtctacaactccagctggtaa

SEQ ID NO: 30018 - protein, 129 aa, DROSOPHILA
MFKLVVLSALLAVAVARPGHLYESPLVYAAPAATTVVQERSLAKVGSVVSSIPTSVSHQSQSVVHSHSHVVEDIVAPVVKSTPVVSYAAAAPVVHTAYAAAPVVHTSYAAPVVHTSYAAASPVVYNSSW

SEQ ID NO: 30019 - DNA, 2327 bp, DROSOPHILA
atatataccttcatttacagctcgttgccctctgcgtggcctctgctcaggctggtctccttcctttccatgctccggctccactggctgctccacttgctcctgccttcgcagctcccctggctgctcctgtggctaccgccggagtggtggctccatatgcctccagcttcaatgcccaccgcatcaaccacgccgtggcatacccagtggctcctgctccagctccagtggccttcgctgctccccttcccgctcccctgcccgttccagttgctgctcccgctccagtggcctttgccgctcctgctcctctgccagtggctgctgctcctgctccggtggcctttgctgctcccgccaaggttgccttcgccgctcccgctccggtggctgctcctctgggcttcgcccctgctccggcgcctgttgccttcgccgcaccagccaagttcggattcggacccttcgccgctcccctggctgctccagtcccagcgcctctggctgtggcccccaagttcgctcccgccccatacttcttctaaggacttagctgtaggatcacccagctcatacactcccatccgtcctattagattgtagaaactagcccaaatcttcatctcctagagagcagcaatgcttggcgaataaacaattatccattaatcaaatttacaaacgtgtttctttgaggaagtttacttggtagcctctcagtagtatttcctattatagctgccttggattataccatccaaaatcatatttcaaattaatactgctcttaaaagtcgaacatcattagcggataatatataataccttctaaaaccatataaacggtttctatattttttacggatttttaggtaagttttatagaatcattcatcagtgatagcagcaatgttaaacgtaatgattaaaagaatgattattattattatttgtttttatttataagttaaactatgtttttctagggtatacatcgctagaacctaatgtttttgacatgaccaatcctctggaagagaggaacatgttcgtagggcgtgtgcgaaatgggcaccgaatcgtaggtgacgtgggcaatcttcgtgagaggtgccacaatggtgtagccaggatgctgagccaactcctggggcgttgatgcaaccggcagaggatgatgatagatcaccgggtgatggtagataaccgtggcggcaaaggcaccactcaaaaggccgaatagcacgacgagctaaaataagatctatcagatacagatactaataaaggagtactgagtatctatcctgtttaccttgaacattctctggtgatattgtggtcagaactgcacttggactaagctgaatgcagccgaaggccaatcaatttataggctcgtcttcatcgctggattttcatagcgcttttaaacagttaggaggggtaaaccggttgacaatcccctgagatcagcaactgcatttcccttgctaccaggaacctgttgcaacatccatgtagtgggagcactactccacttggcctctggtccccttctcttcgaaaagaaacccgttttcaagttcaagtttaaagcgtcaacgccgaagattatcaaagagtcagtgactcttttgtgcacttaattatggcacattgggttggttggttgcttttgttgtcttacatttctcggctttttgtttgtttgttttttttttcttgggaagtatgagttagttggtcacacgtctgcggatttgcctttgtttacccatttgatgtctcttttcaattttaatcattgcccaatcttgtgtttttcgagctattttatgtggctttggaggtgttaagaattgattagtttgactttattcagcggctgttcgagctctttatgctaaagcggttataaacgttgttttagttttaatactagcacactccctacaacgaagttgcttttgtggccagtctgacacatacaaattttgcttaatatatacttgtgttatagattcgtgaaaaatagattttgaaatatatttaaattaaacctacgaatatatagcgtttttttggaggagtctatacttttacttatatagttctcttcttttctatactgaataaaaataaacagaccattgacccgaagttcagatcttagttcttgatcagatccaaccggaatcacatgaaggaaacgaaggaaaaggccacccaccagatttaaaatgcccacaggccaaattaaaaactggaactggaaccattgtggactggtaaatgccaaactcgattgcagattatacaat

SEQ ID NO: 30020 - DNA, 264 bp, DROSOPHILA
atgttcaagctcgtcgtgctattcggccttttgagtggtgcctttgccgccacggttatctaccatcacccggtgatctatcatcatcctctgccggttgcatcaacgccccaggagttggctcagcatcctggctacaccattgtggcacctctcacgaagattgcccacgtcacctacgattcggtgcccatttcgcacacgccctacgaacatgttcctctcttccagaggattggtcatgtcaaaaacattaggttctag

SEQ ID NO: 30021 - protein, 87 aa, DROSOPHILA
MFKLVVLFGLLSGAFAATVIYHHPVIYHHPLPVASTPQELAQHPGYTIVAPLTKIAHVTYDSVPISHTPYEHVPLFQRIGHVKNIRF

SEQ ID NO: 30022 - DNA, 2492 bp, DROSOPHILA
ccatcacccagcattggaatcggaattggtcatggctacggtggatatggcctgggattgggtctaggaatcgggcactacggaggactctacgggcacggctatggcgggcactatggaggtcttggtctgggattgggctaccatgcacccatcatctccaagacgatcatcggcaaaagctacttgggcggctatggctatggcctcggtcacggatatctcggaggctacggccatggactgtacggaggacacggtctgggtctgggtctgggtctgggatacggactgggatatggctatggccacggttggtagaggtactcccaagtcaagtaaagttaagccaaatggagccgggacgagcgtgtgagagttttcaatcaagtcatatacttcgcagtacccaaatcttattcagtcagtcactcagcaagtcaataaatcaataaagacaaagcaaaaaatgtacaaaaaactagaatcatggtcaaccgtttattaaaactggatctttttttctcacggttctttgagacatatttataattgtcttaattgcctatactaaacatatattttgatacttaatgtaagtaaagcacacttttgatgttctgaacaaaatatataacattcgtttacgatttcaaaactttggctataaggaacatccaaatactgaaatctgaaaataaatatctgaaaaacaaaatgaaactgaatatttgaaaattgtcagcacgtttttcatattgcctcaaacgcttgatcaaataaaacagttttaagtttagtttttaaattcaatcgaaatatatttcaacatcaaacccactcttcacaatctgttttttaacaatttgatttcactttacaaaaccttcactgatttctctctctctcttttttctctgtgtatttacatctcatttctgaccgatccaaacaaaacgaaatgcatgcggaaaacgatgatgggtggtatggacctcgtttaccatccatgagcgagtccataggcaggagcagcaagagctgtcttgtagcccagtcccagaggagcacccagagtaggatatgccgacttgtagcccaatcccaagggagcggccagaggggcgtgagctagtcccaaaggaccatgagccaggccaatgggaccgggaccatatcccaatccgtaggcggaaagggccggagcagccagaggagcgtgcgccaaggccggggcggcatagctaagcctgggggccagcccgtaagaggcaatcgagggagcagccaaggcgtgtccataggagatggccggagcagctgcagtcagcggcaaggccggagcagctaatccgcccaaatagccaggagcagcagcagcgctggccaggcagaaaacggcgaaaacgaactagttgatgggggaaaaaaaaatgagatactaacaaaggacttttcagagtatatcaattccacttacgtatttgaacattttggttttggttgcaagttgaactcgtggcaagaacacaaagctgaataatgccgctgtctaaggcacaaatgcttttatagcccacagacctggccaaaatgcagcacgagaacggatccaaactggcggcccagagacttttacttttgttcaaacgagagacataggcatattcgtagcccaaaaccgagtccaagagagccacatgcaaagctggcctgtcgagtatcgagatggcgatggagacctgggacccaccggagcaccacctggccccgccccagacaacgcggatgtgggcctgggctgcgatttggccataccctttcggtggtaaactaaatgagagattgtttttatctaatgaataataaggattttaatacgtaattaggaaagtcatcaaatgaaatattacataaattattcattaaatttttgattcttctacaaggatagtagttattctgtgagttattcggttcacaataatgaaatatttatatttacctatttacactattagaacttattttgtcttaatatttttaatatatttatggaaatttcaatctaaatatatattatctattataagtattatgctgtttatattgaatattcataattgtctccagtcaaagggtatttccccaatcgatcaacgtttcgaccatttttgtttttattttgaataatttctgataaatttgtttttggtctatttacctaatgccgaagccgcgacaaggtgtgcgtgagaaaaacttaaattgcattttgtatcttgcctttttgggttcttgtatgcatttatttccatgcaggcaacaagtttcgcccattccgccgtttaaattcattcaaatgcgtgaggctattttgctgtagaaattttcgcagtaaatgctcgagcattcgcggagccaaagtcttaataattacaacacaggccggcaatgaaaggggcgtggcagatacacacctgtgcgtaaaa

SEQ ID NO: 30023 - DNA, 423 bp, DROSOPHILA
atgttcaaatacttcgttttcgccgttttctgcctggccagcgctgctgctgctcctggctatttgggcggattagctgctccggccttgccgctgactgcagctgctccggccatctcctatggacacgccttggctgctccctcgattgcctcttacgggctggcccccaggcttagctatgccgccccggccttggcgcacgctcctctggctgctccggccctttccgcctacggattgggatatggtcccggtcccattggcctggctcatggtcctttgggactagctcacgcccctctggccgctcccttgggattgggctacaagtcggcatatcctactctgggtgctcctctgggactgggctacaagacagctcttgctgctcctgcctatggactcgctcatggatggtaa

SEQ ID NO: 30024 - protein, 140 aa, DROSOPHILA
MFKYFVFAVFCLASAAAAPGYLGGLAAPALPLTAAAPAISYGHALAAPSIASYGLAPRLSYAAPALAHAPLAAPALSAYGLGYGPGPIGLAHGPLGLAHAPLAAPLGLGYKSAYPTLGAPLGLGYKTALAAPAYGLAHGW

SEQ ID NO: 30025 - DNA, 2288 bp, DROSOPHILA
atcgaggagaattgagaatcagcaactcaaagacttgaattaatttgcaaaatgttgtttcttagttaaatgtcgttcgcttgatttgattttcatacttttcgacggttgcacgcggcgtatgattaatgccagagttggcgtggtgggttcgtttgaggcgtggcttcgttcaacttatcgatggcgggtgattagcaaaatgcaatttaagcggcgcccctcaatgtagtaccatattcgcagtggcgatggaaatgcattgacctctaagccaacacacacgcaacttgcaatcaaagtgataaacaatgtgccgcgagctggccacatagacctcgaagggtcaggggggtatcagggctaagggggtgcgaactgcgtaaacaaagctcaaggattgcgtcctggaacgtggcgaagtgtcgatgaaccaaagtgggcgcacaaacaggccagagttgggcacacccttggagggcactctgtcatatgggagctgtctaatgaaaatggtggcctgatttaaccttaaacgaattcattcttctcatcatataatagtttaaagtgctctggtgaccattgcaaatgttaaaaattaaagcttgcagcactcgttaataattcaaatgaaatcccttatcttgaacttataattctatgtaataccacaaactaaagctatatatatatacttcccatccaggtatctattgcaataagacggcgcttcccaagagcaacctgcactatctgtttcctttgaagaaaagtcccgatgcccacggcaagattaaaattaaacggaaggaataaaactcgattcacttctcagtcggtcagtgcgtgggcctgatgcattgcgttttaatttctgtttgcctgcgagcatgtatctccatctctgtttgtatctgtatctttcgccgtggcagtgacgacgtccggtggacacgtgcggcagccttgcggaatccctttgccatcctgggacatcttacttcttgaggatggtggccacaggggcggcggcataaacggctggcagggcggcgctgtgggccacactgtgggcactgtagctactggcatagggggccacgtagggggcgtaggcaggggtgtaggcggcggtgtaggcgaggggtgcggcagcgggcagggagctgtacgccagtggagtggagtaggccagaggggcattgtaggccagcagaccaggattggcagcagcggcggcgaacagggcgcacaggacaacggcaaactgcaggataaaatgcatacaaaaagtacattaaaatacacatttacaagaagttttataaatataaaaaattgtttgaaaaatctacactgtttgataatagttttatttcgaacacacgcgtttttgtttgtatttaggattgtgaattgttgcatttttgaaacattgtatccttaaaaaaatgttggaaacttacgaatttcatcattttaattgatttggttgtgttagcgtcgaagttagacttctgattgatgtcttgtgctgagttcgaagtggtttatataggtaaatatacatagcatccttgacaaagcccattgaaaaagcaaaaacccagcaagtttaaagcatttccatcacgtaccagggctaaaacagggccaaacatttggtctctttttactggcacaattataatgttgcagatttgtgtttgtcgatatgcctgcgaatagtacgcattccttgtgaatttattattgaaaatgaatgttttttcccgctcatcttgagcatttccgcaactggcgtcagcagctgtcgtttgccgattgaattatcataatttagcactcagtgcgttttgtgggctgtgaacgtgcgtgtcattccaaccgtcttggccatctccggagttcggctcactctgtacgtttcaattgtcagccactcgaacacgccactttgcattctaatcagagatgcaagtaaaaatagaagcggtttatccagtttcgaaggacgtcatcgagttgagcccttggcttaaggttgaggacaccagaaacagggaatcgaaagctttgcataaatggaatcgcgagttcaataaaccggaggtctcgttgaccctattaatccaatgcaaacatggacattccaccacgaagaacacaacctcctttacacttcctttttttttaacaaataataggttttaagtccaaaaaataatttccaatgtatcaaagcaatttattgatacaaagcttaaaaaagtcattgattcctt

SEQ ID NO: 30026 - DNA, 288 bp, DROSOPHILA
atgcattttatcctgcagtttgccgttgtcctgtgcgccctgttcgccgccgctgctgccaatcctggtctgctggcctacaatgcccctctggcctactccactccactggcgtacagctccctgcccgctgccgcacccctcgcctacaccgccgcctacacccctgcctacgccccctacgtggccccctatgccagtagctacagtgcccacagtgtggcccacagcgccgccctgccagccgtttatgccgccgcccctgtggccaccatcctcaagaagtaa

SEQ ID NO: 30027 - protein, 95 aa, DROSOPHILA
MHFILQFAVVLCALFAAAAANPGLLAYNAPLAYSTPLAYSSLPAAAPLAYTAAYTPAYAPYVAPYASSYSAHSVAHSAALPAVYAAAPVATILKK

SEQ ID NO: 30028 - DNA, 3104 bp, DROSOPHILA
cgcaactggcgtcagcagctgtcgtttgccgattgaattatcataatttagcactcagtgcgttttgtgggctgtgaacgtgcgtgtcattccaaccgtcttggccatctccggagttcggctcactctgtacgtttcaattgtcagccactcgaacacgccactttgcattctaatcagagatgcaagtaaaaatagaagcggtttatccagtttcgaaggacgtcatcgagttgagcccttggcttaaggttgaggacaccagaaacagggaatcgaaagctttgcataaatggaatcgcgagttcaataaaccggaggtctcgttgaccctattaatccaatgcaaacatggacattccaccacgaagaacacaacctcctttacacttcctttttttttaacaaataataggttttaagtccaaaaaataatttccaatgtatcaaagcaatttattgatacaaagcttaaaaaagtcattgattccttccagcccaccaaaattaaaaaatgtaggggctagcaatttatgaaactagtgtgagaaatatttactgaaaatatgatatcacctactttataaataatatttccattggattttaatgtataccaaatttagtacttagtacccattgcaaaagagtactgcctaaaagtatgtgattatacatactcccttcacattagagatgaataagtgatgcaataaattatgaacaagtggtatacgttttacgcaaaatgcagtatttatttcaacaaaaatattccctttcttgaagtggtatgtcctgttcccatgacttaactttcagcagtcggcagaggtggggaaatgtagagtctgtcgaactaacaccagggatgtaagaagattggatgttgcaggtggttagcaggaaggtgtgtatccttgttgcaatagatgtgtatatgtttatattcaggtccagttcagcagtcaggttaagatcacgatccattcatccagtcttaacggtagtaggcggcataggggtaggcggagtaggcggacgcataggggtacgtgtaggcggagtaggcggcggccactggagcggtgtatgccgcggtgtaggcagccgagtaaggagcagctgccacatagggagcggagtaggcgctgtaggccagaggagaagcgagcaccgccggcttggcagagacgcaggccacgatggcgaacaggcacagagcgaactgaaaggataggaaaagtgcttatgagtaatccgttgtttggtggcaagtccagctatcctgcgatccttacgtatttgaacatgttggctgtttgggttggttgtgaactgttggttctcaagtactagactgatatctcctagtgcccgagtactcgggtatatatagcagaatcggtcgagaaaattccattccaattccccacattgaagcgaaggtgatgcgtggccattggtatgcacatccattcccagatcggttccaagtccattttgaagccagccaaggagaatcttgagcattatggctttgcacttttggtttcgtttggtatttttaaaagcgtgacgaaaagcgaaaaacaaatcgaatgtgagtccgtgttttgcatactaaaacgtagctggatattgatccatccatcggcaagtctggaaatgacccacaaaaactgccgggttgggttcagaaatttataaagctgggttctgtcgctccagtcatgtttatttcgttttcagaacgttgagctatcagatcttatcagctcggattagctatgtacaggaaattagtaagtctcaagcggttatccgccgagaagtcgatgcacttgctcaaagatgatgaggcctcgccatcggtggccatttcaggtggtgctcctccttctgatccacctggcggccgcgggtcagatccaggatgctgccgaggagatcgatgtgccgcctgcccatcgggctgctccaccaccgccccgccaggcagctggagctgctgttcccccaccaccactggggccaccaccacttgtgggctctgcaccgccgccgagctatcctttgttctacccagctgcgtggctgccattcggacgctacagcaactccattcccgtccacatagtggctgcctaggggagcgtcctcccactggccataaggtggtcaaaggacactgttgtccctcctgttgaatcctttccctgttatggttgctattttactcgttattgcccgctttaagccagaaatatatttttagacacgcacatgcataattatttattcgggttgacgcaactttcagtcggcaatttttaaatggccaacacgtgattctcctaccagagatgccggttacctatacatttcgagaaatctatcacttttgccatctgtgatttgtcaatggatgatgacgcaactgaattggtattttttcgggctacatttccgcattttaagtgggcagaacagacgctgccagaacaaaaggtttagaaaaggtgacagtaaaaaaatattaattataaaaaacgtatatgtttaggtgactttctttttaaatactatcaagaacttttgttgccgccaaaagattgagaaataataattaatagtagaaaatccattaaaaagtattaataatatataactatagcttttttgctattgaaaaacagaacttggtgttcccatttccagaataatatttttaagcttttagtttgatttgttttattgccagtcgggtctatttttattccatttcaaatccgttttgaatacttgttaatccgttttacaaaacagtggtgtatgcagcgctgtaagggtaggcggcatacggataagcagagtaggcagcggcaactggagcggtataagcagcggcggcaactggagcggtataggcagcggcggcaactggagcggtgtaggcagcggcaacaactggagcagcagccacaccgttgaagttgcgggccacgtactgcgaactggtagcggtgaccacgccggcaggagcagctgcaaccactggagcggcggccaggatagcgggcttgggctcagccgaggagcag

SEQ ID NO: 30029 - DNA, 624 bp, DROSOPHILA
atggcagccacgcagctgggtagaacaaaggatagctcggcggcggtgcagagcccacaagtggtggtggccccagtggtggtgggggaacagcagctccagctgcctggcggggcggtggtggagcagcccgatgggcaggcggcacatcgatctcctcggcagcatcctggatctgacccgcggccgccaggtggatcagaaggaggagcaccacctgaaatggccaccgatggcgaggcctcatcatctttgagcaagtgcatcgacttctcggcggataaccgcttgagacttactaatttcctattctccttggctggcttcaaaatggacttggaaccgatctgggaatggatgtgcataccaatggccacgcatcaccttcgcttcaatttcgctctgtgcctgttcgccatcgtggcctgcgtctctgccaagccggcggtgctcgcttctcctctggcctacagcgcctactccgctccctatgtggcagctgctccttactcggctgcctacaccgcggcatacaccgctccagtggccgccgcctactccgcctacacgtacccctatgcgtccgcctactccgcctacccctatgccgcctactaccgttaa

SEQ ID NO: 30030 - protein, 207 aa, DROSOPHILA
MAATQLGRTKDSSAAVQSPQVVVAPVVVGEQQLQLPGGAVVEQPDGQAAHRSPRQHPGSDPRPPGGSEGGAPPEMATDGEASSSLSKCIDFSADNRLRLTNFLFSLAGFKMDLEPIWEWMCIPMATHHLRFNFALCLFAIVACVSAKPAVLASPLAYSAYSAPYVAAAPYSAAYTAAYTAPVAAAYSAYTYPYASAYSAYPYAAYYR

SEQ ID NO: 30031 - DNA, 2400 bp, DROSOPHILA
ggttatccgccgagaagtcgatgcacttgctcaaagatgatgaggcctcgccatcggtggccatttcaggtggtgctcctccttctgatccacctggcggccgcgggtcagatccaggatgctgccgaggagatcgatgtgccgcctgcccatcgggctgctccaccaccgccccgccaggcagctggagctgctgttcccccaccaccactggggccaccaccacttgtgggctctgcaccgccgccgagctatcctttgttctacccagctgcgtggctgccattcggacgctacagcaactccattcccgtccacatagtggctgcctaggggagcgtcctcccactggccataaggtggtcaaaggacactgttgtccctcctgttgaatcctttccctgttatggttgctattttactcgttattgcccgctttaagccagaaatatatttttagacacgcacatgcataattatttattcgggttgacgcaactttcagtcggcaatttttaaatggccaacacgtgattctcctaccagagatgccggttacctatacatttcgagaaatctatcacttttgccatctgtgatttgtcaatggatgatgacgcaactgaattggtattttttcgggctacatttccgcattttaagtgggcagaacagacgctgccagaacaaaaggtttagaaaaggtgacagtaaaaaaatattaattataaaaaacgtatatgtttaggtgactttctttttaaatactatcaagaacttttgttgccgccaaaagattgagaaataataattaatagtagaaaatccattaaaaagtattaataatatataactatagcttttttgctattgaaaaacagaacttggtgttcccatttccagaataatatttttaagcttttagtttgatttgttttattgccagtcgggtctatttttattccatttcaaatccgttttgaatacttgttaatccgttttacaaaacagtggtgtatgcagcgctgtaagggtaggcggcatacggataagcagagtaggcagcggcaactggagcggtataagcagcggcggcaactggagcggtataggcagcggcggcaactggagcggtgtaggcagcggcaacaactggagcagcagccacaccgttgaagttgcgggccacgtactgcgaactggtagcggtgaccacgccggcaggagcagctgcaaccactggagcggcggccaggatagcgggcttgggctcagccgaggagcaggccaccagagcgcacaggacaacgagggcagactgtacggaaataaccagttaatataatactccagatatctgtatccatatggagaaaccaccaactcaccagcttgaacatgatggtttagtttagtttgatttgagctagcaaattggactatgacttgattcgatccgacatgcaacttttatagcaccgggaaatcgcatagatgcttttgactttctgggcacacacgataatggggcgaatgattctataccacctgcatgggaatgcagagcggcctttcagtagctcaattggccgtttggctacgttcccgccgcccgcggaggtcgattccaatccgaatccgaatccgaatctgaatgcaagaccaaacccattcattatttcgggcacgtccgcattgtgggcccataaaagatgtcgccgcgaaggtgaccagtagcccgatgtgattgatgccaccagacacggctaattgccgatgagtaacctcctgcgccaagagttggccaggaatcaatgaaatggaattgcacgcttcaatccgattgcgagcgcattgtttcagggttacgtccgtcggctgcaatggtctttatgcaatcaaaaccatgtcatcgtgcccgttctttgtttcggccaaaatctaatccgcttgactgatgcaatgcggtcaatctcacacacgagccaaaaaacgccagttacgtttacattcgcatcgtaaggtcaacaaactgcatggcaagatgcagtttcgagggggtcgccagataactgaggctctaaagttagcagacagcttttaataagagtcaagctcagcttaccagtccattcacaatcgaaacgtgcctgtatgggcttatatctctgaagcaaaatgaagccagacatgtaggggttcctacagggcaagttcttttggggagaggacgacctcggaataccctgtactcaattaaccacatatacttctaatcttgaaaaccagaagcagaagaatgtctagctacacgacatatgtataaacatattaccaaaattgatataatgacaatatttagaaagatatcgtaagatacccaaattttatatattcgtt

SEQ ID NO: 30032 - DNA, 330 bp, DROSOPHILA
atgttcaagctgtctgccctcgttgtcctgtgcgctctggtggcctgctcctcggctgagcccaagcccgctatcctggccgccgctccagtggttgcagctgctcctgccggcgtggtcaccgctaccagttcgcagtacgtggcccgcaacttcaacggtgtggctgctgctccagttgttgccgctgcctacaccgctccagttgccgccgctgcctataccgctccagttgccgccgctgcttataccgctccagttgccgctgcctactctgcttatccgtatgccgcctacccttacagcgctgcatacaccactgttttgtaa

SEQ ID NO: 30033 - protein, 109 aa, DROSOPHILA
MFKLSALVVLCALVACSSAEPKPAILAAAPVVAAAPAGVVTATSSQYVARNFNGVAAAPVVAAAYTAPVAAAAYTAPVAAAAYTAPVAAAYSAYPYAAYPYSAAYTTVL

SEQ ID NO: 30034 - DNA, 2294 bp, DROSOPHILA
atcccaggaggtcgttaatgcctccttcaccgccgaggaatccaagctagaatcgcagattcaaatgctttcgaaacagttggatattgtaggctcgcattcgaagaatctggaacttcacctggcctttatgcagatctttgcgtacgttatgggcggcctggtcctggtgggtgtggtgtcactgataacccttcgatatctgaagaatcaacgatcgggtcgatatgatcgcagcagcattgtcttccgctccaatgccacaatggaagctaatctcaccctgggcagtgaagatcttcagtagcctgtacatttttaactttattaaagtggaaataaaattgcaaagtttaaacatttaattcgtaatggttgttaaatgatttcataacgctaaaatttcttcgtgcttgcttaaaacaacttcgagtggcaaaaacgcataggatgtcgtaaaataaaatccttttgccaaatatcttctattcaaaccaggaaggtataacattttatattcgaattttattgaagtgcagatactcaatttgtatactcaatagaaaatgcggaaaagaaattgatagggtgtctgcgaagaaagaaagaaagagaaacatttgtaagtttatctaaatcgaccttgcacacatatgtacatctgacttcctgtatggcactgagttttgataactgagagctttaagaccttcaaggaaattatacaaattataaacgtttttcttttatcatatggattttagcaaatataagatatgtaccctgatacaaccacttttccgaataataaaatcgggaaattaaaagtttgattttgttgtaccaaaccactcttagatatatttttaagttttaagcaaacctaaagattgttaaataaaataaaagatttgtgtttcgatttttataatacttttattatttcgtttatttcggtttgagttgtccttagatttcgttaaagcctggatcactcatcctacttcttcagcagcagaggagcggtgtagggggcggcaacgtagggagatgccacatacggagacgccacgtaaggggaagcgacgtagggagaagccacgtagggagaagccacatagggagatgccacgtagggagccgcaaaatttccgtggtattcccggctgtaaaccgcagccgccggagcagcagccaccagaggtgcggagtaggccagaggagccacgattccgggcttggcggccacgcaggcaatcagtgcgaagagggcgacggcgaagaacttgaacatcttggtggatttggctgtttggatttgcgggcaaacgaaactgatgacaactgctggatgaacacggcgttttatacccaaacgaccacccacaattagccttggcacttaagctttcttggcccaccaatttaattagccaaagtacccgcaatcgtacctaaatccgttcgcagtagccaactgcgaatggtacgtgactggcctgagcaacataattgtgtttttcggccgggagaccttgcaaggtcgctagccattcggctgtggggctataaaagccacaagtctggactgtttaagacatcagttgcatttgttcaatccgacaagtaaaaccaaacaaaaaaccaaacctaccaagatgttcaagttcgtcgccgccgtcatcttcgctctgtttgcctgcgtggccgccaagcccggaatcgtggctcctctggcctactccgccccctacgtggcgtctccatatgtggcatctccctacgtggcatccccctacgtggctgccccctacaccgctgcctacaccgctgcctacgccgccccctacaccaccgcctacactgctccctatgccgcctacacctctcctctgctcctgaagaagtagattcccggaaggatgatcaacttaagaggatagcacacggacacttgcaatgaaactgaaataaactcgcaaacaaacgaacatatttgtcttttactcggaaaatggggtttactgggagctgaagaggaacttcgaaattccatttatatatagtttactatgcatattatactatacttgaagagaagtcatatccaataatgcataataagcaatatggtatcaaatacaagtatttgtattattaactcagtaaatgtataagcaactcagtaaactatttccacgatacattttcaaccaactgatactctactctaattaaatgttcacaaacagcttcttggaatcgcctcataagcagtgaaacgactatctgca

SEQ ID NO: 30035 - DNA, 294 bp, DROSOPHILA
atgttcaagttcttcgccgtcgccctcttcgcactgattgcctgcgtggccgccaagcccggaatcgtggctcctctggcctactccgcacctctggtggctgctgctccggcggctgcggtttacagccgggaataccacggaaattttgcggctccctacgtggcatctccctatgtggcttctccctacgtggcttctccctacgtcgcttccccttacgtggcgtctccgtatgtggcatctccctacgttgccgccccctacaccgctcctctgctgctgaagaagtag

SEQ ID NO: 30036 - protein, 97 aa, DROSOPHILA
MFKFFAVALFALIACVAAKPGIVAPLAYSAPLVAAAPAAAVYSREYHGNFAAPYVASPYVASPYVASPYVASPYVASPYVASPYVAAPYTAPLLLKK

SEQ ID NO: 30037 - DNA, 2384 bp, DROSOPHILA
accaagatgttcaagttcgtcgccgccgtcatcttcgctctgtttgcctgcgtggccgccaagcccggaatcgtggctcctctggcctactccgccccctacgtggcgtctccatatgtggcatctccctacgtggcatccccctacgtggctgccccctacaccgctgcctacaccgctgcctacgccgccccctacaccaccgcctacactgctccctatgccgcctacacctctcctctgctcctgaagaagtagattcccggaaggatgatcaacttaagaggatagcacacggacacttgcaatgaaactgaaataaactcgcaaacaaacgaacatatttgtcttttactcggaaaatggggtttactgggagctgaagaggaacttcgaaattccatttatatatagtttactatgcatattatactatacttgaagagaagtcatatccaataatgcataataagcaatatggtatcaaatacaagtatttgtattattaactcagtaaatgtataagcaactcagtaaactatttccacgatacattttcaaccaactgatactctactctaattaaatgttcacaaacagcttcttggaatcgcctcataagcagtgaaacgactatctgcattaccatttacaactaatttccaagtggacaaaaagtgttgggtttgccatgaccaggggcaaactattaataattacagataattatccttggggtacacacatgtcgagcggcgtgcagcaatttcattccgggtaaaacacactaagcttagacaatgcaacgtgcggcgtttaaaattagacatcgtggcgtatacgtaatctgcggcaaatcaaaaacagatccaaaccaattcgaacaaagagtttgcatttattgtgtgttatataaaaataattttaattcgaattatattgccatggcccagcccagaagtatgttatcatctggccattgatttagcccagcggattgttaacccttagtccagccattgtagttaaccagactccgactcttgctgaaactgatgctattgaacactcccaggttggctgaccagcccagggtgaatgtaatgttaccaaaggggtcaagaaccaccacgggcttctggtttttctggtggttctttttggcattgctctgcagttggttgaatgcactgtacagggaagacgatggattctgcacgaattcttgaactccgataataaatttgtttacttctcgaaaaaaatcattgggcttgaatagcttggcggggtcttcgatgaactgaatcccttcaatccgttctggttcctggtaaaatgaatcctctgccaagttaaagctgcgggctacttgagttggcatgaggaaatatatcggttgaaaccaagccacgttcatcaaaacgaaccaaatcgaaatcaactgtaaaataatcccactttcagtatgttttaagcattttaagtcaagtatttgaactatttgcccactaactatatttttaacgatttttaagaaatatgtttgtttaagctcaaaagagtacatgggcatgattcattgttctaaaaaaaaaagtacttaaggtttcaaaagaacaaaagaacaacttcataattcataaaaaaattgtagtgcccagaatgtctgtaagtgtacttacagcaatcatgtccatcgtgaatctgaacgataactaagccaaagaaagacaacaacgttggcttaaataccccatagaatggagtctacccctccttctcaaaaaaaattattatgacacataaatttcagaccaatttcagaactttatttgaggcatgtccgtcaaagagatggctaaactccgtgtgaacttgagttgagcttcgggcgacaggtgctctggcggccgagtcttgaggacgcctatttgtgagatggctcctcctagatccagccatatccacggccatgaccgtatcctccgtagctgatgggatgcacaacgctgtgcgaggtggtccaaatgggctggatcacgcgcaccgagggcagactgtggtacgagctggtcaggatgggcgaggagtgcaggtaaccaggagcggcatagctcaaagccagacagaaggcgaggaatacgaactggaggcgggaagagttgctcacttaattaacttttttcattcggaggacaggacaggacaggatatccttaccagcttgaacattttgaagcggttttgattgctgaagaacttctggaacgcaaaactcaaagtggaactcgttgagaagctgccaaaagatggtttgatggctggttgaatgtgatgcctggtttttataacccagccgccaaagccaagaagccccagca

SEQ ID NO: 30038 - DNA, 384 bp, DROSOPHILA
atgccaactcaagtagcccgcagctttaacttggcagaggattcattttaccaggaaccagaacggattgaagggattcagttcatcgaagaccccgccaagctattcaagcccaatgatttttttcgagaagtaaacaaatttattatcggagttcaagaattcgtgcagaatccatcgtcttccctgtacagtgcattcaaccaactgcagagcaatgccaaaaagaaccaccagaaaaaccagaagcccgtggtggttcttgacccctttggtaacattacattcaccctgggctggtcagccaacctgggagtgttcaatagcatcagtttcagcaagagtcggagtctggttaactacaatggctggactaagggttaa

SEQ ID NO: 30039 - protein, 127 aa, DROSOPHILA
MPTQVARSFNLAEDSFYQEPERIEGIQFIEDPAKLFKPNDFFREVNKFIIGVQEFVQNPSSSLYSAFNQLQSNAKKNHQKNQKPVVVLDPFGNITFTLGWSANLGVFNSISFSKSRSLVNYNGWTKG

SEQ ID NO: 30040 - DNA, 3368 bp, DROSOPHILA
agcccagaagtatgttatcatctggccattgatttagcccagcggattgttaacccttagtccagccattgtagttaaccagactccgactcttgctgaaactgatgctattgaacactcccaggttggctgaccagcccagggtgaatgtaatgttaccaaaggggtcaagaaccaccacgggcttctggtttttctggtggttctttttggcattgctctgcagttggttgaatgcactgtacagggaagacgatggattctgcacgaattcttgaactccgataataaatttgtttacttctcgaaaaaaatcattgggcttgaatagcttggcggggtcttcgatgaactgaatcccttcaatccgttctggttcctggtaaaatgaatcctctgccaagttaaagctgcgggctacttgagttggcatgaggaaatatatcggttgaaaccaagccacgttcatcaaaacgaaccaaatcgaaatcaactgtaaaataatcccactttcagtatgttttaagcattttaagtcaagtatttgaactatttgcccactaactatatttttaacgatttttaagaaatatgtttgtttaagctcaaaagagtacatgggcatgattcattgttctaaaaaaaaaagtacttaaggtttcaaaagaacaaaagaacaacttcataattcataaaaaaattgtagtgcccagaatgtctgtaagtgtacttacagcaatcatgtccatcgtgaatctgaacgataactaagccaaagaaagacaacaacgttggcttaaataccccatagaatggagtctacccctccttctcaaaaaaaattattatgacacataaatttcagaccaatttcagaactttatttgaggcatgtccgtcaaagagatggctaaactccgtgtgaacttgagttgagcttcgggcgacaggtgctctggcggccgagtcttgaggacgcctatttgtgagatggctcctcctagatccagccatatccacggccatgaccgtatcctccgtagctgatgggatgcacaacgctgtgcgaggtggtccaaatgggctggatcacgcgcaccgagggcagactgtggtacgagctggtcaggatgggcgaggagtgcaggtaaccaggagcggcatagctcaaagccagacagaaggcgaggaatacgaactggaggcgggaagagttgctcacttaattaacttttttcattcggaggacaggacaggacaggatatccttaccagcttgaacattttgaagcggttttgattgctgaagaacttctggaacgcaaaactcaaagtggaactcgttgagaagctgccaaaagatggtttgatggctggttgaatgtgatgcctggtttttataacccagccgccaaagccaagaagccccagcaatcgcgcgaccttggtcagatattcaaaacccaagagtctctttgaaatcttagcggacgcggaatgctcaggtttccctgagcttaggtgagtgactggctgcagttgcccacccaccgaaaattgcatcactaatgcaatggtgatgccatgaaatacgcaccgcaaaagatcaacgaaaaaaataaatttgcggaaactgcgcaattttttaggcaaataacaaatcaacaaatatttagccgaataacacagttcgaacaatatacttacttaattgatttcggcgtgggagtttgttttcattgctacgaagacaaaaggaaacatggccatttctcgacaccacccgcaacccaccactgaccttgaaagcctcccgatggaaggcgggaaaacaccggaagtgcgtctcaatccaggacgcacttaattgtttattttggggccaagagcaagacgcaatccaaatcgatggaagtaaacagacgtcaaagagatgcctacatttgagcctcagcgaaaatagaacgtacttacacactaaaaggggatgtccctaattgattgaggataaataaaaataaaattaggatgagtttataggttaaggtttctaaaattaattgctagaatagcacacaaatcaataattacgaatatataacatagaaatcgatccgaatgcaacaagtcaattataaaatgtgtgtatttgttttctagcacattctatcctaattatcatgcattttacggggaaaggcaaatctttgtagcaagttggaaggaggacttctctgccgttctagaacccaagaggcatttgtggtttcactggcttgtcagcggactcacgaccatccgattcacatctggattctgagtggcagggaacgagttccgctggcaattgcaattgcaactggcccattcaaagtgagttaagggcttctttcatttgccgcttgctgggcaaatgcctttgaccttggccaccagccaaagtgaaggtctgaatgcgattgggagcagctataaaagcctggagtagcgtggaatggctattcagttggataggtgatcttcaaggaactgcaacgagcgaaaatgaagctggtgagatcggaaaactcttctatataactttgcatatatatatttaaccaatttaattgatctaacagctgatctttgcctgtttgcttgctctggctttggggcacgaggtgtattactatacccccagctatgggtactaccccagtacctttgccaggtcctcggctgtcctgcccttggcctattcccgtttgattgccccggcagccgccgaatcgcatctttaccacagcgtggagaccccgaactccttccagcagcaatatcgcagcgactacaagcccctgacctatgagtacatctactagatgggcggggagcaacaaacctttgcgtgaattgtaagcaagtgaaatttgaataaagttcgaacgctcctcatcgaaggtgttttaactctagatgataagcccccattgtgttgaggtgtctgtgaaaacaactttcctacttcccccaaaaccaaatgacctagcacacccgctgtctgttgaactcggcctccaattgttgttcagttataaagccccaaacaacaatggctatatcgaatgaccccgcccaaatgcccgtccttacacacagttgttcacctatgcttctcggaggcctgtctaaatttaataaaatcccaaaagtggcaacaaatcaagactcatgtcgcacgtcgaacgtcaccgtggcaaaaagaagccgtagagtccaccgcaaggtgcaatgtgactcacacaggctgttcccccgatttttgccctttggcgagtggctcgtcgatcccgaaaggaatcgctccggaacgtgacccgaggccg

SEQ ID NO: 30041 - DNA, 567 bp, DROSOPHILA
atgggccagttgcaattgcaattgccagcggaactcgttccctgccactcagaatccagatgtgaatcggatggtctgatgcaattttcggtgggtgggcaactgcagccagtcactcacctaagctcagggaaacctgagcattccgcgtccgctaagatttcaaagagactcttgggttttgaatatctgaccaaggtcgcgcgattgctggggcttcttggctttggcggctgggttataaaaaccaggcatcacattcaaccagccatcaaaccatcttttggcagcttctcaacgagttccactttgagttttgcgttccagaagttcttcagcaatcaaaaccgcttcaaaatgttcaagctgttcgtattcctcgccttctgtctggctttgagctatgccgctcctggttacctgcactcctcgcccatcctgaccagctcgtaccacagtctgccctcggtgcgcgtgatccagcccatttggaccacctcgcacagcgttgtgcatcccatcagctacggaggatacggtcatggccgtggatatggctggatctag

SEQ ID NO: 30042 - protein, 188 aa, DROSOPHILA
MGQLQLQLPAELVPCHSESRCESDGLMQFSVGGQLQPVTHLSSGKPEHSASAKISKRLLGFEYLTKVARLLGLLGFGGWVIKTRHHIQPAIKPSFGSFSTSSTLSFAFQKFFSNQNRFKMFKLFVFLAFCLALSYAAPGYLHSSPILTSSYHSLPSVRVIQPIWTTSHSVVHPISYGGYGHGRGYGWI

SEQ ID NO: 30043 - DNA, 2710 bp, DROSOPHILA
aataggatagaggttcaatataagcaaaaagaaaaggaaggtaaaaatatacaaattaatgtctttaataagtaacattttatatatatacataagaaaatatcagacaaagagcaggaaagtataccaacatatagtcttaatggatagtgaaacacagagttttatgtacagaagtataaatttattccaacatgtggcttacaatctaaagttcaggtcgcgtgtccttcgagcacgtccttacatggagtccttgcgataagcgcggtagttgttcatctcattgggaaatgttttatacagctccagcagcagattcgttttgaacttcttcaggccctcgatcttgcccttgacctcctcgttcttggccagtgccttctccacgcaatccttggtgtacagctgaggattcttgtcttggtcgatgtagtcaaaaaacacttcaaatggcacatagacgtcctgcacctgggagcgcagcttgtcgatctcttgtaggccggtcaccaagctgttactaatggtgcacatatttatagacatttgatcaaataaattttagcattttcttacattttctggttgagtacattttgaccctgtggctgaaaatcgcttacgattatgcggatctgacgaacattctcgatgaacatctctagctgggtctcaaggttctctagcggtgcagacatttttaacgattcaaattcgttccttattttgtgggtatttcgttaatatgtttgttttccttggcaaatattttatttttcttcgcaactcttcttcttctagaaaacaccgaatgaccagggctactcaaacgcaattttgagcattcggatttacgaataagcaaggaatagcaaggtcacactgttcaatcgcacactttttttgctacaaagagcgtgatttatttttatagaagcaaaaaaagcaataattacttaatttactgccataaatatactgagaataagaacccagaatgtcggatagtgatttggatgccttacgcgcgcagcgcatgtcccaaatgcagtcgcaattcgtaagtgaaatatttgagtggctccaaaccggctagattcctctagagaattccaaaaatagtcataacttggaatgaaagcaaattagactatataaaatataataaaaatgttaagaatacattagcaatggtatgctttgttagttcttatagacaccttccctatgagtcatccttctcgactgggacacctgtttctttaaagggcaatccttcaatgaccttaactccttttttcctatttttagggcggcggcaatgatgcggaaaagcaacaagcccagcaggagcagatgcgcgcccaggaggaaatgaagcactcgatattatcccaagttctggaccagcaggccagggcacgacgtatgtggatctagaccttgaatatctctagctaataacttataaaatatcatttagttaataccctcaaagtcagcaagccggagaaggcgcaaatgttcgagaacatggtcatccgcatggcccagatgggtcaggtgcgtggaaaacttgatgacgcccagttcgtcagcatcctcgaaagcgtcaatgctcagatgccgcagagcaagtcctccgtgaaatacgatcggcggcgggcggccatcgatagcgacgacgacgaggattacggctgctgattcgtccgaaattccgcccaacatctaatttaagttatgcccgctcctcacatccgctaaatcatgtttattacttttactaacttaaaacgagaaacaaaactagatgcccaaatacgtatggacttctttgtgtcagatggcgaatcttaaagcgtattggaagttcgtgccaagcggcaatgacatacactgacataggactagatttggcttacatttatatgcggtagaaaagtggtctagaggaggggtggggtcttctacgacttcttatagggatttatcatttcatattcttgtatgttcctagctttttatgatcttgctcggaaatgcactatgagatcatcttatttactttctctaacattcactcgcaatcaaaagctttcactagattcatttttaagttatccctttactccttcttctcgtgatcttcatcgggatcttcttctgtgaccaagcaatcgccgcagaaaatagagtacatgatgagcgataagaatcccaatggcaggccgaagatgacagtggtcagcacgggatttcccagccacatatcccttaatgctcttcgcacttcgaacagtgcccgattcaaacgtacaaagtacgtatctcctccataggcaatggcactttcgttgcggatggattctaggaaaaggtgcagtgcctgtggagtcatttgcattggatcatcttcgggtatgaagtggtgttgggtgctcgaattaatcgctatcaagtgaggcgtgggcagttgatccaagataatggaatgtgctattgatggctcgccaatctgaaatggaaatattgattagctccaaatcgataaaactatgatagaatcacttacccatccaaattggaatttgtcatgatatcgcgccctatgctttcttatcacgccctccaccatgtcccgaaactccagctcatgcgtggctatctgattgagcttatcctcctgtaccacagccaaaaccaa

SEQ ID NO: 30044 - DNA, 402 bp, DROSOPHILA
atgtcggatagtgatttggatgccttacgcgcgcagcgcatgtcccaaatgcagtcgcaattcggcggcggcaatgatgcggaaaagcaacaagcccagcaggagcagatgcgcgcccaggaggaaatgaagcactcgatattatcccaagttctggaccagcaggccagggcacgacttaataccctcaaagtcagcaagccggagaaggcgcaaatgttcgagaacatggtcatccgcatggcccagatgggtcaggtgcgtggaaaacttgatgacgcccagttcgtcagcatcctcgaaagcgtcaatgctcagatgccgcagagcaagtcctccgtgaaatacgatcggcggcgggcggccatcgatagcgacgacgacgaggattacggctgctga

SEQ ID NO: 30045 - protein, 133 aa, DROSOPHILA
MSDSDLDALRAQRMSQMQSQFGGGNDAEKQQAQQEQMRAQEEMKHSILSQVLDQQARARLNTLKVSKPEKAQMFENMVIRMAQMGQVRGKLDDAQFVSILESVNAQMPQSKSSVKYDRRRAAIDSDDDEDYGC

SEQ ID NO: 30046 - DNA, 3050 bp, DROSOPHILA
acagggcgatgctcagacactgtcccctcttctttacgccccccccccccccctttcaccgattcgccccgcccatgagtcactatgtattttcgtcgggggttcggggggaatcattgtgggacggtggatactttgcaacagactctgggacagactggtacaaaacaaaagcaaatgcagctagtaaacgcgacaatagggaaagaaaataagaaaacacaagagccaagtgggcgaccacacagcataagaacactgcaagaaaagtatgattaaattaatgctttatacgaggctaatattcatagttgagtaaattcagtaaatacaataaaacaaaataaatgtataggctttcatgcctcgcagatatagatatagatatggatatgttaatttttcttatagctcagaacataattatacttaaattatccttaaaggatgaatttattttaaacaataataaccaaagattaattaaatttaattaacttatttagcttgaaattaataaatcagttatgataattagtagtgataatttagttaaagatcagcttgctgaattaataaaatatattatgaagtacacataacaaaaagtgacgttatgacctcattcaaatgtgctgaaacttaaagaaaattttggtataagttaaaaaaatatattaatttaccctttgatacactgttataaattgtctgctatttttttctctctctcttgcagttataatcacggcacattgatcgggtatttgcaccgcaattgaccatgcgatttgggccatttccggacgaaagcacggcgtaaacaatccgatcgccggcggcggacgacgctgtggcccccacgcatgcagccagtggcgccgcgggggcccgctgcacattgtgttggtggtgcacagtggttctggttgcgatcagcctgacgacgctcctccggccgggctcagtttcagcctcagccctcgcggtgccaatgccaatgccggaatcggggattccccgttccagtcacgccctgcagcaggaacaccaggtatccgccacaccgacgtggtggtcgctaatcgagatactaagtcgaactgagcgcactgaacggccaagtagaagcggtggcaagtgtttgagatgccagagcagcgattcgatcagcagttcaatatcgaatgcaactggaagcggcggcgaaagtgtgagttcgagttctgtgccaagtgcgccggcgcagagtgctgtatatagtggtagtgcaattttgtgcagtgtaaatagtgcaaataatacgcgtaagttaaatttaattctgagcaagtcacagcaaaagcgaggggagcgcttcgctgttggcacaaatttgcaaaataaattaccagcatcgagtgcggattgccacttaagtccaagtgccgagacaaatattcgtaccacaaccgcagccgatccaccgcgatccccgttctgtccgccgtgttcatatagtcatctccatcatcgtcgtcactggcatcggcatcggcatcgccatcgtcctcgtcatagccagcatcatcaacgtcattatcgtcatcgtggcaagtgttgtcgttgtcgcgacgcgtcgcagtctgcatccgcatcgcccgcgtctatgctcttgccatatcaaattaatcaacgtgctacattgttgcagcaatctgcaacagcagcaacaacatcaactacattgccacatgtgcccggggcagcagcagcaagagcagcaacaacagcaaacgtatctctgcgtgccgtgcctcgtatttttaaacgcaaacgtgatacggtccaaacagcgaccactgcatcacctttgaccccgcagcaacatccaacagtcgcagcagcaacatcagccacatccacaacaaccacgcgcagatcgcgactcgaattcatactgtacacggaagtctaccaagtcgacgaggattcggtttcctccagcgatttccattcgaagtcgaacgtgggcagcgacgagcccttctggcagaattacggtaagtgattaataaactatataagcgatattaactcttaacatgaaatttgtgaatccattacaatttggaaagatatttggcgttgggagtacttttaatatgcttaaatatatgtacttgacgtatctattgaacaagggaaccgttatgatggttttgaaaacttaataaatataacgatgttctattatgtcctttatgatatatgaacaactattacatctttttattgtcattagttttaatgagaaagctttttctaaaaccatatatgtacttacctcattctataatattaaatagcactccgtagttcgtttacctgtcaaaaacaacatccgaatgcgaaaaaatgttcaaaaataaacgaagcatagcaatgccaaaaaaacatactccactctgcatgtcacatttgttacaacaaaaaaaaaagtggtgaaagaataaacaaaaggaaggggaataagcaacaaatcgcagcaacaattgccctgaaatgttccagtaccagacatcgtatctgaacaattttatgccttatgcgatatggcatttgtcgtcagaaaaaaaaatttgggtggagaatgggggtattgtggttgggggggaatggggatatatggatatgatgtgggatttttaacacaactggctggttaacataattttcgtgggcatctctccttttttgttgttgttgttcttgttctgcaattcaagggaatataaagcgaaaaacgacggtaaaaacaacagacaggcagaaggagtgggacggggagagtacgaaagagacagttggagattatggagaagaagaaatgagaatgcagctgtcgaggaatatttgctatctagtaattatgatatcattgattaatttctaatgaaaatatataaaatatataagccaaaatagcaaataaaattgtacggtcttaggcctgttattggtatagattcatgaattatcgtagagttttataaaatattttaaaataa

SEQ ID NO: 30047 - DNA, 699 bp, DROSOPHILA
atgccggaatcggggattccccgttccagtcacgccctgcagcaggaacaccaggtatccgccacaccgacgtggtggtcgctaatcgagatactaagtcgaactgagcgcactgaacggccaagtagaagcggtggcaagtgtttgagatgccagagcagcgattcgatcagcagttcaatatcgaatgcaactggaagcggcggcgaaagtccgatccaccgcgatccccgttctgtccgccgtgttcatatagtcatctccatcatcgtcgtcactggcatcggcatcggcatcgccatcgtcctcgtcatagccagcatcatcaacgtcattatcgtcatcgtggcaagtgttgtcgttgtcgcgacgcgtcgcagtctgcatccgcatcgcccgccaatctgcaacagcagcaacaacatcaactacattgccacatgtgcccggggcagcagcagcaagagcagcaacaacagcaaaccgaccactgcatcacctttgaccccgcagcaacatccaacagtcgcagcagcaacatcagccacatccacaacaaccacgcgcagatcgcgactcgaattcatactgtacacggaagtctaccaagtcgacgaggattcggtttcctccagcgatttccattcgaagtcgaacgtgggcagcgacgagcccttctggcagaattacggtaagtga

SEQ ID NO: 30048 - protein, 232 aa, DROSOPHILA
MPESGIPRSSHALQQEHQVSATPTWWSLIEILSRTERTERPSRSGGKCLRCQSSDSISSSISNATGSGGESPIHRDPRSVRRVHIVISIIVVTGIGIGIAIVLVIASIINVIIVIVASVVVVATRRSLHPHRPPICNSSNNINYIATCARGSSSKSSNNSKPTTASPLTPQQHPTVAAATSATSTTTTRRSRLEFILYTEVYQVDEDSVSSSDFHSKSNVGSDEPFWQNYGK

SEQ ID NO: 30049 - DNA, 3549 bp, DROSOPHILA
gaagttatgttaaaatccgttttaaaattttaattaaatattagataatataatatgaatgtcgtccgtcttaaaattggttaatcctttgacttacctccagcactaggttagcaatgggagcatcctgcacctggagcgcgttgagcacctccggaacctcctcctcgaagtagacatcgatgacgggaccgatgacagcatggatgacacccttgcgacccttgctctccagcttcttgcctccgccgtcggacttcttttcctcacactcatcctcggcttcatccttcttcttaaccagttccgcgtccgtcttgcagacttcctgcggctcgggctcgcactcatcgcccgactttttcttatccttgtcatcccaaagggacagggaggcatgaaggtagcggggaaacaccacaggattaccaagatagttgccccggtaacccccggtacccgggcccatcttcaggccaatccttgcacatgctaacatggtttttttcattttcagaggaagctggtcatgtgaaataggttcattcttcttacctgtagccattttagcccatgataccaacatttttactttagttttttattctttcgctgcttggacgtctttgctgcaaataaaacttgcttgtaatgatagattcctttgacagatgacagcaatgcctactataaaggattcccttaatgcactttaaatgggttgtcacctatttattttttagggatatttgctttctaaaacttcttaaaagtttgcaatataaatcctaaagttttcttaattaattaattaatataatatgatttcttatattttaatttattttcaggctgcattagattaagcttggattcataatcgatcctcagatatgttttcctttagctctattttagggttgagtcagttggtttccaaggataccgatagccacaaagctctgaagccaaaacagtaaggttttcaagctgatggaaaatggacgtactatcgcattacagctcacccatagttgaatttccggccacgcagcctttggagaagcagcatgccctggtggacaactgtacgggcaccgatccacctcctcccagccaagatgccgccacaggaacgcaggagaagctgcatgtggccacacaaacagagcaacgagtagttagtagtaaggatgtggaatacgatgagagggctttggcgaagtggttgcgacagatctgccccatggtcgaacgggagctaatgaatcccacgcctctgatggaggatctaacgatgagccagtgccgcttggaggagaaactgcaggtgtacacgtaccagaaactgataatgggtggtgcagaaaactcgcaaggactggctatctggctgtgtgtgcatacgaataacgccccagttctggtggccaccactgtagctccccatgatgactggtgcgagcatgtggatcagcagctaaaactctttgttccccaaagaatgtccgttggcaacttggtgatttatacagaggccaaaactctacccctaaaatcctgtttgcgaagtctgtgcacaaatccgttcaacaagaccatgttcgctggttcgaccatggacggagagctcttcatctggttatatgagcaggcgaggggttccgattccagcgtcgatatcaaacagctatacagtgtatcctccacccagggagctgcagtggctctggactggccgcgggaacatcttctgttggcctgctttgccaatggcagcgttcgccagtgggatttaagcaggcagatggctctggattgggagtgagtctctctaaacactaaacgaaacatttcccggcattaatcttaaatattatttaattaacttctccagatacaccctgcccgcaacggttagctcagagcctacggcaatggtgacccttggtctggatgacttcgtcgtgggcactaacgatggtggcgtctatcgctgctggaacaccggccggcaaaccgcagccatcaagcagatcaaattgttggccctacggcgacatcgattcatggtttccaccctcctccgtaccgaaatggagggcaacctgttcgtcctgagctgcgatctcagtggacaggccttttatcacgatatgcggcttgtggatgaggtgataacatgacaaacaaacgagctgaacactatttattttctcttaaataatgaacaggacatggctcagttgatagtacaaattccacttccctttaaaaacgtaatcgcctgtagtcgggatggcaacatcatcttttgcccagccaatgatgggtcactggaatactatagggtgagcgatggagcccatgcccatgtcaagggaggacttcgcggcaagggaagccttatccgtagtagcgacaatgggtgagctaataacgaaggaaatcaataaaacaacaaatttgaataataattatcttacagacgctggttaattgcaggcctctatggcgacgagttccagatattctacgtagaacactaaatagtcgtattgaattttgttctcagttttgaaataatcgcttgtatttgcatgactgcttatgttaatatgtacggttttatcttctcttaggtttggtatatacacaattttattttaaaatttctcagatctctaacaaataccacatgtaaatatagactatgtattgtataaacaagacattttatctgtgtagaattttgaacaaaatgcaaaaacgtaaagccatttcgaaaatttggcgtaaaataagactgcattctctgtgggaatctcgttaaaaccgcgttttcacatacgattcacaaaataaaatgttccttttacaactatagatcatttcatagtgttatcaagctgtatgtgaacatataaaaagaaatatgctgtgtgtagaaaagtgctagaatgacataattacaaaatggcaataaatgaatacactaaacttttataaccatttgcctacagtaaaataaattatacaattaacattaacgagatatatgcgatatataaatatataatagaactgcacacaattttgctaaatctctcacgtccgaacgtccgatcctatctgtcctaatcacgcgattccactctaatccatttcagtccactttgcatccactcgttcaacttttcacttaagcttagattgcaatctgcattttgcacatagttcacataataataactagaagcagcgctcgcccaacttctgattggctgataaattcagttgaagagcaccgtattgggatcttcgttatccatctgcttcacatggcgcagcacatctttctttgtaattacgcccagtaggcgactgcaatggaatttggattagataacttgaaactggttaaactgcttctggccacaaactcacccgttgtgtgttaccaatgtttggcgcagtcccagctttcggaacatgtccactaccgtctccattggcgtttgatctgtaactgtgatcggtgccatatcc

SEQ ID NO: 30050 - DNA, 1356 bp, DROSOPHILA
atggacgtactatcgcattacagctcacccatagttgaatttccggccacgcagcctttggagaagcagcatgccctggtggacaactgtacgggcaccgatccacctcctcccagccaagatgccgccacaggaacgcaggagaagctgcatgtggccacacaaacagagcaacgagtagttagtagtaaggatgtggaatacgatgagagggctttggcgaagtggttgcgacagatctgccccatggtcgaacgggagctaatgaatcccacgcctctgatggaggatctaacgatgagccagtgccgcttggaggagaaactgcaggtgtacacgtaccagaaactgataatgggtggtgcagaaaactcgcaaggactggctatctggctgtgtgtgcatacgaataacgccccagttctggtggccaccactgtagctccccatgatgactggtgcgagcatgtggatcagcagctaaaactctttgttccccaaagaatgtccgttggcaacttggtgatttatacagaggccaaaactctacccctaaaatcctgtttgcgaagtctgtgcacaaatccgttcaacaagaccatgttcgctggttcgaccatggacggagagctcttcatctggttatatgagcaggcgaggggttccgattccagcgtcgatatcaaacagctatacagtgtatcctccacccagggagctgcagtggctctggactggccgcgggaacatcttctgttggcctgctttgccaatggcagcgttcgccagtgggatttaagcaggcagatggctctggattgggaatacaccctgcccgcaacggttagctcagagcctacggcaatggtgacccttggtctggatgacttcgtcgtgggcactaacgatggtggcgtctatcgctgctggaacaccggccggcaaaccgcagccatcaagcagatcaaattgttggccctacggcgacatcgattcatggtttccaccctcctccgtaccgaaatggagggcaacctgttcgtcctgagctgcgatctcagtggacaggccttttatcacgatatgcggcttgtggatgaggacatggctcagttgatagtacaaattccacttccctttaaaaacgtaatcgcctgtagtcgggatggcaacatcatcttttgcccagccaatgatgggtcactggaatactatagggtgagcgatggagcccatgcccatgtcaagggaggacttcgcggcaagggaagccttatccgtagtagcgacaatggacgctggttaattgcaggcctctatggcgacgagttccagatattctacgtagaacactaa

SEQ ID NO: 30051 - protein, 451 aa, DROSOPHILA
MDVLSHYSSPIVEFPATQPLEKQHALVDNCTGTDPPPPSQDAATGTQEKLHVATQTEQRVVSSKDVEYDERALAKWLRQICPMVERELMNPTPLMEDLTMSQCRLEEKLQVYTYQKLIMGGAENSQGLAIWLCVHTNNAPVLVATTVAPHDDWCEHVDQQLKLFVPQRMSVGNLVIYTEAKTLPLKSCLRSLCTNPFNKTMFAGSTMDGELFIWLYEQARGSDSSVDIKQLYSVSSTQGAAVALDWPREHLLLACFANGSVRQWDLSRQMALDWEYTLPATVSSEPTAMVTLGLDDFVVGTNDGGVYRCWNTGRQTAAIKQIKLLALRRHRFMVSTLLRTEMEGNLFVLSCDLSGQAFYHDMRLVDEDMAQLIVQIPLPFKNVIACSRDGNIIFCPANDGSLEYYRVSDGAHAHVKGGLRGKGSLIRSSDNGRWLIAGLYGDEFQIFYVEH

SEQ ID NO: 30052 - DNA, 3143 bp, DROSOPHILA
gccgcagcccccagcaccttcctgcagctcctagtcccgctgctctgcatctgcaattcatttgatttaatgtttaattgccgcgacaatcgctgccaatgacatatgggagcagaaggcgcctgaggagctgggacagcattatgtgtatatgcttcattctctcggcgaaatattaagataattaagcaaatatttttattgtaaaaatctcgtagatcgtaatgtttgcagtactagtagtagcaatgaaataggatttcgaatatattgtatccctcgtcgaaccgggtgcgctagataaatcagccggcggcatgcgagtctgttcggaatatcatattcgagggggcatatgtttgtatccgtttgtatatttagacttgcgctgccttgtgtgcgcatctgtgtgtttatgtccaagtgtttacggccatcaatgtacagaacttaacccattaatattagctaagcagaagccacagcatgcacacacaatatcaaggtctccactatcgcgagttgtcctcaacatgaaaattgtgaaaatgcttttactttttagcgtaaatcgatttgtacatatgtacatacacatacgcatatgacgcgagattttctaaacgaaacattcatacgtattcatttctccgtttatggggttccagctaataatcctatggtatttcatggcatatagaatgctagacatctcgaggctttttcaaactgcatgcgcaccagcaaaaagtgagttccattagatgatgattaatactgcctaagatcatgatcttcatgttagtcatgtttaaagccagttatatcccaagaacgatttaacaccaatgacgaatttcaaatgtatcgtatttattatttcggacctattaaatgcctatcaaagattgtttacaaatatatatcgctttattattttagaaggtttgtaaaaaccatattattgctttaattagaaaactggcggaaaatcgtttgcttaaggagtaggagtagtcgtagaagttgttgaggtagactgtgtggatgattccgtagaagaagactgcgtggtggaagcagtcgtggaagaagactcggtggaggattccgtagatgaagaagccgacgaggacgcagtcgttggtgtagattccgttgatgaggaagctgtggatgaagcagtcgttgatgaagactcggaggaggactcagttgaagaagcagtcgatgaagaatcagagggcgactgagtcgttgtatccgagcagctggtcggcctggttgtcacacatgagctggtggttgaatcaaagaacggcgtggaggcgccgcaagtcatatagagggcaacccaggtggttccagatttctggcagtacaggtagctgttgcacgtggagtcatcggttattctggtaaagaagtaactaggattggtactaggctcgccagcattgcacaaatcctctttctgcgcagcactaggagttgtcgttggagccactgtagttgttgtggttggctgataaatactgttgctacaggtggcatccaatccaagctataaggtataacatgttagtatgaataatttttaaagtccaacaaaacctacaaattcggaggcacaagacggtacacagacggtttgatacgtcgacagagcatctatgatacaaatctcatctgtgccgcaattgtacacactgctggtcagcacatcgccggcggaggagcagcgggcatactgggtgctgctgacacaggcgtatttggcgcctgaggaacacacttcgcactgagctccatttccgccagagcctccacacacgtccaatatggtcgaatttacctcggagatcagagcacaaacgctatcagaattggagcaaacggtgcccgaaggacattcgataatatctccaactggaccattttctgaggtaagaaatagaatgtttacatgaaaggactttaggtattaaaggactacggtccaggacttactcatgcaattctgatagctgttctgatcaacgcagtacacatcgttttgctccagacaagtctgacatgactgagctgccacgaacgatagtccacacgccatgatggccaccaaagcgattatcctctgcatgttcctgccaaagtttttacaccttttcggtagtgctgctcaacctgaacgatttactgatatgatcccaaccacccatctgccgtcttatatagcggaggagctcactatgcattaaccttcaattgtttatgggttgataatattgtttgtcagatttcgttgtctatgcctgccaaaagtctatcatcataaagtaatattgaagcgatctaaatgacagcaacatgctttttaattttacgtacttcataccgggaaatgcggttcataaagtgtaatcgtacatatgtatatggtatttttgaaggtctattgacatttctgttaccgtttgagtcatgtcttttcgaaatacattctttctttataaaatctgaagtttaaacttttatttctattttttgtaacttgctttatttttcaatacacagcgcacacatatgttagtagcagttattataaacgaacaaaacatgttttccaaatcccataatattttatatatatttaaaagtagtggtatgcaagtatgttttgcaaattatttgataagtcgatttaggagcatcccgttggtttcgtcgatacgcaaaggctggtcgtagaatcgaaatatggcttgggttggtggcaggacaaataaacagtgtcccattcggtggattcagttctttcgcagtagagataagtgtggcaggaagtatcctccttgtagatcgtaaagaagtacaaggtttccttaggtatttgaagatctttttcagcttcagtacaggcactatttttctgctctgtactgggtgtgacagttgtcggtgctgcggtagttgttgtcgtgtattcactgttgctgcaagtggctctcacgtcgagctgcaaaaaacaaaacaaaaaaaaaaaaggactagaacacaacataattaagttacccaggaatacctacaaaatcgaggacacaagaaggcgtacatatgttgtcgtacttttccagtgcttc

SEQ ID NO: 30053 - DNA, 1020 bp, DROSOPHILA
atgcagaggataatcgctttggtggccatcatggcgtgtggactatcgttcgtggcagctcagtcatgtcagacttgtctggagcaaaacgatgtgtactgcgttgatcagaacagctatcagaattgcatgaaaaatggtccagttggagatattatcgaatgtccttcgggcaccgtttgctccaattctgatagcgtttgtgctctgatctccgaggtaaattcgaccatattggacgtgtgtggaggctctggcggaaatggagctcagtgcgaagtgtgttcctcaggcgccaaatacgcctgtgtcagcagcacccagtatgcccgctgctcctccgccggcgatgtgctgaccagcagtgtgtacaattgcggcacagatgagatttgtatcatagatgctctgtcgacgtatcaaaccgtctgtgtaccgtcttgtgcctccgaatttcttggattggatgccacctgtagcaacagtatttatcagccaaccacaacaactacagtggctccaacgacaactcctagtgctgcgcagaaagaggatttgtgcaatgctggcgagcctagtaccaatcctagttacttctttaccagaataaccgatgactccacgtgcaacagctacctgtactgccagaaatctggaaccacctgggttgccctctatatgacttgcggcgcctccacgccgttctttgattcaaccaccagctcatgtgtgacaaccaggccgaccagctgctcggatacaacgactcagtcgccctctgattcttcatcgactgcttcttcaactgagtcctcctccgagtcttcatcaacgactgcttcatccacagcttcctcatcaacggaatctacaccaacgactgcgtcctcgtcggcttcttcatctacggaatcctccaccgagtcttcttccacgactgcttccaccacgcagtcttcttctacggaatcatccacacagtctacctcaacaacttctacgactactcctactccttaa

SEQ ID NO: 30054 - protein, 339 aa, DROSOPHILA
MQRIIALVAIMACGLSFVAAQSCQTCLEQNDVYCVDQNSYQNCMKNGPVGDIIECPSGTVCSNSDSVCALISEVNSTILDVCGGSGGNGAQCEVCSSGAKYACVSSTQYARCSSAGDVLTSSVYNCGTDEICIIDALSTYQTVCVPSCASEFLGLDATCSNSIYQPTTTTTVAPTTTPSAAQKEDLCNAGEPSTNPSYFFTRITDDSTCNSYLYCQKSGTTWVALYMTCGASTPFFDSTTSSCVTTRPTSCSDTTTQSPSDSSSTASSTESSSESSSTTASSTASSSTESTPTTASSSASSSTESSTESSSTTASTTQSSSTESSTQSTSTTSTTTPTP

SEQ ID NO: 30055 - DNA, 4205 bp, DROSOPHILA
aagtatttgattttcgttgcacaggtacgcaatgatatgtgaaggcagctgtttatcaatttcattcattcttactgatctgaggtaggtacaaaataaatgtatatatatataaaaaaaaaatacataaaaaaataataatcatatgcgtggggcatttgaaacagtctagattccacacacaagtaaaatcctaaacgggtcataaactatcaaataaattacataaacatttacgttcattaagcattaaacatatctatgtaaactatgctatttatcaatatatgtatatatgtaaaaaaaaaacataaaaacagtcttgtggttgcatttgtgtttagtttctcgttaagcagatttcatttctttgattatgattgcagaatgcgaatgaataaatgtggcgaatgtgaatgtgaatacgagtacgagtacgaatacgaatacgaatacgaataggagttgcagttcgagtaggactataaataaattctgcttaattactgggtactatgcgcatgtcttttcttcttggtgtgttctaggaattggagttgtctcctctaatgtgagtgtgtgtgtgttttttttttgggtggtattatgtaatatgtacagagcggccccacctacaaactatatatatacagggcgcctatttacagtagggtggctcgatggttttggacctccaaaaagtgcgagcaaatcgtagggtgatcttttttcgaaaataataaaaactaaaaataagaagttattatcaatgactgaaggaatagctaaaatcgttaaggatcaatcgttaagtttgtagttcgaaaaatattcaagaactaacttgaactaacttgtcaaagttaaaaagtcaatttttgtttactttaagctagaaactaagaaattgtccataatattccttaactattttcctgctcctacgatttccatgcccactttcggatccccccaaaagggtacagggtatttggtgagcctagttagcctgctgggtgagcatgttgaccaactcggtgcgctccatgttgttgagcgtgtgcatatcgactcccagagcggcggccaccgcctcgatgtccaagccaaaggcggtgagcagctcgaggaatcgcatctcctcgccggtcatgggattggtgagcgtgggacacgagtgattgcattgcggccaactgcagcgttccagcagacggaggccgcatttctctggcactcgcggaacgcgatgtcgcttcttggactttgtgcccgcggaggcgttgttggaggagcgtgtcttctggggcgcactcgcttccaggaaaacacccgccgccggctgttcccgctgcattttcatctgctgctgctgagccttcctgcgtcgcttgcgctgctcctgcctttcctcggctgtcaattgctggcgccgtcgctgtttccgctgatcattgccattgctcgacttggggctgttgtccttcttattgcgatgctcctgcccgccattggccttcttttgctgctgctggcggcgacgttgcttccgcctctgtcgctgctcctggcgcaatcgttttcgctcctctcgctcctccttgctcaggtgattgtgcttgcgctgctgccctccagattgggccacattgttatgcttctgtcgctgcagccgctgacggtgtcgctggtgtctttggttattggcatgttctggatgcgagaccgccgtcgatggttccgtggaacgcttgagcttgtcatgacgcctactgcgcgttgagtgctcccaacagcgcagcgctgagggcagcgatatatcgtcgatcttgatattgacccaatcccgtttgaagagcaccccatgacctatgcaactgggtgcaaacactgcgctcacattgtccagcgaggatctcagggcgccgcccatttcgtggatgtagttccattgctgaggcgtcacgggtgctccaacattatccactcgcatttgggcctcgtcgaaaagccattggaaaacgaaaagcggagctgtttggtggagaaaagcaggttaaataaagtctaaaagtcttcaagtcatagacaaacttacttttcaaagtgggatatagtcggtatccatagtaacatctccatggctccgtgggataacttttggtgcactcctcgggcagcaagccctgccacaacttccaaccctgacgcactgcctcattggaggccacggccgccggcgtgtatggctctctgtccaggaaccaacccgagtcactcactcccctcactgtgatctgtagctttttctcgttgaccagaaagtctcgaatgcgatccaaattgagcattacacccatgccaccagccgatgagccaacgagcatcagttcgccacccggcactcggcccaatcccacgggaatcagctcggcgatcacctggcgcagaatcagggcacccatgaaccgccaactgttctcccgatcgctggtatccggctccgttcgtgttcccgaccacgaatcactgctgcagtacgggatgagcacatggttggcattgtgccagtagggattctcctcgggatgtggcgatagaatgccgccaactggaaaatgaagaatgaaatgattagaaatcattgttatttcatttatttttatatcacactcaccatctctcgtctctggccactgggaggaggtcattaggtggcgcagtcgcatccatctggagcggcacgagcgcacatcgaaacagtgccagccaccttcgagtagaacgatccacttcttggagctgggatgcttgcgcagatagaaaccggcatgactgccatcgttgcaggtgatgctcgtgttggccagattggcgcgtttcagggagcggctgtggtcaccggagccgctggccgagtgcatcaccatgtagttgcgctggatcatgttcatgctggtgtccctcaatggatccttctcctgcagactcgccgcatccaagatgctgctgctgcaaacggctggcagctgactgaacgtggctaagagcagcagaagcgttagcagcggctgattgagaaaagagcggtaaagagaattgctttagtgtgcgtttagagttaaaaaaaagtcttagatgagagaaaagatgctgctctctgtttgcgccgaaaaatcactcacggctctctcacgcgacccattgtgtgcgtgtatgtgtgtgtgtgtttttggcggaaaacttgctttgatcaaaatgcgagcaagaagctttgcgataagatcaaagaaatttttgccgcctgccgtttcgttgtgttgttttcccccacctttccctttgactccattttggttttttttttggtagatttcttgttgtttttgttttttttacatagagagcagcgtggagagacaacctttaggtatttagtcaaacatggcaagaaattgttgttaatcatacgccccgtgggccagtcaaacaaatttcaatttcacaatgtcatggccgctgacgcgtggtaatcaccagttcttggctttgaacttaaggtcgcctcgttgtttcttccccccccttttttttctctctctctctcttacacacatcaatcaaatgagctatctggcgatttgcttcgtcgtttcgctgattctcgacttcgagtttgagttcgagttttttgtttagctattttccagcaatttgtaaataagacaataacaataagaacaacaaaacacatttgccgacagcatgggcaacgattttagtgtctcagtgtgtcagtctgtcaattctgtctacggtcttgcctccgcataaataaccattcagaaatcgtaaagaaatcttcaatcaatgtttatacaggcctttgaagtccgccgattcctgtcgattcgttgcagccagccacgacaatttgcagacagcaaaatgcaaatgacacaaacacgaaacgaaacaacaacagcaacagcaacaaaaactctagcaattatattggccaaaggcctacaaagtataatttcgtttgggccaactcaattcgaatgcaaagtggtcctaacggtagccggctagccgtcattaaaatatatccatatatatatctgcggcgatatcggtggttttgccacttatgtatttataaacccaacaatctggttcccctcctcaatacaaatgaatta

SEQ ID NO: 30056 - DNA, 1950 bp, DROSOPHILA
atgggtcgcccgctgctaacgcttctgctgctcttagccacgttcagtcagctgccagccgtttgcagcagcagcatcttggatgcggcgagtctgcaggagaaggatccattgagggacaccagcatgaacatgatccagcgcaactacatggtgatgcactcggccagcggctccggtgaccacagccgctccctgaaacgcgccaatctggccaacacgagcatcacctgcaacgatggcagtcatgccggtttctatctgcgcaagcatcccagctccaagaagtggatcgttctactcgaaggtggctggcactgtttcgatgtgcgctcgtgccgctccagatggatgcgactgcgccacctaatgacctcctcccagtggccagagacgagagatgttggcggcattctatcgccacatcccgaggagaatccctactggcacaatgccaaccatgtgctcatcccgtactgcagcagtgattcgtggtcgggaacacgaacggagccggataccagcgatcgggagaacagttggcggttcatgggtgccctgattctgcgccaggtgatcgccgagctgattcccgtgggattgggccgagtgccgggtggcgaactgatgctcgttggctcatcggctggtggcatgggtgtaatgctcaatttggatcgcattcgagactttctggtcaacgagaaaaagctacagatcacagtgaggggagtgagtgactcgggttggttcctggacagagagccatacacgccggcggccgtggcctccaatgaggcagtgcgtcagggttggaagttgtggcagggcttgctgcccgaggagtgcaccaaaagttatcccacggagccatggagatgttactatggataccgactatatcccactttgaaaactccgcttttcgttttccaatggcttttcgacgaggcccaaatgcgagtggataatgttggagcacccgtgacgcctcagcaatggaactacatccacgaaatgggcggcgccctgagatcctcgctggacaatgtgagcgcagtgtttgcacccagttgcataggtcatggggtgctcttcaaacgggattgggtcaatatcaagatcgacgatatatcgctgccctcagcgctgcgctgttgggagcactcaacgcgcagtaggcgtcatgacaagctcaagcgttccacggaaccatcgacggcggtctcgcatccagaacatgccaataaccaaagacaccagcgacaccgtcagcggctgcagcgacagaagcataacaatgtggcccaatctggagggcagcagcgcaagcacaatcacctgagcaaggaggagcgagaggagcgaaaacgattgcgccaggagcagcgacagaggcggaagcaacgtcgccgccagcagcagcaaaagaaggccaatggcgggcaggagcatcgcaataagaaggacaacagccccaagtcgagcaatggcaatgatcagcggaaacagcgacggcgccagcaattgacagccgaggaaaggcaggagcagcgcaagcgacgcaggaaggctcagcagcagcagatgaaaatgcagcgggaacagccggcggcgggtgttttcctggaagcgagtgcgccccagaagacacgctcctccaacaacgcctccgcgggcacaaagtccaagaagcgacatcgcgttccgcgagtgccagagaaatgcggcctccgtctgctggaacgctgcagttggccgcaatgcaatcactcgtgtcccacgctcaccaatcccatgaccggcgaggagatgcgattcctcgagctgctcaccgcctttggcttggacatcgaggcggtggccgccgctctgggagtcgatatgcacacgctcaacaacatggagcgcaccgagttggtcaacatgctcacccagcaggctaactag

SEQ ID NO: 30057 - protein, 649 aa, DROSOPHILA
MGRPLLTLLLLLATFSQLPAVCSSSILDAASLQEKDPLRDTSMNMIQRNYMVMHSASGSGDHSRSLKRANLANTSITCNDGSHAGFYLRKHPSSKKWIVLLEGGWHCFDVRSCRSRWMRLRHLMTSSQWPETRDVGGILSPHPEENPYWHNANHVLIPYCSSDSWSGTRTEPDTSDRENSWRFMGALILRQVIAELIPVGLGRVPGGELMLVGSSAGGMGVMLNLDRIRDFLVNEKKLQITVRGVSDSGWFLDREPYTPAAVASNEAVRQGWKLWQGLLPEECTKSYPTEPWRCYYGYRLYPTLKTPLFVFQWLFDEAQMRVDNVGAPVTPQQWNYIHEMGGALRSSLDNVSAVFAPSCIGHGVLFKRDWVNIKIDDISLPSALRCWEHSTRSRRHDKLKRSTEPSTAVSHPEHANNQRHQRHRQRLQRQKHNNVAQSGGQQRKHNHLSKEEREERKRLRQEQRQRRKQRRRQQQQKKANGGQEHRNKKDNSPKSSNGNDQRKQRRRQQLTAEERQEQRKRRRKAQQQQMKMQREQPAAGVFLEASAPQKTRSSNNASAGTKSKKRHRVPRVPEKCGLRLLERCSWPQCNHSCPTLTNPMTGEEMRFLELLTAFGLDIEAVAAALGVDMHTLNNMERTELVNMLTQQAN

SEQ ID NO: 30058 - DNA, 3311 bp, DROSOPHILA
attatctcatgtttcgtcgtatatttcagaaaatcgaaaccgttttcgatatcatggaattggaggacgaggatcgcactcgcctgctgcagctctccgatttacaaatggccgatgttgctcgattctgcaaccgttaccccaacattgagctgaactatgaggtggtggacaaggatcgcatcaactcaggatcaaccgttaatgtagtggttcaactggaacgtgaggatgaggtcactggcccagtcattgctccattcttcccgcagaagcgcgaagaaggatggtgggtcgtcataggtgatcccaagaccaactccctgctctccatcaaacggctcacgctgcagcaaaaggcaaaggtcaagctggactttgtggcacctagtccgggcaaacacgactacactctgtactacatgagcgattcctatttgggttgtgatcaggagtacaagttttccatcgaagtgggtgacttccagtcggaaagcgaaagcgagtcagattagttttctttaggatcatcagttgggcatgtttgcacaaatgaaaatcaatcattttacaatttacgcgcattaattgtagcaataataaattcgtgtactactttagtagaaaccaaattgtacaaggatacactgaggataattatataaagtagtacaaaaaaaaaaaaaaacaaaataaaaaaaacctttcaactttctttcgctggttgataccaagaatctaaatattttgtagtcaacagtgccaattcttatattgtcttaagcttttaaatttcgtatggaacaattcaagtttgttgtaatttgtaatctggatcatcaaaatgcaaccgtttagattttaaaaaaatcattcaaattattcattcaaattcaattcaatcataaatatttatttggattttttagatatttgcacataggattgctgacaaatagattaacttggaggtattttccctgtatggtgaacttggcttttagcggctgacagaaactgccgatccatggctactgccacgattggctcctccattagcgaagctgttcgtggagctaaagtttattgtctgtccattgggaagatggtaaacctgactcagcgaagcacctgccgcattattggatccaaaggggctggtgttctgggactgagtggccgtgcttgcggaggaggcaccgaatgatccattggcactctgcgactggaagccctgagcctgcccactggcggccgaggatcctgagttgagtccattgttgtagttgctgtgggcagctccgttggatgcggcctgctcctggttgtaaccactgggtccgagtggtcccagcggatttaactcgacgttggcattggcattgccgccatctggtccggcaccaacatcaacacccgctttggttcccccagcgccggccgatgtacctgcctgaacttttccaccttgattaccgccgaatccgggatttcctccgaatcctgggttaccgccgaattcctgattaccgccgaaaccctgattacctccgaatccctggttgcctccaaatccttgattaccgccgaatccacctccaaaaccaggctctccaccgaatccgccaccgaagccgggatttccagcatactgaccaccaaattgtcgcccaaactgacgcttcaccctcttgtgagcggcctggattccggatatttgatccaggaccgaacggacgcgacgcacctgcggattagacttcggtttgatgtacaaggctgattccaccactacttcctcgatagtggcgcccttggaagctgtaaaatgcaatggtatatactttataaaatattttatatttattttaatttaattaatagaagctgaataatcggcaagcttattattaaaaaattcggagcaatctattattttactaaatattttacgctttgttcgcactacagaatgtgtacatatgtatacacaaaaatttatagatagatatgtatttatatatatttacagaatttcagatttgaaaagtattttccaaatgtatttaggaagttttacaatctaagaattgtaagattttcgagcgttaagaattttacttacgcaaatcatcatcgccggtttgaacctgcttctcgttgcgctgcctcagttgaggaaacgccgacgcagctgccagacagatgagggccacaaatagcaccggaattgatacattcatttcgtgttcttcgattagattggttgccttctggagatcgcagctggacacgtccgttggctgcgccgcttcgcgatcaactgttggatgtatatatttcagcctgtccgctccgccgccaatcggccgatcaactctcactttcaatcgccgtagggggctgcccctttggtctggatggcgctaattgcttctatcaatattcaagatgttcggcaaatacgaagaaaaaaattgaaaaccaaaactggcttgtataatccaacgatttttggcacatgtaaccgatgcaaactttgtataatgttgtattatgtaggaaaaaaacaaaacgggtgtacaaaagccgaaaccggttggcggccaaagctcgtggaggaactagtttggttttcttttgtttattttgttgcttggttgcttgctgcttggtttttgttgcttttcgatttccatttcgggaaacagatgttgtccagaacttttacgggtccacagagtggaggcggacagatctccccgaatgagttggtgcttgcaagtggggggcatcccagtgaacatttgtgtaggatttccaaaggcagacgcttgtctgccctttcagctgataagaggctagaattatcggtttagttggaataatcacttttatttctatttctaatctaaaaggctagacaatctttcagaaaaataattcatgggagtgcttaaataaatgaataaatggaattttgttgtaacatactattacaatttaaattcgtaattgaaagaaatcaattataaaagcaaatggtttattatagtaataaattcttccatgaatacattagttaaataaactgtttattactctttccacatttaatctaaaagtattgacaaatatttcagaaatttaagtaagttgtgcaatacgaatttaaacgcgaattaggacattcacagcttccttccatcaaaatgagaatgaagtgaacgataacaaagggacatttgttgagatcgcttaatcaaacatgtaatattgggtatatgcgaacgacttgatgatgtatacga

SEQ ID NO: 30059 - DNA, 1007 bp, DROSOPHILA
cggcgcagccaacggacgtgtccagctgcgatctccagaaggcaaccaatctaatcgaagaacacgaaatgaatgtatcaattccggtgctatttgtggccctcatctgtctggcagctgcgtcggcgtttcctcaactgaggcagcgcaacgagaagcaggttcaaaccggcgatgatgatttgccttccaagggcgccactatcgaggaagtagtggtggaatcagccttgtacatcaaaccgaagtctaatccgcaggtgcgtcgcgtccgttcggtcctggatcaaatatccggaatccaggccgctcacaagagggtgaagcgtcagtttgggcgacaatttggtggtcagtatgctggaaatcccggcttcggtggcggattcggtggagagcctggttttggaggtggattcggcggtaatcaaggatttggaggcaaccagggattcggaggtaatcagggtttcggcggtaatcaggaattcggcggtaacccaggattcggaggaaatcccggattcggcggtaatcaaggtggaaaagttcaggcaggtacatcggccggcgctgggggaaccaaagcgggtgttgatgttggtgccggaccagatggcggcaatgccaatgccaacgtcgagttaaatccgctgggaccactcggacccagtggttacaaccaggagcaggccgcatccaacggagctgcccacagcaactacaacaatggactcaactcaggatcctcggccgccagtgggcaggctcagggcttccagtcgcagagtgccaatggatcattcggtgcctcctccgcaagcacggccactcagtcccagaacaccagcccctttggatccaataatgcggcaggtgcttcgctgagtcaggtttaccatcttcccaatggacagacaataaactttagctccacgaacagcttcgctaatggaggagccaatcgtggcagtagccatggatcggcagtttctgtcagccgctaa

SEQ ID NO: 30060 - protein, 312 aa, DROSOPHILA
MNVSIPVLFVALICLAAASAFPQLRQRNEKQVQTGDDDLPSKGATIEEVVVESALYIKPKSNPQVRRVRSVLDQISGIQAAHKRVKRQFGRQFGGQYAGNPGFGGGFGGEPGFGGGFGGNQGFGGNQGFGGNQGFGGNQEFGGNPGFGGNPGFGGNQGGKVQAGTSAGAGGTKAGVDVGAGPDGGNANANVELNPLGPLGPSGYNQEQAASNGAAHSNYNNGLNSGSSAASGQAQGFQSQSANGSFGASSASTATQSQNTSPFGSNNAAGASLSQVYHLPNGQTINFSSTNSFANGGANRGSSHGSAVSVSR

SEQ ID NO: 30061 - DNA, 3884 bp, DROSOPHILA
tttacaatctaagaattgtaagattttcgagcgttaagaattttacttacgcaaatcatcatcgccggtttgaacctgcttctcgttgcgctgcctcagttgaggaaacgccgacgcagctgccagacagatgagggccacaaatagcaccggaattgatacattcatttcgtgttcttcgattagattggttgccttctggagatcgcagctggacacgtccgttggctgcgccgcttcgcgatcaactgttggatgtatatatttcagcctgtccgctccgccgccaatcggccgatcaactctcactttcaatcgccgtagggggctgcccctttggtctggatggcgctaattgcttctatcaatattcaagatgttcggcaaatacgaagaaaaaaattgaaaaccaaaactggcttgtataatccaacgatttttggcacatgtaaccgatgcaaactttgtataatgttgtattatgtaggaaaaaaacaaaacgggtgtacaaaagccgaaaccggttggcggccaaagctcgtggaggaactagtttggttttcttttgtttattttgttgcttggttgcttgctgcttggtttttgttgcttttcgatttccatttcgggaaacagatgttgtccagaacttttacgggtccacagagtggaggcggacagatctccccgaatgagttggtgcttgcaagtggggggcatcccagtgaacatttgtgtaggatttccaaaggcagacgcttgtctgccctttcagctgataagaggctagaattatcggtttagttggaataatcacttttatttctatttctaatctaaaaggctagacaatctttcagaaaaataattcatgggagtgcttaaataaatgaataaatggaattttgttgtaacatactattacaatttaaattcgtaattgaaagaaatcaattataaaagcaaatggtttattatagtaataaattcttccatgaatacattagttaaataaactgtttattactctttccacatttaatctaaaagtattgacaaatatttcagaaatttaagtaagttgtgcaatacgaatttaaacgcgaattaggacattcacagcttccttccatcaaaatgagaatgaagtgaacgataacaaagggacatttgttgagatcgcttaatcaaacatgtaatattgggtatatgcgaacgacttgatgatgtatacgaatttgcgtactaactaaatggataaaacacaatgaaccgaaagtaatatatattttttgtacaacttgaaagtcgtcatgaggcgcttgaatggtttgttttgcgagtttttccttacaatattgtttttaatgcttactcttacgttaaggaatcaacaaaactgagcactgttcgatatagttagcatttaacctaggataagtggttaatcagcggctgagggcctactcgatgccatgggcgaagatcatgaccaaacctggatcgatcatgacgtcctcagtcatgtggaggttgtcgcagctcaaaacgagcacagcttgcttgcctgcggaagagtaagtttaaagataaagccttgttgttaatatttatgtttaaaattgttacctggaatgcgtcgacacacatagttgtcgtagatcctacgattggtttgacgtgtctctagcgaactgagcccacggggccaacgtcgctcgtggcagaactccataagactatccaggatgtgtggcggacagcccgactcggacaaagcgcgcttgatcatgagctatcaaatgaaaagtgagttaacgttttaaaaaaatttagaatttgggcttcacctgcagtgcatcgtcgggcgtagagatcattcccccccagcgcgtaaccctggcccggggcagtgtgctgctccagcggatcacctcgtcgcgctccatctggtcggctatggcccgcatcgcaggattggagacgcgcatggcacgcataaagtccttgaatagctgcagctcgcgcttcagttcgttgatagtcagctgctggtcggtgagctccgatttgagctcacccattttttccgtctgcttgacaattaaagtgcgcagctcccgcacgcagttgtggtcctttagctcatccttgggtatgtcaaagccgcatcccttctcgcagggaaatggtcgcttcggattgtgaatgcattcgtccaaatgggaattgtaggcgtctagcttgagaacagccgtgcagccataaggcgcattgtcacaggtgattgacagtctggttggcaagggtcaaagattagttagagtccacaaggttcacagagtagaaggcgttgggtttttctcacctggacagtaggttgcgcaatatgcgaggcactgcccgcaagttggcagtagtcagggaatttcgatccaccggacaagtgggctggcgggttagccactcgttaatgcatccgcggcagaaggcgtgctcgcacatcacggcctgaatcggtagatatgtatgattgtttgtatttaaagcatatgtatgattcgcggtgtgcgttctttgcaaacaaaacaaacctgcagcggatcctcaagcactccggagcagatgggacaggtgagctcctcgtccacctccccctgaaagcgattcacatcgtagcccatcttaggtcctcagcacgctggccatccgcataaaaatactattaataattcttttctgcggattgcaaaatctgtgtgtttttttttcggttcagtcagtgcagtgttgtgtagtgtgactgagtagtgttggaaagctaggatggcacttcagctgtaatccgcgagaaatggcttcttaaaataactgtttagcttgaaaatattgagatattttctgttccaccttagttttaaacttaagtttgacttaaagtcaaaatttttgatataatagaattcttgtttgatctccattcatttatttgtactattaaattagctttggccaggcagcttaacaaattaaatacgtcatcgtcctggttaaaatatgtttacacacttgtcgatcatatgattaataaataatatacatatcctgcccaaaggaccacgtcagcataagccaccggtgattaatcagcgcacagttgatttaaaaatatagcatctttataataggtaaaaatatcaatgtatttaacagtctggaccgttggcatgccactatttggtatacaataatgaaattcgtcaaaaagggagtccaatggacatggctacccaattcatagactaacacaacacataaaacatttaacgcttaatccgatacccccaggtccccgcaccctcgtagccagtgatcctgtactatatctcgttgcgatccttccagccatatttctggcgctgctgcttctccctactattgctattaccctgcctattgccattgtaggaggagctcttcggcggggcgcaatagcaggatctctgctgggagtccagataggagcggcatcccagggtcaatgtgccggtgaatagcatcttggcagccgccttgcagcccttcatcatcagatcgctggctatggacttctcgtagctgtcgcagtacttgtacaagcacctcttgaagtccaggtcgcacagctccttatcgctattgcaggtgtcgtagcagatatcgtggtcattgcaacatgtctccatctccttggccggcagatagtctgtgctgatcctcaggcccaaggaaccacatccatctgcggtgggggtatagaacttattctgaaccgctctgggcgctgtaagataaacacacatatggatgctggggaatttacataatgcgcagtgcgtcaccac

SEQ ID NO: 30062 - DNA, 1611 bp, DROSOPHILA
tcaagctaaacagttattttaagaagccatttctcgcggattacagctgaagtgccatcctagctttccaacactactcagtcacactacacaacactgcactgactgaaccgaaaaaaaaacacacagattttgcaatccgcagaaaagaattattaatagtatttttatgcggatggccagcgtgctgaggacctaagatgggctacgatgtgaatcgctttcagggggaggtggacgaggagctcacctgtcccatctgctccggagtgcttgaggatccgctgcaggccgtgatgtgcgagcacgccttctgccgcggatgcattaacgagtggctaacccgccagcccacttgtccggtggatcgaaattccctgactactgccaacttgcgggcagtgcctcgcatattgcgcaacctactgtccagactgtcaatcacctgtgacaatgcgccttatggctgcacggctgttctcaagctagacgcctacaattcccatttggacgaatgcattcacaatccgaagcgaccatttccctgcgagaagggatgcggctttgacatacccaaggatgagctaaaggaccacaactgcgtgcgggagctgcgcactttaattgtcaagcagacggaaaaaatgggtgagctcaaatcggagctcaccgaccagcagctgactatcaacgaactgaagcgcgagctgcagctattcaaggactttatgcgtgccatgcgcgtctccaatcctgcgatgcgggccatagccgaccagatggagcgcgacgaggtgatccgctggagcagcacactgccccgggccagggttacgcgctgggggggaatgatctctacgcccgacgatgcactgcagctcatgatcaagcgcgctttgtccgagtcgggctgtccgccacacatcctggatagtcttatggagttctgccacgagcgacgttggccccgtgggctcagttcgctagagacacgtcaaaccaatcgtaggatctacgacaactatgtgtgtcgacgcattccaggcaagcaagctgtgctcgttttgagctgcgacaacctccacatgactgaggacgtcatgatcgatccaggtttggtcatgatcttcgcccatggcatcgagtaggccctcagccgctgattaaccacttatcctaggttaaatgctaactatatcgaacagtgctcagttttgttgattccttaacgtaagagtaagcattaaaaacaatattgtaaggaaaaactcgcaaaacaaaccattcaagcgcctcatgacgactttcaagttgtacaaaaaatatatattactttcggttcattgtgttttatccatttagttagtacgcaaattcgtatacatcatcaagtcgttcgcatatacccaatattacatgtttgattaagcgatctcaacaaatgtccctttgttatcgttcacttcattctcattttgatggaaggaagctgtgaatgtcctaattcgcgtttaaattcgtattgcacaacttacttaaatttctgaaatatttgtcaatacttttagattaaatgtggaaagagtaataaacagtttatttaactaatgt

SEQ ID NO: 30063 - protein, 315 aa, DROSOPHILA
MGYDVNRFQGEVDEELTCPICSGVLEDPLQAVMCEHAFCRGCINEWLTRQPTCPVDRNSLTTANLRAVPRILRNLLSRLSITCDNAPYGCTAVLKLDAYNSHLDECIHNPKRPFPCEKGCGFDIPKDELKDHNCVRELRTLIVKQTEKMGELKSELTDQQLTINELKRELQLFKDFMRAMRVSNPAMRAIADQMERDEVIRWSSTLPRARVTRWGGMISTPDDALQLMIKRALSESGCPPHILDSLMEFCHERRWPRGLSSLETRQTNRRIYDNYVCRRIPGKQAVLVLSCDNLHMTEDVMIDPGLVMIFAHGIE

SEQ ID NO: 30064 - DNA, 3076 bp, DROSOPHILA
gcagggaaatggtcgcttcggattgtgaatgcattcgtccaaatgggaattgtaggcgtctagcttgagaacagccgtgcagccataaggcgcattgtcacaggtgattgacagtctggttggcaagggtcaaagattagttagagtccacaaggttcacagagtagaaggcgttgggtttttctcacctggacagtaggttgcgcaatatgcgaggcactgcccgcaagttggcagtagtcagggaatttcgatccaccggacaagtgggctggcgggttagccactcgttaatgcatccgcggcagaaggcgtgctcgcacatcacggcctgaatcggtagatatgtatgattgtttgtatttaaagcatatgtatgattcgcggtgtgcgttctttgcaaacaaaacaaacctgcagcggatcctcaagcactccggagcagatgggacaggtgagctcctcgtccacctccccctgaaagcgattcacatcgtagcccatcttaggtcctcagcacgctggccatccgcataaaaatactattaataattcttttctgcggattgcaaaatctgtgtgtttttttttcggttcagtcagtgcagtgttgtgtagtgtgactgagtagtgttggaaagctaggatggcacttcagctgtaatccgcgagaaatggcttcttaaaataactgtttagcttgaaaatattgagatattttctgttccaccttagttttaaacttaagtttgacttaaagtcaaaatttttgatataatagaattcttgtttgatctccattcatttatttgtactattaaattagctttggccaggcagcttaacaaattaaatacgtcatcgtcctggttaaaatatgtttacacacttgtcgatcatatgattaataaataatatacatatcctgcccaaaggaccacgtcagcataagccaccggtgattaatcagcgcacagttgatttaaaaatatagcatctttataataggtaaaaatatcaatgtatttaacagtctggaccgttggcatgccactatttggtatacaataatgaaattcgtcaaaaagggagtccaatggacatggctacccaattcatagactaacacaacacataaaacatttaacgcttaatccgatacccccaggtccccgcaccctcgtagccagtgatcctgtactatatctcgttgcgatccttccagccatatttctggcgctgctgcttctccctactattgctattaccctgcctattgccattgtaggaggagctcttcggcggggcgcaatagcaggatctctgctgggagtccagataggagcggcatcccagggtcaatgtgccggtgaatagcatcttggcagccgccttgcagcccttcatcatcagatcgctggctatggacttctcgtagctgtcgcagtacttgtacaagcacctcttgaagtccaggtcgcacagctccttatcgctattgcaggtgtcgtagcagatatcgtggtcattgcaacatgtctccatctccttggccggcagatagtctgtgctgatcctcaggcccaaggaaccacatccatctgcggtgggggtatagaacttattctgaaccgctctgggcgctgtaagataaacacacatatggatgctggggaatttacataatgcgcagtgcgtcaccacacctggtcctccgatatccggtgcggggcactggtatatgcagttctcgtccacggccgcatcgaaaacctcgtggaccgtgcgaaatttgcgcaccagcactatcaggttcttgaacacgtcaccaaagatcgcctccgcggctataatggcatcccttagctaaatccggggagagaagatacaggagtaacagatactagctctcacagatttcctacgagaagcggtgcaccttacgtggactatggtgctggatccatagcctgaataggcgtaggttaggaacgtaagaaggtatatggccaccttcatccaagagaactgcatgttcgctgtttaattcgtttttgaagggtcagctatttgttgtttgcgcgtaataataaactaaactatgcgaaagacatttgtagcagtgtgaccaggcgtcatcgttcaaatataccaaccggctcggaaatcataccaaactgcatatgaggttgcatacttttaggcactgtcctgacatttcaaaaaatcctaatgggaaatttaaaaccgtttttaaatattataaataaaatacgttatgatttataaaacaaaaaaatttatgaaaaataaaatcttgttggctttgcagagagtattacaattaatgctatacattaataaaagtaaattgaatttcagaacactggcgccatctggtacagacaactcaaaacatttaactgacaatacatatacatcgatatttcgaggggggaaaattcaaaaaattgggaataaacaaaattttccttaaatggatttgtggcatatatttttggaacgtattttagtggcttgcagagtcagcgcaagtgtcttcgcaaatttcggctgcggtttgtattccagctggaagctaagtgagttgtttcccacaattatacttagtgcggcaaggatactaacatttttatgccttacagtctgcggcgaccatgactcggcttccggtctgcgggcaggacttgccacgcccactcaaagaggtgagtgcatgcagtgtccttgcacttgacaaacaggactgaagcagcctcaaaacgaaatagtgaaatagggaaaaaaaagtcgcgcacagaaaacgtaaacgcaaagcttgctgacatctcgtgcctgccttcgcttaattataacatcaaattgaaatgcacacggcaattgtatgcggcacctgaaatgagactgtggcacgcaggcgtcactcgtactcgcatttcgtttgcacctgaccttgttggcctttattacaacggccagcgaaatcaacgtgcataaacatgcgaacgcaacacccgaaaaccgttaaagaggcgcgctcgctgtttgcttaaaa

SEQ ID NO: 30065 - DNA, 935 bp, DROSOPHILA
caacaaatagctgacccttcaaaaacgaattaaacagcgaacatgcagttctcttggatgaaggtggccatataccttcttacgttcctaacctacgcctattcaggctatggatccagcaccatagtccacctaagggatgccattatagccgcggaggcgatctttggtgacgtgttcaagaacctgatagtgctggtgcgcaaatttcgcacggtccacgaggttttcgatgcggccgtggacgagaactgcatataccagtgccccgcaccggatatcggaggaccagcgcccagagcggttcagaataagttctatacccccaccgcagatggatgtggttccttgggcctgaggatcagcacagactatctgccggccaaggagatggagacatgttgcaatgaccacgatatctgctacgacacctgcaatagcgataaggagctgtgcgacctggacttcaagaggtgcttgtacaagtactgcgacagctacgagaagtccatagccagcgatctgatgatgaagggctgcaaggcggctgccaagatgctattcaccggcacattgaccctgggatgccgctcctatctggactcccagcagagatcctgctattgcgccccgccgaagagctcctcctacaatggcaataggcagggtaatagcaatagtagggagaagcagcagcgccagaaatatggctggaaggatcgcaacgagatatagtacaggatcactggctacgagggtgcggggacctgggggtatcggattaagcgttaaatgttttatgtgttgtgttagtctatgaattgggtagccatgtccattggactccctttttgacgaatttcattattgtataccaaatagtggcatgccaacggtccagactgttaaatacattgatatttttacctattata

SEQ ID NO: 30066 - protein, 225 aa, DROSOPHILA
MKVAIYLLTFLTYAYSGYGSSTIVHLRDAIIAAEAIFGDVFKNLIVLVRKFRTVHEVFDAAVDENCIYQCPAPDIGGPAPRAVQNKFYTPTADGCGSLGLRISTDYLPAKEMETCCNDHDICYDTCNSDKELCDLDFKRCLYKYCDSYEKSIASDLMMKGCKAAAKMLFTGTLTLGCRSYLDSQQRSCYCAPPKSSSYNGNRQGNSNSREKQQRQKYGWKDRNEI

SEQ ID NO: 30067 - DNA, 3161 bp, DROSOPHILA
aatgactacgacttatttacattaaaatatatcgtttttttgggtttttctctaagttccaaaaaaagaatgtgtttcacaatttaactaaaacaaacgaccgtgttactgtcaaaaaataaaatatgtcaagcaagaattgcttttatcagttaaataaatattaaatatttggttttcttcttgcaaagagaaggggggcttacgtagcaccttaaagtataaaaacgtaattgcaaaagataactacgcatacgctcacttgcaaaagataaatgttatggcacccaaataagcaatttaggtatgcaacgtattttgaggggttggcaatccgtccaattctaaagctttctttatgggtttttttatggaataaaaaagaaactctcaataaaaagcaacgtacttttaggaaccaacgcagtaccaaatattgcacattgacttagatatatatagatattttagagctaaacggccatcactgttgcattaaattttagtttagtgttgataagtgcaaattgaaacgaatacctatcgcagcaagactttgcgcggcatcgcaaatttgaaaatggcatacgagcgaaggtctagttgcggttttggctgcactttgatagcttcccggagcgtaaaccgatatgaataggaatggcgagttaaataatcttgtggtcaagtccagtcaacttgtaaatgacgctgcaagaatggcttcgccagttgctcataaacattcgaccaaatggtttgattaaccaagttcattgagcgtatcgtatcggtcgaattctaaaactttaattgctgtcgtagcttgagcacacgactggttttgccaataataaaaaatttgccgcaatttgtctgtgaaaagtggcaggcattattatcagtcgacaaatgtatgaatgttaacacgaaaataacattattccagcgcgcactgataaaggccggcaagcgaaaaactgaaaactgaaactacacaatgtccgagagtaagcagccagtgcttagtagaactcagacatccgccgactacggcagcacgctccggacggatacgccacgccgacccacatttattccgatcgaatccccgcgtcgctattcgaaaatggcccacggttccctgtccggccacgaggccgagaatcgcctccagagactggagtacttccttaacgttctcaaccagatgtgcattggatttatcaccatctatatttcctatctcacgctgcgaacggggctctcgggcacgggtctgcatgcctggctagtgaccatcggggtaaatagttgggggatcaccatcaccgtctaagcgggcactgaagatcttcattccacaccacagttctccttcttcatggccgagggcgtcatgatccactacggcggcaatgtgctgacaaatggatacaagcgccagacgaagaccaccattcactgggtgctcctgactttgggaggcggttgcggggcagctggtgctcttatcaagatgattcaaaaggggtttttgctgcaatcgacacatgggaggctgggtgagtagagtacagacacgcacaatgcctattaaatagcagcagatgtctaatacattagaataaaacagtggaatagaatagttccaaggatccatttcttggtgcttcccagtctaagctagtacttaatttgttatttgttgaacaaacgcccccattttccatatttactttagttttatcgctttcttactatctttttagtagtacatttaatgatcacctaacaggcaacaaaaatcctaaaaggcactcactaatagattcccttctcgccaacagggatgaccgccttcgtactgtgcattctggccatgtcctcgggactggctgcacttttctccagccgcatcaagaagctaatcacaccattgctgaacaagacgttccacaacttcctgggattcgcgtgctttgtgatcgcactggtgacccagtactatggctaccagacgggctactttaagagccgaagtgagacggatttccaaatcctgatgaagtgcctcaccctcatatcgttggtcctgtcgagctacggaccgatgaaggcactctatcagaaatgcaaaaatatatcgcaacagttttagataggatgaaaagaatcactcgaatgtatgtagataaataaatgtaattttttctaaaaccccattttatcgacctatccaactataccaacaacgattcaaaattttatacctgtttattggtacaacgtgtgatccataaacatgactaagtatttttacaatgcctcattagggaaaacccggttaaccagcggtcagactttcatcgtccggtactcccccctgtaaaagttatataaccacccttttgattgatttgatttgataaggtctgaaaaagtaatgaattgactattagatacactgcaatttgcatttaagtttaaccgctcactcaaaaagccagcatttgaattaatcaatcaaaattatgatcatttataatttaagttatactattattcattttcctataacagcattgggtagcatgcatcattttaaaatccaaaacatgaccgggttttttatctgatcggtttgtgacacttggaggccgcataattgatagtaactgtcccaaataagtccaaacttttgaagccccgtaaaaagaagatcttgacttccggcaccttaaattaaaaaaccgtgtattttgcatggtgcagtttcgtatgtttatttagaaaatccatatcatttcttcttaaatctctcgcaataaataatacttggcgcgtgtgtcgcgttgtgtgtgtgatacgtatatcagttagcagtaataataaatagctagcgttaggtattaaaattcatagtcaattgggtaatacaaggctgtctggctttaaaaccccctttctgggtaacttttggtaagagaaagtcaagatctctatatagaatcgggtgaacagatctttagcatgcggtaggtaaataggagttatcagctatcgactaaagcccagttaagaattgtgtgttgggcaaggcatattcgaaattcgactttctatatcttttcatagtttccatagttcgctccgctcac

SEQ ID NO: 30068 - DNA, 810 bp, DROSOPHILA
atgtccgagagtaagcagccagtgcttagtagaactcagacatccgccgactacggcagcacgctccggacggatacgccacgccgacccacatttattccgatcgaatccccgcgtcgctattcgaaaatggcccacggttccctgtccggccacgaggccgagaatcgcctccagagactggagtacttccttaacgttctcaaccagatgtgcattggatttatcaccatctatatttcctatctcacgctgcgaacggggctctcgggcacgggtctgcatgcctggctagtgaccatcgggttctccttcttcatggccgagggcgtcatgatccactacggcggcaatgtgctgacaaatggatacaagcgccagacgaagaccaccattcactgggtgctcctgactttgggaggcggttgcggggcagctggtgctcttatcaagatgattcaaaaggggtttttgctgcaatcgacacatgggaggctggggatgaccgccttcgtactgtgcattctggccatgtcctcgggactggctgcacttttctccagccgcatcaagaagctaatcacaccattgctgaacaagacgttccacaacttcctgggattcgcgtgctttgtgatcgcactggtgacccagtactatggctaccagacgggctactttaagagccgaagtgagacggatttccaaatcctgatgaagtgcctcaccctcatatcgttggtcctgtcgagctacggaccgatgaaggcactctatcagaaatgcaaaaatatatcgcaacagttttag

SEQ ID NO: 30069 - protein, 269 aa, DROSOPHILA
MSESKQPVLSRTQTSADYGSTLRTDTPRRPTFIPIESPRRYSKMAHGSLSGHEAENRLQRLEYFLNVLNQMCIGFITIYISYLTLRTGLSGTGLHAWLVTIGFSFFMAEGVMIHYGGNVLTNGYKRQTKTTIHWVLLTLGGGCGAAGALIKMIQKGFLLQSTHGRLGMTAFVLCILAMSSGLAALFSSRIKKLITPLLNKTFHNFLGFACFVIALVTQYYGYQTGYFKSRSETDFQILMKCLTLISLVLSSYGPMKALYQKCKNISQQF

SEQ ID NO: 30070 - DNA, 2669 bp, DROSOPHILA
aatctatctgtttcggtcttagtgacttattgactggctaaggttcaacttgcctgctcagacatttggcccaaagacatcaacaatgtttctatattttcaagtaggtggtaacttttatctggtacgtgcgattttgcattccgataaggcgctgctgacttgcgatccgacaggaggactacatgagtattatgtatattatcaataagtggatcgcgagtgggcgagcactcgagtgacgagagtctaattaatattaataacccctctaaatttagaccccggctcatgacgttttcgtggaatgttcaacgtgagtgcgatcgcatattcgagcgcccgtgaatggtaatcctgttttacttcggtgccgaaagccccggcatcgatgcgtgaatgaatggatgtcgataaggtcgattagatctcctcgccgacgatactgcgaacgtgtacatgcagccccgaccactcaataatattgtataatcctttaagtcaactgcattagaatggggcacccaaaatgtttcgctgataactcgatagcaaacaaattgtatgtcagtctagtgaaagtcacaaagccattgtgaaggcaataaaaacctcagttgcgcatagtggcttgtaatagctaatgcacggcggatcgatagtcgaaaaaggtagttcacataaggaagaatccttaaaaatcctttgaattttgaaacaaaaggctctattcatttatttattggaaaacgattaataagaatccttaaaaaggatatttaagcgattcctggcaactacaataggaatttaaaggttgcatcttttcctagaatttatatgaaactaggttaaaaacatacaacttttgtgaaattaaactacaataacagtgtttgtgaaattaaaattaaaatttccaatttcttgaaatttcaattaccaatttcttgaaattgcaattacaatttctgtgaaacaattctaaagcaacgccacaatgagcgatgacaaaacaaaaccaacctcagtgctccagcatatagaatcggcgctatatgtgatcaaccagctgtgcataggattcgtcaccatttggatcagctggacctgcttgcgccaggacctctcgggcattcgcctgcatgcctggctggttaccttcggttttgtgttcctgatggccgagggaatgatgtgcttctacgacggcagttggctaactgtgcgttactcccggaattacaagactgcctttcacgtggtccttcagatccttgggggaggcatgggcgtggccggctgtttgattcaactaatacgtgacgattggtcaatcagcgtcacgttacatgcccgcctgggtttcgccgccttcgtcctgtgtctgatctcattgctgagtggactggtcgccttcctggcgagatgcctgagcaggaccatctcacccttggtcaacaagaccttccatgtggtcctcagcttcaccgccttcgtgatcgccatgatggcgcagttttacggatacacacagactggaattttcaggggacaaggacaggatttcgttgtcctcatgcaggtcgtcactatggtcctaatggtcctaaccagcattggcgccattaagtcgctctaccagaagattggtagcctggccagttaggaacgcctgtcgattatccctaatcctgtatatctatagtgcacttaagctaagctagactatttgctatttatatattaaactaatgttatcataaggataaatcaaatgactaagaaaaaaataaaaaatgactacgacttatttacattaaaatatatcgtttttttgggtttttctctaagttccaaaaaaagaatgtgtttcacaatttaactaaaacaaacgaccgtgttactgtcaaaaaataaaatatgtcaagcaagaattgcttttatcagttaaataaatattaaatatttggttttcttcttgcaaagagaaggggggcttacgtagcaccttaaagtataaaaacgtaattgcaaaagataactacgcatacgctcacttgcaaaagataaatgttatggcacccaaataagcaatttaggtatgcaacgtattttgaggggttggcaatccgtccaattctaaagctttctttatgggtttttttatggaataaaaaagaaactctcaataaaaagcaacgtacttttaggaaccaacgcagtaccaaatattgcacattgacttagatatatatagatattttagagctaaacggccatcactgttgcattaaattttagtttagtgttgataagtgcaaattgaaacgaatacctatcgcagcaagactttgcgcggcatcgcaaatttgaaaatggcatacgagcgaaggtctagttgcggttttggctgcactttgatagcttcccggagcgtaaaccgatatgaataggaatggcgagttaaataatcttgtggtcaagtccagtcaacttgtaaatgacgctgcaagaatggcttcgccagttgctcataaacattcgaccaaatggtttgattaaccaagttcattgagcgtatcgtatcggtcgaattctaaaactttaattgctgtcgtagcttgagcacacgactggttttgccaataataaaaaatttgccgcaa

SEQ ID NO: 30071 - DNA, 669 bp, DROSOPHILA
atgagcgatgacaaaacaaaaccaacctcagtgctccagcatatagaatcggcgctatatgtgatcaaccagctgtgcataggattcgtcaccatttggatcagctggacctgcttgcgccaggacctctcgggcattcgcctgcatgcctggctggttaccttcggttttgtgttcctgatggccgagggaatgatgtgcttctacgacggcagttggctaactgtgcgttactcccggaattacaagactgcctttcacgtggtccttcagatccttgggggaggcatgggcgtggccggctgtttgattcaactaatacgtgacgattggtcaatcagcgtcacgttacatgcccgcctgggtttcgccgccttcgtcctgtgtctgatctcattgctgagtggactggtcgccttcctggcgagatgcctgagcaggaccatctcacccttggtcaacaagaccttccatgtggtcctcagcttcaccgccttcgtgatcgccatgatggcgcagttttacggatacacacagactggaattttcaggggacaaggacaggatttcgttgtcctcatgcaggtcgtcactatggtcctaatggtcctaaccagcattggcgccattaagtcgctctaccagaagattggtagcctggccagttag

SEQ ID NO: 30072 - protein, 222 aa, DROSOPHILA
MSDDKTKPTSVLQHIESALYVINQLCIGFVTIWISWTCLRQDLSGIRLHAWLVTFGFVFLMAEGMMCFYDGSWLTVRYSRNYKTAFHVVLQILGGGMGVAGCLIQLIRDDWSISVTLHARLGFAAFVLCLISLLSGLVAFLARCLSRTISPLVNKTFHVVLSFTAFVIAMMAQFYGYTQTGIFRGQGQDFVVLMQVVTMVLMVLTSIGAIKSLYQKIGSLAS

SEQ ID NO: 30073 - DNA, 2937 bp, DROSOPHILA
tcagaacaatcaagccctactcgctcttcattcacttgccgtactcagtgaaactaggagaaacggtcagaattccggttttgatcgtcaacctgttttttacctgttttttttttaaagtggagttggcactggataatgaagcatatgggtttgaagattccttggaacatagtcagagacaactttttgaaatcgacgaatacggagccaaaagcgtgtttttttttaaattctgccccaagtacacaggaaactttattccactcgattttagagcaacctcttcagttaaatacactactgtttataggtcgctaatgattatcgaagacaaggaaagagaaatcgaatatagcaatcgtgccctcttagtgaacctaaaggacaatcaggagtacagaagcagctttcatatggacctcccaaactccagactggtcgagtttagtttatttagtgaccctcttgtcccgatcctccaaaacttggatagttcaataccggacggcactggcgaactgaccatgtccaaaatgttagtcaactttttggtgtggaactaccttaatcgaaccaaaaagctcgataaagctttgcacacccgaatcaaaagtaacttcagagagggctatcaaaagatactaaactatttccacgaagatggaagctttagctactttgaccctccgaaagccaatggatccatctggtttacttcttacgtcctgcgatatttgcacgacattagggcactcatatatatagatcgtaccattttgcaaaagggatacagatttctgcttagccgccagcataaagacggaagtttcacggaggatttcaaatacttctcaagatccggcagtactctcttcttaacatccagtgtcctgttggctctccagaaacaagccaaacccaatacgatagccataaacaagtcggttaatttccttagatcgatgaaacagatgaaacattgacattggccaaatcgatggccatatacgcatcgcaggctccggaatctgatcaacttgtgtcgcaacttagatccgtggcaatgcaggaaaatgatcaaatttggtgggcagaggatgtgcggaacggaagtcctcaggatgtggagatcaccttatatgccctgctcctcatggcttcgaaagtagataggccagagtcagcaatcagcaccgttcgatggtttttagaccagagaaatattcatggagaattcgagtccagccagaagacagttgttggcctcacagccctgattgagtatgctgaaaagtgggactacaatccaacggcttgggaagtgagcatcagcaacgaagacatatccgaaaaattggtggcattcaatctgttgacccagccgattaacttccatcaggacaccaaacgactggaggttcggacacaagggaactggggagctctcatccagatatgttatggttacgaagtcaaggagaaggtgaaggagtaaaatccaagcttcggtattcagactacgctcaagtccggcagtttgtcatcgaaaatggaggcagtcgtgtgcgtggagttcgtggagaggagcacaaatgcctcgaatatggccgttttggaggtgtccttgatctctggatacagctcggataaatcgagcttcaagagaattcgggatgtcgaaggagttggggtgagtttgcaactctttgaatgataatataaccccgtcaaattatccatttttcacgcagtccgtggataccaagaatgaagactccgtggtcattgtccacttcgaaagtctggccaagaatgaaagcaaatgcattcccgtcgaggcgtacataacacatgaagtgaccaattttaagccttccagtttagttatctatgataattatggccggaaggcaaccgaatattatcaatattaaaattggagctcgacgactttaaaggcacttaaagttccagtcttgagtccacagcctcgtaaatcaagccgtgtcatattaatcagggcaccacgcttccaatagcccgcatttttatggtactactcaaagtcaaatccaatataccttaatcaccttcaatgtcagatcgccgatatgaaaccgctgagtcagcaaaaagtatttgtaaacattgcgctagctaatttgatcaaaatgagtatggtttatcacaaccacagtgcttaaggcgcgtggatggttcagaatctatctgtttcggtcttagtgacttattgactggctaaggttcaacttgcctgctcagacatttggcccaaagacatcaacaatgtttctatattttcaagtaggtggtaacttttatctggtacgtgcgattttgcattccgataaggcgctgctgacttgcgatccgacaggaggactacatgagtattatgtatattatcaataagtggatcgcgagtgggcgagcactcgagtgacgagagtctaattaatattaataacccctctaaatttagaccccggctcatgacgttttcgtggaatgttcaacgtgagtgcgatcgcatattcgagcgcccgtgaatggtaatcctgttttacttcggtgccgaaagccccggcatcgatgcgtgaatgaatggatgtcgataaggtcgattagatctcctcgccgacgatactgcgaacgtgtacatgcagccccgaccactcaataatattgtataatcctttaagtcaactgcattagaatggggcacccaaaatgtttcgctgataactcgatagcaaacaaattgtatgtcagtctagtgaaagtcacaaagccattgtgaaggcaataaaaacctcagttgcgcatagtggcttgtaatagctaatgcacggcggatcgatagtcgaaaaaggtagttcacataaggaagaatccttaaaaatcctttgaatt

SEQ ID NO: 30074 - DNA, 777 bp, DROSOPHILA
atggccatatacgcatcgcaggctccggaatctgatcaacttgtgtcgcaacttagatccgtggcaatgcaggaaaatgatcaaatttggtgggcagaggatgtgcggaacggaagtcctcaggatgtggagatcaccttatatgccctgctcctcatggcttcgaaagtagataggccagagtcagcaatcagcaccgttcgatggtttttagaccagagaaatattcatggagaattcgagtccagccagaagacagttgttggcctcacagccctgattgagtatgctgaaaagtgggactacaatccaacggcttgggaagtgagcatcagcaacgaagacatatccgaaaaattggtggcattcaatctgttgacccagccgattaacttccatcaggacaccaaacgactggagactacgctcaagtccggcagtttgtcatcgaaaatggaggcagtcgtgtgcgtggagttcgtggagaggagcacaaatgcctcgaatatggccgttttggaggtgtccttgatctctggatacagctcggataaatcgagcttcaagagaattcgggatgtcgaaggagttgggtccgtggataccaagaatgaagactccgtggtcattgtccacttcgaaagtctggccaagaatgaaagcaaatgcattcccgtcgaggcgtacataacacatgaagtgaccaattttaagccttccagtttagttatctatgataattatggccggaaggcaaccgaatattatcaatattaa

SEQ ID NO: 30075 - protein, 258 aa, DROSOPHILA
MAIYASQAPESDQLVSQLRSVAMQENDQIWWAEDVRNGSPQDVEITLYALLLMASKVDRPESAISTVRWFLDQRNIHGEFESSQKTVVGLTALIEYAEKWDYNPTAWEVSISNEDISEKLVAFNLLTQPINFHQDTKRLETTLKSGSLSSKMEAVVCVEFVERSTNASNMAVLEVSLISGYSSDKSSFKRIRDVEGVGSVDTKNEDSVVIVHFESLAKNESKCIPVEAYITHEVTNFKPSSLVIYDNYGRKATEYYQY

SEQ ID NO: 30076 - DNA, 2255 bp, DROSOPHILA
taaagtgcctgacatttcctcgggtgactgtgcgctgactgctgaaggagtgtcggggcttaagtttcagaactccattagtctttacttccaacacgatactccagtggtcatcatactaattgacaaggacgattatatccctagagatatgatcaactatcgcgttttggttctaaatgaacaacttcgaccagatacttatgccgaagatgtggttatctgcctcttggatcccgaaagaaataaggttgataaggccaggaaaagcaaagtaactgacaaagtatctatccgggcaatttcacttgtccaagaaggcaactcgtggacagtgggagttgagtctcgaagatgcagatggtgccgaatacggagctcgatcgagtacattcacctttctttacgtaaagccctaagttctccagtataaaggagaacgagatgaagatagttcttagagccaagtaagttgggaagtagtatgtatggttttttaaataatttaagttgcaatcccctgaacggaagagaagattaagattaagttaaacacggaataataacagcaaaaggtgacgtggtcaaaggtctggacacctttcacatagatctgaccgacattgccaagcacaaagctccaatccagaccacgtatatatccacaataaaggcggcggtggaggatggtgatagtggggaaaaagtcactaagaccacatacgtttacttgcttgaaaatcgttatattgctttaaatccattccagcttatttacagcgaagaaatggaaaaaggggattgctatttcacgaaattgagaaaagttgacgaaaggaagcgttttgagttcgacggccagttgaataaatcgggactttacgtattccaggcaaacctctctgatttcccaaaaaacgataaatatttggcatactacgatatatcagtggagtataagggcgaagaacagcgaatccagcaaacaattgcacaatcgatgggcttcatgatagatgtgacaaatgcttatttcacaccgcggatagatgtgaatttcttccttcagatccatggacgcaagaatgacaaaggttttccaggtgctttggttgttggcgatgagttccgggtgaccctgaattccaacgcacccatcacgtacttcatatacaacatagttgcccgtagtcttatactccacaccgaaagagttgagttcgacgagcccaagacggtttacaacttcacctaggcatctcacagcgccccattttaatatctacgcctactatgtggacgatcagggtgtccttcagtacaccaagtcgcaatacaaagttctcatgagtctttctgctctaagcactggatatcctgaagaagaaatcaagctaagaatcagaacggaaaccaattcctatgtcggtatcctggcgatcgacgaaaggatttcagggagaataaagacagatgacataaaacatgacaatcttgattatcagttttacaccaataaactgtcaaatgctttgctatttaacaagcccccaacggaacttcccaggaatcatgatatcgatctgtcctatttggaagagcaattggaggatgtctacttgcacacctacgaagatattcccggatcgcgtcttggtctcgtcaccatgaccaacgcgcagatcaaggaaagaatttttcgatatttcgacatgggtaactatataaaaatactttattacaatagagtcctaatggaatttatttgatgcagacaaatacgtatctgcgcgttcgatatcggtcaaatatggaaaatctcccctacgatatcctatgaaaactactgaaacttggctgtttacggatataagaaaatcccagaaagaggtgacggatctggaaataaagcttcccgacaccttgggcacctggatagtcaagggtttctctttgcatccggaaaaaggattgggtatcttccaaagtaaccttacacaaatcagaacaatcaagccctactcgctcttcattcacttgccgtactcagtgaaactaggagaaacggtcagaattccggttttgatcgtcaacctgttttttacctgttttttttttaaagtggagttggcactggataatgaagcatatgggtttgaagattccttggaacatagtcagagacaactttttgaaatcgacgaatacggagccaaaagcgtgtttttttttaaattctgccccaagtacacagg

SEQ ID NO: 30077 - DNA, 255 bp, DROSOPHILA
atgggcttcatgatagatgtgacaaatgcttatttcacaccgcggatagatgtgaatttcttccttcagatccatggacgcaagaatgacaaaggttttccaggtgctttggttgttggcgatgagttccgggtgaccctgaattccaacgcacccatcacgtacttcatatacaacatagttgcccgtagtcttatactccacaccgaaagagttgagttcgacgagcccaagacggtttacaacttcacctag

SEQ ID NO: 30078 - protein, 84 aa, DROSOPHILA
MGFMIDVTNAYFTPRIDVNFFLQIHGRKNDKGFPGALVVGDEFRVTLNSNAPITYFIYNIVARSLILHTERVEFDEPKTVYNFT

SEQ ID NO: 30079 - DNA, 2651 bp, DROSOPHILA
aattaagccgacgaaattgtcttattaataaatacgaaaacataatcgacattgagattaaactgctcgttagtaggagcaaatatgggagatgatttatttgcgactaacattaagcaccattacatggctaataactttttgttaatagttagcttcagattgcaaatcaccttctatgtagatgctccaacggcggaagtgggcactggatctaacggttcgagttcggctttaatgatgcgctgaaggatgaggctggagtctggatagccttcctggggccataaaacggcaattactgtccagagccaaaggccaggtgctccatagtttgcgatgtacgcgagatttatgtgcgaaaccagtttgcaggtggctgccagccccttcctgtggccaagtcattgaacccgcgcccagaactgcacccagactagataactgaaagagatctagctgtgtctattgcaggcggggcaattagcactgccataaagattttggacttctttttgcggcaaattgaggttattgggttaactttttttggaatcatgcttacagagattgggttactaaacaaatttaaattggcgcaagatgagtgaaaataactcatcacaataataaaaaaagaagtttcttcttgaaactcaatgcgatatctgcgaacgacaatgggttagatgaggagccggagaagatcgaacacaaggcagatagttcctctcgaatggaacggacttcgaacgtggctgctgggaagcattagaaatgcgcggagctaaagattcccacagcaacctggcaatgcggaagtctttgggctgattggaggcggccattgaactgtgtccataaatcgggttttcttggtcttccagtctccagttgtggtccaggtgggctcgccttcacagcggccgagaacttggaatcattcaacgcacgccattggagcacatcggtcctgcggtcttttcgcttgggcaacatcatgtgcaagttcaccaaccggctgtttgtgttcgccctgctgcttgtggcacttggaagaattctggcccagcccgttggcggcaagactaggccagggaattcgaggaacgtgatcagcgacttgctggacgtcttatacgacgactattccgagaatggttttcagcgcgaggacattctatacgaccaacggcaaaagggtggggagaactatcagttcaaagtggatggggtcgtcatcggaatggcgcctcaaatgagctccagcttgctctactccatggcagagtcctacttgagtgagtactactgtaatagaatcgaattgccgacataacactaattccacgccaggtgaaatgttgttgcgccaatctacaccggatccagattcaactcagatgtacgagagggatcctgagaccgacacagactctggttccaccgagggcgtaactaagattcctgagctagcccagattaatttggaaagcagacaacatcaaattgtagcttctcaaactgccagccggttagtacagcactaatatgtaattctgcttagaaactaattaaaagatggtttttgctcagatctccaactcaactgctccaattgcttaagatgctcaaaagttctaaggcctaaaatgatatctttagatactatgacaagaaattagtcctaagttcttggaaaatacatagcaaataaaatcattcttcgaatttaaatttccgttgatcccattggtgctgttccactgaacaatatttaaaaagttcaaaatcactgtacagtacttggtattttaaacatccatcacttttccattcaaaatatataaatattgaaaagcatgacatacgatgtttttttttttttattttaacttagtgtgtcaactatctttataaaaaaaattaaaattttctgggaatccaatagaaagctcagtctggagatgaatcctcgaaagcggagctaatttgcaagcaagactcggcatccaatagtggatatctgcagatcgtccgatttgagaactccgaaatcatatgcttttcattcctattttctttagatcccggacaattgatttctgttttttttctgttttgattttcatcatcgattgattaatttccatgaggacattgttttcaaagcttttaagaccgcgaataaatccagtctcattcagtaaagattcgtgaaggcaatttcgtgtgatatcaagatatatatgtatattcggaaataatgttcacgtgaacctcgcgatttggaagttcaatcctttgaaggattgaatgattaggacgccatcctttatatgttttagatataaatatcacccttcaccttctccagtttgatacctatcaatattactagggaatgcattacgacggaattcaaaacatcttgaaaaacctccaattaccccagttcagattgaccgttttattgcctcccatttttatagttccgaagaaaattacgaacgcagaggcatcattttagattacctagattgccaagtttcataaaacaaaaccatctttagattaggttttcaatatttcgggtttgctgatttcgatatcgataagaaactgacgtatgtatgtgtgaagttttaatg

SEQ ID NO: 30080 - DNA, 534 bp, DROSOPHILA
atgtgcaagttcaccaaccggctgtttgtgttcgccctgctgcttgtggcacttggaagaattctggcccagcccgttggcggcaagactaggccagggaattcgaggaacgtgatcagcgacttgctggacgtcttatacgacgactattccgagaatggttttcagcgcgaggacattctatacgaccaacggcaaaagggtggggagaactatcagttcaaagtggatggggtcgtcatcggaatggcgcctcaaatgagctccagcttgctctactccatggcagagtcctacttgagtgaaatgttgttgcgccaatctacaccggatccagattcaactcagatgtacgagagggatcctgagaccgacacagactctggttccaccgagggcgtaactaagattcctgagctagcccagattaatttggaaagcagacaacatcaaattgtagcttctcaaactgccagccgatctccaactcaactgctccaattgcttaagatgctcaaaagttctaaggcctaa

SEQ ID NO: 30081 - protein, 177 aa, DROSOPHILA
MCKFTNRLFVFALLLVALGRILAQPVGGKTRPGNSRNVISDLLDVLYDDYSENGFQREDILYDQRQKGGENYQFKVDGVVIGMAPQMSSSLLYSMAESYLSEMLLRQSTPDPDSTQMYERDPETDTDSGSTEGVTKIPELAQINLESRQHQIVASQTASRSPTQLLQLLKMLKSSKA

SEQ ID NO: 30082 - DNA, 3181 bp, DROSOPHILA
tgcctgcctacagataaatttgtagaccgtaatgacagctgaaagtttcaaatcagcttaaatgctaaaaaaacatttgggatggggaatttattctacatcttagtatatgatcactgtgccattaggagttagcttcaaggatacgtaggccaaagttcgtacaaggtatctatgtatatgaaagtaagcatccttaagatagttcattattaccgtactgatggtcgaagtttgtagatcatttttacgagtacatataagtacatatagtgctgcacctatgtttggcgaaggcataaatcaattgaatagaatgctcatgatcggtttgatatcgtttgctcaggtgacgggttctggggatgcgtacgtgacatggttgttagcccagtcaatgggcgaccaaacgcttcctcattagctaattggcgtgaaaatcagccaccagacccactgtgccgggcgatgggaaccgcgttgacaggcccacctccgcccggccccgcccgcctaacggctggccaatatcaataagtcgagatgtggacggagaaggagatggctaccaagtcacgccgtcgaaatgggcacggccgaacaaaaagagacggtcagaaagtaagtggcatgaataaaagcaaaaaccagaacgagaatcgggcagagagagaagaaagccgcagtggcagaggagctgcactggaagaaaaaatgcataaatgaaataataactccgggacttattattttgtaagatgaaaaggcaacttttaaaaaaactttgaaaaattgacttcgcaatactttttattccatttaaaaattatttgttaaagttagtttgccaaatccttcgatggaaaacaccgattcaagaatctatacgctatttggttcagtgcagcgccgacggcagcgccagaatatgaaagttgcgcctgcgctgacatgaaaactctcccaccggactgggaatcagttgcgaggcagaagcgcgcgagtcaagaacgccgagcggaccaatttgagatctactaagtgaagatggcctggaagactttcacgcttctacccctgctattggcagcaggtctagctaatcccttgagctccacaacggagccatctaccccaccagctgccaatcctgacgtgccgcagatcataaaggaggagcacttcccggccatggccccggcccaggctctggagtccagcggatccagtgggcaacccataatgctgcaacctcctctcgaatcgcccagcgcagatgaggacgcactgcgtcgccgcacaatcacgtatgatcagcgccaggaggggcagtacaacattcgtgctgatctggagaacttcatgatcctcctgattccacctggaccgcaggagggcatcagcctgctggagctactgggtcgcggaaacaccaagggcagtggatcgctcaagcgcaaacatcccgcgaggagcaactcactgaagtccttctaccagaaaagtcagctgcagaagttgcagcagcaacagaatcagcgccaatcctcgccagcggcgcatctgccggagttcattgagggtcggtcgccctatcacgtggacatctcagccagcgatccggagcaggctcaacgcctgcagcgccagcaggtggacgtgctgcctccgcaactgatacccatgccgcagctaattaagcccttccacttggaggcggaaccggagttgattcaagctctgccccccgtctccgccagcagcagtgccggttctaatctcctcgagagcttcaatcatcccggatcgcagtacttccgcagctcccgctccttgagaggcgatagctatctggataccaatcgcctgaccggcggcgattatgccagtccgcgctccattagtgcccccatttaccgcagcgatcttggcagaggagccaatggcctttacccccccatcgacgcacccacctacttctcggaccaatcgcgctcctggcaactggacgaggaacccactcgggcacaagcggtggaaccggagatcgttagcttcgatctgttggccgacgacgacctggccgagtcccgaaccctcctccgggacggactggcgcgctgcgctcgcggagaacgtcgtgatagctacggcgaatgtcgccagatcgagggctattaagcggaggagtgagaacgccagactgccagcttaaatgttagtttcatacattgcacactctagaattaagccgacgaaattgtcttattaataaatacgaaaacataatcgacattgagattaaactgctcgttagtaggagcaaatatgggagatgatttatttgcgactaacattaagcaccattacatggctaataactttttgttaatagttagcttcagattgcaaatcaccttctatgtagatgctccaacggcggaagtgggcactggatctaacggttcgagttcggctttaatgatgcgctgaaggatgaggctggagtctggatagccttcctggggccataaaacggcaattactgtccagagccaaaggccaggtgctccatagtttgcgatgtacgcgagatttatgtgcgaaaccagtttgcaggtggctgccagccccttcctgtggccaagtcattgaacccgcgcccagaactgcacccagactagataactgaaagagatctagctgtgtctattgcaggcggggcaattagcactgccataaagattttggacttctttttgcggcaaattgaggttattgggttaactttttttggaatcatgcttacagagattgggttactaaacaaatttaaattggcgcaagatgagtgaaaataactcatcacaataataaaaaaagaagtttcttcttgaaactcaatgcgatatctgcgaacgacaatgggttagatgaggagccggagaagatcgaacacaaggcagatagttcctctcgaatggaacggacttcgaacgtggctgctgggaagcattagaaatgcgcggagctaaagattcccacagcaacctggcaatgcggaagtctttgggctgattggaggcggccattgaactgtgtccataaatcgggttttcttggtcttccagtctccagttgtggtccaggtgggctcgccttcacagcggccgagaacttg

SEQ ID NO: 30083 - DNA, 1181 bp, DROSOPHILA
cgagtcaagaacgccgagcggaccaatttgagatctactaagtgaagatggcctggaagactttcacgcttctacccctgctattggcagcaggtctagctaatcccttgagctccacaacggagccatctaccccaccagctgccaatcctgacgtgccgcagatcataaaggaggagcacttcccggccatggccccggcccaggctctggagtccagcggatccagtgggcaacccataatgctgcaacctcctctcgaatcgcccagcgcagatgaggacgcactgcgtcgccgcacaatcacgtatgatcagcgccaggaggggcagtacaacattcgtgctgatctggagaacttcatgatcctcctgattccacctggaccgcaggagggcatcagcctgctggagctactgggtcgcggaaacaccaagggcagtggatcgctcaagcgcaaacatcccgcgaggagcaactcactgaagtccttctaccagaaaagtcagctgcagaagttgcagcagcaacagaatcagcgccaatcctcgccagcggcgcatctgccggagttcattgagggtcggtcgccctatcacgtggacatctcagccagcgatccggagcaggctcaacgcctgcagcgccagcaggtggacgtgctgcctccgcaactgatacccatgccgcagctaattaagcccttccacttggaggcggaaccggagttgattcaagctctgccccccgtctccgccagcagcagtgccggttctaatctcctcgagagcttcaatcatcccggatcgcagtacttccgcagctcccgctccttgagaggcgatagctatctggataccaatcgcctgaccggcggcgattatgccagtccgcgctccattagtgcccccatttaccgcagcgatcttggcagaggagccaatggcctttacccccccatcgacgcacccacctacttctcggaccaatcgcgctcctggcaactggacgaggaacccactcgggcacaagcggtggaaccggagatcgttagcttcgatctgttggccgacgacgacctggccgagtcccgaaccctcctccgggacggactggcgcgctgcgctcgcggagaacgtcgtgatagctacggcgaatgtcgccagatcgagggctattaa

SEQ ID NO: 30084 - protein, 377 aa, DROSOPHILA
MAWKTFTLLPLLLAAGLANPLSSTTEPSTPPAANPDVPQIIKEEHFPAMAPAQALESSGSSGQPIMLQPPLESPSADEDALRRRTITYDQRQEGQYNIRADLENFMILLIPPGPQEGISLLELLGRGNTKGSGSLKRKHPARSNSLKSFYQKSQLQKLQQQQNQRQSSPAAHLPEFIEGRSPYHVDISASDPEQAQRLQRQQVDVLPPQLIPMPQLIKPFHLEAEPELIQALPPVSASSSAGSNLLESFNHPGSQYFRSSRSLRGDSYLDTNRLTGGDYASPRSISAPIYRSDLGRGANGLYPPIDAPTYFSDQSRSWQLDEEPTRAQAVEPEIVSFDLLADDDLAESRTLLRDGLARCARGERRDSYGECRQIEGY

SEQ ID NO: 30085 - DNA, 3008 bp, DROSOPHILA
aaaaaaagcaaaggaaatacatttttgattatattcctagcaagtaattaataaataacttttgagaaaaaatgctatagtttcatggaaatcatatgcatcaacttttagcatcgtatgcgaaaatatacattcaatttccaaaaacttttctcaaaatctattcaaaatatacgaagaaatttttgttattttgtatgttttgtaggtaaataaattcaccttactattaacctatgctattgtttgttgatagaagcaaattttaaaaatattttaagcttttttaaaagttaatagtaaaggatccaagtttgtttaaatttgcaaaaggcatcttggccaatttttgaataggcatgataatatgaaggataattaattatactgctgttttcgaaataggaaacaaaatatagacttattaaacttttacaaaattactttagttcgctttattactttatttcttgtaaacgatagacagtatgcccgaaaacatttgttacgttatcattaccttcgaagacctattttctgaatgaatttgaacaagaagcagctggggcacgtttttcagtggtgttattactaccgtagcacacaaaaaaccgggtcaatctgttctgtttagaaacaaagaagaattttgaaacgtgacactacacggattttccctaactttaccaagatgtcgatgaaccaataactatttagtacgactacatgcaacataattcgctttagttctttctttttacaagatgataaaacagttgttcgcgactatcttcttagtagtagggaaattctcgtaaacacactattacagattggagcagcatttgcacctgcacccgctgaagagaagtgggtggtgaccgaactgatagaacttaacccagtctaagacacgttttggaccttaagttgggctacttaagttgcggttcggatcgaaaagagacactcagcggggagcggccatcagagaaacaccatgagagtgcgactgactttgctaacgatatgcatttacctatgcgcggctgcagctgaggatctggactccatccatgagatccgcagtgaggtggaggagctgatcaaaggtacggaggagctaaaccatgggctgcagaaagtgaaggacgtgcagaagggcattgaagagaagttcaagcatcagcgcgacgagatcgaactcattgctggattggaggttgccatagccaagctggaatcgaacgttcaaagcagcttccaagccacggcctctggagtgggaaatttgacagccattgttaacgcaatccagggtcagaatgaaaactctattaggaatcttaccaaagtggagctagaaatcaggaaagccctggaacaagtggctgccaatcagaacaaatacgagcagaacctaaatgaagtggcctcatccgtcaactcgcatctgtcggagattcagcagctgctatcacaggccgtcataggggaactcatcggcttggacaataaagcgaaggtcctccaggagcagcagcgcaacatcgtgggtcaagtgggatatctgggcgaacttaaggctctggcagatcgtgccaatcgcaaagtcaatcaattggagtggggtctggtcattctcaaccgcactcagtccgagagcctcaacagcatcgagcacactgtccatggagtgcaggtggccacctcacaggtcgatcataaactggctgccctactgaacaatcagaagaacattgaaaggacgctggatggctgcaagcacaaaaatccgtcacaccagaagccccacgagatctggactcacccggaacacgcaccaatttacaagtaagtttgtatgccctacttctgggtgcacactaaaaccactcttttcattttaaggccaaaaccagagggcaatcaaggatacgagaacgtctatgcatcccaagaagaggctgaatacctatacaaactttggtatggaaagggccagtagcattaatacgaaaactgaagatagatgttttatgccatattcagaaattgcttgatttcctatatcaaatcccagcatgtcgattctatctatcttatataattgtatattaaaccgttctgtaacacaatgtaataaacaagagtaaatggaggaaatcgaactttataagttgtatattgctaaaaagtgttatgtccaactttatatatcaattgttggaaaacttataaaactagataaatgcacctgacatagaggaaaccggctctacctctataattttgttggatccaatggatgaacctgaccatcatcccgctcaaacttaattatcagctgcgactgatgctggttccagtgctccgatcgatgtaatttagcattcgtcttcgaacggaattcctcgactgacaaatcgatctcaattttttcgttacttgcatccggatcggcggggtaagcatcatctcctggcaagagatgcactaatccatttgtacacttgtgcactacaggatgaatcagctgaatgcctttgacctcacgctctgctgcaaactgacgcaggttatctaaagaggagaagtttaggcagcgcgaaagttcatagaattgtggaggcggcagccagagttcttttcttaggctcgcttgaaggtagtccaatggggaacgccactacaataatataaatgatagtacattaaatgcaacttaaaggtttcgcgtatcgctcttgtgccgtataatatcccacccacctaccgcagaatccttgacctcattaggttcgatgtgaaccctgggttcctgttccagggcagtcataaagaaggccgtctcgaagcgcttcttaaacgtggacggcgtgcgccagacagaccactcgtgaagtgaccagacatctggaagcacatccagctgcttgcagagctccaggaactggctggcattgttgtggacgatgtgctgccagtgggcgcggtcaaactggtca

SEQ ID NO: 30086 - DNA, 855 bp, DROSOPHILA
atgagagtgcgactgactttgctaacgatatgcatttacctatgcgcggctgcagctgaggatctggactccatccatgagatccgcagtgaggtggaggagctgatcaaaggtacggaggagctaaaccatgggctgcagaaagtgaaggacgtgcagaagggcattgaagagaagttcaagcatcagcgcgacgagatcgaactcattgctggattggaggttgccatagccaagctggaatcgaacgttcaaagcagcttccaagccacggcctctggagtgggaaatttgacagccattgttaacgcaatccagggtcagaatgaaaactctattaggaatcttaccaaagtggagctagaaatcaggaaagccctggaacaagtggctgccaatcagaacaaatacgagcagaacctaaatgaagtggcctcatccgtcaactcgcatctgtcggagattcagcagctgctatcacaggccgtcataggggaactcatcggcttggacaataaagcgaaggtcctccaggagcagcagcgcaacatcgtgggtcaatccgagagcctcaacagcatcgagcacactgtccatggagtgcaggtggccacctcacaggtcgatcataaactggctgccctactgaacaatcagaagaacattgaaaggacgctggatggctgcaagcacaaaaatccgtcacaccagaagccccacgagatctggactcacccggaacacgcaccaatttacaagccaaaaccagagggcaatcaaggatacgagaacgtctatgcatcccaagaagaggctgaatacctatacaaactttggtatggaaagggccagtag

SEQ ID NO: 30087 - protein, 284 aa, DROSOPHILA
MRVRLTLLTICIYLCAAAAEDLDSIHEIRSEVEELIKGTEELNHGLQKVKDVQKGIEEKFKHQRDEIELIAGLEVAIAKLESNVQSSFQATASGVGNLTAIVNAIQGQNENSIRNLTKVELEIRKALEQVAANQNKYEQNLNEVASSVNSHLSEIQQLLSQAVIGELIGLDNKAKVLQEQQRNIVGQSESLNSIEHTVHGVQVATSQVDHKLAALLNNQKNIERTLDGCKHKNPSHQKPHEIWTHPEHAPIYKPKPEGNQGYENVYASQEEAEYLYKLWYGKGQ

SEQ ID NO: 30088 - DNA, 3424 bp, DROSOPHILA
agagttagaaactcagccggcttgttgtgcacccttcgctgccacgactccaggtctggaacagcctgagcgcaagttaccgcaccaaaatccagttgactccgactccggcaaagcaacagacccacctcttcaaagcattccctcacggcggttagtcgcagcgtaatctccctaaaaagacaaaggtcatagattaaactcccaatgtgacagagtttagcgcaacctttggactcaccgagcccaaatgcgggaacgcttaaagaaccgatcgtagcagccagtgccctggggcgccagaatggcaggacgatcttcgcggatgagaaccaggcggcgtagtgcctcttgtggaacaccaaactcctcgaggtagtgcagccaggcgacgctttcatcggccccagagtccaagaggccaccgggaaatacagtctgattgagcgcaatcgccgtggcatcactgcgttttagcataagcacctgaaaggtcaggattatggttatccgcttttggaaatggcctcttcactttccttgtaatctttgttattgccatcatctctggacaccaggattacactggccgaggtgcgccacttggtaggagatgcaggttggctcatatctgcttttatttagccaaatgagtagcaaaactgtttagttccatccacaaagaaaacgaaatcaaaaggttgttttgttccctccaatcagctgattggtcgataggcacgataacgactcctgtgcaaaaaaaaatcgatcgatagccgcctaatcaaagcgctgaatatttgaagtttgaattcgtgcgaaattcaaactttacctttttggtcagattaccatgcagaagcgagcacgaagagcaaaaaacccaaatagattagttccaatccacacgtgttcgcaaacatatttaagctctgcccttggacaacaaaagacacttgcaattggtgtttccagtcgaaaacaacttgcagttgaaatgaaagtactgatcacgttcttctttctgggcgcctgcctctgcggcatccaagcggatgagagcatcgctgacctcttgaaggacaatgcgaagggcgtacaggcagccaatgtgctcctgacccggattgcccaagtaagcgagcagactcaggtcggtttggcagagcaaaaggaggcactgaaggccctgacgctcgtggagaagctgctagccaagttgactgtcgttctggaggttggctcccacaatctggtggccacccttgagaacctctctaggcagggcgaggaatacggcaatcgaacggagtcagagctcctggaattggtgcgtctgcaggagggcaccaaggagatactcaatgtcctggaggccaagctggatgcctatcagaggcacgtgctccatagttcccgcaacattgacaacagcatcgacggactggccaaacttattactaggacggtgttgccacaattgaatgggctaaagtgtaccttcgatagcttggagacgtcccaaatcaacgtggaggtggagctgaagaacttggccggagtcaaggagctcagcgagaactccaacttcaagctgaacgtgctggagcatcaattgaagcagctgaatcgcactcaggagcagcgcttggacatcctaatcgatgcagtcaagcatttgcagccccacagttcctggaaagtggaggctgttctccgcgaactgatcatctcgcagaaacgcatcgaactgggtctggaagagtgcagccgacaacagccctatccgcaatatggccatcacgacgagtcctatcttcccacctacggagctgaggtcccagagccgcagcatgctcatcctaagcccaagcaagtggatctggaacaggtgtggagcatcaaggaggagcccaagcacggtaagtggtccttattgccaccagattaggatcacaaattaatggcttgtcgttcataggagagcactctggaaaccacaaagctaccgcctatgcccagtcccccgagccaaagaagaactatcagagctccagcgccgtgtcctggcggcagacggtgccgtgggagtacggatccccataccagtccgctccagttcaccaccatcagccatggaacccagctccggcccacgttcccacctccgttaccaagcccaagccgtgccccaagaaagagcaccctactccggcatcctatgttcctttgccacatgaccagcctgaatcctacaagcttcctgtggattacagtcccaaacctaaccacgagcaacctcataagccccaccacgagccacagtcttacaatgaggagatctacaagccacagcccatccagccaggagaatccttcaggatttggtatggagacagttccctcccccaaggatactaaaggaagatttaactgggactaccactgttactgaaactgatacaacttttcaaagcatttaacaaactctttttttttaattcagattcattactttgtacaatttttatgttttataaataaataaaaaaaaagcaaaggaaatacatttttgattatattcctagcaagtaattaataaataacttttgagaaaaaatgctatagtttcatggaaatcatatgcatcaacttttagcatcgtatgcgaaaatatacattcaatttccaaaaacttttctcaaaatctattcaaaatatacgaagaaatttttgttattttgtatgttttgtaggtaaataaattcaccttactattaacctatgctattgtttgttgatagaagcaaattttaaaaatattttaagcttttttaaaagttaatagtaaaggatccaagtttgtttaaatttgcaaaaggcatcttggccaatttttgaataggcatgataatatgaaggataattaattatactgctgttttcgaaataggaaacaaaatatagacttattaaacttttacaaaattactttagttcgctttattactttatttcttgtaaacgatagacagtatgcccgaaaacatttgttacgttatcattaccttcgaagacctattttctgaatgaatttgaacaagaagcagctggggcacgtttttcagtggtgttattactaccgtagcacacaaaaaaccgggtcaatctgttctgtttagaaacaaagaagaattttgaaacgtgacactacacggattttccctaactttaccaagatgtcgatgaaccaataactatttagtacgactacatgcaacataattcgctttagttctttctttttacaagatgataaaacagttgttcgcgactatcttcttagtagtagggaaattctcgtaaacacactattacagattggagcagcatttgcacctgcacccgctgaagagaagtg

SEQ ID NO: 30089 - DNA, 1365 bp, DROSOPHILA
atgaaagtactgatcacgttcttctttctgggcgcctgcctctgcggcatccaagcggatgagagcatcgctgacctcttgaaggacaatgcgaagggcgtacaggcagccaatgtgctcctgacccggattgcccaagtaagcgagcagactcaggtcggtttggcagagcaaaaggaggcactgaaggccctgacgctcgtggagaagctgctagccaagttgactgtcgttctggaggttggctcccacaatctggtggccacccttgagaacctctctaggcagggcgaggaatacggcaatcgaacggagtcagagctcctggaattggtgcgtctgcaggagggcaccaaggagatactcaatgtcctggaggccaagctggatgcctatcagaggcacgtgctccatagttcccgcaacattgacaacagcatcgacggactggccaaacttattactaggacggtgttgccacaattgaatgggctaaagtgtaccttcgatagcttggagacgtcccaaatcaacgtggaggtggagctgaagaacttggccggagtcaaggagctcagcgagaactccaacttcaagctgaacgtgctggagcatcaattgaagcagctgaatcgcactcaggagcagcgcttggacatcctaatcgatgcagtcaagcatttgcagccccacagttcctggaaagtggaggctgttctccgcgaactgatcatctcgcagaaacgcatcgaactgggtctggaagagtgcagccgacaacagccctatccgcaatatggccatcacgacgagtcctatcttcccacctacggagctgaggtcccagagccgcagcatgctcatcctaagcccaagcaagtggatctggaacaggtgtggagcatcaaggaggagcccaagcacggagagcactctggaaaccacaaagctaccgcctatgcccagtcccccgagccaaagaagaactatcagagctccagcgccgtgtcctggcggcagacggtgccgtgggagtacggatccccataccagtccgctccagttcaccaccatcagccatggaacccagctccggcccacgttcccacctccgttaccaagcccaagccgtgccccaagaaagagcaccctactccggcatcctatgttcctttgccacatgaccagcctgaatcctacaagcttcctgtggattacagtcccaaacctaaccacgagcaacctcataagccccaccacgagccacagtcttacaatgaggagatctacaagccacagcccatccagccaggagaatccttcaggatttggtatggagacagttccctcccccaaggatactaa

SEQ ID NO: 30090 - protein, 454 aa, DROSOPHILA
MKVLITFFFLGACLCGIQADESIADLLKDNAKGVQAANVLLTRIAQVSEQTQVGLAEQKEALKALTLVEKLLAKLTVVLEVGSHNLVATLENLSRQGEEYGNRTESELLELVRLQEGTKEILNVLEAKLDAYQRHVLHSSRNIDNSIDGLAKLITRTVLPQLNGLKCTFDSLETSQINVEVELKNLAGVKELSENSNFKLNVLEHQLKQLNRTQEQRLDILIDAVKHLQPHSSWKVEAVLRELIISQKRIELGLEECSRQQPYPQYGHHDESYLPTYGAEVPEPQHAHPKPKQVDLEQVWSIKEEPKHGEHSGNHKATAYAQSPEPKKNYQSSSAVSWRQTVPWEYGSPYQSAPVHHHQPWNPAPAHVPTSVTKPKPCPKKEHPTPASYVPLPHDQPESYKLPVDYSPKPNHEQPHKPHHEPQSYNEEIYKPQPIQPGESFRIWYGDSSLPQGY

SEQ ID NO: 30091 - DNA, 2723 bp, DROSOPHILA
catgccctcgctgtccaatatgaccctcaaggcgctggaggtcctgggaaacagtgataaggggtttctgctcgtggtggaagccggtctaatcgaccaagcccatcacaggggaaacgctcgaaaggcgctaagtgaggtgctcgaactgaacgcagccgttgagtctacactttccttcctcaagtcatcggatcgcctggacgaaaccttggtcattgtgaccgccgatcactcgcacagcctgaccatcaatgggcatcccgatcggggatccagtatactcggcttggcgggaaactcgaagacagaagggacgccgtacaccacgttaacctatggcaccagctatcagggattccaggtggatccgcaaacgcagagccgcaaggatccaactgctgacgatattaccgcctgggagtacacccagcaggcagcaatcaacacggacgagaatctgcacggtggctcggatgtaacgattcacgcggatggtgccatgtcctacttgttccacggcgtccacgagcagagctatgtggcgcacgccatatcgtacgccctgaggatcggaagattccgggatagctccatcgcggaaactctggccgagctgacgcccatataagcgtagaaacaaaagcgtagccaacaaaacactttgatatatgtagttataatgaaaactgttcttgccaagcttacaaattagatataagtcaaagattgggtcaccgaaataggacatgagttaactgaaaccattgaaggattttaccgaatgagattgttgaataaacattaatttgaagagaaaacattcaacatttactttgccatctttgttctttatctttattacaatcccattatgttgacaaccaataatattattaccctagaagctaactaaatctgatgtttaaggctagtgcctgcacaaataaatgtgattactactattcattaaaggttgcggttttttttttagtgcaaaatggacttactgcaactgaacgacgattgtttggatattatatttggttatttgagtttggaggacctagcgccgctctacaatgaaattccctgttttggaggcgccatcgagagacagctgcatcgattcagggacttgaggttcagcatgagagagccgcctgctctccacgaagatttgctcattaagttgggtggccaactgaacagcctgcacatcaacgtgggctactccaccaaggaccaggacgtactccggtacctgaggccactgtgccaaggggccgccgagagccgcaggattcgggctctgaagttggaccatgccaagtggtcggcggagatagtgggcactgtgggccaggtggttccatcgctgctatttctggacatgcgtcactgcgatgtgcgagactaccagatagcacagctcttgcaatcggcagataagctaaaggcactcgctctactccacattgacaatcagacgggtgattcctatctgcagccgcaactactcaacagattgccatcgctgaagctcattcacctaaccaccttgggttccatgggctttaaccccgaaaacctgacacggctgtgcccgaacctgagcttcctcgtcagtgacctaatcaagggagattttaagatatatggcccgcctgcctacatacagaactactacaagtgctataatgagtacttcaagaccgcctgagtacatgtggcacagtttgcagagatctcagtggaattggattctatatttgatatgaactcactctttttgtaaatatttttgtcttttactatgcaagagattgcaattgcatttaaaatacacactcaaacaaatgtacaaccgaaaagctcttcttttcgacagaattcaatttctcgtttgcactaatttgagttaataaaagtagataattgaatacaatttgacttaagttttaaatttccgttagagagaatactgcttagtttaaactgcttgctttcgcacagataagctgggcaacatactttgcttaatgcaagcataccaccacataaatatgttagcaggataacttaataacacagcgctgttcaatttgttagcatttttaatttaatttaagcaaataaatttaccttaatacgatatttgacaattggtttgcaagtgtaaaggcggtatttttcgtatcgctttaagtctggtattttacacatcgcgcactgcgatagtatcgctgacaaatattttgtgccggcatgcaattcagaaataaaaaactggtgaaatagctcataaatataaatagcttaagaagcgattggctggcaaagagaacgaccggagagtcaggatggtggtgcgtccgtacaacgatgagctccggtacctggagaaagtgagcgaccactgctggcgcatcaagaagggcttccagccaaatatgaatgtggaggggtgtttctatgtgaacagccggctggagcgcctgatgctggaggagctgaagaactcctgtcgcccgggcgcagtgggtggcttcctgcctggcgtcaagcagatagccaatgtggccgcgttgccgggcatcgtgggcaggtccattggactgcccgacattcattccggctacggatttgccatcgggaacatggctgctttcgacatgaacgatccgctgtccgttgtaagtcccggcggcgtgggtttcgac

SEQ ID NO: 30092 - DNA, 723 bp, DROSOPHILA
atggacttactgcaactgaacgacgattgtttggatattatatttggttatttgagtttggaggacctagcgccgctctacaatgaaattccctgttttggaggcgccatcgagagacagctgcatcgattcagggacttgaggttcagcatgagagagccgcctgctctccacgaagatttgctcattaagttgggtggccaactgaacagcctgcacatcaacgtgggctactccaccaaggaccaggacgtactccggtacctgaggccactgtgccaaggggccgccgagagccgcaggattcgggctctgaagttggaccatgccaagtggtcggcggagatagtgggcactgtgggccaggtggttccatcgctgctatttctggacatgcgtcactgcgatgtgcgagactaccagatagcacagctcttgcaatcggcagataagctaaaggcactcgctctactccacattgacaatcagacgggtgattcctatctgcagccgcaactactcaacagattgccatcgctgaagctcattcacctaaccaccttgggttccatgggctttaaccccgaaaacctgacacggctgtgcccgaacctgagcttcctcgtcagtgacctaatcaagggagattttaagatatatggcccgcctgcctacatacagaactactacaagtgctataatgagtacttcaagaccgcctga

SEQ ID NO: 30093 - protein, 240 aa, DROSOPHILA
MDLLQLNDDCLDIIFGYLSLEDLAPLYNEIPCFGGAIERQLHRFRDLRFSMREPPALHEDLLIKLGGQLNSLHINVGYSTKDQDVLRYLRPLCQGAAESRRIRALKLDHAKWSAEIVGTVGQVVPSLLFLDMRHCDVRDYQIAQLLQSADKLKALALLHIDNQTGDSYLQPQLLNRLPSLKLIHLTTLGSMGFNPENLTRLCPNLSFLVSDLIKGDFKIYGPPAYIQNYYKCYNEYFKTA

SEQ ID NO: 30094 - DNA, 4343 bp, DROSOPHILA
acgagaaaatgcttcattagtgcaccaccgaacgatgggcttaagggaggaaagcccgtgcacataccaatagcgaagaaagtcccccaaaatagtaatcgtatttgcccaatagacctgcgaatacaacatacaacgccatttattctcaaagccaacttgaacttgagacgcgatgaacttcgcattcggtttttcaagcggctaatgacgataatcgctcggtggctgtcaaaattgccgcagaatataattgccagctgcccatagagtagcgctcgacgtcccatgattaacgatgagagcattatgaaaaagcccaaaacacaaaacaaaacacagaagcgagaacaaaaaacgccagctggatacaatggaatctccaagatacagcggaaactacatcgaaacaatcacaaaagatgctagccaaccgattagcttcaattactggaaacggggtacggggttttgatctacgcataacgctcagatgcatcgcgccccacccacgaatgcattcggaacaactcacttcggccagtcgagatcttatccgcgaagctctaacaagccgtcaacaacaaaagcacactgcgagaaaatatccttgaaacggtatcatttctgtgtttagtttatgtcaagaagctcaacaatccaaaatcctttttggtcagaaattcaaaccttgttgttatgcccaaagttaattatactcccaatgggatcttcaaatattaatcaatcaaagtaattatttgtcagcttctattttgttatcataggaagccattaaatcaattaattagaaattagttacgcatttttatttcccgtgcagcagcatcagcgttgtctaaaacttaagtagagttaaaaacaaaagcgacttttttgtgctttgccagctttgccagttgattttaatgaatctccgttgatatttgaaatcagcttgcttgttttgcctcgcttagttgtttgtcggcggttttcaagtgcgcacacaaaacgcggctccattctcgagatcgattttcgagaaactcccagggaaatacccattagaatactcgacaatgagctctttcaccgcccacctgttgatattgctcctcggtggtctgctgctaactcatcactgcgtccaaggttggtcaaagtaatgggtcagcgggtcaatcaatcaatcacgcggcgggcgaagaagttcctccatgagtcagctggaattttcgggtatagggaattccagtggtggggaaactacgaaatagacaatcctatcagatttgtgagggtgtacgaatacaagcagcttttaaaagcaattagctgaaagatgcttacacttaaaatggcttacttaaaaccagtgtacattcatttaattagaatgcaatcccaactaattcgctttgcaaacataagagaccatccatttgaacttcataattcaccctaagaattcgccaatccccgatgggtttaccccagattgcagttgaaagtactcgattcccatcgaagacttgctccctttggtctcacctggaagcctaattggtactaacccagcgaaatccgatgctgattgtgactaatcccataattgtggcgctgcccgtgcatattcaagtgcaacctcaaatcggtcagcggcagctcagattgcagattagttcagtcggttgaatcggtgcggtgcatatccgtaaataagtcagcgtgtgctaattgcatcacttgtatgccacggacccgcaacacgctccaattccttcgattaaagtccggaggaggtggtggtcgatccatggtccgtccatccgtggtcgtggtgtttgcataactttaattaaatttctgctaaatctcatttccatgctaaaccgaaaacaaacaacgacgctggcgtcggatggcaaccaggtcaggcgagtaaagtgtcctccaagttggatttcgatgagagcgatggcagcaacaatcagaatcagacgggctcacccggacaaccgggacaggcgggcggaactggcaatgggagctacgacccgggaacgggacgaagcctgagtggtggaggaggaaatgcaggcgggggcagcagcggaacttccagcgggggaaatcgccccaagatccacggagtacgggtcaccgtcgatacgggcgatggacagcagcaaacgaaaggtaattaaatccactcgcacccactccccttggcgtcccaattaaaaaactaaaaaacaaatatagagtccaaggagagcgtggaaattacggatttgggcaagcacaagaagcgcgtgggcatccacacggacatcacgttcgaaatcacctccgattcggacgggaacgagaccagttccgctcaacagcagggcgacaagggtgagtggccatcgaaatctgctaacaaactcactttccctcttaaaccaatccaaagggcacagatatacttggatatataccttatcttaattaaaaagaagtacaactactgacaaagcaaaacaaccctatgaaacatgactatcctatatgaatatatagcttattattccattctacttttacataaccgccaacagaggacgccagtgtgccaattttcaagggtcgtggtggcagcgaatcaaagcacaagacccgcaagccatatgatcccaagtcgcagtggaatcccaacttctccggcgagcagcatggctaccagggcgccaatcgaggtggctaccagggctccaatcgcggcgactactatccgcagtactatcacggcaacgtctatgccggcggaagttccgatgcaggcagcatttacaggaacggcgagacctggacgcactacgtcccggtttggaccacggagcgagtgccgcaggagcagggacagatctatcggcggcccagctggaagccctgctactgcatgtcatccacggagttcagacgccgtcgggatagcaaagccagaagagagcagacggatcagcacaacaagggtgtcatcaacagtggggttgtccaggtggtggatggcaagttggagcggcctttctcctgaggaaaagccctccgctttaaccagttttcacaactttgtaaagttaggtaatgcagaaatatatttaaaatagaactttagtttagtctctttagaaatattattttacttatttaaaatattggttggcccaatattttgaaccctttttcgctgacaataacatattcctaattgccatcaaactgttagaaaagaattgtatttaggtaaagaaggcaaaaaggaaattttaataaatttcatatttgtttttgaaaaaatataagtttgggatgactaatcgaattgtggtaagatcacgtggactaccttatcactgctccttagatttttagtagttgtatgacgaaattataaaattcgcaagttagtttcagaatgtattcttatctttaaaaatgtgtaaaatccgtatgaagtcatacattttttcattttttaggtgtaatggcctaacaaaagatttcatttgacatttaaaaaatttattttacgttcacattattttccaacaacagtgcgagctgagtatttcactctctaagaacaggacaggcgtaaaaagttatgggtactgattgatgtagacgctttacgagtgaacactgtgggtgccaatcttgccgttgtcatcgacggaggctgtcaccgcatggtatcccgcccgcttgccattgatatcaacactttcgctctcgccggtgactagatccttgtagttgttgacatggccattggaatcgtactgttggaaagggaaaggaaaaagataattataaaacatacaagtaatgccacctcgtcatcaattgcagcgcaatcacatatgccttcgttttatatataagtaaaataaaacccaccgagttctgggaagaccacttggactgcttctcccactgcttggtacggtagccactgcccaagtttccggctcctgctgataatccggccccaacgctgctagctccaaccacttgaccggtctgtgccgcgttcagtccaagtcccaagttctgctgtccgcttaatagggatccactgagcagcgactgctgtccgccaacctgtccgctcagcagagatccttggctgccgcccaacagagatccactcagtagagctgcgctgttaccggtactggcggagttcagggagctggcagagttcaaagagctagcggagttgaatccaaactgggagccagagttgaaggcggagttgtagccagagttaaagccaccttgtgagccgg

SEQ ID NO: 30095 - DNA, 1294 bp, DROSOPHILA
agtgcgcacacaaaacgcggctccattctcgagatcgattttcgagaaactcccagggaaatacccattagaatactcgacaatgagctctttcaccgcccacctgttgatattgctcctcggtggtctgctgctaactcatcactgcgtccaaggtcaggcgagtaaagtgtcctccaagttggatttcgatgagagcgatggcagcaacaatcagaatcagacgggctcacccggacaaccgggacaggcgggcggaactggcaatgggagctacgacccgggaacgggacgaagcctgagtggtggaggaggaaatgcaggcgggggcagcagcggaacttccagcgggggaaatcgccccaagatccacggagtacgggtcaccgtcgatacgggcgatggacagcagcaaacgaaagagtccaaggagagcgtggaaattacggatttgggcaagcacaagaagcgcgtgggcatccacacggacatcacgttcgaaatcacctccgattcggacgggaacgagaccagttccgctcaacagcagggcgacaaggaggacgccagtgtgccaattttcaagggtcgtggtggcagcgaatcaaagcacaagacccgcaagccatatgatcccaagtcgcagtggaatcccaacttctccggcgagcagcatggctaccagggcgccaatcgaggtggctaccagggctccaatcgcggcgactactatccgcagtactatcacggcaacgtctatgccggcggaagttccgatgcaggcagcatttacaggaacggcgagacctggacgcactacgtcccggtttggaccacggagcgagtgccgcaggagcagggacagatctatcggcggcccagctggaagccctgctactgcatgtcatccacggagttcagacgccgtcgggatagcaaagccagaagagagcagacggatcagcacaacaagggtgtcatcaacagtggggttgtccaggtggtggatggcaagttggagcggcctttctcctgaggaaaagccctccgctttaaccagttttcacaactttgtaaagttaggtaatgcagaaatatatttaaaatagaactttagtttagtctctttagaaatattattttacttatttaaaatattggttggcccaatattttgaaccctttttcgctgacaataacatattcctaattgccatcaaactgttagaaaagaattgtatttaggtaaagaaggcaaaaaggaaattttaataaatttcatatttgtttttga

SEQ ID NO: 30096 - protein, 317 aa, DROSOPHILA
MSSFTAHLLILLLGGLLLTHHCVQGQASKVSSKLDFDESDGSNNQNQTGSPGQPGQAGGTGNGSYDPGTGRSLSGGGGNAGGGSSGTSSGGNRPKIHGVRVTVDTGDGQQQTKESKESVEITDLGKHKKRVGIHTDITFEITSDSDGNETSSAQQQGDKEDASVPIFKGRGGSESKHKTRKPYDPKSQWNPNFSGEQHGYQGANRGGYQGSNRGDYYPQYYHGNVYAGGSSDAGSIYRNGETWTHYVPVWTTERVPQEQGQIYRRPSWKPCYCMSSTEFRRRRDSKARREQTDQHNKGVINSGVVQVVDGKLERPFS

SEQ ID NO: 30097 - DNA, 4071 bp, DROSOPHILA
tccacatatgcacgtgccacgcaatcttcgccagcaatcttaactgagatgcagtaataagataatccgttctgtttgctggcatcgcattttcctgcagaactgcttagcaattagcgagtaagcgtccttgtgcccgccccataatccaaaatgcctctaactcaatttacatgccagaaagcgacaggagctgagcccaggaaaagcccagctgaagtcaaggagtcagaagccaggagatcccaatccggaccgaggtcccctcgacattattaaaacggataaatcgcgacgtgcaacgatgtgttgggcgaaagtgaaaagctgtgcgtgggtaattaaaaacgggagctggaaaagccagagacgtagctggaaaagcggagtcggataaggacagtcgagtaattcgcatgtcggattttaattaattcaggccaagagaaacaagaagcgctctggagataggtcgtcctggggaatctgtctttttccccaacgttttaagtaggttaatgctgcaggggagcagatgaggtggttgtggcggttgtttttttcggtggaaaagcgggaggctgggggcctccggtagacgccttaattggtgggcgtcacaaaatatttaccgtaacacttaccgctcaaaaagccaggggtcgggaaatgggaaatgggaaagatgataaagtgcgcaaatgtttgcactttccctttatgactatttagagacgccaaactcacttttaggtgtgaaaagggcggcggcggggtgacgacaaccccaaattatttggattcacggatgggggcgagtgttgacgtcttgataagagcatgtttataaatattttcacattatgcgtggcatttatttgcattttatttatttcttttcatatgggtttgagcatgctgcacacatactgtcagttcgctgtcgaactgagtatatttgcatcagttttcattggcatttatacccagtagcccattcaaaaaacatccgtgaatattttctacacaccaaacttaaaatcaaatcttccagacttgcttattacagactttgaaactgaggctccgcccgcatcttggtttttacatttctttttttggacattaactgattttagttctactaacaatgtgcactaagacaaacgaacgtgccactcgacttcatgaacctggaagggtttgcagggagttgttgtacctcaggtcgaaggtggtaagtattagaagcaaagttattatcatttctcaatgttaatttattgaatttgccgtttttagccagtacgtgaagttcccgccttcacttttcaggcactgcagcctaatactgtggtgaaacctcctccaaagtgagttcctcgaagatcgccgagttatcttaatgaaatttgagcctaactctccccaggatcgacattttcaagcggaagccagtgaaggagaccgtattcaagatctacttcaatcgcggcgacattccgtgtgtgatgtccggcaggagcagcaaacaggatccgaccaaggagcgtccggtgaagtggcactgtgtgccggagaatctcgactattgctactatctgcccatcttcgtggacggactggcggacatggactacgacacccggttgctagcggtcaacggagccattgacctcatcatgcggtcccccaaaaaggtgctacccgtgctgcccaagctcattcttcctctgaaacgggccttccagacgcgcgacaagcggatcatcatctccgccctccaagtcatacaactgatggtccgactgggtgagtttatttaagaattaaactttcagaactatatattttaaggtactagaaatggagaattttagaatcccataattttactgtatgatttattatccatctcacatggaaaataattctgttaagggcaatctaccgggttcatgtaataattatatgatccttgtagctcaatgcatttctcactgtaagataggctatttgtatcttcagggctaaaattgacatatatagctctatgtccagatgcctcgtttaataaagtcttcatcagatagaatgttattaatgtccacccaatagtttccaatcatctgcagttttgccctaatagcactccactcctttttattttcaagacacaccagtctactttgcatactttcacattccagtcgagctctcgatgtaatagaatttttcaccaattctctcgaagtgggttaatgatctattacttaaatcgaagtcattaaaacccaactgattctggtttttttcgatttatattgagtgcctgaaagtgtttttaaaatacgcggcatgttgtccagatttgatagttcataattatcctcttcgattaattccgacatcgttgtcaagtcatcccaatcagtatttttgatcatcatttcagtttcaatggtaaattaccaacggatatatactacctgaaaagggttttaaggcatttcacaatatttagtatcagactttcttagttcttctttctttcttagtcattgaatcaaaagcacaacagctatatacgatgtatattctcctatgaattaatttataataagcagtcttaatagaaatgaaccattttatatcatgtgcttgctgctaaaaagtgtataccacgaaaaatgggttgcgcaaactctgctactgcgaaaattgattagtcaactgacgtacttacaatattattgaataattcacaactattataagttactcactcaattctgatgcaatccacaggtccctgtgtgggtcaggccctggtgcccttctatcgccagttgctggccgtgtgcaatctttacaagaacatcaacgtgaatctgggagagggtatcgatcccgatcgaaactgccgcatcggcgacgtcatcgaggacaccctgaagctgctggagtactgcggaggccccaatgccttcatcaacatcaagtacatggtgcccacctacgagagcagcgtcttccccaagtgcgaggcgcccgagccccgggaagcctaacatttcccatggaaatgcctaactaccagttcgcttttcttcggccttcagccttcagttaccaagaatttgcgaacgagttttaaccgccaaatcgaagtttgtgaaccttcaaatcagggatgagtaaagccaaaattaatcattagtttgtgagtataacttggaaaattgaggtggtggtcgtttaaaatacttagaccattggttcataattctgtttagacttacgaatctgtgaataatcatatttgtttctgtttcttgctgaatgtaactatctgttaaaaactgttagcagtttttctacctctacatgttctgagtgcaagttagtaaaatgcaagttggtttgcctaaaacaagtattttcatgatgtgaaagaggtattcgagtatgtccctagttcaattgagtttgtacaaatacatccctgaaaacaggagacatgttccgagttctgccccacacactgagtacctaagccgtcatgtaaatatttcccccttaactatatttccgtgtagtactatttgcctaaaggaatacccgtgttcgcctgcacttaccccgtacttggggcaacaacctactagcaccaccccaactactggaaaagtgccatctgctagacagtcaagtgataaatgcctaattaatttttaattttcgaaaacgcagaacggtggccggggaagtatactttttatgcccactgtttcgggccaatagaagaagtcgtgccataaataaaaagctcattacaataaatcataaagtgaaaattgttcaatttgctccggctcttttaatggaatatccgtgtagcgaacgtcgagtgtctggttagcagcactcgtctaaggatgcgtgtattcggaatgggaagggagcgggggaaccgctcctcctgcccacaatttactgtcctgtctgggtctgtcctccgccgaatccccttatctctggcttaaatcagccgaacacttttgacttttg

SEQ ID NO: 30098 - DNA, 951 bp, DROSOPHILA
aaaaaacatccgtgaatattttctacacaccaaacttaaaatcaaatcttccagacttgcttattacagactttgaaactgaggctccgcccgcatcttggtttttacatttctttttttggacattaactgattttagttctactaacaatgtgcactaagacaaacgaacgtgccactcgacttcatgaacctggaagggtttgcagggagttgttgtacctcaggtcgaaggtgccagtacgtgaagttcccgccttcacttttcaggcactgcagcctaatactgtggtgaaacctcctccaaagatcgacattttcaagcggaagccagtgaaggagaccgtattcaagatctacttcaatcgcggcgacattccgtgtgtgatgtccggcaggagcagcaaacaggatccgaccaaggagcgtccggtgaagtggcactgtgtgccggagaatctcgactattgctactatctgcccatcttcgtggacggactggcggacatggactacgacacccggttgctagcggtcaacggagccattgacctcatcatgcggtcccccaaaaaggtgctacccgtgctgcccaagctcattcttcctctgaaacgggccttccagacgcgcgacaagcggatcatcatctccgccctccaagtcatacaactgatggtccgactgggtccctgtgtgggtcaggccctggtgcccttctatcgccagttgctggccgtgtgcaatctttacaagaacatcaacgtgaatctgggagagggtatcgatcccgatcgaaactgccgcatcggcgacgtcatcgaggacaccctgaagctgctggagtactgcggaggccccaatgccttcatcaacatcaagtacatggtgcccacctacgagagcagcgtcttccccaagtgcgaggcgcccgagccccgggaagcctaa

SEQ ID NO: 30099 - protein, 187 aa, DROSOPHILA
MSGRSSKQDPTKERPVKWHCVPENLDYCYYLPIFVDGLADMDYDTRLLAVNGAIDLIMRSPKKVLPVLPKLILPLKRAFQTRDKRIIISALQVIQLMVRLGPCVGQALVPFYRQLLAVCNLYKNINVNLGEGIDPDRNCRIGDVIEDTLKLLEYCGGPNAFINIKYMVPTYESSVFPKCEAPEPREA

SEQ ID NO: 30100 - DNA, 2955 bp, DROSOPHILA
ctacttaactactattactatactatatactatttttgttttacaaacaaatttacataatttcacatacatatttattaaatttaaaaactcaaagtagaatttccgtcgagttcgacctttgatgacaacttcttggtattaattcttagatacagcgtggccaatttaggatttttgtaacttcatctgaccgtcttaaataataaatgctgtgagtctaaatacttattttatcgtatttacatatatcatttcttttccagctttataatttagctaccgtcaacattttttagctatttttaactgtttaactgaagagttggcaacactgctcagaacttgtttacaccagatgttcgaacatgcgaatgcccgtagaaaatgaaaagagctgactgaacaaagcaccacctgccggcggttgcatgcaaatggataagttacatgttgcatgtggatcgcaaacaaagttgcaaataggattaccaccgaaaacatatacatacatatgcatggctagaaaatacctatagacaataaaaaaataaatgatccgcaagatatgcatttaagaaataaaataaaataatgataatttaagaataatttcttataaggatttttagcatttattgtataaattcatgaagtagccagaacaggaacccagaaaggcccaaaaatgtatgcaatactaagaagaaagagtattaaagcttggaagttgataattaaaacgcagagaagcattcgtttgccacattttcgaaaaattaactaatgcaaatttatgatttttgcaaataaattttttaaaaaaagtgattattaatgtagagcttatgttttgcgtgatcttgaactagttcaaaaaacggccttatcagcaaaaaaaaattaaatcaagcgctttatgataacaccccgcttacactgataacgcatggcgataacgccgactgatgccaactgccggcagttttatttgagcacaatgccgaatcgcgcgacgcggaagaaatatcgccggattcgactccacattttcctggcattatccctatggttcctgatcgaggctcatcccgtcgaaggaacacggtgcaggaatccctatgagagggtacgggaaaactattgctacttcgttgctgacgaggaaccgctggtgagagagacataaagaagcctctacttccgaagtcacgattaacttactagtgtagcttaaattaagttgagttctgcatgtaagcaaggggaattcgctaattgtatccgctgttatcagcgagaagaagccaacgaacatcaaacatatgtacttatgggtgtataaataaacggacgatgacgctctttgtcgagttttgttcgacctaaccgacttgaatatgctctgcactaaggtcaacaaataaaaaaaaaactcgtacttaatataagtttaggtacacagtaaacaccaaacaattttgattttaaaagatatctatctatgtctatctatatatatatatccttagattataaaatataattctagagtaataatatttttatcttatctacagcacacatcgttccataacttttgctatcaggacaagcgcacctcacgagtttgcctggatagtgacgaggaaatgcgcgttctggcccatcacctggccaacttgggctacccgaacggcacgcagttctggagcgccgggcatcgatggccgggtgataaccgcttctactggaactactttggcagagcccgaccgctcaactactccaactgggcggtggacgagccgacgccccaaatgggccgcaattgcctgatcctcactctccagggtggagaactcatcatgagcagtgagtcctgctacacccgagcggtcgatatctgcgaacagacgctgaacggcacggattcccgtcccgtaatccactgatcgccagatatttatgtatctcaatatctactaaagtacctagcaaaacaaaacccaaatattcgatttctattatcttttttttttttaatgtgactctcaataaataatatttttcttaaagtataagcaagaaagaatttatctaagattttcggatggattggatgctccgcgataaactaattaaaagaatgttagtcagattaaaccaatttcttggccacaaagaagagcaatccagagtttgataagcaggaacttgtgataggcgtgaaaaaatgtggcagaaaaatagcgtttgtcttcgagcttaaatatatgagaaaattaatatgaattaccttggctaggcgcttttacgattactcaaaagcatgtaaagatagatagaacttctcacgttatttcatgttcaaactgattagttttacacctgctacacaaagttgccgcgggcacccaacttctctacttacatacacttatttgcgctgagcaagggaatttatggcgttgtcaaacaagtacttaatttaataattcaacattttgccaggaccctgtgcccgcagccactggagagtctgcagtttctggcatgtaatacaaataaatttcgactaaacgcttttaaacagtcacagacaatgcgtcgtcgcgtcgtctggaggcgttgggggcggggctggtgtggctggtgtggcgaaaggatggggcatccccagaccggaagtgacgacagcagtggcaaaatggcaacattctggccggaatggctgcggcaattaactcaaattgataatgacaacggaaaagttgtaggcacctgaggtgtcgcgactcgctcggagtgtgggcgatgctatattagggggcgtggcggatcggatcggcggtgacgtgatttcattttgagtgcatccaaaacggcgacacatttcgacacgtcctttgacaacgccctttggcgtaattaaaacgaaataattttcgacaa

SEQ ID NO: 30101 - DNA, 549 bp, DROSOPHILA
atgccgaatcgcgcgacgcggaagaaatatcgccggattcgactccacattttcctggcattatccctatggttcctgatcgaggctcatcccgtcgaaggaacacggtgcaggaatccctatgagagggtacgggaaaactattgctacttcgttgctgacgaggaaccgctgcacacatcgttccataacttttgctatcaggacaagcgcacctcacgagtttgcctggatagtgacgaggaaatgcgcgttctggcccatcacctggccaacttgggctacccgaacggcacgcagttctggagcgccgggcatcgatggccgggtgataaccgcttctactggaactactttggcagagcccgaccgctcaactactccaactgggcggtggacgagccgacgccccaaatgggccgcaattgcctgatcctcactctccagggtggagaactcatcatgagcagtgagtcctgctacacccgagcggtcgatatctgcgaacagacgctgaacggcacggattcccgtcccgtaatccactga

SEQ ID NO: 30102 - protein, 182 aa, DROSOPHILA
MPNRATRKKYRRIRLHIFLALSLWFLIEAHPVEGTRCRNPYERVRENYCYFVADEEPLHTSFHNFCYQDKRTSRVCLDSDEEMRVLAHHLANLGYPNGTQFWSAGHRWPGDNRFYWNYFGRARPLNYSNWAVDEPTPQMGRNCLILTLQGGELIMSSESCYTRAVDICEQTLNGTDSRPVIH

SEQ ID NO: 30103 - DNA, 2777 bp, DROSOPHILA
agctataaatctgataaaaatatagctcctttatagtggtcaaatatgtatttttttcttcaatttatcaattttatcttggccaagaataattttatttatgtgccttatctgcgagacattgtcttgtctaagaatttttgactgatttccgctgaagctttttctttgtgttcgagtgactttaatcaaacgccgccgcccgctgtgttgacattgaaaaatgccgacgccaccgtcctggtctccgatttctgctgccgatggcggccacatgtttcctccacacacgtccaacactttatgacaatcatttgagttaattgccaacgggtcgggtggatctcgatggaccacacggcgaagtaaccgcgtgtggcgtaaatacagcgtctcatttggccaagcaactcatctgtttagccgcacttgcaacatgttgcatggcttggtgtggcgtccctggaccatcttggccagcgaccgcgcccccagtcgagatccatacccactcccagacccatctgagctgggcagtaaaaggcattagcgtccgtgtctgtcaccttcgtcatggtcacgctaatcgtggtaatcggctgcgccaataaaccgacaggtttatggacctgcagacgcggaagccggcctcctgcgaccagacgcatgcgcacttgatttaaaagcaattaaaatgcgaattgatgtcacgatcgatttttcaccagagcgttggagctagccaaatgccaaaagcgggccaagtcctcaatcctactttcgccaggttgaaaagatccagctcaattcccagttgagctttatttcgtatcaatcaaatatttattaataagctgtctagctagaaaggaagattttgtaagaaattgtgtcaattaatgctaataggttaacacagagtataactaacttatcaccatattgttatctgccgttttagctgttgaccacttgatgggtcgatcaggatgaggctgctatgttgctgccggaccagacatacgccgactatgacgtgggccgccaccagctgctgacctaccacaagagcaggagtcgcggcttgaagtccaagctccagcgatccaagagttccgatgccagcagcagtagctacgagcgaacggtggactttttcgagaacataccggatttccacggcgagtccctttcgacctttctctacagtccgtcggcggagcaggatgcccaggccaagggcgatgaggtgcgattggagcggaatcggctggcggatgatgacgaggaccaagatagcgagagcaccagccagagcgacgactgcgaggacgacgatgtcctgcgactgtgcgaggactttctctgtcgccatcgcatgcgacctgatttcttctgccaataccacaaggcagtcaggtgagcttgcagtgatttattaactttaatgccataaaattagataatgttataaaattataatccttatcatattttttgtgttctcgatttcagttccacaacaccctcaccaaagcaaacgaaaacctcaactcccattgtgcagtgcaagtccgcatccccgccagtaaaagtgcaatcggacttaaaggacttcaagtcgaacaggacgagcgcagtggtggaaaggttcgccaaattctcagccatttacacgctcccagtgcccaagaggaaaaaggcgtgcaacaaaaccacaggaaatattacaggtaaaattaaattacacgaaattttagaatccgtgtctatgtaatataatgaaaactgaaaacgaatggtaataagaatgaaactgtaacatgtttagaaagttaaaattcgtgttgaaaatgcttactgggtggctaagtgtgttatgtgtttgcctaaacaaatgtgtctttagtttcccgtaacatttcattgggccactccccttttttatcagacattttatagaccatagacatgacacagtttggcccgatcttattatatattagagtgaccggcattgtcagcagtttcgacactaattacgattagcttagtacgggatcatgtggcattgtgagcttaaagtttttctaatcctgtggacggtctcccaggtatatatacctgtaagtatattgctttttataggactgcctaaatattattgattggacttacagtgctggggaaagaagttcatcagtcgatttgagtcgataaatggtattgaaggcgaaaaggaaactctattcacttgttcagtgcggctcgtgggaagagaacgtatgttaaatggatcaattatgcaccaagtcgacttggacgactccttcgatgtgtggatggatattcttcacttcaagaacggagagtgggctcaaggaaatatcaaagtgcgaacgaagccctgcgattggttcaccaactactttggtaaatacttcctgccattggtcaaggattcaaatctaccgccaattcaagagatgtgtgtattcccaaagggtgaatattatttgcgaattaccaaaatcgaacctcaaaactggccgccgattttgtatcgaggcctaaaccaattcaacattaattatgtaagagatggcaaaagtactggcgggattcaatttgtcattgacttggaagattccacattatagccaaatcataacaaaatcaattacgggcaatggaaatgtttttaattaaaacaattgaagaccattatagttttttgttcatatcgggaagagcctgtttctaagtaccatttaaat

SEQ ID NO: 30104 - DNA, 681 bp, DROSOPHILA
atgttgctgccggaccagacatacgccgactatgacgtgggccgccaccagctgctgacctaccacaagagcaggagtcgcggcttgaagtccaagctccagcgatccaagagttccgatgccagcagcagtagctacgagcgaacggtggactttttcgagaacataccggatttccacggcgagtccctttcgacctttctctacagtccgtcggcggagcaggatgcccaggccaagggcgatgaggtgcgattggagcggaatcggctggcggatgatgacgaggaccaagatagcgagagcaccagccagagcgacgactgcgaggacgacgatgtcctgcgactgtgcgaggactttctctgtcgccatcgcatgcgacctgatttcttctgccaataccacaaggcagtcagttccacaacaccctcaccaaagcaaacgaaaacctcaactcccattgtgcagtgcaagtccgcatccccgccagtaaaagtgcaatcggacttaaaggacttcaagtcgaacaggacgagcgcagtggtggaaaggttcgccaaattctcagccatttacacgctcccagtgcccaagaggaaaaaggcgtgcaacaaaaccacaggaaatattacaggtaaaattaaattacacgaaattttagaatccgtgtctatgtaa

SEQ ID NO: 30105 - protein, 226 aa, DROSOPHILA
MLLPDQTYADYDVGRHQLLTYHKSRSRGLKSKLQRSKSSDASSSSYERTVDFFENIPDFHGESLSTFLYSPSAEQDAQAKGDEVRLERNRLADDDEDQDSESTSQSDDCEDDDVLRLCEDFLCRHRMRPDFFCQYHKAVSSTTPSPKQTKTSTPIVQCKSASPPVKVQSDLKDFKSNRTSAVVERFAKFSAIYTLPVPKRKKACNKTTGNITGKIKLHEILESVSM

SEQ ID NO: 30106 - DNA, 4141 bp, DROSOPHILA
cggaggcgccgcagctgaagaagggcgaagcggtgaccgtagtgggggcctccaccgttcggggtcacctgatggtggagcacaaggggcagagcttccacgttcccttccagttcatgacgctcagtaaataaggactactggtggaaacaaactggttatgattccattcattccatctgttcaactcttcctgattttagacatcccatttctaaaagactgtaaatattccatttggtagattaaataacaagcattctgtctacgaagcgcatgctaactgaggtgctctaattggcccctaacttacgtagtattattattgtcgcgttaataaataaacgccaatcgataggttgtagcttcaattacatacccacaagtgccaatcaaataagttcttccacctaattcataagtattttacatgttactgagattacattattcgccgttaagtaattagttaagtaagtttcaacaacgacattcattttttatttttgagttcacttaagaattgtgaattttattagactaaggttcattttgtcattcaaataaacgaagcatgcattgaaatatttaaattatcttattttatttcataaaaaggagatgtttctgcaaaataagttaattttccgtttatgataagaaaacgagtttgttttggtctgctagaaaaggaagtaagtattccttaaatgtcccataaataaactaataagaaaaataacttcacgataaaagttctttttttcgcgcgttcattttaaatattttgatacgttgattctatatactaatagtgttggaaattgccgcattgcattcaagcagttcaaatccaagtagttcaagtctcaaacggcaagcatgcaaacaaacagctgacagtatttgtttttggtaatctcgttttgaacaaaaatttcgatgtgagatggagcaaataaatgaagatgtttggatagatatactaaagtacctaccaatgagggatcagttgtcgctggtcgaagtcaacgagaatatatcggcatacgtgaagtatcattggagtcatctcaaaacagtgactctgacccgcgaggatctggattttctggatcggaataacagttagcgctgatgttataaattcgatccattaataatatatgtaacttttaacttagagctgatgcacgaatgtctgggtggctggtcggcaacggtggagcgtttgaatttgcaaagtgccagcagtgatctgctgagaaagtggacggaatacgactttccccacctccgatcgctcgactgccacatggactacaatctcgaggaggcggacgaggaaacccttctgctaaccgagctgttcccgctcttgacacggctgtcactcaatagcagcacaacaggtcgttacttgtggcactggaagcaactaagggagttgaatctcacctggtgtgagtacctggacccagaccacttcgaggagatctttggcaacctacagctgaccaagctgactatgctctattacggatataacgtgaacctaggcgaaaaagttgtggacataacgcgatgtaccacgcttgaagagctgcacatcgatgaccaccatttgctgggtgatttcctgccccgactgatgaatctgccgcacttccgccgcttggccttttacacgcgagactactatgagtatttgctaggttcggtggccaggcacaagccgctgaaggttcaatcgcttctcttcaacgactctttctggagcagtgaacgggtggcgggaagtatactgcacatgaccaatcttcgtcggctggtcctgcaggaggatgacatcgatgcgcagcagctgcacaccatctgccacaaattgccaaacttggaggagctacaccttttggcgatgcgagaagttccgtctcccagccacctgtggaactctataggtcactgccatcttcttaggattcttaacctatcgtctaccaagctggtggacctccgaagctcctgcctgacaaaagttctgctaagtcgcaggattccactgaccctgcatctccacaacactggattggatcctagtaaagtaagttaagcacaacatattgttcaatgactactaagtttaattatctccgtaggttctacgggattttgatagtgcctccttgaaaatctcctttgagccgatccatttgaatatttggagtccgcgatttgtggaaatcgaattcagtccagactcgtagtagtcatttgaaaagacttaaatgacatttctacctcaatccgtccggtatacgaatatatatgtagatggagatccaaatgatatatcctgagtaaaatgttgtaccctttgcaagggtatagagtcaaatagcttaacaaaaccacaaaatcttttatctgtctacctaccaaaatcgtattaaattcaagaaaataatcatttgtcttttaaacttcagacgtactactttcgatttttagaaattaaagcttcagatgtaacaacaaatataggctgctaagatttcacaagaacaataaataagaatgataagtatttatctttattggggccagttcaccaagctttgtttacctgcgaaaccgaaatggatagcaaacattttgcctcaaggcagttgtgcattagaactccttcagtacggttaccattggtaatggatcggacaaatctaaatgaattgaaacataaaatgcgtcggattttgcattgtggacacaatgagactgcggaactaaaatacaaattgtttgaagttcaaaaagaactggatgaagctaatgactttattgccgaaataaaatttgaattggatagtgtaaggtgttgcacatccacattcgttcaacatgtaatcgacttctatctgagcataggttgatatactggcactccagaatcagtggctgcgcgatgaattgatgatgctaaaggccgaggagatgggtgtgattcatagggacttggaggaggatccagcaactcaaagggagcgtcgcagctatcgacagcaagtttctgctggaatggtgtcacctcagcttgaaagcccactccaggagcagcgatacggacgcaaactggattaaactaatggctgattacattgctcgaaatctgaatttatttatcattaatgatattgtatgataaatctatgccattagccgcttccgactacacgcaaaccacttaaaatataagacttatctttgttgtcacacttcataaaagtatatttctgaatcagagaactgaaataaactcagtatttgataaagatacaacaagataaactgcgcctaattaggtttacattttttcagttaataattatcgattcccactttgacgcatttatatttgcacaaaatatatatttatgtgtctacgtttaattacacacctatcccatttattaccaactgcgaattgagtgtgttgaaatttatggtacctcaaagtccacttatctggccatctcatctgacctttcgaactccatgcataaatcagtcgatcctaactcgcctgtaaataaataaaatcaattgcatttgcagctggctagctttcttaatggctggttggttcgatttgtaatgcatttgcaactcccaaacggaaagatacattttatgagctcagagtgcgtcaggtgtgcgaaagataaattgcttatttccaaaatggaggaacccccctttaaagaaataacgaaactcaaaccagttctcaaaatgtagacttttatttgatcgtgtccgactcacgttaagatatatgtttgcagcatagacacaataattattaaatatatatgcaagtagaattccgtaatatatttgtatcgcattagttgtacgtgtgctttaataatttatatttacaatacttaaaagtcgcgtgagaccaagttggctattgataaaataaactttcagtttcgttggggtttttttgtttttgttggcttcattttgggggccaaaagtgtgttgttagcatataagtatgtatatttgtgtagatctttttttttaaatttttgttagtttatgtaagacatacctagttaaagattttttg

SEQ ID NO: 30107 - DNA, 1239 bp, DROSOPHILA
atgagggatcagttgtcgctggtcgaagtcaacgagaatatatcggcatacgtgaagtatcattggagtcatctcaaaacagtgactctgacccgcgaggatctggattttctggatcggaataacaagctgatgcacgaatgtctgggtggctggtcggcaacggtggagcgtttgaatttgcaaagtgccagcagtgatctgctgagaaagtggacggaatacgactttccccacctccgatcgctcgactgccacatggactacaatctcgaggaggcggacgaggaaacccttctgctaaccgagctgttcccgctcttgacacggctgtcactcaatagcagcacaacaggtcgttacttgtggcactggaagcaactaagggagttgaatctcacctggtgtgagtacctggacccagaccacttcgaggagatctttggcaacctacagctgaccaagctgactatgctctattacggatataacgtgaacctaggcgaaaaagttgtggacataacgcgatgtaccacgcttgaagagctgcacatcgatgaccaccatttgctgggtgatttcctgccccgactgatgaatctgccgcacttccgccgcttggccttttacacgcgagactactatgagtatttgctaggttcggtggccaggcacaagccgctgaaggttcaatcgcttctcttcaacgactctttctggagcagtgaacgggtggcgggaagtatactgcacatgaccaatcttcgtcggctggtcctgcaggaggatgacatcgatgcgcagcagctgcacaccatctgccacaaattgccaaacttggaggagctacaccttttggcgatgcgagaagttccgtctcccagccacctgtggaactctataggtcactgccatcttcttaggattcttaacctatcgtctaccaagctggtggacctccgaagctcctgcctgacaaaagttctgctaagtcgcaggattccactgaccctgcatctccacaacactggattggatcctagtaaaaatcagtggctgcgcgatgaattgatgatgctaaaggccgaggagatgggtgtgattcatagggacttggaggaggatccagcaactcaaagggagcgtcgcagctatcgacagcaagtttctgctggaatggtgtcacctcagcttgaaagcccactccaggagcagcgatacggacgcaaactggattaa

SEQ ID NO: 30108 - protein, 412 aa, DROSOPHILA
MRDQLSLVEVNENISAYVKYHWSHLKTVTLTREDLDFLDRNNKLMHECLGGWSATVERLNLQSASSDLLRKWTEYDFPHLRSLDCHMDYNLEEADEETLLLTELFPLLTRLSLNSSTTGRYLWHWKQLRELNLTWCEYLDPDHFEEIFGNLQLTKLTMLYYGYNVNLGEKVVDITRCTTLEELHIDDHHLLGDFLPRLMNLPHFRRLAFYTRDYYEYLLGSVARHKPLKVQSLLFNDSFWSSERVAGSILHMTNLRRLVLQEDDIDAQQLHTICHKLPNLEELHLLAMREVPSPSHLWNSIGHCHLLRILNLSSTKLVDLRSSCLTKVLLSRRIPLTLHLHNTGLDPSKNQWLRDELMMLKAEEMGVIHRDLEEDPATQRERRSYRQQVSAGMVSPQLESPLQEQRYGRKLD

SEQ ID NO: 30109 - DNA, 3463 bp, DROSOPHILA
tcatctcttccaacttgaagaaggtatcgtccaccacagagttgcgtagtcgcttgtttcgtttgtctttcggcggcgcggtcttctgcttttgtagccctccatcctcgtcgctgaagtctgattcctcatcttgttcctcatcgcctgagtcttcagcttgtattacttcgtcttcttcctctatttcttcaccatcgtccagttcaatgcccaggtgctgctcgcgcatcgccgtcagcctggcggtttgctccagcacctgttggaacactagttcgttgcgaatctccagttgctgccagatctgctcctcgtccatttgctccagcaccaattccggcagcagttccttcttgttcgccacatcctcgctgatgctaacggcgtatgtctgctggataagctgctcgatggcattcacttgttccggctgtggcctgaaatataaattgttttgactacgtttgaaaaaacacgtgcgcggtctttggaaggaaaacaaactggagaaaacgctctggattcttggtcagctgctcgaagttctctgcgatttccttgaagacattcgcctccttggattttttacttccaatcatttttactactgctttctgtgcttaattaaatgaaatatatattccaacaattcgagcgcaagagcgggtccaaaaacaacaaccagttggtgagagatggaacagatacatagagatgagcgcgtgatacaagtacaagtttttccaagcttaaaaactttatgcgagttggaatcctgttttgagccaaaatttgttattccaaaaataataaatatatttaacttgaagaaaacaaagctctaaaaaaaatcataattgcttacacagtagaccagaagccgtatatcgtgacaaggaaatcgataatttatcgaaggcctttgccaccaccaagccagctgtaggcggctttttacaggcggagtccgttcacaaaaactatgcccaactagaagatggattcgaagttctttaaactgctcctgctgggcggcgccgtgcgcttctacttctgtcgcacgccgctggctccgatgattggcaaccgagtggagttcgcgacacctttaaattcacacaagcgcagtaagtaaacaaagtagacatcaaatagatgaacaagtctgaatggagttattcttgcagtgcaagaggggatatttcttctacagagtggcattgatccctatctgggcgacctggtacacgaatcgccgctgatactcagcgcgctctccggattgtttcaaaaatacccgcagtttctgccgatattctacataatcctggatatctgcacggcggccctgctttatgcgatgagtctgagattcgtcaagcaaaagcaggatcagcaggacaaggagcgaaaggagtatgccaaggatacggaagagctgcagtttggcccgctggacaagcttgacattccggaacttgtgatcgtggcatatcttttcagtccactgactgttatgagctgcattggaatgacctccaccgtgataagcaatctgttcctggctttctttttctactgcctcgtgaagggaatgctcattccatgccttctagtcctcgcgttcgaaactgtccgcagcttctatcccattgtacttatagcaccactgctcctggtcttttcacggaattcggtcaggaggggtgtggctatagcggcgctctttatcgtcagttgtctaatcgtggcagttgcgaactattttgtgctgaacagctggaacttcctggatggaacgttgggttttatgtaagcaagaactatcttattagttatctgtttgtatttttacgtatttaactatcttacagattttatttccgcgatctacagccaaatatcggtctcttctggtacttttttactgaaatgtttgagcacttccgcaccatgttcctaatcacattccaattgaatgccaccgtattatacctggtgccactaagtattaagctgcgcaaggagcccctactgctagccacggtattggtggcccttatggccgtttttagggcgtatcccagcctgggcgatgtcggcttttatctggccttgcttccgctgtggaaaagatgttggaaatgtaagttatctggctcacgtagttatttcaactgctaagcactttggtaatttctttcagtcatggcccatggctttgtggtctttacgttcttcctggtcactctatctatgatgggagccctttggcatttgtggatctatgcaggatcggcaaatgccaatttctatttcggtgccactcttgcgttttccactgggcagatatttctaatcaccgatctgctgttcgcgcacgttaaacgtgagttctgcttgttcaatggtcagaagattctgatcgatggcgaggaagcgaggatagtcttaaagtaagcattaacagtatcagtatgacggacagaatccaggaactttgtacagatgcagaatgcgcttcctaatggcagccgagcatactcttaagataagttaactccgaacaatatcagattaaacaaaatattttatttgattgtaatggttttttactgatgtgaatagcccgtcttcgtcttgcggttgaggaacttgtacaagtagaggatgcgtttctccatttcccgccacttggtgggtcgggcgatgggatacttggacttctcgagcagcttacgtttgcggagaagcacctggtactcattgccggagacgccacgcagccaggatggcagggagtagagcaccttgactggatgcagacgatcgttgcccaggatgtcgatgtagtcgttctggccaaacaacgcacgtttctttgaccaggcgttctttgggcgatacaccggcatcggcagtttctgtccattgtccacatgggggagtagtccgctcttgaagatcttgtcctcatatccatagcgccgcacagtgggaccgcgtgctcgtcgctcggcatgggataactgccgcacggtgtagctggttgatgccatcggagccaagggttttccgcccacagcaaggagcgtggctctgccaagtttttgaatcatacttcccagccaagacatggctatgttttaattaacgattagataattgtaaacagtgcctggaaatgggtgaaaaaacacgaacagaacatctgtttttgctggcaagccggcagtgttggaaaatgtagtgatttgttgtagctaattagtacaaggaatatgagaatacaaattggtagctacggtaaaaagtatccgaaattttatatatgtgtcacttcataaatttggggtgtaaaacaattttttataggtattgctctgtgtacaagtaatcgaatcagtgggcaatcgaaagtgccggtaagtgtaatcgacattcatcagctgattgcagt

SEQ ID NO: 30110 - DNA, 1281 bp, DROSOPHILA
atggattcgaagttctttaaactgctcctgctgggcggcgccgtgcgcttctacttctgtcgcacgccgctggctccgatgattggcaaccgagtggagttcgcgacacctttaaattcacacaagcgcatgcaagaggggatatttcttctacagagtggcattgatccctatctgggcgacctggtacacgaatcgccgctgatactcagcgcgctctccggattgtttcaaaaatacccgcagtttctgccgatattctacataatcctggatatctgcacggcggccctgctttatgcgatgagtctgagattcgtcaagcaaaagcaggatcagcaggacaaggagcgaaaggagtatgccaaggatacggaagagctgcagtttggcccgctggacaagcttgacattccggaacttgtgatcgtggcatatcttttcagtccactgactgttatgagctgcattggaatgacctccaccgtgataagcaatctgttcctggctttctttttctactgcctcgtgaagggaatgctcattccatgccttctagtcctcgcgttcgaaactgtccgcagcttctatcccattgtacttatagcaccactgctcctggtcttttcacggaattcggtcaggaggggtgtggctatagcggcgctctttatcgtcagttgtctaatcgtggcagttgcgaactattttgtgctgaacagctggaacttcctggatggaacgttgggttttatattttatttccgcgatctacagccaaatatcggtctcttctggtacttttttactgaaatgtttgagcacttccgcaccatgttcctaatcacattccaattgaatgccaccgtattatacctggtgccactaagtattaagctgcgcaaggagcccctactgctagccacggtattggtggcccttatggccgtttttagggcgtatcccagcctgggcgatgtcggcttttatctggccttgcttccgctgtggaaaagatgttggaaattcatggcccatggctttgtggtctttacgttcttcctggtcactctatctatgatgggagccctttggcatttgtggatctatgcaggatcggcaaatgccaatttctatttcggtgccactcttgcgttttccactgggcagatatttctaatcaccgatctgctgttcgcgcacgttaaacgtgagttctgcttgttcaatggtcagaagattctgatcgatggcgaggaagcgaggatagtcttaaagtaa

SEQ ID NO: 30111 - protein, 426 aa, DROSOPHILA
MDSKFFKLLLLGGAVRFYFCRTPLAPMIGNRVEFATPLNSHKRMQEGIFLLQSGIDPYLGDLVHESPLILSALSGLFQKYPQFLPIFYIILDICTAALLYAMSLRFVKQKQDQQDKERKEYAKDTEELQFGPLDKLDIPELVIVAYLFSPLTVMSCIGMTSTVISNLFLAFFFYCLVKGMLIPCLLVLAFETVRSFYPIVLIAPLLLVFSRNSVRRGVAIAALFIVSCLIVAVANYFVLNSWNFLDGTLGFIFYFRDLQPNIGLFWYFFTEMFEHFRTMFLITFQLNATVLYLVPLSIKLRKEPLLLATVLVALMAVFRAYPSLGDVGFYLALLPLWKRCWKFMAHGFVVFTFFLVTLSMMGALWHLWIYAGSANANFYFGATLAFSTGQIFLITDLLFAHVKREFCLFNGQKILIDGEEARIVLK

SEQ ID NO: 30112 - DNA, 3362 bp, DROSOPHILA
cagaatgcgcttcctaatggcagccgagcatactcttaagataagttaactccgaacaatatcagattaaacaaaatattttatttgattgtaatggttttttactgatgtgaatagcccgtcttcgtcttgcggttgaggaacttgtacaagtagaggatgcgtttctccatttcccgccacttggtgggtcgggcgatgggatacttggacttctcgagcagcttacgtttgcggagaagcacctggtactcattgccggagacgccacgcagccaggatggcagggagtagagcaccttgactggatgcagacgatcgttgcccaggatgtcgatgtagtcgttctggccaaacaacgcacgtttctttgaccaggcgttctttgggcgatacaccggcatcggcagtttctgtccattgtccacatgggggagtagtccgctcttgaagatcttgtcctcatatccatagcgccgcacagtgggaccgcgtgctcgtcgctcggcatgggataactgccgcacggtgtagctggttgatgccatcggagccaagggttttccgcccacagcaaggagcgtggctctgccaagtttttgaatcatacttcccagccaagacatggctatgttttaattaacgattagataattgtaaacagtgcctggaaatgggtgaaaaaacacgaacagaacatctgtttttgctggcaagccggcagtgttggaaaatgtagtgatttgttgtagctaattagtacaaggaatatgagaatacaaattggtagctacggtaaaaagtatccgaaattttatatatgtgtcacttcataaatttggggtgtaaaacaattttttataggtattgctctgtgtacaagtaatcgaatcagtgggcaatcgaaagtgccggtaagtgtaatcgacattcatcagctgattgcagtcagaggcatttgtttgaaattgtttattggacattcatccccagcagcacaatgatggaatccgaggtagattctgagcgaaccatgctaaagcgcgagatcgccgagctgcgcgcagcgctcaaccagaaggagcagtgtctgcgagaattggattccttgttttccttcgccacaaggccagagcaggaggtcgtcggaaatgatctggaatcgcctgatgttgcagtccacacgaagttgaccaacgacgatattgcgcgttacagccgccagcttatactgcccgacttcggcgtccagggacaattaaagctgaaaaacagctctgtcctgattgtgggcctaggcggattgggatgtccggcggcgcaatacttggcggcagccggatgcggacacttggggcttgtcgactacgacgaggtggagcggagcaactttcaccgccagattctgcactccgaggaccgttgtggtatgtccaaggctgaatcggcgaggatagcactgctcgaactgaatccgcactgcgagattcagtgccattccaggatgctgtaccctcataacgccatgcacatcatccgaggctacgacgtggttttggactgcaccgataatgtgcccacccgttatctactcagcgatgcctgcgtcatgctgagcaaaccccttgtctccgggagtgccctaaagatggatggtcagctgactgtatacaactatgccaacgggccctgctacaggtgtatcttcccagttcctccaccgccagaagcagtcaccaattgcggagatggcggagtcctgggtgctgtcaccggtacaattggcgcaatgcaggctctggaggccatcaaggtgattgtgggaatgggagatgtcctcgccggacgccttctaatcttcgatggcggtagcggcgtgtttcgcaatattcgcatacgcagcaagcgacccaactgccatatgtgttccgctcagccgctgatcacggagctaatcaactacgaaatgttctgcggtatgcatgcaaccgacaagaacaatcccatgctacttttgtcgacggatgagcgtttgtccgtggaggactaccaacagaagatccaggctcaaccacatttgcttatcgatgtgcggccaactgcagaattcgagatttgccagctgcccgaggctgtgaatgtgccactggtagagatcctcgacgacagctatcttaagcggcttggcaagcaattggaggacaaggaactgcccatcgtactggtctgccgtcggggtaatgattcgcagatcgccgttcagcatttgcgcaaccgattccccacgcatttcgttcgagacctgattggcggactgcatgcctggacgaacagtgtagaccccagttttcccatatactaatccgacaaaacatatacgttccactatatatgtagatttattcattgtttctcctgcaatgcattggttttttggttttttttacctaagctcttacgtatgtcttgttatcataaataccaggctggtgtaataaaatgaataattcaattctgtcttctttcgttgaatatattgataaatttaatggaatcatatgtcttccgggctctaatgggtgcctataaaaatggaaaagtacggacacaaatgctttgcatatccttagatacatgtcttcgtacgggtaaaactatgaatatgaagtctataattattggtgcagggataacaaaattaactatttttaaaacggcttaaactccttgtaggacccataatacataatgctatcataagactacttcggaaaatcaggaagtcagattaaactttttctatatgtccttttaattcaattccattcaagaaaactaacctttacaatatgctttcgaactgatcggttccaccagttttccaccttcgtatttgaattaagtaatcaaatacaaaatggattgaataattgtagaccattggtggacacaaaaagatcattagcattcgattataaatggaataaatagtgaaagcactgctcattggtgtaggcgagccgacagaaccaatatcattttaatccaaaatgcagacagacatattgcaattttacaaagacaaatcggtttttgtaaccggaggcacaggatttctaggaaaaggtaaagctatataagaagttcatatatctctagataataaattcaaaactaaaatatgttaaaattcaaatttcagtgatcattgaaaagctcctccgttcaacggatgtaaggcgagtttatctattagtaaggccaaaaaagaatgaaacggtggaaggacggtttcaggcctggaaagatgagccggtgagtccaagaagatgatgataaggatgtgggtgcccatcctatag

SEQ ID NO: 30113 - DNA, 1362 bp, DROSOPHILA
atgatggaatccgaggtagattctgagcgaaccatgctaaagcgcgagatcgccgagctgcgcgcagcgctcaaccagaaggagcagtgtctgcgagaattggattccttgttttccttcgccacaaggccagagcaggaggtcgtcggaaatgatctggaatcgcctgatgttgcagtccacacgaagttgaccaacgacgatattgcgcgttacagccgccagcttatactgcccgacttcggcgtccagggacaattaaagctgaaaaacagctctgtcctgattgtgggcctaggcggattgggatgtccggcggcgcaatacttggcggcagccggatgcggacacttggggcttgtcgactacgacgaggtggagcggagcaactttcaccgccagattctgcactccgaggaccgttgtggtatgtccaaggctgaatcggcgaggatagcactgctcgaactgaatccgcactgcgagattcagtgccattccaggatgctgtaccctcataacgccatgcacatcatccgaggctacgacgtggttttggactgcaccgataatgtgcccacccgttatctactcagcgatgcctgcgtcatgctgagcaaaccccttgtctccgggagtgccctaaagatggatggtcagctgactgtatacaactatgccaacgggccctgctacaggtgtatcttcccagttcctccaccgccagaagcagtcaccaattgcggagatggcggagtcctgggtgctgtcaccggtacaattggcgcaatgcaggctctggaggccatcaaggtgattgtgggaatgggagatgtcctcgccggacgccttctaatcttcgatggcggtagcggcgtgtttcgcaatattcgcatacgcagcaagcgacccaactgccatatgtgttccgctcagccgctgatcacggagctaatcaactacgaaatgttctgcggtatgcatgcaaccgacaagaacaatcccatgctacttttgtcgacggatgagcgtttgtccgtggaggactaccaacagaagatccaggctcaaccacatttgcttatcgatgtgcggccaactgcagaattcgagatttgccagctgcccgaggctgtgaatgtgccactggtagagatcctcgacgacagctatcttaagcggcttggcaagcaattggaggacaaggaactgcccatcgtactggtctgccgtcggggtaatgattcgcagatcgccgttcagcatttgcgcaaccgattccccacgcatttcgttcgagacctgattggcggactgcatgcctggacgaacagtgtagaccccagttttcccatatactaa

SEQ ID NO: 30114 - protein, 453 aa, DROSOPHILA
MMESEVDSERTMLKREIAELRAALNQKEQCLRELDSLFSFATRPEQEVVGNDLESPDVAVHTKLTNDDIARYSRQLILPDFGVQGQLKLKNSSVLIVGLGGLGCPAAQYLAAAGCGHLGLVDYDEVERSNFHRQILHSEDRCGMSKAESARIALLELNPHCEIQCHSRMLYPHNAMHIIRGYDVVLDCTDNVPTRYLLSDACVMLSKPLVSGSALKMDGQLTVYNYANGPCYRCIFPVPPPPEAVTNCGDGGVLGAVTGTIGAMQALEAIKVIVGMGDVLAGRLLIFDGGSGVFRNIRIRSKRPNCHMCSAQPLITELINYEMFCGMHATDKNNPMLLLSTDERLSVEDYQQKIQAQPHLLIDVRPTAEFEICQLPEAVNVPLVEILDDSYLKRLGKQLEDKELPIVLVCRRGNDSQIAVQHLRNRFPTHFVRDLIGGLHAWTNSVDPSFPIY

SEQ ID NO: 30115 - DNA, 3923 bp, DROSOPHILA
gatgagcgtttgtccgtggaggactaccaacagaagatccaggctcaaccacatttgcttatcgatgtgcggccaactgcagaattcgagatttgccagctgcccgaggctgtgaatgtgccactggtagagatcctcgacgacagctatcttaagcggcttggcaagcaattggaggacaaggaactgcccatcgtactggtctgccgtcggggtaatgattcgcagatcgccgttcagcatttgcgcaaccgattccccacgcatttcgttcgagacctgattggcggactgcatgcctggacgaacagtgtagaccccagttttcccatatactaatccgacaaaacatatacgttccactatatatgtagatttattcattgtttctcctgcaatgcattggttttttggttttttttacctaagctcttacgtatgtcttgttatcataaataccaggctggtgtaataaaatgaataattcaattctgtcttctttcgttgaatatattgataaatttaatggaatcatatgtcttccgggctctaatgggtgcctataaaaatggaaaagtacggacacaaatgctttgcatatccttagatacatgtcttcgtacgggtaaaactatgaatatgaagtctataattattggtgcagggataacaaaattaactatttttaaaacggcttaaactccttgtaggacccataatacataatgctatcataagactacttcggaaaatcaggaagtcagattaaactttttctatatgtccttttaattcaattccattcaagaaaactaacctttacaatatgctttcgaactgatcggttccaccagttttccaccttcgtatttgaattaagtaatcaaatacaaaatggattgaataattgtagaccattggtggacacaaaaagatcattagcattcgattataaatggaataaatagtgaaagcactgctcattggtgtaggcgagccgacagaaccaatatcattttaatccaaaatgcagacagacatattgcaattttacaaagacaaatcggtttttgtaaccggaggcacaggatttctaggaaaaggtaaagctatataagaagttcatatatctctagataataaattcaaaactaaaatatgttaaaattcaaatttcagtgatcattgaaaagctcctccgttcaacggatgtaaggcgagtttatctattagtaaggccaaaaaagaatgaaacggtggaaggacggtttcaggcctggaaagatgagccggtgagtccaagaagatgatgataaggatgtgggtgcccatcctatagtgacttccatattcgtatgattttaattcgggttgaatgctgatatttttcaggtttttaaaatcctactcaaggctaaaccggaggctctgaagttggtcacacccatttcgggagactgcagcgaacccggtctgggtctcagcgacggggatcgcaggatggtgaccgctgatgtgcaggtgatcatccacagtgccgcctccattcgcttcgtggagccgcttcaaagggctttgaacattaatacgcgtgcaacgcgcctgatgattcagctggccaaggagatgaaaggcttggaagccttcgtgcacatctccacggccttctccaactgcccctcgcagcacattgaggagcgtttctatccggagcacctaacgtgcccggcggccaaggtgctcgaattcaacgagactttgagcccagatttgttggacaagatggctccggctcttatgggaaagtttccgaacacctatacctataccaaggcactggccgagcaggtgatccagatggagggtcaggacctgccaatctgcgtctttcgtcctgcgataagtaagtgatttagtgggctcagacaaatagaaagaagaaatcaaagattgaggtcaaataattagttaacatcatcaactttgtgccttgcagttttggcaaatttcaaggagccgatgtctggatggattgacaaccttcacggagtcgtagccttgatatacggcaatacatatgggatccttcgcctcttgtatgtcaatcctaaggccgatgctataatagttcctggcgactattgtgccaacgtggcgctggcttccggatggcaggtggcaaagaattccgaatcgcgatcgtcttctcagttggcggcgaagaagccgccgcccatttatacactcgccacaaccaagtcaaattccatcacctttgggaaggcggtcaagttgggcatccatcataaccatacgattccggtgaccaaaacgatttggtatccatttgcccactttaccacctgcccttggttgtttaagctgggttgcatattttatcatctgattcctggtttcttcttcgatctcctcctacgtatccaaggtaaaaagcctattctgatgaggagctatcaaaagatccacgaagtacttttgcttctgtttcccttcaatggaaaaacgtacgagatggatatgaataataccaatcaattatgggattcaatgtcgccggaggacaggagtatatttccctttgacatggccactcttaactgggaggagtacttcactcgcatattgtccggaatgcgggtgttcctttacaaggaatcctgggacaccttggaacaagcgaaaaagcgtttattcaggtgcgtagaattcagattcgatagttgctctatctaacatccatggctgtttcaggttttacatattgcatcgatcccttcaacttgtactttgccttgctctcggaaagattgtgtggatcttgtacagtgtaattgctaataattacattaggagcattgaggttaccctgccgtctccggtggccgattttccaagtatttaatccaatgtgcatatgtacatgcatatatggcatccgattgttaggggtccttttttgatcgattttataacgattttcattgtatcgattgccaaaaataaagttatatgctcgtgcgtaattcgattgtatcattctacacttaaccgttttttataataattaaaaaaattcaatttatttctagtttgtaaaacaaaactttgaagcaaataaaatcccgttatttttacgaataccctacacgattacgactaacgcctttacaatacaatatcagctgaccacatttgagtttgctgtacaaaataccgttagcggtgcactcaacagctgagcggcgctcaagctaacccgccgataatgcagacaacaaaaaaagtattaagcaggtagattggcaggcaggtgtaaaatttcggaacacgcacactcttgtgattgtgtatgaatgcgaaacggcgtacgctctcgcaaacgctcctacgagtataaaaaccgttctccgtcgcagcaagcagtcagtatctccacagcagcagaggcgacgggaagacaaagcaatctgaattgaatacgtcctagttttgggtccgtataacaaaaaaatttatagtgcaaagtagctgagataagcgcggcttgacccgggaaaggcgccagagatgggggcatgcaatataacagtcttattgctggtcatcatgttgtgggtgagttatatacgaacacaagccgcaaagatttcgattatgttctatatttaaacatttgtatatatttcattagctaccccatggtctgtccatgggcaatagctgctcggcatcggtgctggaggcgcgtaggttcttcgagctggaaaatgaacaattgcgaaggcgtttccatgaggaattcctttccggctacaactataacaccaatgtaacggaggcgaatcgccaggccatgatcgaagtgtatgcccgcaatgcggaactgaataagcgactcgcgc

SEQ ID NO: 30116 - DNA, 1242 bp, DROSOPHILA
acagaaccaatatcattttaatccaaaatgcagacagacatattgcaattttacaaagacaaatcggtttttgtaaccggaggcacaggatttctaggaaaagtgatcattgaaaagctcctccgttcaacggatgtaaggcgagtttatctattagtaaggccaaaaaagaatgaaacggtggaaggacggtttcaggcctggaaagatgagccggtttttaaaatcctactcaaggctaaaccggaggctctgaagttggtcacacccatttcgggagactgcagcgaacccggtctgggtctcagcgacggggatcgcaggatggtgaccgctgatgtgcaggtgatcatccacagtgccgcctccattcgcttcgtggagccgcttcaaagggctttgaacattaatacgcgtgcaacgcgcctgatgattcagctggccaaggagatgaaaggcttggaagccttcgtgcacatctccacggccttctccaactgcccctcgcagcacattgaggagcgtttctatccggagcacctaacgtgcccggcggccaaggtgctcgaattcaacgagactttgagcccagatttgttggacaagatggctccggctcttatgggaaagtttccgaacacctatacctataccaaggcactggccgagcaggtgatccagatggagggtcaggacctgccaatctgcgtctttcgtcctgcgataattttggcaaatttcaaggagccgatgtctggatggattgacaaccttcacggagtcgtagccttgatatacggcaatacatatgggatccttcgcctcttgtatgtcaatcctaaggccgatgctataatagttcctggcgactattgtgccaacgtggcgctggcttccggatggcaggtggcaaagaattccgaatcgcgatcgtcttctcagttggcggcgaagaagccgccgcccatttatacactcgccacaaccaagtcaaattccatcacctttgggaaggcggtcaagttgggcatccatcataaccatacgattccggacaggagtatatttccctttgacatggccactcttaactgggaggagtacttcactcgcatattgtccggaatgcgggtgttcctttacaaggaatcctgggacaccttggaacaagcgaaaaagcgtttattcaggagcattgaggttaccctgccgtctccggtggccgattttccaagtatttaa

SEQ ID NO: 30117 - protein, 404 aa, DROSOPHILA
MQTDILQFYKDKSVFVTGGTGFLGKVIIEKLLRSTDVRRVYLLVRPKKNETVEGRFQAWKDEPVFKILLKAKPEALKLVTPISGDCSEPGLGLSDGDRRMVTADVQVIIHSAASIRFVEPLQRALNINTRATRLMIQLAKEMKGLEAFVHISTAFSNCPSQHIEERFYPEHLTCPAAKVLEFNETLSPDLLDKMAPALMGKFPNTYTYTKALAEQVIQMEGQDLPICVFRPAIILANFKEPMSGWIDNLHGVVALIYGNTYGILRLLYVNPKADAIIVPGDYCANVALASGWQVAKNSESRSSSQLAAKKPPPIYTLATTKSNSITFGKAVKLGIHHNHTIPDRSIFPFDMATLNWEEYFTRILSGMRVFLYKESWDTLEQAKKRLFRSIEVTLPSPVADFPSI

SEQ ID NO: 30118 - DNA, 3657 bp, DROSOPHILA
aaagcccactccaggagcagcgatacggacgcaaactggattaaactaatggctgattacattgctcgaaatctgaatttatttatcattaatgatattgtatgataaatctatgccattagccgcttccgactacacgcaaaccacttaaaatataagacttatctttgttgtcacacttcataaaagtatatttctgaatcagagaactgaaataaactcagtatttgataaagatacaacaagataaactgcgcctaattaggtttacattttttcagttaataattatcgattcccactttgacgcatttatatttgcacaaaatatatatttatgtgtctacgtttaattacacacctatcccatttattaccaactgcgaattgagtgtgttgaaatttatggtacctcaaagtccacttatctggccatctcatctgacctttcgaactccatgcataaatcagtcgatcctaactcgcctgtaaataaataaaatcaattgcatttgcagctggctagctttcttaatggctggttggttcgatttgtaatgcatttgcaactcccaaacggaaagatacattttatgagctcagagtgcgtcaggtgtgcgaaagataaattgcttatttccaaaatggaggaacccccctttaaagaaataacgaaactcaaaccagttctcaaaatgtagacttttatttgatcgtgtccgactcacgttaagatatatgtttgcagcatagacacaataattattaaatatatatgcaagtagaattccgtaatatatttgtatcgcattagttgtacgtgtgctttaataatttatatttacaatacttaaaagtcgcgtgagaccaagttggctattgataaaataaactttcagtttcgttggggtttttttgtttttgttggcttcattttgggggccaaaagtgtgttgttagcatataagtatgtatatttgtgtagatctttttttttaaatttttgttagtttatgtaagacatacctagttaaagattttttgcgcgattatgcttacacttgaatatatatttaggatatatttatttaaatttctcccttctctctttacctttcttccatattttcgggttaaaacgagcaattagcactgagttaaatctgggatgaaaatttgcataaattgttttcaacattttttctttcggagcaacagtttaacgcttttattcgcctttggtatatataatttcgatatctgttgaatattattttcgtataactcttgaagggaaaaaaaattttgatgaattgcatgaggacatttccgtaataaatatttatgtacaatgaataacaaacaattaaacgtaatgcaaatgaaagatctaggaaagtatcaaagtatgggccaagtttaggtggaaaaagttgacgttcgtcctcaacgttcacaggattcgcagcccggtctcatccagacgccttagacatcggtctcggatcgtcgcctccgaccgggtcctccggcaaagttggctgcagccagacccatgcgatgtttcgcctcctgggtacccgaatatccccgggccaagccaaagtccacggttcgtttggaactttggaagagaaagaagtttagcagttacaaatgatttggttagattaggctctaacaattaaccttactactggtagcatttaaatgagtaagagaactttagttgcacatatgtattaaacaatttctaattagacagttatatctgtcttcaatacttacttctccagatcgtttcgagcccgtatgatggtgcgtccaaagcgagtcatcagttccatgagtaggtcgtcgggcacctcctccagttcgttatagccagcgccaccgtatcctccattggattggctattttaaagtcaacgaaatggaaaattagatggggaatttgttcgtatttatacaatacaatgcggctgaacaggatatctaattacgttggccccgttgaatttgacattcgactggcttaaaatcttcatttgcatgaaaacccaattatatgttaaagcccaaatgtttggagcattttccattcgagcaattgctaattagttggccagggtcaatgaatttttaatagttactttgatggaagggaaattgagtttgaaaccataccacacataaggcatgtccttagaatatgctacatctacatcaacgactcaagtggtgtggccaagtactgcaatttttgacacacttttctgtcaacgtttacattttgttaattgaaaattttccttcgccatgtgagcgttttcttttatatattttatttttcagctgcctaagtatatttccatctcccacatgggcaagattcatactcagtgggataattgcttgcctcaaatatttgtgtggcacatttttcggtttttgcagcttaagtgccggaatttaattaggctatgtccttttgtatgtgttcagccaaattggaaaggatatgtctgcatgtggttggggtacaactaggtgattgggtacaactacctgggcatcggagctgcctcgatgctcgagatggccaagaggcagaagaggaggaaggccaaggcgaagcaagcgcatcggtttgtcatctttgtgcggctgtctcctgcaagaatttaagaaataatttaataaaaatcgaagcttggaaaactgcaatttaagcaaagacattccaatgaaaacgacgattaacgaggtaaaaggctagtgacgaacgcacctttaacactgaaaattgtgccattatcatatcatataaaatgtagtattattttattatcactattatttaataatgtctataacagttttgtcttcaacatatacaaagtcattttacatatttttgaggccataaacttcgtgcgcttttccagtgctttcataaactatttgaaaagccaagcggtttagtgttctaaggtcaacatcaattagaagtcgatggcgaggtgagttgagtttccacccacaacggaagtcgagtggcgtccaggtttttccattaagtgattcattaactgctcaacgaagcagtcccaatctgggctacccttcctgttttctcccccccttcctgcttcactcatttgggttggaaactagctagcagggccaatataacctgttgtccacgagttgtcccgagtttcacaagacctccactttttgcattgctcaactgcacttccacttcctgtcatcgcacacggatgcccctgcatccttcggccgctactcctaaatgggtgttgtcactgttgtgtttgcagttgcaaaactatagacccgcacaattctctgacatcactggctatcctttgacaccccggcagtatacctgacatctgtggcattcccccgggctaccagagtccccacttgacacccggtgacacacatcattgcccggccaacaggctggacaaatgaattggctcccggagctgatggcttctgtcattgccttcataacaccatctcctttgggtccggagtcaacatttatcccacagccagctgggaatttgcggactaccggataacacatttggataaccacttcagtctccttaagtgtcaata

SEQ ID NO: 30119 - DNA, 839 bp, DROSOPHILA
atgacaaaccgatgcgcttgcttcgccttggccttcctcctcttctgcctcttggccatctcgagcatcgaggcagctccgatgcccagccaatccaatggaggatacggtggcgctggctataacgaactggaggaggtgcccgacgacctactcatggaactgatgactcgctttggacgcaccatcatacgggctcgaaacgatctggagaattccaaacgaaccgtggactttggcttggcccggggatattcgggtacccaggaggcgaaacatcgcatgggtctggctgcagccaactttgccggaggacccggtcggaggcgacgatccgagaccgatgtctaaggcgtctggatgagaccgggctgcgaatcctgtgaacgttgaggacgaacgtcaactttttccacctaaacttggcccatactttgatactttcctagatctttcatttgcattacgtttaattgtttgttattcattgtacataaatatttattacggaaatgtcctcatgcaattcatcaaaattttttttcccttcaagagttatacgaaaataatattcaacagatatcgaaattatatataccaaaggcgaataaaagcgttaaactgttgctccgaaagaaaaaatgttgaaaacaatttatgcaaattttcatcccagatttaactcagtgctaattgctcgttttaacccgaaaatatggaagaaaggtaaagagagaagggagaaatttaaataaatatatcctaaatatatattcaagtgtaagcataatcgcgcaaaaaatctttaactaggtatgtcttacataaactaacaaaaa

SEQ ID NO: 30120 - protein, 116 aa, DROSOPHILA
MTNRCACFALAFLLFCLLAISSIEAAPMPSQSNGGYGGAGYNELEEVPDDLLMELMTRFGRTIIRARNDLENSKRTVDFGLARGYSGTQEAKHRMGLAAANFAGGPGRRRRSETDV

SEQ ID NO: 30121 - DNA, 3180 bp, DROSOPHILA
acttcgtgcgcttttccagtgctttcataaactatttgaaaagccaagcggtttagtgttctaaggtcaacatcaattagaagtcgatggcgaggtgagttgagtttccacccacaacggaagtcgagtggcgtccaggtttttccattaagtgattcattaactgctcaacgaagcagtcccaatctgggctacccttcctgttttctcccccccttcctgcttcactcatttgggttggaaactagctagcagggccaatataacctgttgtccacgagttgtcccgagtttcacaagacctccactttttgcattgctcaactgcacttccacttcctgtcatcgcacacggatgcccctgcatccttcggccgctactcctaaatgggtgttgtcactgttgtgtttgcagttgcaaaactatagacccgcacaattctctgacatcactggctatcctttgacaccccggcagtatacctgacatctgtggcattcccccgggctaccagagtccccacttgacacccggtgacacacatcattgcccggccaacaggctggacaaatgaattggctcccggagctgatggcttctgtcattgccttcataacaccatctcctttgggtccggagtcaacatttatcccacagccagctgggaatttgcggactaccggataacacatttggataaccacttcagtctccttaagtgtcaataaataaataaatggagtggtatttctacgtaaacgatagcttaaattatatatactttatacattctcgaacaatttacagaaagtccaatgtgtaattcatttattatatgaaatgcagataagcataaatagccatgactgtaaaacgcaattggagtcgcttactcacaacctatccacttacaaagttgtaaacagattagattgttacaccttcagccttcgaaaggtgacccacttgaggtgacccagacatttggtagaaaattctaagagctcgtttctttattgattcgtaattgcggatcgttaattaggcgactggggcgaagccaatgcggttgttgcccaaatcgaactcggtgtagtactggccaatgaagacatcgcccagaatccagaagtcggtgcccatgtactcgaaggcggacatacagttgccgtccgactggatgatgtaggccgagggcttcaggacgaagttggtgccaccgatgttgaaggtgacatcgggcagggagctgacgcttgagcagtccagatagccatcctcacccacgttcaggatctcggagagggtaatgtaagcattgtagggagccacgatcagggaggtgccggtatcggcaatagcctggcaatcatcacacagcgagtaaccgtcaatggaggatccagccatggtgaactgccagtagccctgctccgagatgggaacgtaggtcagagcgccagagtacagagaggcatcggagccaccgaagatgagttcaccacccatagtggaggtgccatcgcgggccagatagaacgagaagacggagttgtcgaccagaccctgggacaccatgttgtagaacggaggagccacaccatccacggccagggactcataggccataccgagaatgccatcgaagttggcatcgttgaagttggtgcccggctcgttggtggattcagcaaaggtctggctctggatgctcaggccattgacgtcgacggtatcggtggacaggtagccagttaggctgccagtgccatactggatggagaaggattcgccgttggccacgtaggtggagctggcgctggagtcgtactggttgtgggtcaggcaggcatcgctcttgcaggtgttcgatggcacccacaggttcgaggagcctgagtcgaacagaaccttgaagctctgagcgggagttccgatggagatggctccgtagtaagccatattcatcgagttggacagctgttcctcatccacgctgcgaagcgagggcagctggtacttggtgcgcagataggatttctcggccaaaacattctgacgcgtcttcacaaagttctgctccttgaggatcggcacgcgatggagctcggcactggccagggctgccaggagcactactacagcgatggtcttgaacattctcttggtttctagtctactcgagttcgactaactgacgatcggtgtagcgggtctaatttatagcacttgccatcaatcacagcccaaattgtccggtgataagatttgttgaccactccagtcttaagcagtatgagttcttaatgctcgtccggcattcgatatttataatctggcatattatcatttcaggtgtgaggtgatatttcgatcttttcgatagcgttctcaagaagtgaatcctaaattccaatacgcagctggactttgttatgattggacattttgagtgactttgatagtgcttacattacgcgataataataagtgactcttcatggtaatttgttttaatatcattgcatgattaagctcacagataagccaataaattagagatagcgataagtgtgttagggttttagggtaaaaccatgcatttgggaaattcaccaggcatattgggcaaaacccctgcttagcaaaaagccaaatcatttagtaactaaggatgatgatataattgctcgagcattaactcacattaccagaatgaatttgttttcaattggttaatttaaggaaacgtgggaatttgatcgttttcagccaagaggaaacgcattcacctcggcttaaattcccttccaatcaagtggttacactcgagcactttcaccagctatttgctcggtcatataaaaatataaatttcgttttagcagataaaaaagcaaatgcaggtccggcggcagtcatcttcttgccatggctcctactaccattaagcttaagaccctattgaaatcagatttaaaatcaaataaaatgccacttcaattggccaagaaggacaaaggagattcatggtttcgattgcgttttattgccagcgcagggactgtttgcacatgtgggatggtgggatgttgagcagtaatgtgaggatttctgggtggtgattctgtgtggtggtcagccacaggttaattgtggtccagagcatccgctcttat

SEQ ID NO: 30122 - DNA, 1180 bp, DROSOPHILA
tagactagaaaccaagagaatgttcaagaccatcgctgtagtagtgctcctggcagccctggccagtgccgagctccatcgcgtgccgatcctcaaggagcagaactttgtgaagacgcgtcagaatgttttggccgagaaatcctatctgcgcaccaagtaccagctgccctcgcttcgcagcgtggatgaggaacagctgtccaactcgatgaatatggcttactacggagccatctccatcggaactcccgctcagagcttcaaggttctgttcgactcaggctcctcgaacctgtgggtgccatcgaacacctgcaagagcgatgcctgcctgacccacaaccagtacgactccagcgccagctccacctacgtggccaacggcgaatccttctccatccagtatggcactggcagcctaactggctacctgtccaccgataccgtcgacgtcaatggcctgagcatccagagccagacctttgctgaatccaccaacgagccgggcaccaacttcaacgatgccaacttcgatggcattctcggtatggcctatgagtccctggccgtggatggtgtggctcctccgttctacaacatggtgtcccagggtctggtcgacaactccgtcttctcgttctatctggcccgcgatggcacctccactatgggtggtgaactcatcttcggtggctccgatgcctctctgtactctggcgctctgacctacgttcccatctcggagcagggctactggcagttcaccatggctggatcctccattgacggttactcgctgtgtgatgattgccaggctattgccgataccggcacctccctgatcgtggctccctacaatgcttacattaccctctccgagatcctgaacgtgggtgaggatggctatctggactgctcaagcgtcagctccctgcccgatgtcaccttcaacatcggtggcaccaacttcgtcctgaagccctcggcctacatcatccagtcggacggcaactgtatgtccgccttcgagtacatgggcaccgacttctggattctgggcgatgtcttcattggccagtactacaccgagttcgatttgggcaacaaccgcattggcttcgccccagtcgcctaattaacgatccgcaattacgaatcaataaagaaacgagctctt

SEQ ID NO: 30123 - protein, 372 aa, DROSOPHILA
MFKTIAVVVLLAALASAELHRVPILKEQNFVKTRQNVLAEKSYLRTKYQLPSLRSVDEEQLSNSMNMAYYGAISIGTPAQSFKVLFDSGSSNLWVPSNTCKSDACLTHNQYDSSASSTYVANGESFSIQYGTGSLTGYLSTDTVDVNGLSIQSQTFAESTNEPGTNFNDANFDGILGMAYESLAVDGVAPPFYNMVSQGLVDNSVFSFYLARDGTSTMGGELIFGGSDASLYSGALTYVPISEQGYWQFTMAGSSIDGYSLCDDCQAIADTGTSLIVAPYNAYITLSEILNVGEDGYLDCSSVSSLPDVTFNIGGTNFVLKPSAYIIQSDGNCMSAFEYMGTDFWILGDVFIGQYYTEFDLGNNRIGFAPVA

SEQ ID NO: 30124 - DNA, 4600 bp, DROSOPHILA
gacaagacagctggacatatgaacattctactgtcaaagttccggcgagtcatgttaattaagagaaattatgcaagcgaattgctacttttggtcaacctactcataatacataattcgtcaaaggcgagacatcaaagaaattgcattttgctgtactcccactggatagatggttcggaaatgaggagttttacgaaaaaaatatatataaaatatatatgcatataaatcagttattatgaaaattgaaattgactttgttgtgtgtacacgttgcaacttcccgctgagcaaagaccgttgccataatgcatattaggattttatgacctcaaaggatgccacgaagggttgttggcatccactttgagccgcgatatgtcaactggaatttgcgccattttccgcgagctggcaatctggaaaaggcattcaaaatcggcgaccataaggtaaaatgtacatgcttgatttcatagaatgcagatatgcgttatgggtgaatattcatggaaatcgatagcatgccattgggcaataagcgattttaaatgcgaaatttgcatactataacaactgcatatgcacaattgcataatatattttattttaatcctatttcaataatgtaatatacaaagtgcgagtatgaatttccccagaatattaataatttttgattgtcatggcaattaagtaacatatatgcctacacaaccatcatggcggataagtaatattacatttgcttgaatgacaaaaaaattggcattgagtgattaaaaagagagaatgaattaaagaaaaacaatatatttgtagtagtataggaatttattgaattacatcatatgtggagctgattcttgattcttgtaatgcagatcccgcccagggttcacaacaaagatcccagtgttcatagccaaaaagagtcccgagccgcaaccgcgatcgaatgaatgttactaaatgagcggttattaaaagagataagtttccatacttaaaacattcgtttattatctaaaactgttataaaaattgcaaacggaattatagcaagattgttatgcatatatagaaataccctataattaacaatgagcaatgagactgacgtattactcttcatcgtcatcatcatcatcgtcttcctcgtcatcgtcttcctcatcgtcgtcctcgtcctcatcgtcatcaccatcttcattatcgtcatcgtcatcttcatcttcatcttcatcagtatcatcgccatcatgtccctcctcatcctcatcgccactttcgccagcactgtcctctgcctcctcaacttcctcctcctcatcggattctgcatcagcctttgcgccttcgctgctggactccttgcgagcttttttcgcgggcactgctgcgtccccgccatcattgtcctttggagcggcatcagcagccagcagtgcagccttctctttgcgcaactgggccttgcgcttgacctggtcgctggtgagcttaatgaactccgcatccttggtcatggcaaatttggacagcacctcattggcctgcttcttaagcttgagcatacgctgctcgcgaggacccacaacatatggtacatcctccggtggtgcacacatgctgacatatagtggcagcgcactggttcccgtgatatcgatcttgaggtacatcgaacgaatgttggccagtccacccggatagacttcctggagctgcttgatcaccagcagaatgttctcagccaactgctcggcggtgatttcgtggttgcccaccggaacggcaattagatctccctttgacaactgcctgaatgcggtgcgggtgagggcgcgggtcacctcctgtggcagcttatcgttgtccttgctcagacgcagtgagtggagcacgttgcggggcttctgggtgttctacaaatggataaggcagtggtattgcaaatttagaaaatagttaataaattctattaaagttcttcctagatttctataaaatccgcgtaattcatatggctgaataaaaatacagtctcccgatttgaaaaatgttttacaatttggaagagaataacatttaatatggctggattaatctcatttcatcataaaacattgcgaaggataccctgattcagaatatatatgaataccttaaaaaaatacatacgaatgttcgcgaccttcccacaagatctatttgcggacaaaagaaagatttgtcttcctggaacccactcattagcaggcagaatttcttaccttgcccaaaaaggcagtagcctgtcctgacaaacgaccgtcgcacaacaggtagtcgtagctgttgaggaacttgcgcttggcctcaaaggaacccatctcgttgcgcagctggttgaatggaacgacggttaggcgctgtttcacaccagcctctcgcaacatatcctcgtagtgttgcttggtgggatcatagtcaaacttggctccacgctgcaaatctggcacgatgagagccacatcgtcgtccttgcccaccaacgaatgcttcagattcaacttgaccatgcgctttgggcagctggggatcttgtagctgcaaacttgcaaaacatagcggtaatcagagaagatcgaggtgttcttcttcttttccacctcctcggagacaacagacttcaatgccgcgcacaccttcgtcacattattttcattgacaatctcgtggaaccgtttctcgtcaaaggccttcaattcgaaggtcagctcaactggttttttagacttggcaggctctttgttgacagcgttgcctttggcctgaccaggcttggacttgctgagggccttcttggatttgggtggactggcaggcttagacagcttttgcaccgcctttgccttcttttggagctgcgaagcgggctgagcctttgctggtttagctggtgctgcttgtttttcggttttcgcagtctttttcgttagtgcagcagtttgtcctgactttttagctgcaggaaccttcttaatagaaggtacgggatcttgcacagacttctttgctggtgctggctcttttttggctttcacaggagcagctttagtctttttctcttgctttttcggtggcacaggggattctggaggagccaaaatcaaaggttttttggcttcgatctttttgccgaccggagccccagaagcggccggctttgccttagacttcttcgccgctggtgcgggggcagccggcgactcaggaggagccaaaattagtgggcgcttggccgcttttgactgcttcttctcggctcccttcttggacacctccggctccttcttgatggcatcttttttcaccggagccgcgttctttgcctttttgttgctggccaactccagagtagcgtctgtggccagtttcttggtcttttccggtttaccctttttcttaaccacgccctcgatgctggcgctcttgttcagcgacttgggctgcggtttctgtactttaaccatattattttttgcttttttgacagatgcgtaaaaactcgagcaaaactatatttaaaatgcaccacaaccacacgtgctacgctttaatatcgatatgttcagaatcgcaaaacgtagctacagtcgatatcgggaactattttcattaccgatgtctcaggcacggtcacaactttagccaatacacacccccttcgcagggccgagcaccaatagcagctgtttcaccaaaaccgattggaaaattgaccgttatagcatatcgatttcgatttgtatcccatctctatttctcccttagaagataaaattaaattttttaattttgtaatgtaatatagaaattatgatgatgattatatgattgagtatttctactctaatccaacaaaaaaacaagtggctacgttacttgctttgctttctttaattagggtactatttacatagcaaacagttattttaagtaaataattctaagaatagtcaaattccgcaagctgcacgcgtgcctaatcgcctcaacaggacacagaatgtccttgactcacacgccgccacacacaaagcgcccacgcatcacatacacatacgatggatccgcgcacatggaacattaaaagtaccgacacatggcatctcccatggagcaccaaattggggactccccagacacacagtacatgctaaagatattcttgcaacaaggattgctatgtgggcatacgtgtgtgcttgtgacaactttctggcacgtgactggagacgagaaaactttgctggcttaaggcaattacaatatgaaggagtcctagcgtgtacgtttaaagcttcagcttcttggcatccgccttggcggtatcctttttcggtcgctttttggatgctgtagccgctgcggtatcctgcagtttgtggaagaaagcctttgaggacttcagagctccctggtcgttgctgctggcattgatctgcaagaaaatcgtttaaagtttgattcatttagaattcaaaatcgctcaagaatagcaattaaatacaaaacataaaacagagataaactaaaatgttatatacct

SEQ ID NO: 30125 - DNA, 2252 bp, DROSOPHILA
tagcacgtgtggttgtggtgcattttaaatatagttttgctcgagtttttacgcatctgtcaaaaaagcaaaaaataatatggttaaagtacagaaaccgcagcccaagtcgctgaacaagagcgccagcatcgagggcgtggttaagaaaaagggtaaaccggaaaagaccaagaaactggccacagacgctactctggagttggccagcaacaaaaaggcaaagaacgcggctccggtgaaaaaagatgccatcaagaaggagccggaggtgtccaagaagggagccgagaagaagcagtcaaaagcggccaagcgcccactaattttggctcctcctgagtcgccggctgcccccgcaccagcggcgaagaagtctaaggcaaagccggccgcttctggggctccggtcggcaaaaagatcgaagccaaaaaacctttgattttggctcctccagaatcccctgtgccaccgaaaaagcaagagaaaaagactaaagctgctcctgtgaaagccaaaaaagagccagcaccagcaaagaagtctgtgcaagatcccgtaccttctattaagaaggttcctgcagctaaaaagtcaggacaaactgctgcactaacgaaaaagactgcgaaaaccgaaaaacaagcagcaccagctaaaccagcaaaggctcagcccgcttcgcagctccaaaagaaggcaaaggcggtgcaaaagctgtctaagcctgccagtccacccaaatccaagaaggccctcagcaagtccaagcctggtcaggccaaaggcaacgctgtcaacaaagagcctgccaagtctaaaaaaccagttgagctgaccttcgaattgaaggcctttgacgagaaacggttccacgagattgtcaatgaaaataatgtgacgaaggtgtgcgcggcattgaagtctgttgtctccgaggaggtggaaaagaagaagaacacctcgatcttctctgattaccgctatgttttgcaagtttgcagctacaagatccccagctgcccaaagcgcatggtcaagttgaatctgaagcattcgttggtgggcaaggacgacgatgtggctctcatcgtgccagatttgcagcgtggagccaagtttgactatgatcccaccaagcaacactacgaggatatgttgcgagaggctggtgtgaaacagcgcctaaccgtcgttccattcaaccagctgcgcaacgagatgggttcctttgaggccaagcgcaagttcctcaacagctacgactacctgttgtgcgacggtcgtttgtcaggacaggctactgcctttttgggcaagaacacccagaagccccgcaacgtgctccactcactgcgtctgagcaaggacaacgataagctgccacaggaggtgacccgcgccctcacccgcaccgcattcaggcagttgtcaaagggagatctaattgccgttccggtgggcaaccacgaaatcaccgccgagcagttggctgagaacattctgctggtgatcaagcagctccaggaagtctatccgggtggactggccaacattcgttcgatgtacctcaagatcgatatcacgggaaccagtgcgctgccactatatgtcagcatgtgtgcaccaccggaggatgtaccatatgttgtgggtcctcgcgagcagcgtatgctcaagcttaagaagcaggccaatgaggtgctgtccaaatttgccatgaccaaggatgcggagttcattaagctcaccagcgaccaggtcaagcgcaaggcccagttgcgcaaagagaaggctgcactgctggctgctgatgccgctccaaaggacaatgatggcggggacgcagcagtgcccgcgaaaaaagctcgcaaggagtccagcagcgaaggcgcaaaggctgatgcagaatccgatgaggaggaggaagttgaggaggcagaggacagtgctggcgaaagtggcgatgaggatgaggagggacatgatggcgatgatactgatgaagatgaagatgaagatgacgatgacgataatgaagatggtgatgacgatgaggacgaggacgacgatgaggaagacgatgacgaggaagacgatgatgatgatgacgatgaagagtaatacgtcagtctcattgctcattgttaattatagggtatttctatatatgcataacaatcttgctataattccgtttgcaatttttataacagttttagataataaacgaatgttttaagtatggaaa

SEQ ID NO: 30126 - protein, 681 aa, DROSOPHILA
MVKVQKPQPKSLNKSASIEGVVKKKGKPEKTKKLATDATLELASNKKAKNAAPVKKDAIKKEPEVSKKGAEKKQSKAAKRPLILAPPESPAAPAPAAKKSKAKPAASGAPVGKKIEAKKPLILAPPESPVPPKKQEKKTKAAPVKAKKEPAPAKKSVQDPVPSIKKVPAAKKSGQTAALTKKTAKTEKQAAPAKPAKAQPASQLQKKAKAVQKLSKPASPPKSKKALSKSKPGQAKGNAVNKEPAKSKKPVELTFELKAFDEKRFHEIVNENNVTKVCAALKSVVSEEVEKKKNTSIFSDYRYVLQVCSYKIPSCPKRMVKLNLKHSLVGKDDDVALIVPDLQRGAKFDYDPTKQHYEDMLREAGVKQRLTVVPFNQLRNEMGSFEAKRKFLNSYDYLLCDGRLSGQATAFLGKNTQKPRNVLHSLRLSKDNDKLPQEVTRALTRTAFRQLSKGDLIAVPVGNHEITAEQLAENILLVIKQLQEVYPGGLANIRSMYLKIDITGTSALPLYVSMCAPPEDVPYVVGPREQRMLKLKKQANEVLSKFAMTKDAEFIKLTSDQVKRKAQLRKEKAALLAADAAPKDNDGGDAAVPAKKARKESSSEGAKADAESDEEEEVEEAEDSAGESGDEDEEGHDGDDTDEDEDEDDDDDNEDGDDDEDEDDDEEDDDEEDDDDDDDEE

SEQ ID NO: 30127 - DNA, 4248 bp, DROSOPHILA
atggcatcttttttcaccggagccgcgttctttgcctttttgttgctggccaactccagagtagcgtctgtggccagtttcttggtcttttccggtttaccctttttcttaaccacgccctcgatgctggcgctcttgttcagcgacttgggctgcggtttctgtactttaaccatattattttttgcttttttgacagatgcgtaaaaactcgagcaaaactatatttaaaatgcaccacaaccacacgtgctacgctttaatatcgatatgttcagaatcgcaaaacgtagctacagtcgatatcgggaactattttcattaccgatgtctcaggcacggtcacaactttagccaatacacacccccttcgcagggccgagcaccaatagcagctgtttcaccaaaaccgattggaaaattgaccgttatagcatatcgatttcgatttgtatcccatctctatttctcccttagaagataaaattaaattttttaattttgtaatgtaatatagaaattatgatgatgattatatgattgagtatttctactctaatccaacaaaaaaacaagtggctacgttacttgctttgctttctttaattagggtactatttacatagcaaacagttattttaagtaaataattctaagaatagtcaaattccgcaagctgcacgcgtgcctaatcgcctcaacaggacacagaatgtccttgactcacacgccgccacacacaaagcgcccacgcatcacatacacatacgatggatccgcgcacatggaacattaaaagtaccgacacatggcatctcccatggagcaccaaattggggactccccagacacacagtacatgctaaagatattcttgcaacaaggattgctatgtgggcatacgtgtgtgcttgtgacaactttctggcacgtgactggagacgagaaaactttgctggcttaaggcaattacaatatgaaggagtcctagcgtgtacgtttaaagcttcagcttcttggcatccgccttggcggtatcctttttcggtcgctttttggatgctgtagccgctgcggtatcctgcagtttgtggaagaaagcctttgaggacttcagagctccctggtcgttgctgctggcattgatctgcaagaaaatcgtttaaagtttgattcatttagaattcaaaatcgctcaagaatagcaattaaatacaaaacataaaacagagataaactaaaatgttatataccttttgaacattgcgattcttggtgattgtcttgagcagcttggcatccgcttccttctttgtgggcgccttgccctccttggctcgctgaagctcgcgctgctccagagccgagtggatggcccgctgcttttgcttctttttgcggcgctcgcggttcttatccgttcgatcgcgttcggtcttgccaagtggagcgtgcttgggtccgcggaacacctcctcgggtgccagcagcttggcatcgctcaccgccagcggggccacctcttccatgtgaactgctggtgtgttcgttacgatcttgatctccggcgccaccggtttcggcgtgaagtggaaattggagagggcgtccaatttaaggaatagggaacgcattgcccgcttgatttcttggtgttctttcggttccggaccagttttgtcatcggcatcgcgattgggatcgagtttttccatttcgcgctgatactgcgcctcgtagatctgcgacagcgattgttttgatttctcctggtcaagcacaagttgttttctgtactcttgcggggtgttcaccggtcgcacagtgcgctccacatcgtcccatgctttgtcgcgaatacgctgcttaattatgtcctcgatggagcggttatcctcttccgtgattggcgccgttggcctggtggtcgaatcgaagtcgagaatctcctcaagcagtgagttctggggccgattggctgcctttacttcgcctttgagctgccaaggcttctcgcctaggacaatgtcttcgtagtcgcggatgcgttgaaacaaacgagcctctctcatctcattggatgattgggacggtggctctgtgggttgtggctcctcctcttctttctccgaatccgagtctgaatcgctggcaggttctatgccactttttgccacgaattcggattcatctatttcgctggccgcctcatctggatcttgatcattttcaggttcatcatcgccctcgtctccttcgctttgatcagaatcgccctctttgggatttgcatcctcatccggttcattttcattttcactctcgttttcattgaagaaatctttctgcttgcctttgttaatctttttagaatgctctgtcagttcctcattcatgtcaaagaagtccgcatagttgacattcccctcctcatcgtcctcctcatcttcgccaagaccaaaatcctctgcgaaatgatctatatcatcggcctgctcaacgcgtttcttgctgttcaggcggcgcatctccttggcatcctcctgctccaggaactcattcatctcttccaacttgaagaaggtatcgtccaccacagagttgcgtagtcgcttgtttcgtttgtctttcggcggcgcggtcttctgcttttgtagccctccatcctcgtcgctgaagtctgattcctcatcttgttcctcatcgcctgagtcttcagcttgtattacttcgtcttcttcctctatttcttcaccatcgtccagttcaatgcccaggtgctgctcgcgcatcgccgtcagcctggcggtttgctccagcacctgttggaacactagttcgttgcgaatctccagttgctgccagatctgctcctcgtccatttgctccagcaccaattccggcagcagttccttcttgttcgccacatcctcgctgatgctaacggcgtatgtctgctggataagctgctcgatggcattcacttgttccggctgtggcctgaaatataaattgttttgactacgtttgaaaaaacacgtgcgcggtctttggaaggaaaacaaactggagaaaacgctctggattcttggtcagctgctcgaagttctctgcgatttccttgaagacattcgcctccttggattttttacttccaatcatttttactactgctttctgtgcttaattaaatgaaatatatattccaacaattcgagcgcaagagcgggtccaaaaacaacaaccagttggtgagagatggaacagatacatagagatgagcgcgtgatacaagtacaagtttttccaagcttaaaaactttatgcgagttggaatcctgttttgagccaaaatttgttattccaaaaataataaatatatttaacttgaagaaaacaaagctctaaaaaaaatcataattgcttacacagtagaccagaagccgtatatcgtgacaaggaaatcgataatttatcgaaggcctttgccaccaccaagccagctgtaggcggctttttacaggcggagtccgttcacaaaaactatgcccaactagaagatggattcgaagttctttaaactgctcctgctgggcggcgccgtgcgcttctacttctgtcgcacgccgctggctccgatgattggcaaccgagtggagttcgcgacacctttaaattcacacaagcgcagtaagtaaacaaagtagacatcaaatagatgaacaagtctgaatggagttattcttgcagtgcaagaggggatatttcttctacagagtggcattgatccctatctgggcgacctggtacacgaatcgccgctgatactcagcgcgctctccggattgtttcaaaaatacccgcagtttctgccgatattctacataatcctggatatctgcacggcggccctgctttatgcgatgagtctgagattcgtcaagcaaaagcaggatcagcaggacaaggagcgaaaggagtatgccaaggatacggaagagctgcagtttggcccgctggacaagcttgacattccggaacttgtgatcgtggcatatcttttcagtccactgactgttatgagctgcattggaatgacctccaccgtgataagcaatctgttcctggctttctttttctactgcctcgtgaagggaatgctcattccatgccttctagtcctcgcgttcgaaactgtccgcagcttctatcccattgtacttatagcaccactgctcctggtctttt

SEQ ID NO: 30128 - DNA, 2075 bp, DROSOPHILA
ctggttgttgtttttggacccgctcttgcgctcgaattgttggaatatatatttcatttaattaagcacagaaagcagtagtaaaaatgattggaagtaaaaaatccaaggaggcgaatgtcttcaaggaaatcgcagagaacttcgagcagctgaccaagaatccagagcgttttctccagccacagccggaacaagtgaatgccatcgagcagcttatccagcagacatacgccgttagcatcagcgaggatgtggcgaacaagaaggaactgctgccggaattggtgctggagcaaatggacgaggagcagatctggcagcaactggagattcgcaacgaactagtgttccaacaggtgctggagcaaaccgccaggctgacggcgatgcgcgagcagcacctgggcattgaactggacgatggtgaagaaatagaggaagaagacgaagtaatacaagctgaagactcaggcgatgaggaacaagatgaggaatcagacttcagcgacgaggatggagggctacaaaagcagaagaccgcgccgccgaaagacaaacgaaacaagcgactacgcaactctgtggtggacgataccttcttcaagttggaagagatgaatgagttcctggagcaggaggatgccaaggagatgcgccgcctgaacagcaagaaacgcgttgagcaggccgatgatatagatcatttcgcagaggattttggtcttggcgaagatgaggaggacgatgaggaggggaatgtcaactatgcggacttctttgacatgaatgaggaactgacagagcattctaaaaagattaacaaaggcaagcagaaagatttcttcaatgaaaacgagagtgaaaatgaaaatgaaccggatgaggatgcaaatcccaaagagggcgattctgatcaaagcgaaggagacgagggcgatgatgaacctgaaaatgatcaagatccagatgaggcggccagcgaaatagatgaatccgaattcgtggcaaaaagtggcatagaacctgccagcgattcagactcggattcggagaaagaagaggaggagccacaacccacagagccaccgtcccaatcatccaatgagatgagagaggctcgtttgtttcaacgcatccgcgactacgaagacattgtcctaggcgagaagccttggcagctcaaaggcgaagtaaaggcagccaatcggccccagaactcactgcttgaggagattctcgacttcgattcgaccaccaggccaacggcgccaatcacggaagaggataaccgctccatcgaggacataattaagcagcgtattcgcgacaaagcatgggacgatgtggagcgcactgtgcgaccggtgaacaccccgcaagagtacagaaaacaacttgtgcttgaccaggagaaatcaaaacaatcgctgtcgcagatctacgaggcgcagtatcagcgcgaaatggaaaaactcgatcccaatcgcgatgccgatgacaaaactggtccggaaccgaaagaacaccaagaaatcaagcgggcaatgcgttccctattccttaaattggacgccctctccaatttccacttcacgccgaaaccggtggcgccggagatcaagatcgtaacgaacacaccagcagttcacatggaagaggtggccccgctggcggtgagcgatgccaagctgctggcacccgaggaggtgttccgcggacccaagcacgctccacttggcaagaccgaacgcgatcgaacggataagaaccgcgagcgccgcaaaaagaagcaaaagcagcgggccatccactcggctctggagcagcgcgagcttcagcgagccaaggagggcaaggcgcccacaaagaaggaagcggatgccaagctgctcaagacaatcaccaagaatcgcaatgttcaaaagatcaatgccagcagcaacgaccagggagctctgaagtcctcaaaggctttcttccacaaactgcaggataccgcagcggctacagcatccaaaaagcgaccgaaaaaggataccgccaaggcggatgccaagaagctgaagctttaa

SEQ ID NO: 30129 - protein, 662 aa, DROSOPHILA
MIGSKKSKEANVFKEIAENFEQLTKNPERFLQPQPEQVNAIEQLIQQTYAVSISEDVANKKELLPELVLEQMDEEQIWQQLEIRNELVFQQVLEQTARLTAMREQHLGIELDDGEEIEEEDEVIQAEDSGDEEQDEESDFSDEDGGLQKQKTAPPKDKRNKRLRNSVVDDTFFKLEEMNEFLEQEDAKEMRRLNSKKRVEQADDIDHFAEDFGLGEDEEDDEEGNVNYADFFDMNEELTEHSKKINKGKQKDFFNENESENENEPDEDANPKEGDSDQSEGDEGDDEPENDQDPDEAASEIDESEFVAKSGIEPASDSDSDSEKEEEEPQPTEPPSQSSNEMREARLFQRIRDYEDIVLGEKPWQLKGEVKAANRPQNSLLEEILDFDSTTRPTAPITEEDNRSIEDIIKQRIRDKAWDDVERTVRPVNTPQEYRKQLVLDQEKSKQSLSQIYEAQYQREMEKLDPNRDADDKTGPEPKEHQEIKRAMRSLFLKLDALSNFHFTPKPVAPEIKIVTNTPAVHMEEVAPLAVSDAKLLAPEEVFRGPKHAPLGKTERDRTDKNRERRKKKQKQRAIHSALEQRELQRAKEGKAPTKKEADAKLLKTITKNRNVQKINASSNDQGALKSSKAFFHKLQDTAAATASKKRPKKDTAKADAKKLKL

SEQ ID NO: 30130 - DNA, 2560 bp, DROSOPHILA
ctagtcctcgcgttcgaaactgtccgcagcttctatcccattgtacttatagcaccactgctcctggtcttttcacggaattcggtcaggaggggtgtggctatagcggcgctctttatcgtcagttgtctaatcgtggcagttgcgaactattttgtgctgaacagctggaacttcctggatggaacgttgggttttatgtaagcaagaactatcttattagttatctgtttgtatttttacgtatttaactatcttacagattttatttccgcgatctacagccaaatatcggtctcttctggtacttttttactgaaatgtttgagcacttccgcaccatgttcctaatcacattccaattgaatgccaccgtattatacctggtgccactaagtattaagctgcgcaaggagcccctactgctagccacggtattggtggcccttatggccgtttttagggcgtatcccagcctgggcgatgtcggcttttatctggccttgcttccgctgtggaaaagatgttggaaatgtaagttatctggctcacgtagttatttcaactgctaagcactttggtaatttctttcagtcatggcccatggctttgtggtctttacgttcttcctggtcactctatctatgatgggagccctttggcatttgtggatctatgcaggatcggcaaatgccaatttctatttcggtgccactcttgcgttttccactgggcagatatttctaatcaccgatctgctgttcgcgcacgttaaacgtgagttctgcttgttcaatggtcagaagattctgatcgatggcgaggaagcgaggatagtcttaaagtaagcattaacagtatcagtatgacggacagaatccaggaactttgtacagatgcagaatgcgcttcctaatggcagccgagcatactcttaagataagttaactccgaacaatatcagattaaacaaaatattttatttgattgtaatggttttttactgatgtgaatagcccgtcttcgtcttgcggttgaggaacttgtacaagtagaggatgcgtttctccatttcccgccacttggtgggtcgggcgatgggatacttggacttctcgagcagcttacgtttgcggagaagcacctggtactcattgccggagacgccacgcagccaggatggcagggagtagagcaccttgactggatgcagacgatcgttgcccaggatgtcgatgtagtcgttctggccaaacaacgcacgtttctttgaccaggcgttctttgggcgatacaccggcatcggcagtttctgtccattgtccacatgggggagtagtccgctcttgaagatcttgtcctcatatccatagcgccgcacagtgggaccgcgtgctcgtcgctcggcatgggataactgccgcacggtgtagctggttgatgccatcggagccaagggttttccgcccacagcaaggagcgtggctctgccaagtttttgaatcatacttcccagccaagacatggctatgttttaattaacgattagataattgtaaacagtgcctggaaatgggtgaaaaaacacgaacagaacatctgtttttgctggcaagccggcagtgttggaaaatgtagtgatttgttgtagctaattagtacaaggaatatgagaatacaaattggtagctacggtaaaaagtatccgaaattttatatatgtgtcacttcataaatttggggtgtaaaacaattttttataggtattgctctgtgtacaagtaatcgaatcagtgggcaatcgaaagtgccggtaagtgtaatcgacattcatcagctgattgcagtcagaggcatttgtttgaaattgtttattggacattcatccccagcagcacaatgatggaatccgaggtagattctgagcgaaccatgctaaagcgcgagatcgccgagctgcgcgcagcgctcaaccagaaggagcagtgtctgcgagaattggattccttgttttccttcgccacaaggccagagcaggaggtcgtcggaaatgatctggaatcgcctgatgttgcagtccacacgaagttgaccaacgacgatattgcgcgttacagccgccagcttatactgcccgacttcggcgtccagggacaattaaagctgaaaaacagctctgtcctgattgtgggcctaggcggattgggatgtccggcggcgcaatacttggcggcagccggatgcggacacttggggcttgtcgactacgacgaggtggagcggagcaactttcaccgccagattctgcactccgaggaccgttgtggtatgtccaaggctgaatcggcgaggatagcactgctcgaactgaatccgcactgcgagattcagtgccattccaggatgctgtaccctcataacgccatgcacatcatccgaggctacgacgtggttttggactgcaccgataatgtgcccacccgttatctactcagcgatgcctgcgtcatgctgagcaaaccccttgtctccgggagtgccctaaagatggatggtcagc

SEQ ID NO: 30131 - DNA, 560 bp, DROSOPHILA
tttacaattatctaatcgttaattaaaacatagccatgtcttggctgggaagtatgattcaaaaacttggcagagccacgctccttgctgtgggcggaaaacccttggctccgatggcatcaaccagctacaccgtgcggcagttatcccatgccgagcgacgagcacgcggtcccactgtgcggcgctatggatatgaggacaagatcttcaagagcggactactcccccatgtggacaatggacagaaactgccgatgccggtgtatcgcccaaagaacgcctggtcaaagaaacgtgcgttgtttggccagaacgactacatcgacatcctgggcaacgatcgtctgcatccagtcaaggtgctctactccctgccatcctggctgcgtggcgtctccggcaatgagtaccaggtgcttctccgcaaacgtaagctgctcgagaagtccaagtatcccatcgcccgacccaccaagtggcgggaaatggagaaacgcatcctctacttgtacaagttcctcaaccgcaagacgaagacgggctattcacatcagtaa

SEQ ID NO: 30132 - protein, 168 aa, DROSOPHILA
MIQKLGRATLLAVGGKPLAPMASTSYTVRQLSHAERRARGPTVRRYGYEDKIFKSGLLPHVDNGQKLPMPVYRPKNAWSKKRALFGQNDYIDILGNDRLHPVKVLYSLPSWLRGVSGNEYQVLLRKRKLLEKSKYPIARPTKWREMEKRILYLYKFLNRKTKTGYSHQ

SEQ ID NO: 30133 - DNA, 2606 bp, DROSOPHILA
gaatttcaatttgaattctaattgagaaaagagcgaccagaaacgacactaaacataaatgcaatacacgcgcttctgtgtatggaggcaatgaaaataaataaatacaagtacgaaaacatcacacaaagatcaagttcaatgaattttcacacagtgacagaaatggagactcaccaatttacggggagcggtggtaattttgtttaattgaatattttcgttctctgtttttgagcgcgcgcaaaataaatatataaatatatatatatatatatcagttttaaaataacgatgacaaaatcaaccaagaacgagcgcaccaaacggaacggatcgcggttcccaccgccgcaaatgggggcgtggcagatcgtgacgcccagcagataaatctctgccaacagcgtatcgaactaatcggataatgcacaacgaacggataatggctaataaagtgaataaccctaaaaatgtcaagcaacttggctgcatatcttgattaatgaacggtgcgtttcgtcactgcgtgaaatgccttcgaaggatgttgaaccgttctaaagtcatgattattttaacatagttttatagccgcacatttcccctctgtgtatcacctcaaaacccatcaattcattgaagaacccataaacattcacatctggattgctttttagacgaccttggctttgcctaggtgcaaagagcttgacctcccaattgatcacccatggaaattaatgatgaatgccaaactgtaaaacaaactcttatttatatccttgactcgcaaatactttttctatctaaatatttactccttctattgctgctttttaatgcatcaaccataaacaagtcttcgtgttcaaaatagcatttaataatagtttactatctcatgctttgttaaatgaacgtaatgaataatcttaaattaaaaagtaataatgtaactatggattttttctgattaaaaagcgtgtgcagtttgttgttagtagattagtagagcccgcaaaccaaacatagggaaaacaaactgaaaaacgtacccaaaaaacatttgcgttatctgtgcgggcgtctggcagacattgtggacattgagggtgcgtgggcgggcgtatagcattccggcgggggtgagcgggggcggtagtaccgcctcgtgcagaatcgccgacgtcgaattgctccggatggtggtatatgcccgataatgcgaactggccgaggatcgcagctccacagatgtggtcgtcgtactggtggtctcctcgatatcctcgtccttcaacttctggtcattattcgatgataataccgccgtttccttggccgattccaattccttatccatcatgattgggtggtgacgactcaatggctgcggggtggctggtggcattgtggtgctggagctggcggttgatttggctgccgattgcttggcggagcgcaatttgataatgttctggccactcagtttcttggcccgcttgatgttgttgttgttgctggcgttgctggcggtgcttatggtagtattattactcgaatttgtagttgaattgctggcataacgatgttgcaagcgcattttgcctagataactgctgctttcagttttcatatgccgattctcgtccgatttgttgcatttgtttgtcagttttttatggggtatttcgtggccattagcataacttgtccattctgtgatctcgactcgccggcaacaacatttcacacgacgctgatgatgcgacgccgctttcactttcaactgaagaatttatgtgaaaataaacaatgttcaaaaactcatatagaaagcaacaaaaaggcaaacaataaatataattcaaatgcagcgaagagaattcactgtgttcgtgtgtgtgtgtgtgaaagagtgtgtttatatcgacatttgtctggcgaaaataaatcaagaaattttatttcccacttttttttaatgttgtttagcagctagacggcacttggttgttgatttttgtttggtttttatgtgtgggtgctcttttggcaaatatttatgcataaatatacatcttgaggcattacgtcttgcacaaattaaattgatttctttggcggcgaataagtgtgcgtgtgtatacgcgtttgtttttataaatttagaaatgattttatatggcgcgcacacaggcgcggttttatatgcgatcggaacggaagtcggctgaataatattcgtaaatatcaggagaactcgaaaaaaagagactcacacacgcacacacgtaggcgacggctcaccaacactcatgcagcgcgagcgacgaggcgtatacgcaacgttgttaacgcgtcgaatgaacgcaagcgaatgagtcgcaacgctcaacaaacccagcacaagtacctccaccatcgatcgccgcggcgcagagagcggagaatctgagaattcgattcaaaagagaagccctctctttattcgcagcccatctcccaagttcaaaacaaacaacattcaatcaaaaggcgaaaattcgaccaatgccgcctaattgagtaggaagacgccaccgaactcactttgcgcgtgg

SEQ ID NO: 30134 - DNA, 606 bp, DROSOPHILA
atgcgcttgcaacatcgttatgccagcaattcaactacaaattcgagtaataatactaccataagcaccgccagcaacgccagcaacaacaacaacatcaagcgggccaagaaactgagtggccagaacattatcaaattgcgctccgccaagcaatcggcagccaaatcaaccgccagctccagcaccacaatgccaccagccaccccgcagccattgagtcgtcaccacccaatcatgatggataaggaattggaatcggccaaggaaacggcggtattatcatcgaataatgaccagaagttgaaggacgaggatatcgaggagaccaccagtacgacgaccacatctgtggagctgcgatcctcggccagttcgcattatcgggcatataccaccatccggagcaattcgacgtcggcgattctgcacgaggcggtactaccgcccccgctcacccccgccggaatgctatacgcccgcccacgcaccctcaatgtccacaatgtctgccagacgcccgcacagataacgcaaatgttttttgggtacgtttttcagtttgttttccctatgtttggtttgcgggctctactaatctactaa

SEQ ID NO: 30135 - protein, 201 aa, DROSOPHILA
MRLQHRYASNSTTNSSNNTTISTASNASNNNNIKRAKKLSGQNIIKLRSAKQSAAKSTASSSTTMPPATPQPLSRHHPIMMDKELESAKETAVLSSNNDQKLKDEDIEETTSTTTTSVELRSSASSHYRAYTTIRSNSTSAILHEAVLPPPLTPAGMLYARPRTLNVHNVCQTPAQITQMFFGYVFQFVFPMFGLRALLIY

SEQ ID NO: 30136 - DNA, 2726 bp, DROSOPHILA
ctatttcggttatggtgagggggtgtgggtggtcggttgtgcagcaaatggcataacttccgctttcgcttgactgctgcaaaattcacggaaattatcaataaatatgcgaggcccgacccgtaaaatgaatgaaactggcaaatttttcgccatatctcactggctgatttttatgtgcagcacggcgcacacaatccaatgtcctgtgccatccaatgtccagttttgtgctccccataacggaagcatcattatcataaattatcattttgtaggaattgcatccgctgcgagccagaaaaaccgagcaataacaacagaaacgacgacaatttcaattgccggcatctcttcctcaatatcgccccatcctttttttggtccaccccaacatcatcatccgtctcgctcccacaccgctactctgctcgcacattcgaatggccaaatactattctagtttaatttatggccgaccgttgtgaccatgattccataatttcgggtttttttgccacatgaaaatctgcttcatgttcaacaatttaatgcgacttttaattgatttcggattaccgaaaagttaaatgtaaatgtaatcaattattcaatagtttaagatttgtagttattggacacaagtgaaacattgctgtaatgctcgtattgttttattctcagagatttcattttaagatcagctctcaagtcacgtaatcgcattgcaccaggaacgtgattgaggctatatactcatcagtttctgatccgatgatgaatgacaccatttcaagatcgctttcaaaatgaataccaacacgtcatgcttatcgaaaaggagttacctaaatacgagttccagttagtattgtctgtaaagtttttgtgtttaaaaaaaagtcgaatatccattattaaaaagagtgcatgagatttaattattagaaaatcagacattttagcttacacagaggatacatcaaaaacttttacgatattagtcatattcgtcatagggggttgaagtggtcgctgtagcggagtgatcggcgtttcccttgatatatatgatggaaatgcgactgccgatcaggaagagtatataggcgatatagagcactatggcgaccaagatggtgtcatctctgaccaggtactcgaagctgatgtaggtgatcaacacgtgggagatgaccaaaataactacactgacaaggaagacaccgatagccacatcctgccaatacctccacgctagcaggatattcataagttcaatacagaatgccagaacgaatagcattcctcccacaacggccagtttgaaggggttcatataaaatccagtgctaattagaacggcacaaatgagcagcgtgataccgaggaaaagcagtgccgtggccatcgtcacaatggagcaaaccagacgccagttcattagaaaacttcctgccccgagtgtcataaattcgtagcaaacggcgatgacgatatagttccagggcctccagtacttcagcggctcaatcaaatggatgcagacgagcagcacgaagcccacgaaaaagcaggcgatggtgtatatgagggcatcatctccaaacagacacaggatcatccattgcggaatggcggccagcaaacagatgcccaaaatgagcagggtccatgttacaaacttgaccagcgctatgccattctcgttctcattgctcgccattttcgatcaacaaacccaaggacttgcatgtagaaatttggtacataattataaaaaagattactaaaattcaattggtcctaaaaacatttgagataaagttcgaaacaactgagatggccgtacatgaaacttgggaattttcttattttatttaatccaaatgaatttttggaaaacgactggggcatcattttccttataagggcgctgctcaattcaatcgttctatccaatttggcagcctcgccgaccaaatctaatatgtggcagccgcaaaagtgccgactctgccacacctcttgagggcttattcttcatcgtttttgggccatcaaattgaggccctctcatcctctttcggagaagaaaacaaaaaatgaaatcagagagccgaagcccgagaaacgttacataaatgagaaaaaaaaaatgtcgcataagccggcgcaggacatactgcaaggacacttgaggctcagcagcggccgaaagtcctttgaagttggataaaaactcgagtcccgtgggtgggccagtatgtcgccaaggaaatacaaaaaaacacagatcgctgacgagtggagtgtgggggaaaaatcaatctgcgactgccaatggtaaggatatgagagtctctataatactatacaataacaactaccaatgagcgaccgggaaaactacagtcgctgtcaaaataataagttctccattgataattattctagccccaacaatgtaaacttttaacttttaaattatgtcctttatgttgtgtcccaaaagcgacattcctcaattcgattttaaacatttttaaaatactttaattttatctccgcaactgcacacacatatatgggcagcataatgaaataaaaataagaggaaatgtttggctgggaaattgaattgaaaatgaccacattgaaacacacacgaatcgaaagctggaaaaaaccaatcaaatacaggcaggctgcaccaactggtcctg

SEQ ID NO: 30137 - DNA, 726 bp, DROSOPHILA
atggcgagcaatgagaacgagaatggcatagcgctggtcaagtttgtaacatggaccctgctcattttgggcatctgtttgctggccgccattccgcaatggatgatcctgtgtctgtttggagatgatgccctcatatacaccatcgcctgctttttcgtgggcttcgtgctgctcgtctgcatccatttgattgagccgctgaagtactggaggccctggaactatatcgtcatcgccgtttgctacgaatttatgacactcggggcaggaagttttctaatgaactggcgtctggtttgctccattgtgacgatggccacggcactgcttttcctcggtatcacgctgctcatttgtgccgttctaattagcactggattttatatgaaccccttcaaactggccgttgtgggaggaatgctattcgttctggcattctgtattgaacttatgaatatcctgctagcgtggaggtattggcaggatgtggctatcggtgtcttccttgtcagtgtagttattttggtcatctcccacgtgttgatcacctacatcagcttcgagtacctggtcagagatgacaccatcttggtcgccatagtgctctatatcgcctatatactcttcctgatcggcagtcgcatttccatcatatatatcaagggaaacgccgatcactccgctacagcgaccacttcaaccccctatgacgaatatgactaa

SEQ ID NO: 30138 - protein, 241 aa, DROSOPHILA
MASNENENGIALVKFVTWTLLILGICLLAAIPQWMILCLFGDDALIYTIACFFVGFVLLVCIHLIEPLKYWRPWNYIVIAVCYEFMTLGAGSFLMNWRLVCSIVTMATALLFLGITLLICAVLISTGFYMNPFKLAVVGGMLFVLAFCIELMNILLAWRYWQDVAIGVFLVSVVILVISHVLITYISFEYLVRDDTILVAIVLYIAYILFLIGSRISIIYIKGNADHSATATTSTPYDEYD

SEQ ID NO: 30139 - DNA, 3822 bp, DROSOPHILA
caggagagtagaaaaataaagtgtaggtaaatgccattggcgcaatccgcagtctccccataaggcacctgctgcagccttccacaaatgaaacgagcctgaaatggagccatgaatgcgatcaggatgacgaacactatggcaagtgccaggagataccgcatatcattgatgatcaggaagagtattagcaggacgatcatggtgacggtgagcagcagaaaaatgcagcaagtacagataatgttgggtagcagaacctccggacttttggccccatacaaatgcagcagggccagcagggatccggcaaccaaaatggcaatcaaaaggacccagacgcgcactagatgcatataatacgctccgaacagggtgagaaagaacaaggatcccagcaccaatccccagcataacaaggtcaatgctggagtctgtgcgatgcagccgagcactgagagaatgatgaaagctaatatcagccaaacgaacggcggcactggaattgccttgtagaccctcacagcgagtgccgacagtatgatccacgaaatggaagacagcaggcacagcactacggaggataggtacacccggaagatgaaggcccgcaactcccgctcgttgatgactaagacctccggtccctccgcaggaactggctcgccaccaggtcttccggttctaaggccataacgaccccaaccccgattgcgattattcatgtgttaatcaattattttaggtcaatataatgtaattttgaagaaaaaagcaaagtaagtgattcattttctcttatattgagactaggacttttcataatactctggctttattctaattgccttgcaatgagaatatatttatattttctgtaccgcctaggctacaccgcactaagtaattagactggatgacagtatcctttggtctggaacaccatagtaacttgccagatcgctaatcagtttcgatcacacagtgacagctatttctctcaatcaaaatcattttcgagtgaaattttcggagcttcagatgtttgtctgatggcctcctttctctcgtcgaccaggatgaagtagcacacgcagaagaagaacatcattgaatgcaagtataaagtcagggtgcagaccatgaggtgctcttcgggaaccacttccacgacgttcagacggccatggttgaactgcgcctgaatggggatcgctatgatcagcatcaggaacagaatgctgacgaaggtgtcgagcagctcaacactcccggtgcagagctggacgattcccacaatggtcaagaccaacagcagtgccatcatcagcagcgtggagcaaacaccgccgggcaggaactcctgcgggcacatggccccagagaagttgagtaacataatgatcagggccacgccgatcatcacgaaactgataatgagcgggctcaagtcgtggatgaaatggcagccaaacaaggtggtacacacaaccaccagacctgtcatgaaccacttacagggagagtagtaggatattctcgggatacaatgcatgcatatcatcaccagaaaaattattagagccaggacgtagcagggaaacggaaggtacctctgcaggtgaatatgggtcagcatgagcagaatccatgcgcccaccgtaattccgataaggatcaggccaatgttatagatgctgcggatgaactgggtcattgggtccagctgctcgatcgtcggccggatgttgtcctggtggtaaatgttgtccatcccgttaaaaatccttatggaccgagtgttaagactaggtctggcctgcaccctgacacttacctcctggcaaagctgctcaccttctatatcttttatttacaaattggtatcttttctcattaaagccttctttttattttacacggacacgttaaattaactcctataactctcaccatttgggagcccagatgacaaagtaaaaggccgcaaagaacaacagaaagtgcagatagatgttgacggcgcaaataacgaattcgtaatcgggcagctggaatcgcctggaatgaaccacctgagcatggtaaacggatgcgggtattagcaaagtggccaataacgtgaagtacaccaactggtagatccaattgtctgtgaagatatacatggtcatcacaaagattgaggacatcacgaaaatgacgagcaggaggaacatggtcctctctccggggaggatgatcttgggtatccatgcgccagcgaaatagcatatcacagtcatggcggaggccaccagaagggcaatgcacacgcgggaaaggttccgctccaggagaagcagaataacgcccaaacctgccagacttacaaacaacccggccatgatgaaactataccaataaaaactccgcaacttggtcaaaatacagaagacaaagagaaacattagggacaccattgcacttatgaatcctgccattataagatctgcctccggaggaattaccttggacaggattatggcaaggatcgcagttgtagtcgaaaacaatccagccatcatgtagcagcgccgcacaaatattattttcgacgagtcgccatttccgttgtccagtcctctggagccttcgccttccacaaccgaacgtcgtgcccttaatctacggggtgctaagcgaagctggtgtatcgaaggatgctcgtatcgaaccaaagttccaggagcctgctcttgctgctgtggcaaaggaaagttgagaagctggagggctggtggatagatgacccagtcatttcttaaactgcctcctaacattgggagcacttagagggcaaccacttaaaattttgacaaaatatttatggcacaccctgattgggtacgaagacatccctaaaaacataaacaatactaatactactaaaaattactaatagccaaaataatacatagcctgtaaatctgatttaagaactggaaatatttatatacaccgtatatatataacaattatcctaagattaagattcgcggaagagataattacggtgacttaccgaatgcgatggcatgcataaatatttaacattttataaatctaagcagtattattccgttcgatcagggcggaaaactcagcgaggcatgcggaattccaaggggactacaaagcctgcaaggaaaatgctaagtagctccgatcaaagctaacaaaacagccacaaaggatgcttactcctttcccctgcctgcattgtttgttgttgttttgctgatcgcttgagtgacacgcaaagcaaaggatacaaggatacactggagtagaaaggcgatcccgagatgtgtttactgccgcatctgcggcctcgatcacaatcactttcacagacggttgatgcttgatggttgacggttggacggcattgttccggctatgactcaatctcaatcagctggctacgcttatccttgatccccgctaaagacatgcaaatgccaaggcagcaggcgatcggggagaatgtcagttatctggcagctgcagctcaatgcaatagatacgcttgcagtcgaaggagtataacccttgagttgccaatcaagtcgttagctcgcctgctcctcatgattggattattgagttggtaaaaagtgaatacctttcggaaattgaaaatcaagtagcggatgtcagtattaggattagattctattttctctgcaaatttataaaacatttttaaagctaaaaagagcaactaatttaaaataactcatacgacttgtttattgatctttctcttgcagatttcgg

SEQ ID NO: 30140 - DNA, 1656 bp, DROSOPHILA
atgttaggaggcagtttaagaaatgactgggtcatctatccaccagccctccagcttctcaactttcctttgccacagcagcaagagcaggctcctggaactttggttcgatacgagcatccttcgatacaccagcttcgcttagcaccccgtagattaagggcacgacgttcggttgtggaaggcgaaggctccagaggactggacaacggaaatggcgactcgtcgaaaataatatttgtgcggcgctgctacatgatggctggattgttttcgactacaactgcgatccttgccataatcctgtccaaggtaattcctccggaggcagatcttataatggcaggattcataagtgcaatggtgtccctaatgtttctctttgtcttctgtattttgaccaagttgcggagtttttattggtatagtttcatcatggccgggttgtttgtaagtctggcaggtttgggcgttattctgcttctcctggagcggaacctttcccgcgtgtgcattgcccttctggtggcctccgccatgactgtgatatgctatttcgctggcgcatggatacccaagatcatcctccccggagagaggaccatgttcctcctgctcgtcattttcgtgatgtcctcaatctttgtgatgaccatgtatatcttcacagacaattggatctaccagttggtgtacttcacgttattggccactttgctaatacccgcatccgtttaccatgctcaggtggttcattccaggcgattccagctgcccgattacgaattcgttatttgcgccgtcaacatctatctgcactttctgttgttctttgcggccttttactttgtcatctgggctcccaaatggatttttaacgggatggacaacatttaccaccaggacaacatccggccgacgatcgagcagctggacccaatgacccagttcatccgcagcatctataacattggcctgatccttatcggaattacggtgggcgcatggattctgctcatgctgacccatattcacctgcagaggtaccttccgtttccctgctacgtcctggctctaataatttttctggtgatgatatgcatgcattgtatcccgagaatatcctactactctccctgtaagtggttcatgacaggtctggtggttgtgtgtaccaccttgtttggctgccatttcatccacgacttgagcccgctcattatcagtttcgtgatgatcggcgtggccctgatcattatgttactcaacttctctggggccatgtgcccgcaggagttcctgcccggcggtgtttgctccacgctgctgatgatggcactgctgttggtcttgaccattgtgggaatcgtccagctctgcaccgggagtgttgagctgctcgacaccttcgtcagcattctgttcctgatgctgatcatagcgatccccattcaggcgcagttcaaccatggccgtctgaacgtcgtggaagtggttcccgaagagcacctcatggtctgcaccctgactttatacttgcattcaatgatgttcttcttctgcgtgtgctacttcatcctggtcgacgagagaaaggaggccatcagacaaacatctgaagctccgaaaatttcactcgaaaatgattttgattga

SEQ ID NO: 30141 - protein, 551 aa, DROSOPHILA
MLGGSLRNDWVIYPPALQLLNFPLPQQQEQAPGTLVRYEHPSIHQLRLAPRRLRARRSVVEGEGSRGLDNGNGDSSKIIFVRRCYMMAGLFSTTTAILAIILSKVIPPEADLIMAGFISAMVSLMFLFVFCILTKLRSFYWYSFIMAGLFVSLAGLGVILLLLERNLSRVCIALLVASAMTVICYFAGAWIPKIILPGERTMFLLLVIFVMSSIFVMTMYIFTDNWIYQLVYFTLLATLLIPASVYHAQVVHSRRFQLPDYEFVICAVNIYLHFLLFFAAFYFVIWAPKWIFNGMDNIYHQDNIRPTIEQLDPMTQFIRSIYNIGLILIGITVGAWILLMLTHIHLQRYLPFPCYVLALIIFLVMICMHCIPRISYYSPCKWFMTGLVVVCTTLFGCHFIHDLSPLIISFVMIGVALIIMLLNFSGAMCPQEFLPGGVCSTLLMMALLLVLTIVGIVQLCTGSVELLDTFVSILFLMLIIAIPIQAQFNHGRLNVVEVVPEEHLMVCTLTLYLHSMMFFFCVCYFILVDERKEAIRQTSEAPKISLENDFD

SEQ ID NO: 30142 - DNA, 2231 bp, DROSOPHILA
gaatctcgaagtcgatgtctgtggtttaataggaacttggagaaaagccgtctgacacgcaaaacaatctcaactggcttatcgttattgcggtattcagtaaccaccattgagcagctgtttaactcagctgtgcgtagttagcgttccgttcttgccgaattgttaaaagccagatgcttgagttttcttctagagaatttgtgttgaatttaattgagtttagagctatttaatcatcagttgctacttacattaaacaaaataatattgtttataactgttaaattgaactattaggttataaccacttaacttttttctttttgatttccgatggaacttatgcaccttaatcgatcaacttctgtttctagttgcctactcatgcatccaagctttaagtattcaactaaataaactattaactgattaaaatcgaacagcaaggaaaccgaaactagcaatcaagccgcaattgccgcagactctactaaattagtgaacgccttcccatttagagagtctggacctttcaatttcatttaaaatacgatggacaaacagagagcccagcaattaggtctagacccgaggggagctgagcagactagagcatgaggctggtcatggactggagccactggttccatcaatcagagccaaaagtaatcgcattgtggttggggccatattttagggatgagtgcttagctcgtgagtggaagaagtgctaccggtgtttactggtagtcatttcagaaaactgatgattgatcaaatatagaaaatatatctatatatctttcaatttaaatatagatcaaagaaatatataaaagtttgtatgctacccatcatatatagaaatcggggaaaatattgtacttatatttaggtttggcagcttgagaccttgtgtacaaggtacagatcatctatatttccggatatttaccaaatgatgggcaactcccgatcacgttaccacctttagtctttagacactcaccttgccgtagctgttcagcggtccgtttatccagcggtctgcctccaagcgtccgctgaagagggctccggtattgggatcgatgcgttgccattcacgcacctccctctggaagggggatctggagccccccgctgcccccaccaccgccgtcggctgcagatgatgatgatgatgatgatggctctgactgtgattgtttgttgtggccacttccatgttgagaagatggagctggggctactgtggtgcgcttttaatttgcacgctcgatgcgctcgagctgccttttccgttttttctcttgctgctttgctggctgctcctctggaaacgggaggctgcacttggccagtgctttgtggtcgtcttctcctgctttctgatgctcgcctatttcaaattattatttattgttattatgctaccgtctagctgttcgtggccgcttcccaggcctcgttcgcgttccgttccgttttggctaaattaatggcaactttaattcattatcataataataattttctagctattctagccctgctactgtgtgcacgtgtctgcccccctccctccccgccaacacctataataattttctaggcttttctttttgcacgctttgctaactatttgctttatggctttcacggtctaatttgagacttctctgtgtgcctttcgtgtattatgtgtgctgaaatgacaagagcaaagtagatagaattttcgttagttaattatgttgcaaagtgttgagatataggtatacagatatatggtatgtataagtgacttttttccgatctctggcggaagcaaaagtgctttgaaccggcgtcgtgcagatttctaattaaatttgcggccaacgttcaacggatatgagacgagtctatagacagagctatacccatagagactgatagccgccagcgacagaggcttggattcttttgaatctcctctctcactgtcagcggatgtcacagtctatttccgcctcagagacccctcactgaatcgcggacatgtgtgtccacttgttgtttctctttttaattcaatttattctgctgtttcgttattatttcaggtagtcgggcgataagtccacatctccaatgcgtggctttttttcggtgttgtcgtcatatgtcagacacatcatttgtaattgtcaaagttatgcaagaacttcatttattttggggca

SEQ ID NO: 30143 - DNA, 231 bp, DROSOPHILA
atggaagtggccacaacaaacaatcacagtcagagccatcatcatcatcatcatcatctgcagccgacggcggtggtgggggcagcggggggctccagatcccccttccagagggaggtgcgtgaatggcaacgcatcgatcccaataccggagccctcttcagcggacgcttggaggcagaccgctggataaacggaccgctgaacagctacggcaaggtgagtgtctaa

SEQ ID NO: 30144 - protein, 76 aa, DROSOPHILA
MEVATTNNHSQSHHHHHHHLQPTAVVGAAGGSRSPFQREVREWQRIDPNTGALFSGRLEADRWINGPLNSYGKVSV

SEQ ID NO: 30145 - DNA, 2710 bp, DROSOPHILA
agagcataacgcattggcactcgagttttattttatcaattttttctgctttttcaatctactcacggcacacagaaagtggacaattttagtttaacttgacggcagttggacaataactgagaggctcttccattaccgaaacgctcgtagaggattattattgcacccataagctttgctacctatcgagttgttggtttgcgtgagtttagtgataaaaagtaaaatatataacgaaatgtggaaaagctgcgaaaaagctcttaacagagttagcacaggtctgcgaaaagagaacttccacgttgttttttttttcgaattgctcgagcaaatatataatatttcattactatattgaacattttgttaatgtattgactgcaaatataacgaacagttttgtatcagccaacatggattacgcatcgtatacgcgatttatccccattcctcaattcctcataaagataaagcaatgacattcgtatttcaaaaactttaattgaaaaatgtattatatttattttcattcactttgcttgtcgtacactaaatgctatcgaagaatatatatgagtatcatttgttattatatatgtttagtttttagtttaattttgtggagttgctggcataattttaatacttgaatttcgagtgcaatgccaaagcgtgtgtttccatttttttttttttcaatgtgtgggaaatgcaatgtggaaatgcgaacaggaactgggaactggaacatattcaaagtcacattttgcaatattagtaagtcggttgttagtttgggtgccgtcaaccttgagtaatttgtttgaaatttatcgccttgccagaaaatttcgcaaattacctaaagaaagtctcatcgaattgggttggtcgttcaggtgttagtgcgtattacaaatgtgtatataaatcatttaaattagatgctttattttttagtagttcgttgcctccgcgccggtgtccccacatcctatttcctatccttgccgtggcgatcccgcggatgcctgctactcgccatcgtcgaggtggccaggctgtggacatggtgtggctgctgctcccgatgaccatgtccagatccctgatgcttgccgctgctgctgtgctggtgctgatgatgctgatgtccattcagtgtgcttttaccgtgtctgtggacgaggaaaataccctgttagatctgtgattacacccttgatgataccaaatatataattttaatgatttttctactgttttgtttcttaggatagtgtttccaaattgctacttcaactacgtagttccagttgctagagagaaatagtctagagagcaaggccgtttgatgttgtgtttcggtttttaaattccaatttcattgatgatttcagttgactttttttttctggtttccagcaacatgttcatagtcagtttttagagttgattctactgatagagcgaagtgtgcgtgaggttagaaatttaagtgctgtgatttcattaataatagtcaaacatgcaagagaattatttggttaaattatagaattgttatattagtagagtttgaattcagtttcacttttaagtttaattaaacgtttttcatagtgctacatttgatagtagagaaattatagtttaatgcccaattccaaaccacttttcgtacttcccgctaaatcccaacatgcaatactgggtgttagaaaagtatagggaatttggaaaaaaaacgcttacgctgtgaaaagtaaaaacagaacccagacaggccctcttttcttttttgtgcttgtgtgcattggccgagtttttgattgtgtgtgcgctccaaaataaataataatcaaaattaacaacgaaaatctctcacactcgaatattatttttgggatttaagtattagtatggggaacacagtggttggttggttgttggggtggtgattaggaaaatgctgttcactttttgcccagctgtgggttatcaaacgtaatcgtgcatttgggattatttgggtgtgcttgtgtgatttttgtgacgagatcctgtcagccaaaggatatgtgtgtcatatttatttgaatttttggtttcttttgggcctttgtctgtcccgcgctgactatgaacatgtgcagatgccgaatggctggtgggtggacacactgctgcgcacttgacgcattttcagcctttttggccagccgcccagccggccacgcccctcccgagccgccgcccctgtcgccgatgcaccaaaaagctgcgcatgctcattgctcagattgttttggtatggacgcagcttgtccgccttacccagctcctcgctggtggcatacagcagatagttgtcatagacatggctaacactcgagttccgtttggccggcaaatagggcagaaaggcgaagctcgagctggtcgattgggtggccttcagggagggtttcttgcgggccacactgcgacacctcagggtggactgattcgagtagctgggcggtatcatctgcagcttggtgcgatactcatagctggcgggcggattcactggcactgggattagggatctctttcgtttgctgcgcggcggtggctgcggtgctttcgtcaccgactctacctcatcaatgctcgcgtagtccgcctcttttgcgggcccatcggcgctttcggcactatg

SEQ ID NO: 30146 - DNA, 204 bp, DROSOPHILA
atgttgggatttagcgggaaacacggtaaaagcacactgaatggacatcagcatcatcagcaccagcacagcagcagcggcaagcatcagggatctggacatggtcatcgggagcagcagccacaccatgtccacagcctggccacctcgacgatggcgagtagcaggcatccgcgggatcgccacggcaaggataggaaatag

SEQ ID NO: 30147 - protein, 67 aa, DROSOPHILA
MLGFSGKHGKSTLNGHQHHQHQHSSSGKHQGSGHGHREQQPHHVHSLATSTMASSRHPRDRHGKDRK

SEQ ID NO: 30148 - DNA, 8807 bp, DROSOPHILA
ttttttaaacaattatataagtaattgaaactcattatatttcattcaaaattaaaacaattgtagataacattttaattgttctgcatttcgagcaagcttatctctagtctttggaagcaatttgtaaataatttttcaaaatgttttttttttaataccctttcatattttatcagcaccgtagagatcattaaaacatttactgtgaagtggaacaggttgaatgacactaaagatttcggtaaccggaatacttactttttcgcttacttttctaacccaaatctcgaagacttttgttattcttcaataaaatgcttactaagcttttttcgttgtaatgctgcaattaggttacaaatccagttttaagaaagtgctaagatctttctaaatattacgaaacaattaagacattaacaaaaacgagctcttttcttctcttttataccaagctgtacccgcaggtaaaatgtacttttatgtggctgcaaacatttgccaaataaaagcacacacaaatgcacataatttaggtgagcgagtaattaagcccaaagtggacaaaagaggagggcaaaaacggagccaaaaagcatccatcgttttttatggctacttggtcgttcgttctgtcaatacaatacccaaacactgtaaaaaccaattggaagttttttattgaaaacattaataaagtcattaatattgttgttgttatagattccagagacattaaatagtaaatagtattttaaagttaacaaacacatatttatgttacaaaatccctgaattgttttctctgtacagcttctctctttctctcttggctctgccgtaaaatacatgtgcgagcacacctgcctgcgtcgacgtcaccgtcggctgcgcagtcgccgccgcgtctgcgcttacgatattatatcgtaatacggtaactccaggaaaacagcaaaacggcaagctgcgatcagttttgattcttacttcgcagcgagaagttgtgattttctcgatccgatctccgcattttaaccttttggtgtgttaacttagtagtattaacatggtttttgctgttatttctatggccgttctggtgcatcggtgcgtgaatgtgaagtgatcggagggtgtaatacacaaagcagactacaaatccgctcatagcaaacaaacaaacaagctcgaaatggctggataccgttatgcaaagttgttgttgctgttgctgtggtgacccaaatagaaattaccaaccgggccaaaaaaataaaagacagttcaagccaacaacagaccgcgtttataatcgacaaagtacatggcgaaaaaaacgatgaaaagtttgtgctatttgacaaattggcaaatttaaaagaaaactaataaagatagaaaaatagcaaagatttattcgaagaattcgtgttagttggctgtatgtgctcggttaatttaaaaggcaaataattgaaaaacacaaatttacaaactaaatacacacctgaaataagttattctaaacaagaagatagatttattctattccattgcttgctagatttgttaatcaaattagttattagagttggaaatatgtactcatcttaatgatttatttagaactgaaaataaaatcttgacgttagtttcttttagttcaaggccctgcagttttttttattcggatttcttgtgaattttgcgttcttagatgtacatatattacaatagagtttctacttttgtggcattaggtttgcatacatattggctcattgaatttacgatacgcttgaaattttaggcacgtccccaaaaaacgttaatgaaaaaacgagccaagtgagcgattaaaagtttcctgttcaccaaataacaacaaatccaaggagcggcaagctaatttggacaacaaaattaatcacaatataaagtggtaatttgaaggtgagttaagccatgtaaaatctgcaaaagtggtctaaatagtctgtagtgttagctaattaaccggtatgcattagcaaactggttagtcggcatttttctgcggtttacgccggttagttttaaattaatagtgaatacatggcaattccagatttgtttatatttatattctcacaaatattataaatttattagcactttactacttcgcttccgcttgattagcgagtgagataattattttcttacactttcagttattgaacactgacctcgttcaattcgataatgacacctagcggaaaaccggatctgtttcgtaacagaaattgatcattgagaatattggggcataagttgatcatgagctatatacaaaattataaggctttttaagtaagaattgaaaatagcgagcactcttatctgtatgtatttgtaagatattttagccaaataaacaaaattggcgaaataatcataatttggcactctgagtttaatcaacaatccgcagactaattatattgagggctccaatcaccaatcaggatttatcgattggctaattaacgtctaagagtggtcgattaaaaacttaagaatttttatgatcattttcgattggcctttggaccaaacttttggacatccacttgaagtccatatgaaagtttcgattggctatgattaacattaacataagaaatgctttcaatggcgttgaactcttttgatttcactttctattggagtgattgaaatgattgtgtctgctgaatagatgacgtgtcttatctaatcgagtcgatcttgatgagggagtagatatcatgggaatctaaactcttcggcttgccattcactcgagtggtttgacggcattcgagatgaaaatttatttacacagcttgtaaaggtcaacaagttttatttttttaagttcaatgtggtacaacctcaagaggcataaacctatatatcattttggttacagtgcgtttcattaataaagggcatttcaaaaatgtgactcaaatatgcttcaaagttttatcgtacaaaaaaattatgctggaaataataaacggcttggtaattataatcaagtgtgaaaatcataaggaatactcagaaaaaaaaacagtaaaaaaaattacaaacatttatgaatcaaactacgttttagccttaccatttcgtcacgcaagtcaaacatttgtaggctgaaggtagttttttggcatattttgttgacgaaaatgaagctgaagcgacagtcgaaaaatcgtgtaaataaaatgcagactaaacaagacaccaaattgtcttggccaccaaagtggatggctcactgtttgttaactgaattagccgccctccttccctcaccatttgggttcgttaaaaagattcattagcgtgccatgcgagcaagttcagggacaatgaacatcgcactcgaaaaatgtttatatcagagttatactctagagaagtaattataatttagacggctatggcgccacgtttgtgtaaaaccatcgcgcgattgccgtgaaaactatgactgaatacaattttagggtctagtgttgcggacagaaaagctgtttgcgattctggtcttgacgaagcatatgccgccttaatgaatacttagtccgtctattgatatttagccttttatttaagcacaacaagctaattactgtattattgcatcattaaatgattttgagaccaaggttaaaaaaaaacttttgagctttttgagcactatcttatcggaaatgctgaggttgctaaggtgtaatgaggagaaaaacaaatatgttttatctaggcatatgccattatggcagattgctgtaaatattctttaaagcctaagtactttgttaattacttagctcttttattgacatcctacctcaaggaacgttttttgtagttgtagtgagctaagtgggctactaaattattttattgggtaaccttatattcaatttttgcaattaacaatcaaccgatgacgggcaataaactgccgagggtctctttttgttaccctcgatgaagcgaataattattcactgaatacataataatagtgcgctcaacgaagcgaatgaactgtgtggtaaattgatccataaatgatgctacccccagcgtgccaatttatataattatatgaatattcagccatacaatagtggcattattagcacgattaagcagtctactaggcttcagctcttgaaccttcgaaacttgggtttcgcattttgcacactagcctgtaacctttttgggtcggcttaatcttaaaaacagggaagatttaactacccattatggttatggcttagtagataaactaagcaaacaaaaaatggcacaaacattggtcaaaggttcagggataaatgttaaatggaaaaccttattacgtatagtcaaatttaattcaaatttacgtaagcaatgcgcacacagtcgtaagaccaaaatttgtaaaaaatatgtcgagccaatagtgagtgtttcttaaaacagaaatattggtcagtacacatccttctagggctccattccaccagattcggcatcgatcttgtgatcggtatagatgggttgcaatatctcacgggcagcttcgtgatcagcttttcccagggcctgtgatcttccatacagcttgatgtacttcttttccttgtcgtgaaccaagtaaccacctccaagaccctgggtgcacaagcccatcgactcagcctcctttttcaactcatcgtatacatcaactgggaaaatgaaagaatgattgtaaccttaaggtcatgagaactatcttaactcacgatggtacttggccttggaaaggctacgaatcacctgcttggcgctacccatttccccatggatataaacgtgggccatcatgtactttgattttccactttccaccttggcaacaggaaaagcgactagacttcgcattggcttctcacaataaagtcgagccgctacatttacatatgttgttccatggtaaataggataacccactagtcattcagagtaaatggctacttaccttgcatcattggccgccaaacgggtttaagaaattttccagcaaactccatgtcaaaaaaaaaaatatttttgctttttttctttttatttgtgtactagctgtcgactatactgagaatgaaaaataaatagcctaacgtctcggaacaagctcgatgagtgttttataaatgtttacttgggttctgaaaattgtttgctaaaataatattactacgacatagatgtttataaatagaaaatatgaaatgaaaagcatatccatctatagtaaacaaatttattcttattaatacaatcagattgtttatagctccacgtcaagatataatgttctttagtttatattgtattacaggcagccataaactattgcattctggtgtgtttatagctaggcaataattttatggtcccaaatataattaattaagtttatttttctgtttattaaaactgtaatttccctctaattatagtgaatcgtgataagcactatacagctgcgcggagaatggaatcgctgagtacgattggtattgcataatcgtgctgggaatcactgctttcgcaaaagctccaaaccaaatataaaatcagcatcttaagggctcagaagctagatgagcaggatgagcaaactacaggtgatcgtacacccagtgaagaaagagttccagcgcaaaagctgcggtttcgaccatgatacccccgatgattttgtcaagtctcaggtaagaattaaataaaggtgggaagggggtgatgggtcaatttaaatagttcaatgaaacgttgacgacagtacaaataatcgcgtccttgggcctacgagaaaaacgcctccactcgtcacgcacctgagcaggtgtgcttctatttgctttgcactcaggtcaatgtacacggtgggcatataaaagtgcaggctgtcgatactataagatagctctagagatcaatctggttacacttgtcaaaggtctttaaattacatcgctgtattaatgtctcagattcaaagtaaaagcttactgttaaatataaaaccccaaagtgaagtattttataacatgcaataccgacttttctgttgatcatatactttgacgttttacaaaaatttgctatttttataccttacccaaaaaaatgccaatttttttttacataacttgaccgaatcgaatctcctttagcattcgtaaaagacattggccgttttaccattttgtatggggctcaccttgagcatttttaatgacttcttttattcagagtatcaatagaatgaggggcctctgaatacgaatatatatgcacaaactgatatatatgacagtacactttgacttgtgtacaccgattgctctggcattgtaaattactggattgaaatattcataagcagcaagccgttacaaattgtgtggcaagtcaagtaaaagcaatactttaaacatgcgacaggtacaacaaattgcgcttctcactaatggtgacctttaacctttctaatacacaaatttggaaaggctaggtgtatgattaaaaaaatgcacaaatgaattagaatatataacgatttattagaaatatctaaaatgcagttttcagtaaaagtttggctacacttcttaaagattttaagctaccaatattttatgtcagttttaacaatttaaatttccattgcagtggcaatcatgtaccaagagtatggcctatttgttttatcgctggttcatggccatgttctttgtggtcgtggtaataatctcaatgtggccagaaacggatgatgcaaccagttattggctctactttatctacatgaccaactggggcatatggatgtgcatgttgaccaacgtcttgggtgctattctagtcactatatggcattatcatccagaatatgcgggtgagtacgacatggctatatattataagaacaaaacagtttgctaatatgcatggttttatgtactccagataaactgttgaatatgaagagctactttagctattttcgcttgtactggggtatgcacatcatatctctggtcttgtccatcgtcatcaccatcatctactggagtattctatatgatggtaagttattcttacactcaggttgccatatcatatcattgactggtttgcgtttcctttagctaatgaaagcgccttggatgccacaaatgtactcactcatgcattcaactcgatttgcatgttcatcgatctgtggattgtagctcatcccctgcgtttgctgcatatatttctgccagtactattcggagttgtgtttgccatcttttcctatatctatcatttgtgcggtggcattaataagtgagtttttatctataaccacataaaatgtgatacgatttaaagatatgtcattctctataggaaaggcaaaccttatatctactatgtgattgactggagcaaacctcaaaatgccttcaccacggtagttggcgtacttttgttgtcctgttgcatttatgtgctgctctttgccttcttcaaactgagattattcctccatcgacgctgtcgaaatgcaaatttcgtactgcccaccagtgcgaaatcaaatggtcaaactaatggattagacgataaatccggaaatggaattcagcactcaccatctcgcatatcaatggtattgggcaatttcgctggctatgagaatcaggcttatttgcccactggctaactgtcgaataaaggctaatcgttgaagtgcacaatttagtcggtagtatttagtcaaatcaacttgtagaatttatgaccagtgatattatattatactgttttatgttaagtaaataaattcgttctgcggagtattgttgcttaacggcatttgaaggtaaaacccggtctatgtccttcggcggaatcaatatttatacttaaacaaaaaacatgcttaagaattctgatcaaaaattcaaatagttaaaagttcgaaaaggaaagcatgaatgtacccaatagccatcggggtttttcaattcgtttgacacgcccgcctttgggaacttcacagttgataattaagaatttatatctgaccatatcaggatggctcaaggtgcatgggtatcaaaaaaaaaaaaaaaagaaattctaagccaattagtagtgtggctggttgtacgagatgtgtaaatattttactcaagcccctaatcacctttgaatggccgcattaggcccaaataggccctgaaggacattcagttcagagttaataaaccggcaaggactgaagtaattctgattgtggggcatctatttataaatgctcgctcaggtgccaagagattttcattgttagtttcatccaattatataaatagatcaattcaacttaacggaacccttgttttttaaaccaaatgagttgtggcttaagttcaaattatgacaaaataattattttacatgacgtactggtatatatcatcaatatatatctcacccttttttttcggatgtgctcaaataatttattggacagcacatataattcgattgttggtgttttcataatttctcatcctttcaacgcactttacgccaacaaagggtctccttagccagtgtccttaatcacagatgttcggttcgagttgcttaaccctaagttggccgcccccgtctgtcattgtgtacacacgttggccaaaacgcgtagccttaattaa

SEQ ID NO: 30149 - DNA, 1292 bp, DROSOPHILA
cgagaagttgtgattttctcgatccgatctccgcattttaaccttttggcacgtccccaaaaaacgttaatgaaaaaacgagccaagtgagcgattaaaagtttcctgttcaccaaataacaacaaatccaaggagcggcaagctaatttggacaacaaaattaatcacaatataaagtggtaatttgaagtgaatcgtgataagcactatacagctgcgcggagaatggaatcgctgagtacgattggtattgcataatcgtgctgggaatcactgctttcgcaaaagctccaaaccaaatataaaatcagcatcttaagggctcagaagctagatgagcaggatgagcaaactacaggtgatcgtacacccagtgaagaaagagttccagcgcaaaagctgcggtttcgaccatgatacccccgatgattttgtcaagtctcagtggcaatcatgtaccaagagtatggcctatttgttttatcgctggttcatggccatgttctttgtggtcgtggtaataatctcaatgtggccagaaacggatgatgcaaccagttattggctctactttatctacatgaccaactggggcatatggatgtgcatgttgaccaacgtcttgggtgctattctagtcactatatggcattatcatccagaatatgcggataaactgttgaatatgaagagctactttagctattttcgcttgtactggggtatgcacatcatatctctggtcttgtccatcgtcatcaccatcatctactggagtattctatatgatgctaatgaaagcgccttggatgccacaaatgtactcactcatgcattcaactcgatttgcatgttcatcgatctgtggattgtagctcatcccctgcgtttgctgcatatatttctgccagtactattcggagttgtgtttgccatcttttcctatatctatcatttgtgcggtggcattaataagaaaggcaaaccttatatctactatgtgattgactggagcaaacctcaaaatgccttcaccacggtagttggcgtacttttgttgtcctgttgcatttatgtgctgctctttgccttcttcaaactgagattattcctccatcgacgctgtcgaaatgcaaatttcgtactgcccaccagtgcgaaatcaaatggtcaaactaatggattagacgataaatccggaaatggaattcagcactcaccatctcgcatatcaatggtattgggcaatttcgctggctatgagaatcaggcttatttgcccactggctaa

SEQ ID NO: 30150 - protein, 318 aa, DROSOPHILA
MSRMSKLQVIVHPVKKEFQRKSCGFDHDTPDDFVKSQWQSCTKSMAYLFYRWFMAMFFVVVVIISMWPETDDATSYWLYFIYMTNWGIWMCMLTNVLGAILVTIWHYHPEYADKLLNMKSYFSYFRLYWGMHIISLVLSIVITIIYWSILYDANESALDATNVLTHAFNSICMFIDLWIVAHPLRLLHIFLPVLFGVVFAIFSYIYHLCGGINKKGKPYIYYVIDWSKPQNAFTTVVGVLLLSCCIYVLLFAFFKLRLFLHRRCRNANFVLPTSAKSNGQTNGLDDKSGNGIQHSPSRISMVLGNFAGYENQAYLPTG

SEQ ID NO: 30151 - DNA, 2574 bp, DROSOPHILA
acagtatttcaactaccttttgattgtacaatatttatttgaattaaaaataaaatcatttaagataacgaacaatgggatcttatcataaaaaatgcgtaaaattttctacatggaaatccaatattgattttcatttctatcttgttcacctaggagatcctgactgtttgtttaagagtcttatgggtacgcattaatatatattagcttataaagtttactaatcaacacaattacaatcgtatttataaattaaagcatttttctacaagaaaaaaactaattaagatggactaaaatgtaaccattgcatatattctagaaaataaaaatgtaaataatctttgaccataaatcatgaagagttgccaatcaactcttcaagttaatgaggtaaaaagttccccttcccaattgctaccaattctacgcaacagacttatcatttattgcatatagatttggtggggactaagataagagctctttattaaagccgctcaggtgttagattaccaggttgtgactaatatttgaaacagtgggctaggcccacgaattttacaaataaaattaaaaagaatttacgcttaaatatatatatgtatttatatatattgctggaggattatgaaatgtttgttatttcggtaaagcagtgaaattcttatttgatttaatatgtttaaatgagagtaggaatacaggaatatttccaaaaatgaatgagtttcgaaaggggaaacccttactgcttctccattgaaactttttgataagtttatgagcctgtaaacgtaaaatgataagattaacttaacaaacgacatacatacaagcttatctcaaagaattgagtattgtgcaaaatctgaagagaatcgccgtataaaagagttcttggcatttaaaaagagtttagtttaaagcgaatcgacatcttgcaaagttgtactacagttaagtgtgaagtaaaaatatttaaaccaaaatgtatatgaaagctttaatagtcagcatacttgtggcctttgtgtgtgtgcaaattggtgagtcaattgcgtaaaatgtgaaattcgagatcaactgattgtttttaacatggattatagctgattccctgaagtgttacacctgcgtaacgccaaaggactgcaagagtcccaagaaagtcacctgcacgaatgcggctgcgaatgagactagttactacctgggtgtctatcatcagaatgttggcaacctaaccagcacgcgattcgattgcctggctctgaagtacaactggagtgagtagcgtggggaccccagaagcggactataaagatttattaactactttccacttgccagataacgatgtgatccatcagctccatggctgtgtgcatccaaatgttggagcctgcagcttagcacttaagccggcctatgctcactacaataagacctggtgtctcacctgttcgggcgacaagtgcaacaagaatccggccggaaagatgagcagcagcactattgccatcgcgtctagcgttctgggtctcttgctggtcaagatgtatgcctagtgtgactattaataaatatgagctaggagctatgatattttatatttgatattttttattgtaccgtcaattttagtaatatcataatttcatttgtagattatgtaggccatgtttattcggtcgagcagttaactaggagtgggtatcactaatcgatggcgcttgaatggacggtggagtgacgaaagttgttgggcgcttctctaggaggagcccattgggttgacggcgtttgtctgcaggttcttgagcagcatctgcagccactgcttggtgcacgtgtcatgttgcacgagcgacgtgaaggtgccgtcacgcagcagatccggcagacacactctaagtgcactgcgagcgcgcgcattttccgtaagtagtagatagcagcgcaccacatgcttcagcacccggaggcatggaaacttcaacatatggatgaccattttgcccagggtgatggccacctgcgagaagcgatcgtggttctcgcaaatgtacgtcagacccatctcatcgagcagtatcttctcaaggattgaagtggccgcgatcttggtcagcttcgatcccctgaccatattggtcagacagtgaggcacgacctcgctccatatcaggaagatgaggacctccgtatcaccggtctcggccagagcattaatcacgcccagcgtggtcaggcgcagctgctcgaagggcctgctcttgaacgtggtcgacaagaaggggtacaagtacatcggtatctggtcccgcaggaaggccgggcgagtctccggatgcgaggcgacgcactgtagcaaagtcagggcgtagcacacgcggttcgactggttggccttcaaaacgggcgtcgttattatggggtatatgttgacgatctcctgcagcagggtgcaggtggtaccgacgcttttccacagcatgggggccaggtccgcataggtgttcttgctcagctccagcagagcggtctcccgcgtggcaggataggcca

SEQ ID NO: 30152 - DNA, 447 bp, DROSOPHILA
atgaaagctttaatagtcagcatacttgtggcctttgtgtgtgtgcaaattgctgattccctgaagtgttacacctgcgtaacgccaaaggactgcaagagtcccaagaaagtcacctgcacgaatgcggctgcgaatgagactagttactacctgggtgtctatcatcagaatgttggcaacctaaccagcacgcgattcgattgcctggctctgaagtacaactggaataacgatgtgatccatcagctccatggctgtgtgcatccaaatgttggagcctgcagcttagcacttaagccggcctatgctcactacaataagacctggtgtctcacctgttcgggcgacaagtgcaacaagaatccggccggaaagatgagcagcagcactattgccatcgcgtctagcgttctgggtctcttgctggtcaagatgtatgcctag

SEQ ID NO: 30153 - protein, 148 aa, DROSOPHILA
MKALIVSILVAFVCVQIADSLKCYTCVTPKDCKSPKKVTCTNAAANETSYYLGVYHQNVGNLTSTRFDCLALKYNWNNDVIHQLHGCVHPNVGACSLALKPAYAHYNKTWCLTCSGDKCNKNPAGKMSSSTIAIASSVLGLLLVKMYA

SEQ ID NO: 30154 - DNA, 2363 bp, DROSOPHILA
ttatgaggccaatcaaaatcgcacaaactgaaaccagaaagacgacagaaaagtgcccaatataaattccaacgaggccaacgagcaaatacaagcaggagagaaacttaatttttgtacttacctacacactggttttttattgctctttattttcagaatcccaaaaactaagcattatttatacaaaatattctaaataaataaataaatataaaaaaacataaaaatataaatttaatactcagctcgtttccctttttttttattaaaataaataaaaatttctgcagagtctccttaataagttcatgttgcccaactatgatagagcattgtttcacctacgccacttcagaatgtgttatataagccatggcccttaaaagtatgcaataaatgttaaggccaagacgaggtaggtggaatctgccaggatctgcagaaactgtaaaagtgtgtttctcctagtcttgaaaatcagatggaacggaaaagccatcaggtggtgttgaaaaggctttaatttttctttcagactgttcagtagaatgcacccaatgtatttataggttaaagtaggctgtgtaaaaatatacaaaggtcgattgggaaaatttaataatctgaattatttttttcttaagaaaacaaagataaaccgaagatggtcagcgcaaaaactattatagctactggtgtgctgaacatcctgggcatttcctttttcgtggcccagccaaaggatcgatgctcggcagctccacccgttggaaagtatatcttcctactagctattcttctgctcttttgggattcagatatgattccaaggaaattgaaaccgttttccccacggatttttgcctgcggagatcttttattcacgatcttcttcaccgaaataatcctgctggtgggatggtgtggcctcgagaggatgacctatcgatttatattttctgtgtgccgtggaaaacctggttgcaattacggattaatgactttctgcagcatcttaggtgccgttggatcactgtgcattgtgctcgaggtgttgacacagcggaagatgaagaatttggtgggacagaacagtgccggcttgcttattcctcaggacgccggaccagtgttcaaattcattcatgatgtgcgaacctttgtgaggggcgccatatactttttccaattgactcgggaggaacgtattctatcagtccacgccttcgaggctcaattgcgctacaagaagggacaggacgtacaacctggtgaacctgctgtccaggattccgggaatcaaatggacgccggaaaatcgacgacagaaccggaaatcgtccacgagttgtccccgtaaattgtttattatttatacaaatttatgccaacagctgttgctaccgccgtccttattgttgctatccttttttttccgatttttttgtgtggggaatcggcatggggcggtatacctttcatttttcgattttccggaattcggtcctctcattgtttgcttttcattttttgctccaactgttttccttgcggtggccattttaattttcgcctttattcctctcctcgccatcatcgttgttgccatgttagccgcaattgatttgccgtaaattgtatttttaatctgtccgacaaacgttcgacattcgatttcgtttcgaaatatgttgaaagcgattctgtttgtatttcgttctccactgcggaatcggggcgattggatcctggggcgggagaagggtgttaatgagtgtgtcaggggtgttatttattcgttaggtaattggcagtttaagattcgtttcgcttacaaaaaagagacatgatctttcttaaatgactcaccttttttagattattacgagtttttagtgtgtttaaatactttgaatatattaaataaaattgttataacaaaatgtttgctttaaaatttaacaaaactattaaatattcggtcatattttcaaaacccactttttataattaaaaaaaaattttttgtacggactcttcagttagaagagaaattttatttccagagcttcacacctaacacaaatatttacaccaatttatttgtaggcttttagatgcagtcgattaaattgcaaattctgtattgggctgctcatcaaagggcgggcgtataaaaataaagtgctagcaaaacaagagtcgaacattatttttggcaattgctttggaaatactaatatgattgacagttgctggaatcgcattaatgtcactcacactcacgcggcccacatccaagcacccccatgttgccccagtgttgagtaattgaatttgtttctgtgttgactcgatgt

SEQ ID NO: 30155 - DNA, 363 bp, DROSOPHILA
atgactttctgcagcatcttaggtgccgttggatcactgtgcattgtgctcgaggtgttgacacagcggaagatgaagaatttggtgggacagaacagtgccggcttgcttattcctcaggacgccggaccagtgttcaaattcattcatgatgtgcgaacctttgtgaggggcgccatatactttttccaattgactcgggaggaacgtattctatcagtccacgccttcgaggctcaattgcgctacaagaagggacaggacgtacaacctggtgaacctgctgtccaggattccgggaatcaaatggacgccggaaaatcgacgacagaaccggaaatcgtccacgagttgtccccgtaa

SEQ ID NO: 30156 - protein, 120 aa, DROSOPHILA
MTFCSILGAVGSLCIVLEVLTQRKMKNLVGQNSAGLLIPQDAGPVFKFIHDVRTFVRGAIYFFQLTREERILSVHAFEAQLRYKKGQDVQPGEPAVQDSGNQMDAGKSTTEPEIVHELSP

SEQ ID NO: 30157 - DNA, 2553 bp, DROSOPHILA
attcgccggttttttttttgcatctgaataatttttgcagttgtctctctttgggtacttcatacgcctcagtggtttatgcgaaatgctaattattttgtattttcataataatatgtcaatatgcatatttttgtctgccgcggggtaacgcaataaatgccgtcaataataaaagcctattgctcagcacgcttcccatttcaatttgttgataatataattcgactgtttaaatttatgccaggccgattttataaaatcagtgcaagaaaaaagcatactaaaattaaaaattcatcaatttggcagctgacattttctgttgaatgttatatataaagtttttagaaaagctttaaccgtttattgtaaaaaatacctttatccattttggttggaaacttgtaagaataagtgtatttatttgctatttttgaagtctttaatcttagttcgactttcaatccactgtcaagaaagcgcaataaccattttccaatcgataacttaaaaacgttcgcaaccatcgaatccatcacgtaattaaactaaatacgtgatattaacttgctaccaatcttatggtgcatacacgcatatcaactttaaagccaagttacgccatcggctcatatgagcctgaaacttcgcagcgctcttgggcgaggataagccagagaagcctggccaaaaattccacaccttggcatagggacgtgacttgatttttcactggctttattatggccgctcaacgagctagaactaccacatttctgggcggctatttcggttcattcgggccaagttgcacatggtacaaagagaaagagagtgagttctcgtagacaggcaattaagtcaggccacgaatgtggtcgaggttttttctacgcccctttcattttggcctttcatttggctttgtccctggcacggacaaacatctaaatgacttagatttgtcaattcgtgttaaggccaatgcggtagtttttcaatgcctcgagtcctcaattggacccgctggacatggagagcttaattagttgggtttcagctggcaatggaagggcttaaagaaagcaatgcatttcttttcttcttcgccatgggttcttacgtaacagattaaagttaaaatatttaggtgcttttaacttaccgtacagtcgtatgatgccatccgtttcccctctcggattcttggccacacatttgtaaataccatcatcgccactgctcacattgatgatggtcaacttcatatgggttttataagctggcaatccgactgtggcttccactctgcgaagggaaaaatatgaatggaaatcatattaacaggacatattgcgtaatgtatttgaatgcattatttaatcatttttgttggtttttactcacttgtacttgtgcgaatcgtgtatgattggtccctcgccacgtgtccaatagttcagagaagtgggatgtgcctctgtgaagcattcgatggtgacgttgaaaccttcgggagcaccaaccaactgatggggtataagcagcattggaggaactgaaagtaaacaaataaagacctatgtagttaagagacagtaagaaccctacctaaaattctacattcaatcattttgcatttcgctatcatctaactgcttctcggatatttcggtaatcaaaaaagttcaacttcgcaaatttataaacttaacttggaagtaaacttgtggtcaagttctctataattcatttgagttagtttggaagttttttttccagtttttattgacaaacaacaaagtttcaagaccgaaatatatttatgcatatgtttaatatatttttgcctgcttttttaggtttatgcaaatggtctgttttagtttggatttaagcaggcattttctgctcagactgattttcatttaaattgcaagtcaagccggagtcaccaagagaaacttctcgaaagcctcgaataaagcgaaaaaaagagactactttcttttaacgaaatcttatgaatagcattattcgggatttttttgccatcttgagttggctcccagcttgcaccgcctgcacctttgcaattatatgcgaggacatctatgggaatccaacctttgccacctcgagaaaccaaacataaaaacctcccgcacttcaggcgcatttggcgcacagttttaattaagatattaaatggaaaaatgccgcagagagtgggactaatgaacactcgagcactacgtttttcctatcattattgtcagcatcccagcatcgtcagcatcttcatcatcattaaggggtacaatggatgttcttcgggcatatttttttgttttgccttgtcatttgtctgcctgttttaccttttgttgatttatgtccaccaagagttggcaattaagctgaaggcaaacgaaaaatggcatggaaagggattctccccgatggtccaattgaatttttaatcagcttggacacaaattagcgtcggttctgctggcttttctgtacgcttatgaaaagtatctcgtg

SEQ ID NO: 30158 - DNA, 315 bp, DROSOPHILA
atgctgcttataccccatcagttggttggtgctcccgaaggtttcaacgtcaccatcgaatgcttcacagaggcacatcccacttctctgaactattggacacgtggcgagggaccaatcatacacgattcgcacaagtacaaagtggaagccacagtcggattgccagcttataaaacccatatgaagttgaccatcatcaatgtgagcagtggcgatgatggtatttacaaatgtgtggccaagaatccgagaggggaaacggatggcatcatacgactgtacgcgggtccaattgaggactcgaggcattga

SEQ ID NO: 30159 - protein, 104 aa, DROSOPHILA
MLLIPHQLVGAPEGFNVTIECFTEAHPTSLNYWTRGEGPIIHDSHKYKVEATVGLPAYKTHMKLTIINVSSGDDGIYKCVAKNPRGETDGIIRLYAGPIEDSRH

SEQ ID NO: 30160 - DNA, 3470 bp, DROSOPHILA
gaggtttgtttggttacagcagcgaatgtcgtgtacaaaacaaaaatagatttatgcttgcggcatttttaagtgacagcaaacgagcaaatttctgtgacgaccacgaccacgcccacggaaagtcctgacgcccacctcccagggcatgacaggacttgacagcacatgtgatgtgtctgtcgcctgtaataaatcttaaaaaagtgcacaacggcaaacgcagtgatttgattctgtctttccattttttttttgtaccgctgccatagtataagccacaaactgcagcagctacaagtgtgctcccgattgaaaaaaagtcgtagaaacgggcctctttgtggagtttttgcggggactttggtaccgagacatgaaaagcagctttaaagcattggtcagttgtgttttggaaaagacagttgcgcactataatatactataatataatactctaaaaactactactgaacaccgagttttattttaagttcctacaatatttaaatatattttttgctctccgttcggaagcatttaagtcgcatttaactcgtaataaaaggtaagacatatacttaattaattaatcagtgctaggttccgttactcttactacaaaaaaaatacttttatttatagccttttataagcaatatccatagtagtttaaatcaatccccaacaattttcaccgaaagttcggctttaatccgctgctgacaaatggaaatatgagcggctgcgaatcctgaagtaaacaacaaaaaataataaacccaaccatttcaacagcaaaacaaattcacagaacgcacgtaacaaaaataaattgaaagccaaaatgaaaaaaaaaagcagaaggcaaatggaaacaacaacgtttttatttagattttaactaactttttcgcggcttctttatcgattctggtaactatacatatctagcaagagtggaatcctgtggttactggaccaatttttaaggactgtgttaatcaaatccaatgtacttacagtccacgctgactttgatgcgcttggaaaccgtgggtggaaccccattggaggcgatgcacagataggcgcccatgtccagtcgggaaatgcgagttatctcgagagtgtcgccctcccattcgttcactggaagggtgtgtgcggaaaaggggttaaaatcagttggggaaatgacaggggatagcgctaaatgattgatgcagtgcatccgcacttacctatgtgattcttattgatggctatgcgggagttatcgtcgcgtttccatttgataatgggtctgggactaccgctggcccggcatctcagcgaaatgttggctccctctcgcacaatcacatcgctggagctcagtgagtcgtcgatgttggggggaactggaaaagatgtgggggaatggaaataatctgcaatatccgctaaactctggtaatcctcttaaatagatgcagtcagcagtcatttaaaattgaactctgccctcgtatttatgcatgataaatatttgccaacacataaaaaccgtagtttggcatcaggaaattgcttttaatatgaaccctgctgtcacacagcaattattttccaatttctcattattcgctgaaatcgaaaagcatttattggtcatgaaacggcggcctcattcaaaaatttgaattcatttcgagcatttcaatatggtgtttactaagggcacaacacaattatcagggtttttaatatttaatttcattagaaaaacatttaatgtaactatggttatgctattgtatgcccgtacattttcatctatgtatatgattttaaactttcgctctatgtcttttttgttggtcgcgtataatttcgtttctttttctcgcactttttaattaaaagcatgcgaattcgctcccttttccacaaatatggcatgcatttttaataatttgtttgttgtttgcccaggcagggaaaataatttcgcctcggcaaaggattcactgaactgtgctccgttccggctactggccctcgtcgaatcctgattccaggattcgggcctgggtctccacttcgcagccggctttctcccgatttcggcgtttttgttcttgccatgtttgcactccgctttaaggcacataaattattttttaattcaccccgtatttggacaggatttacccggcaattcctgtggaagtccccaaaatgccacaccctgattagatcccataccccacaacttaccgacaacgtttaggtagccaaactgcgttttggccgtcaccgtattgatctggcacatatatcgaccccggtcctcctcgtgcacattgtttatgtgcaaataccacgtgcggtgcctgtcgtgcttgtcgtgcgtgacactgatgcgcggattgcgcgtgatcacgtgattgtgaacggtcaggatggcggactgctcgaagtgcatccaggcgacctgaaatggagattggggtagcttatagctgcagtttcatgtcgtgtgttgagctctccaactgattcacaagttaatttacttcatctttaaatgttttatgtgtaacagtgctgctttaaaagtttcattaatttacatcctagcaagctagacaaattctaaaggcttttagttgtttaaccatttagtacgtttccaaccactgctggtacttaagaaaagagggaactttttaataacatcccaacaccagtcattttttttttcggtctgccactgcacacgtactatatggaacatccagcaatttcacagctcagcatcagcagtcaaaatggagcgaaaggactaaaaagtgggtgggctgggaaatgggtggcggagagcggaagcgagaaaattgcatcatagtgtcgcacataaaaataaacgcaaccggttacaagtcgcaggatgtgtggaaaaaggaaaagcaccgtctcctgtgtgagtgtgtggtgatagctatgaattacatgcagccaatataagtacatatacaactggggaaaggatgtaaggcaagccttacttacagacgcccagctacttaaacatgccattcgactaaagctaaaccgggtctctccggcttcttcaccttgggcaggaattttccaagggtttttcccatttccctgcatgcactgcacgtttctcgtttgcagcacattttcttgttgctctcatttacacctcaatttgattctatttcctgcgttccgacagactatcgaatgggctcctagcagccaactcacgctaacaaggccgtctttgatggctacttgagccgggaaatctggcactccgagtgtcccctaatgatggccgcagttggtgcgagtaagccgcttccaacattcatggtaatgatctgcttaagtcccgtcaaaagcaatggcatttgattggtggtttcggcaagaatgcaaactgcagtctgcag

SEQ ID NO: 30161 - DNA, 648 bp, DROSOPHILA
atgcacttcgagcagtccgccatcctgaccgttcacaatcacgtgatcacgcgcaatccgcgcatcagtgtcacgcacgacaagcacgacaggcaccgcacgtggtatttgcacataaacaatgtgcacgaggaggaccggggtcgatatatgtgccagatcaatacggtgacggccaaaacgcagtttggctacctaaacgttgtcgcggagtgcaaacatggcaagaacaaaaacgccgaaatcgggagaaagccggctgcgaagtggagacccaggcccgaatcctggaatcaggattcgacgagggccagtagccggaacggagcacagttcattccccccaacatcgacgactcactgagctccagcgatgtgattgtgcgagagggagccaacatttcgctgagatgccgggccagcggtagtcccagacccattatcaaatggaaacgcgacgataactcccgcatagccatcaataagaatcacatagtgaacgaatgggagggcgacactctcgagataactcgcatttcccgactggacatgggcgcctatctgtgcatcgcctccaatggggttccacccacggtttccaagcgcatcaaagtcagcgtggactgtaagtacattggatttgattaa

SEQ ID NO: 30162 - protein, 215 aa, DROSOPHILA
MHFEQSAILTVHNHVITRNPRISVTHDKHDRHRTWYLHINNVHEEDRGRYMCQINTVTAKTQFGYLNVVAECKHGKNKNAEIGRKPAAKWRPRPESWNQDSTRASSRNGAQFIPPNIDDSLSSSDVIVREGANISLRCRASGSPRPIIKWKRDDNSRIAINKNHIVNEWEGDTLEITRISRLDMGAYLCIASNGVPPTVSKRIKVSVDCKYIGFD

SEQ ID NO: 30163 - DNA, 2339 bp, DROSOPHILA
cgtttttgttgccactgcacctgagaacaatgacagccggcactcacaggagctgagtggcaaatcggagttggaggcgtgttcaccccgcggctctgtcaccattcgggattcattttcccccgtcacgtggcgtcacactcagaactagggttttccacatcggaaatattgcatttccaaatgaaaaattctatggtatgaatttcatctaaatttcaacaaattcgaattcatttaaaataatgtcattttgaatgtttatggaagtccaccaaatttttaaatatttacatgcatttgttgttaatagtgtaaaatactatgcgcatgaaatcatttaacgtagtctttgaagaaaccactatacattttgcataaaagcgtactataacaaatagtataaatgaagtatatccgaagtgccggatcagtagcgttttatgtgtgcaggaggttatctgtgaactgctacctttgccgcccattctgcccaggtggctttcaatttttggcataaagccttgtatcacatttgccctgcggctcaaatctcccccaatctgtgggtatttgtccccttttccccatttgtctgtgcaaatatgattggctgcgggggccttggtcgcctacgtggcatcagagtgttattgatggcatcaggcagcgggagtcggaaagcagccaaaaggcaatcgcggataaagataaagtgcgattgcaatatttacactgccctacaaaattgccactcaatgcaaacacggcgttgtggaagtcttcctaaacggtacgaattgtatggtattatagcaaaaaaaaaatggtggagaaattgtgcatggaaacttattaatcataaaagtaatatgtctctaatatgttatatagctgtgtttattatccgcttaagcagttatatttaataaaaaatataattttatgtgctttctgtggcagtgtactaccacttgagttaaatattcatttagatatgttatgacagatactcactgtttaaattcgaggtcggcacattggccccgcctccggccacaatcacgccattgctgccgaccacggtgcttccggttccgctgccagccacaggtcctcctccgcccgctccattgccagctgctccaccgaagtttggaaccactccagttgccaccgtcttggatccagacggatgtttgccctgggcagttccgacgcccccgccgccaccgccaccgtttagaatctgcggcaagatgatcttgttggtggagtcccccgctgttgccgcgagcactaggagggccccaattagatgccaggacgggggcaacatcaacttgccgttgcggtcgactcagccacagccaggagccccaatgatggcctcgcctcctggccaaagtgcattctctcggatctactcgctcagtttttaccacctcactgccgccgactggtttttaaaacgccgcggggtttgtttgtgttttcgcttttgtacgaagtttttcacacggttttgttatcgcagtttttggcttgtggcaattaccaaatttttagatttttttcacaggattatttccttctggcatttacttaatatgttctgtttgtaagcaacgccattttggtaaaaattattttgaaaagccctcttgcatatgtatttttaaatagtttttaccacacctaaaatatggttaaaattgaaaaacagtgtataaaaaacagagtcgcaaaaaatacatagaaaggaacatactgaacttgacacctactattttactatcaatttcaagtattgtcagtcttaagaaactaaaatttttcacacatttcttaaaagtgttgactatttcttgcaaacttaaaggtcccagtcgttttcagtgatattgctatgggcaaaacaaagaaaaaaacagcctcaattttcgagttttccatttgactttagcacccataaattagctttcaatgcactggattcccactttcctgttccctgtccaattgtttgctgtctagtaactttcaacgcatgcacacagatgccatgcagatttgctggggaattcaataaagtttggcaaaatattatgccatagagccgcacgctagctgcctgccacgccccctgtgcgtaggcggttcgcacgtgttgcagcaaagtttaagccaccaaaagggaaaaagggccaacggaataaccaaaaagtcataaagatttgcctgagcagtagcaacttgagcgccctctggcgaccagttgataaatgtccttttttatatggtttatctgtgggcaaaaaattaaatgtcggaaaatg

SEQ ID NO: 30164 - DNA, 339 bp, DROSOPHILA
atgttgcccccgtcctggcatctaattggggccctcctagtgctcgcggcaacagcgggggactccaccaacaagatcatcttgccgcagattctaaacggtggcggtggcggcgggggcgtcggaactgcccagggcaaacatccgtctggatccaagacggtggcaactggagtggttccaaacttcggtggagcagctggcaatggagcgggcggaggaggacctgtggctggcagcggaaccggaagcaccgtggtcggcagcaatggcgtgattgtggccggaggcggggccaatgtgccgacctcgaatttaaacagtgagtatctgtcataa

SEQ ID NO: 30165 - protein, 112 aa, DROSOPHILA
MLPPSWHLIGALLVLAATAGDSTNKIILPQILNGGGGGGGVGTAQGKHPSGSKTVATGVVPNFGGAAGNGAGGGGPVAGSGTGSTVVGSNGVIVAGGGANVPTSNLNSEYLS

SEQ ID NO: 30166 - DNA, 3457 bp, DROSOPHILA
attaagacagctgccagactgagaaacgcggggcaggggtgatcacatacatcataaagcaaatcaagcgtaagtaacaccttgatataaagctcaagtgactgcaaaacacgggacaaacagggcgtatacgcaatttatatctcccagccaagaaataaagtaattaaggtttgtctggttcctttctttaataacttgtttgattgattacatattttctttgctttgtccactcgaaagtatttccaattgcaactcaattaagatgccctatctcggtaataaaaggaattccggagctcccgtcttaatgacaaatgatttggtttccttgccgtttatatgaccataaatattaagtgaaaacacccagtgtgagttcaaagttcaaagaaagtcgagggtctacaacttgtaattggcacacagattgggagtctgcaacatgtgtagtgggtgttgttgggttataatgaaaaaggttgctctttgaacgccttttgttggcttgagggtttcgggatttctataggttcgcccggctgggaaacagacaaattgccaccgattaagattttttatcggagtacagagggacggtcatgaaaaatgaagatgttgagatgttttttcttggaacttgaggttaaatgaagtcctcgaaactccccaaacgaattactcaaactgactttaagtttaagaaatttaaggacctgtgctgcctaaaaactgaacatgtcctttatccaatgacctcaatatcctatagtattctttacacctctaataataccctttggatggctaattaacacatttgccctaacacaatcacgatgtagccccattaattaagtgctaattatgatgacatcacgacaagacagacaaatcccacccctaatcacttgagcacctatataacgaagccgaaattggctgtgaaattcacaccattgtggatattgacgcagacaatatggaattgaaatcgatggatccggtggagatgcccatttttggtagcactctgaagctaatgaagttctggtcatatctgtttgttcacaactggcgccgctatgtcgcaatgactccgtacatcattatcaactgtactcagtatgtggatatatatctgagcaccgaatccttggactttatcatcagaaatgtatacctggctgtattgtttaccaacacggtggtcagaggtgtattgttatgcgtacagcggtttagctacgagcgtttcattaatattttgaaaagcttttacattgagttgttggtgagtaccgaaagattatctcaaaaatgcatattgcataaatggagttttatagcaatcagatgaccccatcataaacattttggtcaaggaaaccacacgcctatcagttttaattagtaggattaatttattaatgggctgctgcacttgcattggctttgttacatatcccatttttggttcggaaagaggtgggctatataatttccttagatgatttcattgtcaattttatctcttgcagttctgccatatggcatgtatttgcccactattgatgaatacaaatacgcatcaccttactacgagattttctttgtgattcaagccattatggctccaatggggtgttgcatgtacataccatacacaaacatggtagtgacatttacccttttcgccattctcatgtgtcgagtgttgcaacataagttgagaagcctagaaaagctgaaaaatgaacaagtacgtggtgaaatcatatggtgcataaaatatcaattaaaattatcagggtaagctgtttaagaattgtttttaaaattcttttaacattttttaaatacagatttgttgattcaatgaatgccttgaacacccatcttcatttggtggagttcctttgctttggtgccatgctatgtgttcttcttttctccttaataattgtgagtgatgggggattataaaaaaattctagtttttttgtttttcccctatccaacaggctcaaacaattgctcagaccgtcatagtcatcgcatacatggtaatgatatttgccaacagtgtagtcctttactacgtggccaatgagctatactttcaagtaagagttgtctaacaattttcttttaaatttttgtataagtatgggattttgcagagctttgatattgccattgctgcctatgagagcaattggatggactttgatgtggacacacaaaagactttgaagttcctcatcatgcgctcgcaaaagcccttggcggtgaagtcttatagacatttactcagttatgtccttctactaacaattttttcctttttagattctggtgggtggcacatatcccatgaacttgaaaatgcttcagtcactactaaatgccatttactccttcttcacccttctgcgtcgcgtttacggctaagaaaaattcgcttagaaggttagccccctttggtggaacaattgccacaattgattgcatttaagcagcaaatgttcctctcaaaggatattgtggaagggcaaatgcggtgcaattggattgttgcaaatgcattcgaggcaactgcaacacgtctccgaaatattcgaaaggagcaaccaacgaaataaactataataaaattgcttctgttggatcctttgttggcttttcgaccacatcttggctggcagttgaccacgagcgcttccttttgttgttggctcattgttatgcccggcacgtgccattcagataacttctatttaagcaaatataaatctaaagtgtgctaaattagattaaaatgttctcgtaaaataaacgttgtccagtctgctgccagctgatacagggattgcaggaccatggagccacctaacattattgtgtccgaaattgcttacaaattcccgctctgagtgccaagtaagccaaattgttaattaatgctggaaattggaaactccgttatttatccccaatgaggtcattgtatagatgggggggggggggggttgagaagttttgtttctttgtttttgagagcacaaaaaggattcgttaagtaaggcaattcacaataacatattattttataaaagataataagaaggctattttataaagtttttatataaccattgacaattacctttggttatcttccacctttttagtcttaagcatttatttggaacgccgtgtttccccctttatttaaatgcctttactcgaagtgaagcccccataagttgctagcgttatcacttcaatttccctaatcaacattaactttcacttcagagccaagcccctttccaaaacctcccgtcatacacatccgaaattcgacgcagactcgtcttcgaattgactttaatttaagaattttttatatgcccctcacagatccaaaggctaactgtagtcaggaagc

SEQ ID NO: 30167 - DNA, 753 bp, DROSOPHILA
atggatccggtggagatgcccatttttggtagcactctgaagctaatgaagttctggtcatatctgtttgttcacaactggcgccgctatgtcgcaatgactccgtacatcattatcaactgtactcagtatgtggatatatatctgagcaccgaatccttggactttatcatcagaaatgtatacctggctgtattgtttaccaacacggtggtcagagttctgccatatggcatgtatttgcccactattgatgaatacaaatacgcatcaccttactacgagattttctttgtgattcaagccattatggctccaatggggtgttgcatgtacataccatacacaaacatggtagtgacatttacccttttcgccattctcatgtgtcgagtgttgcaacataagttgagaagcctagaaaagctgaaaaatgaacaagctcaaacaattgctcagaccgtcatagtcatcgcatacatggtaatgatatttgccaacagtgtagtcctttactacgtggccaatgagctatactttcaaagctttgatattgccattgctgcctatgagagcaattggatggactttgatgtggacacacaaaagactttgaagttcctcatcatgcgctcgcaaaagcccttggcgattctggtgggtggcacatatcccatgaacttgaaaatgcttcagtcactactaaatgccatttactccttcttcacccttctgcgtcgcgtttacggctaa

SEQ ID NO: 30168 - protein, 250 aa, DROSOPHILA
MDPVEMPIFGSTLKLMKFWSYLFVHNWRRYVAMTPYIIINCTQYVDIYLSTESLDFIIRNVYLAVLFTNTVVRVLPYGMYLPTIDEYKYASPYYEIFFVIQAIMAPMGCCMYIPYTNMVVTFTLFAILMCRVLQHKLRSLEKLKNEQAQTIAQTVIVIAYMVMIFANSVVLYYVANELYFQSFDIAIAAYESNWMDFDVDTQKTLKFLIMRSQKPLAILVGGTYPMNLKMLQSLLNAIYSFFTLLRRVYG

SEQ ID NO: 30169 - DNA, 2873 bp, DROSOPHILA
actccccaaccagcctcgccactcgcccagcgccggaataatggtggactcggatccggagtcggatcgggggctatatatggcacgcccacgcgtgtatagcgcctaaaggtctaaagataatccaaatcgatggagaattgattgctcccccactagtttaataatgatataaattagtcggtaaattagtcgacttgatacaaagttttggaaattatttgcatagaaaatacttcaacgaaggtagagaatagtaactaaatcttaactatgtagtagtactcgtagtgtgtgtgctccaatgtccagctttatgtaaatgtttaaataaaatatacattagtaaaaagcatcttaataaaagataaaataaaactggctactattattgggaagaatgggtttaaatatatggagaatatttctaattggcctatgtttgccataaactgttgaatggtaagttaggtgttcattgtaattacgaaatgattgaagcgagaataatttttatacaagaaccgctcaatatttgagtaccagaaaaaacaactgttgattaaaaatgaattcatttcggaaagatgcaaaacgatgctgagctttgacctaatttaggcgtggtctgaagatgcagagatcaagcttcttgggatttggcgaaaagctttcaggatttgctgcaggactcctttcgattaagctcgctttcggaaaacttttcggaaatgtcttataaaagatgcaacactaaaaagctcgccagcgcaaaagcttcagccgaaagagaggacaagctgcaaccccttaaaggataattctgggagacccccttgtgcgggcaatggaatgggcttttcggagtcaacaataaaattttcagtcagctttgagacgcagcagccacagcagcagcaaaagcagcagcagcagccgctgcaggatttagcggtcggttcaaccaggagcagcaggagtagagaattttcgcgtcagaatgcgaagtcgcacggaactggtgaccaccactttcgaggagagcgacgaggatgatttcagtccggacgattccgactccgaggaggactggcgacccaccaagaaacgtccgtccaagccatctggctccgatggcggcaggaagcggaaatcggcggcagccaatgcctcgaaggccaagcgccggatggccaaggtgagcgacgaggagtccgacgaagaggatgacctagaaaccgatcccagcgacgacgactttgactacccgtcggccagcacttcaaagcgaccccagagtctgccgcccaagaagcaatttgttaagttaagccaactggatttgctggtaaaaaagtctgatcttatggaaaacgactggctaaagaacaatcgcttgtgtctgtggcgcaaagatgaacaaacgaatctgcttcagaagtatctgcgggtcaagtcggctgccgaggaggaggagctgctctttacctccagttctgtagtgagtggattatttgtatgacaatggtggtcacatacatgatataccaatgtatacttaatcaattcaagttatttgcatcaatgtgataatttcaatatacctcctgtgacctcctgtgtttataaataattatcaataagcattctattaatatacttaattttgcagtattccagttgggatgatcagcagacgagcgacttcatagaggtcaaagtcaactgcttggatcccaacaacagacgtattaaactgcacgatctggaggcgattaagaaaatctccgtggaactacaatcagagcgaaataagaaaacgacatcggacaaagaagatactttggaggcggaggaggataagcaaaattaagctgattcttaaaaaaaaaacaactactaattatacacaaaactaacattttcattagtatttacaactagttggccaagttagggttaaacaacaaatttccttgtaacagctatgtgaaaacagcattaaatttaatttagaaaattaaagaaactaagaaaaaaaaaggaaatcaaaaggaaaacatttgaaaatatcaaattaaaatcttggcgtttcaattttaatacatttatattcaacagttcggtagatctcttcaaagtttacttcgctttaggcaaacatgcaaacattcaagcgaaatgcactttgtacagatttgttgtttgttgtttttaatagaaagagtctaaaaatattcgcttggggacggttatcgacgccgttcgcctttgacggttttgcgtttctccttcttttcctcgcgcagttgcttttgcttttcccgatcctctttgtccttttgctttttggccgcactatccattcgggcctgctcccgcttttccttggctagcgcctggacatccgatttgttggtattcttggtgagcgttccactgtcatcctcgctttccgcctcggaattctcgtcgtcctcgttggcaacggcagtctgcaaaaagattggcattgtcattagatactagatacttctactttaaagctagtaatagatatctggaatcagcagcttggccagcatggatagcaacctgggagtattgagctagaatctgctgcttgatgcgacgctcctcttcggtgtattcacgctccttgtttacggcgggttgcagcttctgttgctccagcaacttggccaactgggcattcacatcgatatccagaccttttttcggcggatcatcggcgctgggatggctctgtagccacttttgtagtatggtggccaccagttcgtcaatgttggcggactgcaaagatcacggaccataatttatgtaggcaatgatattactaaccataactt

SEQ ID NO: 30170 - DNA, 702 bp, DROSOPHILA
atgcgaagtcgcacggaactggtgaccaccactttcgaggagagcgacgaggatgatttcagtccggacgattccgactccgaggaggactggcgacccaccaagaaacgtccgtccaagccatctggctccgatggcggcaggaagcggaaatcggcggcagccaatgcctcgaaggccaagcgccggatggccaaggtgagcgacgaggagtccgacgaagaggatgacctagaaaccgatcccagcgacgacgactttgactacccgtcggccagcacttcaaagcgaccccagagtctgccgcccaagaagcaatttgttaagttaagccaactggatttgctggtaaaaaagtctgatcttatggaaaacgactggctaaagaacaatcgcttgtgtctgtggcgcaaagatgaacaaacgaatctgcttcagaagtatctgcgggtcaagtcggctgccgaggaggaggagctgctctttacctccagttctgtatattccagttgggatgatcagcagacgagcgacttcatagaggtcaaagtcaactgcttggatcccaacaacagacgtattaaactgcacgatctggaggcgattaagaaaatctccgtggaactacaatcagagcgaaataagaaaacgacatcggacaaagaagatactttggaggcggaggaggataagcaaaattaa

SEQ ID NO: 30171 - protein, 233 aa, DROSOPHILA
MRSRTELVTTTFEESDEDDFSPDDSDSEEDWRPTKKRPSKPSGSDGGRKRKSAAANASKAKRRMAKVSDEESDEEDDLETDPSDDDFDYPSASTSKRPQSLPPKKQFVKLSQLDLLVKKSDLMENDWLKNNRLCLWRKDEQTNLLQKYLRVKSAAEEEELLFTSSSVYSSWDDQQTSDFIEVKVNCLDPNNRRIKLHDLEAIKKISVELQSERNKKTTSDKEDTLEAEEDKQN

SEQ ID NO: 30172 - DNA, 3738 bp, DROSOPHILA
ttactgcaccaccgcggtggtcctcaatttggactgaaggttttacgctcaactggttgggtgagtctcagtggcaaatgaggtccatgaaagcgggaatacagatacatagtttgctgcaatcggattgatgagcttgcttgttttttggattaaacatatttccgacaattcatatatacgtttcctggcgcaacggttcgtcaagcgacaacacagattggcaaaaatgtaatttattccgcattttaagagagtaaaacaaacaattaatcatttagccaaatgaaaactgacatgaaagagcccaaataaaaatgttcagtgcgaaggggacacgacaccaagagtaatggccatgatgaccagttcaagtccgggttctaaaccagctgacaacattaatttgactcacgttgcggtggtaacccaaagcctacctcccttcaccgaaatgctagctaaaattccggctaacaaatgattaagtttgtgcgggaaacaagtaacacatctcaacatccattgaagtggctaacattgtgcaaactgaagacgtcacattccaccggaaaatagtcatttttcggagaaagccaatggaatgctatctgtgcaaaaagttgagattccaaagtgaaaccgcaacatcgcaattgttgtgaaaacttacattttaatagaaataataaattaagtataaaatttaatatgttatcatacattttttttttaaataaaaatagtatatttaatgaacagtctaatataaatgtgatattgctttaaattaatcatccactgaagacaaaaaccagctaatttttgtcggtgcttcttgtgctgctcaaatgcaaattaattgggcaataaagagtaatttaggcagcacattactcaaagtaattcaagtcaaatatatagaaatagaaacacaggggcttgggaaattttacattctgataagaattcgaggccaaaccacaaaaaccaagtgtctatgaccaaagacaaggccatatacaaatggtttgctcgcacttaaaaaaatgttttgataaaactgttataaaacggttataaagcaagccataagacatatatatgcaacatattcttaaatctttaatattctactgtattcttacaaacaatttctttgctaatttcaactttgacctcttatttgcaggcttagcccaagtgacttaccagatcattgggcctcaggtacatcaaatccatcgacctcgaccagcagcagcagcagcagcagcattagtgccagcggcagcaacaacaacaaatacaacagcggcaacatatcggtctgcaacctgccgcgctcatcgccggccgctgcaacagcagccgttacactatcgtcggccgccggcggtattggcagcaacttgttgagcggcttgcatcacggtctggcgcccggtacgcatccactgcagcgcgcgacggcagccagcggaggcggagctggtgctgggggcgtggcaggcgcctcaacagcagcggcactcacactccagcaacatcagcaccagcagcagcaacaacaacagcagcagcaagcgcaacatcagcatcagcaccagcatcagcagcagacgcaacagcagcaattggcctaccagcaccagcaactgcagcagcagatcatctcgcatcgttccatacaaaacaaggcggcggccaccgctgccgcacaaacggcaaatcttgctgctgccctgcagcgatcggctgccattatgaatgcggtggcatcgccgatctcagccaactctgccaactcagcgacgtccggccgaaagatacggcgcaagacggattcaaaggtcaatctggtaagtttcggccggggtagaagtctctcgtaacgagaaaggaattccgaacactcaataaacctataaataaacatgcgaatattacgtatacgccacatggacattcccatgctagctccaacgcatatgttttgctgcttagctaaaatataattgaatgctttatctaggtaccaaaaccagaacctaagggatgtaaattatgttaggaaataaatatttgtgttttttttttatcattttatcactccaatgcaaaatgaaatttaaagatgtccataaataaaaagattataaatatttataaaacctttttctatagataatatgcagatatatacaaaagtagcaataaactatgcttaattgagggctgaaattttaataattattcatacttcaagtggaacacatttattaacaacattctgctctttgcagccccaatcacaaatcaacaaatgcaacaatgagaagcgacgtcgcgaggcggagaatggctatatcgagcagctgtcggagatattgacgctgaacaagcgtggagatatgacctcaacgaaaccggacaaggcggctatactaaaccaagtggttcgaacggtacgaaatcaattgatacatgtgtacatttgtttatccactccaccccacgcatacaagttaattaccgacaagaccccaatgcataagctcatcaaacgaaactaataagcccgaaacgcgaccaactgcaaaaaaaaaaaaaatagcaatacaagttgttataacaccctgggaatgactgacttggtgtggacttggccagtcgattccactggtctgtccggaataccaaatgatcaattacagcgcaaaaacacagcccagtgaaattccccaatgtaatttccatgcagtttccccacagctccagctttgtcttcgttctttttgatatttttcgtacacagagaaaaatgggtgatagtttttccactttgattaccacataataaatctatatcttaaaaaaagtattatatcaagttgctgatatctaagtattgtgtaattttcttcaagatcttatcacaaaactttcttccaactcacttgagttttctctctgtgcattcaaaaacgcgttccaattaaaaagcaattaaaagctctgccgaaaaagagcttaaaagaatttcgcgaaagggaatacgagaggtgcagaagcagctatgaagagttggctgacgtaatttggcccccgccgcaacacgatttaattaatatttttatttaatttacataaatttatttatgtttcaatggcccgacccgactttatgttgttttaggcattattattgttgttgccgtatttcttttattggtttcaggtagcctaagcacgttattatgcaaattattttcgagccaagcgccacgctttgccgaacatccaaaaaaccgacaaaacccaaaacagaaatcaaacaaaaagtggaaaaagacacaaaccaacaaatggctttttaaatgaaacgcggcacacagccaacgccaaaatacataattttattttgtaatccgggcgggaaaaaaacaaaacaagtcgtcgtcggccagtgaaatgcaattaaagggtacaacaaactcacacatgagttccgtacataataaacaaattgaattaaacgcgttcgtgtcatgttggtttttcccctaatgagaaaagccaacgcagggatcgaaccgagacaattttcagcgctaatccaattgctggacccctcattacatattattattcatttgacaaaacacaactcgattagccggctgacatggaaaaagtaaaaaaaggatacatcccgattggaaaggccccggcgag

SEQ ID NO: 30173 - DNA, 882 bp, DROSOPHILA
atgaccaaagacaaggccatatacaaatggcttagcccaagtgacttaccagatcattgggcctcaggtacatcaaatccatcgacctcgaccagcagcagcagcagcagcagcattagtgccagcggcagcaacaacaacaaatacaacagcggcaacatatcggtctgcaacctgccgcgctcatcgccggccgctgcaacagcagccgttacactatcgtcggccgccggcggtattggcagcaacttgttgagcggcttgcatcacggtctggcgcccggtacgcatccactgcagcgcgcgacggcagccagcggaggcggagctggtgctgggggcgtggcaggcgcctcaacagcagcggcactcacactccagcaacatcagcaccagcagcagcaacaacaacagcagcagcaagcgcaacatcagcatcagcaccagcatcagcagcagacgcaacagcagcaattggcctaccagcaccagcaactgcagcagcagatcatctcgcatcgttccatacaaaacaaggcggcggccaccgctgccgcacaaacggcaaatcttgctgctgccctgcagcgatcggctgccattatgaatgcggtggcatcgccgatctcagccaactctgccaactcagcgacgtccggccgaaagatacggcgcaagacggattcaaaggtcaatctgccccaatcacaaatcaacaaatgcaacaatgagaagcgacgtcgcgaggcggagaatggctatatcgagcagctgtcggagatattgacgctgaacaagcgtggagatatgacctcaacgaaaccggacaaggcggctatactaaaccaagtggttcgaacgcgcaaaaacacagcccagtga

SEQ ID NO: 30174 - protein, 293 aa, DROSOPHILA
MTKDKAIYKWLSPSDLPDHWASGTSNPSTSTSSSSSSSISASGSNNNKYNSGNISVCNLPRSSPAAATAAVTLSSAAGGIGSNLLSGLHHGLAPGTHPLQRATAASGGGAGAGGVAGASTAAALTLQQHQHQQQQQQQQQQAQHQHQHQHQQQTQQQQLAYQHQQLQQQIISHRSIQNKAAATAAAQTANLAAALQRSAAIMNAVASPISANSANSATSGRKIRRKTDSKVNLPQSQINKCNNEKRRREAENGYIEQLSEILTLNKRGDMTSTKPDKAAILNQVVRTRKNTAQ

SEQ ID NO: 30175 - DNA, 4234 bp, DROSOPHILA
gaaggactgcttatctcatgttgggaaattaaaatgcatttcgtttaaattataaattcgaattaatctacatctaaattaccgtaaatgtatgcaaaaatcaataatcattaatcaaaaataaacaaaaatactattaaatacctaaagcagaggtattaataaaatgatatatacaattgaataaatatcatttgaaagttgtttatgtggcaacttagcagcttgccattgcatatatttaatttttaggcaatggcgcttctgctttacgtaagtcctcgtacctcttcacgactcattttcagaggctccactgtacaataattgctgttggtctttcaccattgctactgtcagcgcactaactgtaaacgatgttttctcgatgaagctcaactgcagtcgcacacacgtgcaaggacactcacctgaacgcacacacacacacacacaccaacacagcgaagaacagcggggcaagtagtagtcggcgtgtgtgctgtgcgtgtgtgctggaactcggctctcggcaggaggtttgttttgcactgtgacactaatgtctttttcttgctctttttctgccgaccgcccacttggcctttggcactttgtcaattcacaaacaaaaacgaattgtacgctggattatcgaggaacacacatacgcacaggtgtacagtgagcatgagcgcccactaacgttctcgctttgcatttcatggctatggtttttgctttttgaccaagtaggggcacccccaactaacggtatagataaaaaaaatgtatgaaaaatacgaacaccagatataatacctaaataagaatctttcaggtaaaaagttggaccactgttattgatatacgagtagtatagtcgctggacttttataatttaaaggggcaactttttgttgagatttttatgtcaggtcaaaaataatttagtgaacagatatttaactgcagaagcatatatattttatagttgaagatggaggaagaacccttagtttccccttcggttccaattcgaaagccatgtggtacgtttaagcctccggccatctaccagaagctgatgattgacaatctgactgtcattcgaccgcccatcctgaagatcttctactgggagagctttgaaataacggggtgagaagaataccaagttgcgtccaagctataatcattaacctatgcccagcttgaatcggaagctgcgttcgaaccgcatagagcatgagcatacattcaagatacctattcgccagatccacagtcatcccctgaaaatggtcttctggatccgtaatctatcagccgcgaacgccaagttgactctaaagcgtatccaaaactgtcaatgccagccgcagcagacccaagtcggattcaatcagttccgccagctcttccactgcccacatcgcagactgctccacatcagccaggagatcctgtctatcaatcctgatgaggtggtggccctcaccgtaacggcctatttcttcttgtacggcgaacacctgctcacctacgaagttcagtaagtgtgtacagtggaaagaaagtggtatgtgatgaaatatgattccattattcagcactgaagacaatcgcaagtttctatggcattttcatctggagatctcgtcctttgaccccgaaaagtgtctactcactaaagagctgctgccggtaaacataaaaagcttttaccatataacgcagccgttgtgggtccaaaatatcacgatgtcacacttgtcattctcgtttgcttcaagggatcgtggcctcaagctgctcaatatgaatctcaccgtgcctcgacagagtgtttggcccctcctggtggactatcgacccttggactacgaaaatgaggttatccttatatatgttaccagacattttcctgtagtataatttatatatcactcaggcggaaattgtcttaacttatgaaaataccaaggctcgctacaaaattaaagcacgaggcgtgctgactgacgagaaggaacagacggacatgcccttgaaggatcgggaatgcgtcgacttcctgcacgtcatctaccctaatagagtaaactttgaaatctgcctgcgtgaagatcggacgcagctcgtcaatgtccataactacggacagcagtgcatggagttccggtggcagaggtaagctaaatatagatgtggcacccatttgatccagaagaagtacttaaaccaaagctcccatttaatttacttacccgttccagctacataatcaacgatttttttgcggtagtgttcaatccgcctattttccgcctcaaaggccatcactcgaagttatgcgagatcagagtgacggtgttcgaccgactggtccacttccgccgcattcccatcgttctggaggtgcaccgcattctcgatcgcgccaccatcatagccaagcaggagctggaggaggtggagtccatcgacgatcccaaatggaaagaggacagctacgtggagcacgtctatctgcacctgaacatccgcaccaatattaagcccgctctggactctgaggagctggaaccgggcgataggatcgaccccacggctggacccgaaccctgtagccaagttggtcctggggaagccaggagaggcaacggctcgggtgacggtccatcgacacctgcaccgaacaccgaggagcagcgcaaagaggccgagcgcaaggagctgatctcccgactggtggccaagaacaaactcaatcccaacgagatcatcgagctcagcatggccattgatcagcgaataaccattttcgagaagctattctggaagtacctaagcaagtccaagttcatgcgaatcaatggtgagcgcaagcggcagaaggtggtcaagacctacgagcaagtggtgtccccggataagacgactcccctggaggcagcatcggaaattgatcgaaagtaagttttcgtggagagtctaatagggcattacttaaccagacgacaaattgtttttcactttgcaatatctactggtttttgtttataaaatagccttaaatcataattcaaataatttatttgaaatactaatagattccttacttccagtcacatcatggatctgctgtcccggctgatgcaggaggccatcaacgacttggccaagaactgggtctttattccgtcgcagtactacgaacgcaaccattaggtgttccctccgttaaataaatgcattctcctgcaattcgtatccgtggttttcctggtcgcgcgatgctttccacttcgttgtgggttgtccgcgccggaaatttatgtaagatttcgcacgagttgaaagccgacgccaaaaatgctgccgaatttatgtgtctgcatacggccttttagggcttttcacacagacagggggcgtggccgtttggggagtttaatagcaatggtcagacaactttacgcgagtatttataactcaacgcttgcttttagtttgtgcggaaagcttacaagtggtcaaatgttcgcccatttagtatcttaatattcgcatgtgtagccacaatcttttggattgcactgggcaatctgttgcaattaattactgtttaaatataaaaacgatattttttagcagtaaatattttattaaaactttagcattagcatccgatataatacaaaaataaaaaataaatatatatgcaaaaaaaatagcccttaaccttttttattaaaattacttttgttattgctatgaagttaacaatgagattattcgtacacatattagataacttcaaaatttgaacttcccgcgcttggcaatttttcgatttaacccaaacggtcactctccatcactatatagcgagtgcaccaacccgtactaagcgagagcactgaaattgtatttcctgtaaaaaatggtaattttcaattctattagtacggtcacacttatatctagcgcgtcacttgattttaaaaatttccaaaccaaacgtaaattccagcacaataatcaacctgaatagtgataaaaaccgagaaactcgtacctaaaaagcagttgcagtgtttgccaattgattcaacaccacggctaaagttgcgacatcgaatccgcaggagccgccttcgacggtccaaaaaagagacgccaaattccgcagcgcgcacttcgcctttccattgcatcgaaattcctg

SEQ ID NO: 30176 - DNA, 1809 bp, DROSOPHILA
atggaggaagaacccttagtttccccttcggttccaattcgaaagccatgtggtacgtttaagcctccggccatctaccagaagctgatgattgacaatctgactgtcattcgaccgcccatcctgaagatcttctactgggagagctttgaaataacgggcttgaatcggaagctgcgttcgaaccgcatagagcatgagcatacattcaagatacctattcgccagatccacagtcatcccctgaaaatggtcttctggatccgtaatctatcagccgcgaacgccaagttgactctaaagcgtatccaaaactgtcaatgccagccgcagcagacccaagtcggattcaatcagttccgccagctcttccactgcccacatcgcagactgctccacatcagccaggagatcctgtctatcaatcctgatgaggtggtggccctcaccgtaacggcctatttcttcttgtacggcgaacacctgctcacctacgaagttcacactgaagacaatcgcaagtttctatggcattttcatctggagatctcgtcctttgaccccgaaaagtgtctactcactaaagagctgctgccggtaaacataaaaagcttttaccatataacgcagccgttgtgggtccaaaatatcacgatgtcacacttgtcattctcgtttgcttcaagggatcgtggcctcaagctgctcaatatgaatctcaccgtgcctcgacagagtgtttggcccctcctggtggactatcgacccttggactacgaaaatgaggctcgctacaaaattaaagcacgaggcgtgctgactgacgagaaggaacagacggacatgcccttgaaggatcgggaatgcgtcgacttcctgcacgtcatctaccctaatagagtaaactttgaaatctgcctgcgtgaagatcggacgcagctcgtcaatgtccataactacggacagcagtgcatggagttccggtggcagagctacataatcaacgatttttttgcggtagtgttcaatccgcctattttccgcctcaaaggccatcactcgaagttatgcgagatcagagtgacggtgttcgaccgactggtccacttccgccgcattcccatcgttctggaggtgcaccgcattctcgatcgcgccaccatcatagccaagcaggagctggaggaggtggagtccatcgacgatcccaaatggaaagaggacagctacgtggagcacgtctatctgcacctgaacatccgcaccaatattaagcccgctctggactctgaggagctggaaccgggcgataggatcgaccccacggctggacccgaaccctgtagccaagttggtcctggggaagccaggagaggcaacggctcgggtgacggtccatcgacacctgcaccgaacaccgaggagcagcgcaaagaggccgagcgcaaggagctgatctcccgactggtggccaagaacaaactcaatcccaacgagatcatcgagctcagcatggccattgatcagcgaataaccattttcgagaagctattctggaagtacctaagcaagtccaagttcatgcgaatcaatggtgagcgcaagcggcagaaggtggtcaagacctacgagcaagtggtgtccccggataagacgactcccctggaggcagcatcggaaattgatcgaaaattccttacttccagtcacatcatggatctgctgtcccggctgatgcaggaggccatcaacgacttggccaagaactgggtctttattccgtcgcagtactacgaacgcaaccattag

SEQ ID NO: 30177 - protein, 602 aa, DROSOPHILA
MEEEPLVSPSVPIRKPCGTFKPPAIYQKLMIDNLTVIRPPILKIFYWESFEITGLNRKLRSNRIEHEHTFKIPIRQIHSHPLKMVFWIRNLSAANAKLTLKRIQNCQCQPQQTQVGFNQFRQLFHCPHRRLLHISQEILSINPDEVVALTVTAYFFLYGEHLLTYEVHTEDNRKFLWHFHLEISSFDPEKCLLTKELLPVNIKSFYHITQPLWVQNITMSHLSFSFASRDRGLKLLNMNLTVPRQSVWPLLVDYRPLDYENEARYKIKARGVLTDEKEQTDMPLKDRECVDFLHVIYPNRVNFEICLREDRTQLVNVHNYGQQCMEFRWQSYIINDFFAVVFNPPIFRLKGHHSKLCEIRVTVFDRLVHFRRIPIVLEVHRILDRATIIAKQELEEVESIDDPKWKEDSYVEHVYLHLNIRTNIKPALDSEELEPGDRIDPTAGPEPCSQVGPGEARRGNGSGDGPSTPAPNTEEQRKEAERKELISRLVAKNKLNPNEIIELSMAIDQRITIFEKLFWKYLSKSKFMRINGERKRQKVVKTYEQVVSPDKTTPLEAASEIDRKFLTSSHIMDLLSRLMQEAINDLAKNWVFIPSQYYERNH

SEQ ID NO: 30178 - DNA, 2717 bp, DROSOPHILA
tacgtgatttggagggaagactgtactgaagaaaaacggcaagttgttttaagattatcgtgagtattttgattagattatactcgtttattgctggttttgagtcagtacccgtatgtttaattctttgaaatcgttttgcgaaaactctcaaaccctatccacacaaacataatgaatgttacaaatctgaatgttatgttgttgtcatctgtcactgtttacacgtatcaattgattgtccaaatatgtatatgttgtctttgtctctaaaaatcgtattgaataattcagtgaaaacaagcgtattttaagtctctatatatgtaccttttgctatgtattgtatttttatgtatctgtaactatataaacgcgtacgacacgccccactcccactcacatttcacactcaaatgggaaacctaagaaacaaatgctaaatttaacactatacacactaaaaattaatgataatttttaataactaaatctgtatatgtgtaaatgtaacgtttgtctaaggaatcacacaactgaaagtgaagttgaaaagttaggaaaccaagtaaagtttcacttgaatttcatttcaatgaaaacacaatacactttaatttaactaagtactatacttacaagcataattgagaatgttcacccacagacacacaaaacacacacatgcaacacaatagaaaaatgtttaaacaattaaatttaatgttagtggagacggtattctgtacgctatgtttgtacttacaaatcgatatatatatatatatatatatacatacaattaattaaatttattaattaatttcaacaagaagcaagcaaaaagcagcaaacagcaacaagaacaacagacacgttcacttaatgtttaacaactgaacaaaaacattgaaaatgagaaaatgaaaaagactaaataaaatattaacgaaataagcgtaatagacgcgttcttaaagtttcctatgatagctagcaattacggtttcaatttgcccagtttgttggccatgtccacaattaatccgagattggcattcagtgtcttcacctggttgagtgtgttctcatccagctgcatcagtacttcccgcttcacggtgttgatcttgtgcggtttcacggtgatcacgccgcccctggtgggaatgtggacgtccgcatagcgatccggacgcatctggacggccagcgggcttcccgccttcgagagcaccatctctccggcgcggggccatcgcacaaagctcatggtgtcgccactcagagccctgtccaccgaatgcgcctgaagcctcggtggcagggcattctgcggagttcgtgttcgaccacgactgatggacaaactgcgagttgtgggcggcttaatagctggaaagaaagtaaaacaaaaataacaattactcttctattgccgacagttaaattaaatctcacctgccctctgaaattcggcaaaagtcttaaacccgagagccaagaattctggcatcttcatttgcagtagctgcttatcagtcctaccacggatcaccttaatttggttgtccacctcttgcttgtagcgcttgctcatctcatcgatcttctccagagccgaatccattttgatttgggacaggcgcactttctcttcgcgatcagccttctggcgctgggcctgacgacgagctgtaatcttggtgcgaggcatatttctaacgatttatatattccagtcaactaatcgcctaattctaacaaagtcaaagggctctttggtgaacaagcgattcaaaactgtattcatatcaacgtgcgaaaatacattttaaacatttttaacataacataattttattggccactttctgaaatctgggaacttaaaagcggttgcctcttttgcaattagcaaaagaaagatgttatttgaaggtagcagtttttgctagagccatgaaatccgaccatttcatctgcagcaaacgagcatcagtcctggcttgaagcaaacccaatttgttgtccacatcctgcttgaacaacttggccatctcatcgactttatccattgcagaattaaattggattctcactttctcatctctttcgattctccgtcgttttgcttgaaggcgagtaatcatcatggaacgcttcatttttttttttttggattaagcatgtatttaaaacattacatttaaatcgccgtacacttggatatgaacatgtattgaaacttatgcaaatacgatagatttttatgaataaagacaaaatacttgaactaaatgagtaaaatgaaaactgaacttaaacgaaacgtattaaaatatatgatatagcattatatctagataagcgtttgaaatgacagctacttgaacaccgcctggctggccttattaacaatcatctgcaagttctcgtgcagcgttttgatctggttaagggtgtcctcgtccaggttctccaacagatttgactccacctcgtcggcatccagttttttgggccgcaagctaagaactccgttccgaatgggtatgttcacattggcgaacttgtctggcattctatcgtgtgggaaaaatggttttaacaaattggtatcgacacgtagtatgtgatcaatacttacacttgagccaccatgggactgccgtatttggatagtgccacctcgccgggcttgggatagcgcagga

SEQ ID NO: 30179 - DNA, 651 bp, DROSOPHILA
atgcctcgcaccaagattacagctcgtcgtcaggcccagcgccagaaggctgatcgcgaagagaaagtgcgcctgtcccaaatcaaaatggattcggctctggagaagatcgatgagatgagcaagcgctacaagcaagaggtggacaaccaaattaaggtgatccgtggtaggactgataagcagctactgcaaatgaagatgccagaattcttggctctcgggtttaagacttttgccgaatttcagagggcagctattaagccgcccacaactcgcagtttgtccatcagtcgtggtcgaacacgaactccgcagaatgccctgccaccgaggcttcaggcgcattcggtggacagggctctgagtggcgacaccatgagctttgtgcgatggccccgcgccggagagatggtgctctcgaaggcgggaagcccgctggccgtccagatgcgtccggatcgctatgcggacgtccacattcccaccaggggcggcgtgatcaccgtgaaaccgcacaagatcaacaccgtgaagcgggaagtactgatgcagctggatgagaacacactcaaccaggtgaagacactgaatgccaatctcggattaattgtggacatggccaacaaactgggcaaattgaaaccgtaa

SEQ ID NO: 30180 - protein, 216 aa, DROSOPHILA
MPRTKITARRQAQRQKADREEKVRLSQIKMDSALEKIDEMSKRYKQEVDNQIKVIRGRTDKQLLQMKMPEFLALGFKTFAEFQRAAIKPPTTRSLSISRGRTRTPQNALPPRLQAHSVDRALSGDTMSFVRWPRAGEMVLSKAGSPLAVQMRPDRYADVHIPTRGGVITVKPHKINTVKREVLMQLDENTLNQVKTLNANLGLIVDMANKLGKLKP

SEQ ID NO: 30181 - DNA, 3537 bp, DROSOPHILA
actagaaatattttgatggtgtaagtgtaaaatggtaacactaatgcgcggtaaattcaattaaataattcgaacttaactgaagtcactccaaaataacacatttaagtatatatcttctatatttatttatctatattttgaataatgagttttgaataattccaatgagttctgcaactaatctcaatgaactagttccctacaacatagagatcgattttttttatatctttatttttgaaaggggaattccaactacccatttgttaataatgtaacggtaatagcatcttattattataacaaaatacaatattggtatattagtattattgaatagtaataattggaaaaactaaagacttgcacactagagcgtataataacgtaagtgaaaactcgagatataattttgcatcgtatgtgcggaggtatctgaaatgaaaagccccaaaaattggagccgcaatcctattagtccgtttcgaaatctcgcccctggtcataaattgcgctctgctccacattgttggatgtttgctatctgtctctgctagttgcactttggctgccacaatggcaggattctaataagcgtgggtggctatgggtgtgcgaatggcccacaaatcaaaagcatttttgtcaccatttgggtggcttccttgtggaggggcgtggcactggccgcccttatttctgcacagaacgtggacacgtcatgtgtgtaaggcattttgaaataccaagcaccgctttctgggcacttgatggaaaccccatatggattggcctggttttgtacttaagggaaaatattttaattttcattacccaataatcttaatgatcctcttggctgagaaaacagttatgtacttcatttttgggctagtaaaataaaaaagacagtaggctcataactttattaaaagctgtcggtaaattgccgagatgcaaaatgaaaataacttaatttattattttcgcattcgcatcaatcccactgctcggcttgacatatgaacaaatgggtgttgaaacaattttcattgtacatttccttgttgtatacattaacgcaatcgaacttattgcccctttcttctttcttccacttaaagaacggcggcgatctgccggtgagtgatgatgcaaaaaggccgttcttgaacatagcattcatatctatccaaaagacgccggccggcgctcttgagaagatctcattaaactcctgctcatccctgatggtggcaatgtgaccgcccaattgacgacaggtgtttgaggcgccaaaccaattttgtttgttttccttctcaatgtagaagcgtcttgtgcccattctctggaaaagcgccggattaatcctgtgcgagattcgtagtttctcgagagtctccacactctggttgcccattatggtctgcagctcgttcagtgcgtatgccaacttgctttgcatggccatcaatcgttcttctatcgatctttcgatcctcactattttctgttgcatttcactttccttcagcgcaatgaatgtgaaccattgttgttgatttatagccacttgatcaattagcagcggattttccgttttgttagcgagaacatcacgagaagcccaggctagaatgacgcatataaaacaatacttgaacatgttactatgtatgacctgctagtcccaatccttaaaacggactgtttctggatgttaacatctgtataatgaaataacaatccgcatctaaaagcatattaaagcgttgaaaacggtttacaacgtctggcaaatacataggttattcgttctaagcaggtgtataactaataaaatttattaatacaatttatggcttaccaattaggaaaatctttcttgataccgtacgttcaccgcacttttatgatagtcgcataatttcggccttttcttaattaagttgatgggctagaagttttaattggcttgatgctcgttcttgccttaagccacaaagtggatgaacctaaaggtgggtgggctctaccaaacgtcattaccaatcgatggctgtggggaaaagggatatatccgaggcattcatccagacatctatctatccatccatccatctatccatccgagagcagatatttcagcagcagcaacgacaacgaaactcaatttgcgccggccaaacgatgcgttgagcatataaaatgcaaagcggaagcgacgttcatggatagattacacaactacttacaaatgtgcgtttaagcacccaacacccaccacctaccacccacagccagccatatttcccatttccaacgcttttcctgcgtgtctgcaactgttgcatattgcagtgcgtgcgctgcctttattgtcccgatgttaatggaaacacctgctggcggcggagaagtcagccccggagtccgtgaacgagtgccagtcattgtcaggggaaatctggccgggattgcggggtgaggttgactgtggagctggtggtgtacagccgcccttaagctgcgtcatcatctccatgccggatgacagtagacggaccgagaatggcatcttttgggagcgctttcaggtaatgccgccgagagatccattttacaaagtgcagccagtaaaagtgtttctgtgtcagctgttgatggtgcccagatgccctgctaatgtaaacgtgccacgagggacacaaattataattatgttgaactctgatacggcattaatggaagctcccatgcattgatccaccattgtattgattgctatccaatataccttataagccccattgcagccgtattactataatttatattgatattttaccttcatgctttataatattaaagttgctttgacttttcagcatttttacgtttttaattagaacagctagcacgtattgaaattggaataccaccactacgttttagtttattgatgttagcttagaaactcataaaaagcggagaaaatgaaacaacatgtgcgtaaaaaaatgaaccctagggaagttctagaacagcaactaccctacgaaaaaccaaggcaatcgtaacgagtttatgtcccaccgatatagttccaaccctccaggttaatgagccccgagtgggggagcggttcaattgaattgtgtgccgtaagttggacaaacccaattaaaatttcgactgcccgtttttccggcgataaagaaagaatagtgctggccaccccatttacaatcccctttgcacaggtgttgcacaattccactcgttcccgggcactcgaaagtgcactttgtactcactcaaaatttactccagtctggcgcgttccactttcacacgttcctcgtggactcaacgtgcgccttggcatatgcaacgcattcagtcgcttgtgggaggcagttgcattcgattgccagcactttcatcagcggaaaagccagagagcagctaatagccggacaaagagtgagaaagcgagagcggagagggagaggcagaacacattcgctg

SEQ ID NO: 30182 - DNA, 841 bp, DROSOPHILA
gcagcttaagggcggctgtacaccaccagctccacagtcaatgactggcactcgttcacggactccggggctgacttctccgccgccagcaggtgtttccattaacatcgggacaataaaggcagcgcacgcactgcaatatgcaacagttgcagacacgcaggaaaagcgttggaaatgggaaatatggctggctgtgggtgcctgggcttctcgtgatgttctcgctaacaaaacggaaaatccgctgctaattgatcaagtggctataaatcaacaacaatggttcacattcattgcgctgaaggaaagtgaaatgcaacagaaaatagtgaggatcgaaagatcgatagaagaacgattgatggccatgcaaagcaagttggcatacgcactgaacgagctgcagaccataatgggcaaccagagtgtggagactctcgagaaactacgaatctcgcacaggattaatccggcgcttttccagagaatgggcacaagacgcttctacattgagaaggaaaacaaacaaaattggtttggcgcctcaaacacctgtcgtcaattgggcggtcacattgccaccatcagggatgagcaggagtttaatgagatcttctcaagagcgccggccggcgtcttttggatagatatgaatgctatgttcaagaacggcctttttgcatcatcactcaccggcagatcgccgccgttctttaagtggaagaaagaagaaaggggcaataagttcgattgcgttaatgtatacaacaaggaaatgtacaatgaaaattgtttcaacacccatttgttcatatgtcaagccgagcagtgggattga

SEQ ID NO: 30183 - protein, 266 aa, DROSOPHILA
MTGTRSRTPGLTSPPPAGVSINIGTIKAAHALQYATVADTQEKRWKWEIWLAVGAWASRDVLANKTENPLLIDQVAINQQQWFTFIALKESEMQQKIVRIERSIEERLMAMQSKLAYALNELQTIMGNQSVETLEKLRISHRINPALFQRMGTRRFYIEKENKQNWFGASNTCRQLGGHIATIRDEQEFNEIFSRAPAGVFWIDMNAMFKNGLFASSLTGRSPPFFKWKKEERGNKFDCVNVYNKEMYNENCFNTHLFICQAEQWD

SEQ ID NO: 30184 - DNA, 2402 bp, DROSOPHILA
acaaagaatatgaagcttctgtcactgtcagttgttatcttttgtgccttacaatgtcaaaatgccgttggatataatcctggtacaataaataaataagttcatttatttttaattacctaaaacctgttcttttatagccaagtgtaatgatccgaaaagtaatggtggggcttgccgaaaacctcccgtggacaagtggacctttgacaagattcaccgaaaatgtgtggaaatagatttctttggatgcccagatacgaaaaacatattcgattcaaaaagcgaatgcaaaaatacctgttcatatgatgtattagtttactgaccaacccaccagttcaatggtgaaggaaatgcaattgattgtacgtaattatgtctgtaccacgagtcgtatgcgtaataagagtattaattaattcagacaagcttcgtatgcgtctgttgtttatggcagacaattgagtaaacacagtccagctaattgatggcaggcgacgttttcctctgacccgattgcccatttccctggttacccgttgttgtacttttccaactttgcctatgtgtggacaaacaaagtccgggcaaccgagcactgattgattgagtttctgtttctgtggcacgaaggcgtccagttaatggatcaatggctttctgtttagttcgctgccatgctcgtgtacactcaacatcacccctcactcttttcatccttattgtaataaagtcaatccggttagcagaaaacaaattgttagtacagttccattgtcccttatgggtttactaagagcgctagcttgtgactatgttccgttttgttctatgcattcatttttcttatttcagagtccagcaagccttgatctatgatttttctattttaaaagtcactttactacacaatccagttcgattaacacctaaaacactttagttcataaaacatatattttctaaaaaaaaacggaattgctgaactgtgacaaagatgctcattccagaggttgacatgtggaatgtgtccaagagtagccggatacaccgcctttcgatcttcaattgcgataagcctggactgaaagtgttggactacgccgcagtccggggagttgataggttctacttggagtgccaggactacagggattatttcaaagacccctataatcgagtccacaagccgataaggtttacctcgtatgcgggcaagtgcgacgtaaagttggataccgacgttgaggtcctttctgagccgaccttgtggcgtattgatcgccagcccatcgtctatccgatcgactatcactcggatatggcactgggtagacgggactgcgatcacattaaagccttttgttcgccagctgagagcctaagcttcaagcgataggttgctgttgccatttttgtcagattaaatacagttttaagcattgcaattgtgggttttacgttatattttggtatatttcagtatacaaaagggtgccattcgaaaacgctcgtcgtgtcagtctgttctgtcaatgggttcacggatgcgaatctgttgttttgcgtcagttgggatgcacttttcacccgcctgttggcgtgcaaattgctaatgaatttaattcccctgcacacacgctcgcagacaatgctgtcgaaaacggaaacggatgggaaaaagcgggaaagcggaaaaaggaaacaaggcgacagctcgacggctactgctaacatgtgatgcaggcgacaagtgaagtttgtccgttgtcggaaaatctaataaccgacagcaagcaaacacacaataacgccgagttttccagctactgtactagtcgctgtgtattgccgggttttaatttgtgtcaggacctgcatattaagtgggaccggccacaacggtatcgaaggataccagacacgtactgattgaattgcgggggcggaacggggtgtgctctagttctagttgatacggcatgatggcacagccatcccatcctgagggctgattaagcatacgccatgtgtgcgggccgtgagcctacaatacacaatgcattttctgggcgccagatttcaagcctaaatattatcaccgaccccgttgcagtggtcgaaaaaacaaaataatattttgttaggcaactcaattttcatcagcataaatcaaaactcgacggcagtttatttgcatagcgccgggcttaccgaaaattgttgaaaaatctatttcaactttgcagacaaatcatattcccggctaaagcgggaaacggcagaaactttacggcagctagaaacttttattttgtggaacacaatagacagtcatcctcagggggcattaaatgttactatttactttcgaactcaggtcagacacttgcttttga

SEQ ID NO: 30185 - DNA, 402 bp, DROSOPHILA
atgctcattccagaggttgacatgtggaatgtgtccaagagtagccggatacaccgcctttcgatcttcaattgcgataagcctggactgaaagtgttggactacgccgcagtccggggagttgataggttctacttggagtgccaggactacagggattatttcaaagacccctataatcgagtccacaagccgataaggtttacctcgtatgcgggcaagtgcgacgtaaagttggataccgacgttgaggtcctttctgagccgaccttgtggcgtattgatcgccagcccatcgtctatccgatcgactatcactcggatatggcactgggtagacgggactgcgatcacattaaagccttttgttcgccagctgagagcctaagcttcaagcgatag

SEQ ID NO: 30186 - protein, 133 aa, DROSOPHILA
MLIPEVDMWNVSKSSRIHRLSIFNCDKPGLKVLDYAAVRGVDRFYLECQDYRDYFKDPYNRVHKPIRFTSYAGKCDVKLDTDVEVLSEPTLWRIDRQPIVYPIDYHSDMALGRRDCDHIKAFCSPAESLSFKR

SEQ ID NO: 30187 - DNA, 2567 bp, DROSOPHILA
gcttgggaaatgggcgaaagtgggcggtgctctatctctgactgtctgcacacaagtggtcacatttatgtggacgatatgtttgccttgtatgcgggtagcttctcttctgacccccgtccatttgcagactcactcttcctttgtttgcaggaccttgccaggacgtgcccggctgcacacacatacgcacgcaaacaatcctccatgcacgctgccaatgacagttgtcaacatgacagttataaggacactgatacaaatgttacggatgtttgtcttggccggacaaggaatgttgtttactgcttggcgtaagtagaaagcaaagattgattaaaagtcctgataaatggttgcaaactgtatgtgtcccatcttaaaattaatggataattatctcagtgccataaaatttaatttgagaagtttacaatcgtagaggcagtgatcttcacaatcttcttttcgaaaactttgaaataagcattaaaaactcttcgttacgactttaaaatctctgattccgttaaacatttgagaacatgatttttctaatagtttttcttaagtggacgtttgaaaatacttatccaactttgctattcttaattcctatgacacttgaacttaaagtatttactttccacgaccttaacttttatatgtttttaagaagattatagaaataaagaactttggaataactgcaatagctgaatttaataaaagtaatagagatacggaaagtttaagtgaccaatggcaatgaaattggcttgtgtatgattgaccttggctttaaagtttctaaaaattttagccagataaagttgcattcagcagttaaaccattcattcacattatacatactctaaaaatcttccaactttaatccttttccctacttttaccgcagttttagagcttttttaggcagtactgtcagaagttggtaagtccgtttcagttgtggaaatcccagctaatgtccggcaatcaatgcctgggaccaatgtagatccctccgagactatcgccgctatccccgcccacaccgctgccctcgccgtcctcctcatcctcaccatcgttatccagaaggccatcatccagcccaatggcttccgttccgttctcctgtccactcggaccattgttgatggtggttccctcgtaggtatcgctgtcgtccaccagacaacagtccccgcagtcatccgtcgaggagttgacatcgtcgctgagatcgtccagcagcgtcaccttgggagtccgaaactcatccggacatcccaccgaaagaccggcggaggcaaccgaaatcttgatgttgcaattcgtggaggcgtggcaggcatgggagtgcggaatgggctgctggacagtggccacctgggacgacgccccgtgagcgggccgaaaactcagatttggcgtccgctgacccatgctggcgattccgggtggcatctgggtgtgcgacatgctcaacgtgggcggcacatttagcaccgctgccccaccgcccaccttgtgctgcgagtgggcgtggcccgagtacatcagctggtgcgtgtccgaggccaaattgtgggcagtcagttgcagcggatgctgatccttgcgttctgtcgagtggagaaagcagaagagatggcaactataaacacttcagattgcaaagtatctgaaggatgcggacacggaagcggaagtgcattcgaggacatgtcggcgattggtttatcgcctccacattgtgcaggcatctgtgagggcctcaagtgaatgagccagcacttcgcgtcccccatcacttccgctttccactgtcctgggcttttgcgaatgggtagatgcgggagtagaagtattcgctaccctgctctcaaatgaaaatgtgcatgtgcccattaggggcgctacgtggacgtttcgtaaaatccaattaattaaatggaaaaataagctgattgccgtattgagtatttgtgagtctgccaatccgctgcatacaaatttgcagctatgcattttatattattcgaaattcctaaacgaacactttaaatagtacttaacattcaccaaactatattaaagccctattttgatgcagttttgtttaggcagaattaacataaaaacgaataaaataaatttaaaatattttctgatttcattttatttgttttttgctttaagctctttaaactaacacagattccgtttcaggcaaaattgcgagactgaaaagttagactgttaatcaaattttaaaaagcaccagtaagtgcttgttactaaaattaattaaacagattagggcatactccccgatcccaagctctgcgtatttcagagtgcagtggcttcggaagggtgtgaaaactttccggtgacaccatgccctcgacctgacaagcaccattgtcctggccatacaatggctctcaaactatgtgtgtggttacaagtgggttcaactgcgttggtatcaccttttccgcctccatcgccaccgctcacacccgccccgcaattatctgtccgcaaaactttc

SEQ ID NO: 30188 - DNA, 567 bp, DROSOPHILA
atgtactcgggccacgcccactcgcagcacaaggtgggcggtggggcagcggtgctaaatgtgccgcccacgttgagcatgtcgcacacccagatgccacccggaatcgccagcatgggtcagcggacgccaaatctgagttttcggcccgctcacggggcgtcgtcccaggtggccactgtccagcagcccattccgcactcccatgcctgccacgcctccacgaattgcaacatcaagatttcggttgcctccgccggtctttcggtgggatgtccggatgagtttcggactcccaaggtgacgctgctggacgatctcagcgacgatgtcaactcctcgacggatgactgcggggactgttgtctggtggacgacagcgatacctacgagggaaccaccatcaacaatggtccgagtggacaggagaacggaacggaagccattgggctggatgatggccttctggataacgatggtgaggatgaggaggacggcgagggcagcggtgtgggcggggatagcggcgatagtctcggagggatctacattggtcccaggcattga

SEQ ID NO: 30189 - protein, 188 aa, DROSOPHILA
MYSGHAHSQHKVGGGAAVLNVPPTLSMSHTQMPPGIASMGQRTPNLSFRPAHGASSQVATVQQPIPHSHACHASTNCNIKISVASAGLSVGCPDEFRTPKVTLLDDLSDDVNSSTDDCGDCCLVDDSDTYEGTTINNGPSGQENGTEAIGLDDGLLDNDGEDEEDGEGSGVGGDSGDSLGGIYIGPRH

SEQ ID NO: 30190 - DNA, 3026 bp, DROSOPHILA
agctcagaaatcaaagttcaagccccagtgtgataaatgttttgttttttttttttttttttttagcctcgaacaccttgaacttttttctgtcaatgcggctatcgatcgagagcttgaaatcttgaaaagcagctaggaggccaaccaaagaaaacaacgcaggcccacccacctgcagcttttggagtagcaaacgcctccatttccacggcacccgcgttacgcttgaccttgtgggtctctttgtgctcgccactgctcttttcgtgatgctttcagtttgaatttttggattatcggaagccccgagtcttgaatcaaggccgagcttaaaatgcgcgttttaatacccccgttagtcgtagattaaatgggtatgctagattcgttgaaaagtatgtaaaagttagaagcaagcgtttccggttatttttatttttgttaatttctattgatatgccaaacatattgttgaactttcttgtttgcattccaactagctgagtaaagggtatcagatagtcgaggaaatcgactatagcgtacgctctcgttttttttttattttattatttttgtctttcgttttcgtatttttggtgcttgagtgcgtcggacgggttcgataaactttgtggcattaattaggcaaactctttatgttttcatagctccgatataatttgtatcgaattgaattttctgtgctgcaatcgtatctctcgtttatcaagatgatagataaattatttaccatttgaaaacaatatcttatttatttattttaattcatttcagaagatcatggcctctgcaactaaggggtcaccctcaaaaaacgtaaccaggtgctagaatcaacttttcgttagcttggtagattgcaattggaaacaaagttcactttaactgagataaaacgcagagaatccacacatatccggcgtagatcgtggccaggccgaagaatttaatctgatggttgtggctcgcgaagatgccttcagcgaacacggaagacttgcggcgaaagtttctagtagtgcagcagcagcgctccgcaccgcccaatctgaccggggacacactgtcatcgggaattccgaatgccagtgccagctcggccaccaccagcctgatgatgacaacgtctacgggtctgggcggtgtggccatgggtgcgggagagccggagcgtacgtatgtctttccaggcggcaatccggtcgtaggtagcgcacctggtggaggaggacaaggcattcccggagtggcgatggcagctccatcgcgtggtcatgcccgctcaattagccatggcggaggagccattgttggagccaatgggcgacccattaagtcggccatgaagggccaccagcgagccttttcgcagggacaaatcacagactcaccacccggaagtgctgcgcccgcgggcagaggtcacagtcgcgtgggctccaagacggatttcattcttccaccgggtcacaaggaggaaccggcaagggaaccctcggcgcccacatcagcgaccggtgggcgtggccattcgcggcaagcatcgcgatccgaatccatatacacactccggcggacggaggcaccgccctggtggaaacgccttaccctgtgcaattacaacaccggcgacaagttcgaagagcgaagctatcgaacggtggttcccaatcacacagtgccaccgaagaccccaaagagggatcatcccaatggtcagtttgttggcaacaagatacggacaacgaagtatacgctgctctcgttcataccgaagaatctgctggagcaattccatcgtgtggccaacttgtatttcattttcattgtcctgctgaattgggtgccggaaataagtgcgtttggcaaggaggtggccatgataccggtcctcttcgtcctgggtgtgactgctgtaaaggatctcttcgaggatcggagaagaagggcgtccgacaagaggataaacaacaccacatgccgcgtttacgatgggtgagtaaattgtattgtattttaataacacttctagtaatgaaatcaaatgcataagcataaagttgataaatcagactgatttataatttaaaacagaaaagtacgaagtaaaatattactatgacacagtctaaaatgtatgacaaataaatctctaagtcaaagagctgatttaaaatatttctattgagaatattaaaataaggaagagagataatttagataaccaagttattgtctcagtcataaatttgataaaagaaaattaaattgattattttcaaattgattgatactcgtaatcaactagaataccagtgccatgataaaaaagttaacgggttaacaatgcattcttattgaagactttgttcatagaactggtttcaactaactaaaatttgaataattgaattatgcgtgccattcattcgacgactaaccagtttaaaccgacaaacaaattttgtcaataatgggacacttgtccattatgctcgcaatcatgccggtcaatttgtcaatttcccgttgggggaaaactttttagaagtatttgtgtgaaaagcataccaaaccctgcggcacacacagattttaaccaaccagcatcgaccactgactggttgctggctgatggaaattgtttgccccgtcccgtctgcgatttgtttggcacacacatatatgtatgttttaaaacgtgatctagaaatcgataaagtgccaggagagcagaagcagcagtgccaactggcctgggtaaactttccctcgctgtttgaactaaactctttcaccgaccccccactttcttctctctctctctgtctgctggggcttgggttttggttttggttttgggttttgtttgggcttttgtcccacatttgcgcgtggttgacgcatactttttatctgccaccacctttctttgccagactttccaaccaagtgacaatttacttgcattgcacgtgtacttacacttgaagaaattt

SEQ ID NO: 30191 - DNA, 1026 bp, DROSOPHILA
atgccttcagcgaacacggaagacttgcggcgaaagtttctagtagtgcagcagcagcgctccgcaccgcccaatctgaccggggacacactgtcatcgggaattccgaatgccagtgccagctcggccaccaccagcctgatgatgacaacgtctacgggtctgggcggtgtggccatgggtgcgggagagccggagcgtacgtatgtctttccaggcggcaatccggtcgtaggtagcgcacctggtggaggaggacaaggcattcccggagtggcgatggcagctccatcgcgtggtcatgcccgctcaattagccatggcggaggagccattgttggagccaatgggcgacccattaagtcggccatgaagggccaccagcgagccttttcgcagggacaaatcacagactcaccacccggaagtgctgcgcccgcgggcagaggtcacagtcgcgtgggctccaagacggatttcattcttccaccgggtcacaaggaggaaccggcaagggaaccctcggcgcccacatcagcgaccggtgggcgtggccattcgcggcaagcatcgcgatccgaatccatatacacactccggcggacggaggcaccgccctggtggaaacgccttaccctgtgcaattacaacaccggcgacaagttcgaagagcgaagctatcgaacggtggttcccaatcacacagtgccaccgaagaccccaaagagggatcatcccaatggtcagtttgttggcaacaagatacggacaacgaagtatacgctgctctcgttcataccgaagaatctgctggagcaattccatcgtgtggccaacttgtatttcattttcattgtcctgctgaattgggtgccggaaataagtgcgtttggcaaggaggtggccatgataccggtcctcttcgtcctgggtgtgactgctgtaaaggatctcttcgaggatcggagaagaagggcgtccgacaagaggataaacaacaccacatgccgcgtttacgatgggtga

SEQ ID NO: 30192 - protein, 341 aa, DROSOPHILA
MPSANTEDLRRKFLVVQQQRSAPPNLTGDTLSSGIPNASASSATTSLMMTTSTGLGGVAMGAGEPERTYVFPGGNPVVGSAPGGGGQGIPGVAMAAPSRGHARSISHGGGAIVGANGRPIKSAMKGHQRAFSQGQITDSPPGSAAPAGRGHSRVGSKTDFILPPGHKEEPAREPSAPTSATGGRGHSRQASRSESIYTLRRTEAPPWWKRLTLCNYNTGDKFEERSYRTVVPNHTVPPKTPKRDHPNGQFVGNKIRTTKYTLLSFIPKNLLEQFHRVANLYFIFIVLLNWVPEISAFGKEVAMIPVLFVLGVTAVKDLFEDRRRRASDKRINNTTCRVYDG

SEQ ID NO: 30193 - DNA, 2618 bp, DROSOPHILA
ccgcaaggacgacaaggtcgagggtgtctacgagctgatcgattccgatggctatcgccgcatagtgcagtacaaggcggatgatcacaacggtttcgaggcaattgtccagcgtgagcccacggacatcaagataccgttgcctgagccacccaagaagctcctggccgccaagatcctgactcccgtgctaccggtggcgccactcgtccactacgccgcccccaaggccattatcaagcaggagctgtccgccgggaactatgtctctgtatccggaccaacagcacagtacaagtactaaaaggatctaatgactgacttcagctgcataaacccattaggaaacccgtcttgacccgggaaaactcactgccatacatcataatttagttacaattaagacaattgagtgtacatacagacagcttacattaacctacaataaagatgcatcccattcaatctgttcgcagaggaacacaaaaacttggattttttaatatagggaatatacttaaaagctgggtgagggtattttattgatataaaaaaaaaaatgagtagttgagtagtggttgtgttgcaaacatacttatataagtgtgaagatcagttaagaaaaatataagccaagtgaagaaaaaccacattatgacagttcacaagtgtgacacaaaaaagtgaaagattattaaaaccaaaaaaaaaaagtggtgaatgaaatgcttgacttagttcaactcgcttgtgtgtttggcttcttcagtgaattcgtatcattatatttgcgaattgatgtctcataaaatgatgcgtcacgatacaggtggcttcgatactgtgataagcataaactaatgctatcgccgccagacgcgacatggcccatagatgcctctaatctcacgtagctgctgccactttgggggcgtccaattaccggcgcagtcgacgtcgtcgatggcgattctattggatttggctaacgctctgaccaatgcatccatggagcatcagtgcgaaaatggtcggctgcccggagacacgacaactactggtcacattgctattgacccttggcttctgcctggggggaagctcaaaggatacagttgcggatgcggatgccaagtggatggctccacttaagcagtatgggtatacgccgcagcatctgaagaacaaagtggagcatggtgaattcaccaccttcgaactgggcacccccaactaccagattctcaatcccgaagacgaaccggaatacataactgcggatcaaccgcattatcaggagatgctgaggcgacttaccagtggtcgtagtaaagctgacaccattgatgtggaaatggcaagtcgcacggaaacggttcgcgagacttccgatccgggtcaatctaaaaaaccatctcaaattcaagtgccagttaaaccgaagacacaactaaaacaaaatcgctgggagaaactaaggaagcgcagctccatcgaaaaaagacgtgaccacaaggaaaccatggaaactgatgtgcgggatgatcaaagtttcttccctgatattcaggtttaccccggcttacccttccaaagtcgtgtagcaaatctaaattaatcataaataagtcacctcatccaaatgtgcaaatggctttgattttaagtgatctctggtgattcggacaatgaataaatactaaaagtataaaagtaaaaaaaataaagtacttttttaaaggactactttaaataaatcggagttttttgctatttttctttgtaaggctaaaattgttatgacttttactcgcaataatgaaaatagtgatgttgcttatttttgttaaaacaaaaaagattaagagtgcccccaattttaagcagagttttcccaaaatgttgtttaaataatgagctagacaaaatgttaaatggtcaagatactattatttaaatcagtaaagcttttgtactcaatttgtaggaagataatttaggtattgagcaatatcgcttacaaaaataccattatccatagtgtacgtgtagaccttgagttccacaaagaattacaaccaaaaattgataagtcaatcgaccccagacgttaatatcagatctaggccgagacccagaaattataaatcccccaagcagctggaaattttgtgcagaaccgaaaaaatgatcattgcggtcggaatggttttggctatttataaaattaaagatttcaggaggattgtttattctggctaatgagaaactgcctaaaaaaaatgcattatgaagttcgtctttctcttaaaggttattgtcatgccaaaggtcatacataaatatgtttgctatatgtttttgattaaacaactcttgtcgcgagcactccaagctatcgacgagtgcgggcagaaatgcttgaatgtgtattacggaagcggcggcatctggcgattgtctttacccattccggacccattccggacaaccacgccccattccgagccgtttggggcgtttggaacgtgatgcggtcaacgcttccgcgacccatttgctcggcgttgtaagaacgagaagaagaagctctcggccagcgcagcgtatttaagagc

SEQ ID NO: 30194 - DNA, 618 bp, DROSOPHILA
atgcatccatggagcatcagtgcgaaaatggtcggctgcccggagacacgacaactactggtcacattgctattgacccttggcttctgcctggggggaagctcaaaggatacagttgcggatgcggatgccaagtggatggctccacttaagcagtatgggtatacgccgcagcatctgaagaacaaagtggagcatggtgaattcaccaccttcgaactgggcacccccaactaccagattctcaatcccgaagacgaaccggaatacataactgcggatcaaccgcattatcaggagatgctgaggcgacttaccagtggtcgtagtaaagctgacaccattgatgtggaaatggcaagtcgcacggaaacggttcgcgagacttccgatccgggtcaatctaaaaaaccatctcaaattcaagtgccagttaaaccgaagacacaactaaaacaaaatcgctgggagaaactaaggaagcgcagctccatcgaaaaaagacgtgaccacaaggaaaccatggaaactgatgtgcgggatgatcaaagtttcttccctgatattcaggtttaccccggcttacccttccaaagtcgtgtagcaaatctaaattaa

SEQ ID NO: 30195 - protein, 205 aa, DROSOPHILA
MHPWSISAKMVGCPETRQLLVTLLLTLGFCLGGSSKDTVADADAKWMAPLKQYGYTPQHLKNKVEHGEFTTFELGTPNYQILNPEDEPEYITADQPHYQEMLRRLTSGRSKADTIDVEMASRTETVRETSDPGQSKKPSQIQVPVKPKTQLKQNRWEKLRKRSSIEKRRDHKETMETDVRDDQSFFPDIQVYPGLPFQSRVANLN

SEQ ID NO: 30196 - DNA, 3254 bp, DROSOPHILA
gcccccaattttaagcagagttttcccaaaatgttgtttaaataatgagctagacaaaatgttaaatggtcaagatactattatttaaatcagtaaagcttttgtactcaatttgtaggaagataatttaggtattgagcaatatcgcttacaaaaataccattatccatagtgtacgtgtagaccttgagttccacaaagaattacaaccaaaaattgataagtcaatcgaccccagacgttaatatcagatctaggccgagacccagaaattataaatcccccaagcagctggaaattttgtgcagaaccgaaaaaatgatcattgcggtcggaatggttttggctatttataaaattaaagatttcaggaggattgtttattctggctaatgagaaactgcctaaaaaaaatgcattatgaagttcgtctttctcttaaaggttattgtcatgccaaaggtcatacataaatatgtttgctatatgtttttgattaaacaactcttgtcgcgagcactccaagctatcgacgagtgcgggcagaaatgcttgaatgtgtattacggaagcggcggcatctggcgattgtctttacccattccggacccattccggacaaccacgccccattccgagccgtttggggcgtttggaacgtgatgcggtcaacgcttccgcgacccatttgctcggcgttgtaagaacgagaagaagaagctctcggccagcgcagcgtatttaagagctattcagcaaaatgcatgaaagagtttcgcacgcgaccgaccaacagccaacaagtgccatccatcggcgatccgggacagaaattccagcaattgtggggaaagtgatcgagcgagcgagggagaaattcagttgaaaggtagggtaacggggtcaatcgattgggaacgattccggcgcaattctctgacccattctaaattcaatattctccccccttcagatgttcgaacgctgcaatttattatttatgaccatgctgatggcatcggcactattgacccaagcccatttcccggaatattgtgcggaatgtgaacaggaggtgtgggaacaggtgccgtgcagcgaggtgcccacaacggtagcgccaacaacaaccggaggctctacgttgagcccgcccacaaccagcgccaccagcccgggacctatttacccaacaacaaccagtgccccacccacgcccacggattacactacacagccatcggagtacaagaagtgctactgcgaatgcaagctgggctgcaaggagttctgccgcaaggtgatctcttctgagcccaagcagccgctcacccagatctcatccattggggagtatgccccaggtggccaggtggagtacacgcatgtccatcagcgcaaatactttcccaagtacggaggcgaatcctatgggggattggtaggaccagtgggcggacccaaggcctataagccatatccattggtctacgaacaggcggcatcagctgcttcaccggcttccattccctcggtggcttcctcaccagcggtggccagcatagctgctcctaattacacgctggaggagttggcccaattgcttagcactgcgtatggcaccaagaagggctacccagctagtgtgccaactccgccacgtattcagcttcagccagctccctccgttttctattccccggttccaagctacaaaaagcaagtggttccactcgtgagcaaagtggcgccggcacccaaaatctcctccagcattaagtatgccgcctcagcggtttcatcatcatcatcgggcgtgtcggtggccaagataaagactccctacgaggagaagattgtggtggccacaccgtctcccatttatgagagatccacatcgtatcctattgttgaagcacccaaggaatactcggcgccccagacggaagtctatcccgttgtgcagagccaaacggagtcgtatcccagccacacacccatatatccaagtcccacggaatcctatcccagccaaaaggactcctaccccagcatcacagagtcatatcccagccaaactgagtcctatcaaccgcgtacggaagcctatcccgtaccccaaccggagatcaagccatatggtggtcccgattctggacccgataagccatcgtccacgttcgatctggccatcgataattatctgaaggacttcggatatggcaaccaaggaaggggatatgcggactactaaagttccatacgttgttttttaggattagtctaggctagaatgttttctaggtatcccattatttattgatgtactccccgtttcctgttgactacatgatgattaaataaattattaacaaaaaactaaagaatattatggtcttagtattatagttgaaataactattgcatacttttgggctataaagtagcaatttccccccttcgattttgttaaaagaattaatgaaacaagagataaaaatttacaagactaataaaattatgaaaaaaagcttttatagttcctgaaatctcgactttcatacggacataaccagatcgacttggctattgatcctattgatcaagaatatatatactttatacatagtataaagtagcgagtttgctacttttcaaaaacgatcatttataattcggcttgacgcattttattatttgtatttaaaaagttttcttcatttgcattcatttttttatatactttcttgttgtcgataacattgaataagatttcatcttacgcatttcgccagcttaattctggtttatgcttgccaattttgataagcatagatatatacacaaattagattcataaattttcgtatgcaaatatatatgatttatgcaatatgaatgttttcaaacagcgcttatttaaccgttgatcaaggcgaatccaaattgtttttggtatttccaatttgtattttcacaaattttacgcaccagctcaagtctttcattttctaaggttttacatttgtggagcttattcatttcaattttctgtatgacacgatctagaaaggatgtcggattgagaaaatttctataggcacacacaaaaatagccatggaaatcagaaagttatataagtagctcactataattgcacttgataggatataaatattcaacaaacgaagtaataagaacaatttgcatagtacacttgcaaagatgcgaatgtgcggttttatttattttc

SEQ ID NO: 30197 - DNA, 1254 bp, DROSOPHILA
atgaccatgctgatggcatcggcactattgacccaagcccatttcccggaatattgtgcggaatgtgaacaggaggtgtgggaacaggtgccgtgcagcgaggtgcccacaacggtagcgccaacaacaaccggaggctctacgttgagcccgcccacaaccagcgccaccagcccgggacctatttacccaacaacaaccagtgccccacccacgcccacggattacactacacagccatcggagtacaagaagtgctactgcgaatgcaagctgggctgcaaggagttctgccgcaaggtgatctcttctgagcccaagcagccgctcacccagatctcatccattggggagtatgccccaggtggccaggtggagtacacgcatgtccatcagcgcaaatactttcccaagtacggaggcgaatcctatgggggattggtaggaccagtgggcggacccaaggcctataagccatatccattggtctacgaacaggcggcatcagctgcttcaccggcttccattccctcggtggcttcctcaccagcggtggccagcatagctgctcctaattacacgctggaggagttggcccaattgcttagcactgcgtatggcaccaagaagggctacccagctagtgtgccaactccgccacgtattcagcttcagccagctccctccgttttctattccccggttccaagctacaaaaagcaagtggttccactcgtgagcaaagtggcgccggcacccaaaatctcctccagcattaagtatgccgcctcagcggtttcatcatcatcatcgggcgtgtcggtggccaagataaagactccctacgaggagaagattgtggtggccacaccgtctcccatttatgagagatccacatcgtatcctattgttgaagcacccaaggaatactcggcgccccagacggaagtctatcccgttgtgcagagccaaacggagtcgtatcccagccacacacccatatatccaagtcccacggaatcctatcccagccaaaaggactcctaccccagcatcacagagtcatatcccagccaaactgagtcctatcaaccgcgtacggaagcctatcccgtaccccaaccggagatcaagccatatggtggtcccgattctggacccgataagccatcgtccacgttcgatctggccatcgataattatctgaaggacttcggatatggcaaccaaggaaggggatatgcggactactaa

SEQ ID NO: 30198 - protein, 417 aa, DROSOPHILA
MTMLMASALLTQAHFPEYCAECEQEVWEQVPCSEVPTTVAPTTTGGSTLSPPTTSATSPGPIYPTTTSAPPTPTDYTTQPSEYKKCYCECKLGCKEFCRKVISSEPKQPLTQISSIGEYAPGGQVEYTHVHQRKYFPKYGGESYGGLVGPVGGPKAYKPYPLVYEQAASAASPASIPSVASSPAVASIAAPNYTLEELAQLLSTAYGTKKGYPASVPTPPRIQLQPAPSVFYSPVPSYKKQVVPLVSKVAPAPKISSSIKYAASAVSSSSSGVSVAKIKTPYEEKIVVATPSPIYERSTSYPIVEAPKEYSAPQTEVYPVVQSQTESYPSHTPIYPSPTESYPSQKDSYPSITESYPSQTESYQPRTEAYPVPQPEIKPYGGPDSGPDKPSSTFDLAIDNYLKDFGYGNQGRGYADY

SEQ ID NO: 30199 - DNA, 3002 bp, DROSOPHILA
ttccgtattcaatttcgtttcgaaaatgttcaactggtaaaccaaaaacagagcccaagatacctgatatcttgtagatacattgcagttgctcctttagttgttggtgctgttttcggtcccacaaaattttgctaattatacaaatatatgtgtcacattgttacactttaaatatataaatatgagtacttgtattattcggttgcctttttgttttgattaagtttgctgactaatgcattttcaattgcaaataggaaaagtttcttggtttttttggttttcggtttttggatgccttgcatttgcctagttttgctttcgtattatgtattacattaagtagccgtagattaaatatattacgcgtttatttatcatgattaaacattgattaggttaagttgttgttgtttgtttctctttttgtttcattttgcctttatctttacattaaatgtgtagaaaaattcgttaaattgatttgcatatagttattcgatctcacctccagctcacctggttagccacaaatacaaagtttaattggctcgacaaattaaatgattggctgcacagccacgcgatttaagtatgtatttagttttgctacgatttgtgcattgcagttctgcgctatttagttaatttaattatccattatttggctgcagtctagacttgtaattcgatttctttttcccatctctagcgtgtttcctcatgttaaacatatgatatacatttatggtactttagatacttatataagttctgctttatatcaactcatcactgcaaatgctaaaaacttattagccctcaccacgacactggttgtgggccatccaatatgaccataaaattcccaggtccaacggcgaatcccgaactatcggtggctgccaaacgcactgtggctcaaagccagtcgctgccccgagtcacccaatccgaatccgtccctgttccgcgtcgtcctgtgcatcctccggcgctaggtgagcatgtagacaaatagaagcgccaacgccacgttgaaaatcaggacgagcagcatcagctgctggcgcacaaaccagtcctggatggataaacaacattgaattatattcaaaatatggtgttaatagtttaaatagtaatttaaaattcaatttcaattttaataaaaaatgttttccgtattaagtcgaaattcgattagaatttatagtgataataactattaaattgacatcctaaatttaatttgaattataagagaataagtttgctttaatcctcttttgttttcaattgaatataaatagatttaaaacatatttattttcaacacaataaacttaatgcttttaattcatgaaatatattagctgtttttgcatcgtgtaataaaatatttcacactaattgcatttataattattaggaacctctttaattggcaaagagttttctatggcgtcaaaatactgaacgatgctatgtgtttacataaattggtacaagttaagtgcaccaattgtaaatccatttcaattacagaaacatcaaaggcatttggccaaacaaccaaaactatactacactcgtatccgtgtcggccttctgtcactcaccttaacctgtggactgaccaaatacagcaagggatttgccttgagccgctcgttgacctcgatctggcgacgcactgcctcccgtcgggcggaacccaaggcggacacctcctcccggctcatggcctccgtggctcgcggcagttcctggaaatcgggcatggacttctttcgctgcagcgtcacattgatgggcaccgactgcaaaatgtgggatagaagtattccaggaattagttcagcatggcaagttaatgggcggggggattctccacctcgacggggggctcaacgatccagctttcgctggctcttctggccaacaaagccggcgagaacatgaggtcctcctcatcctcctccggataccagtccatgctcgctgattttctactttcaggcgaaaaagttctatgactgaagctacagctaattagctgcttgcataacgttggacaatttgtgtaatctttcttctacagacggttccaacttgtaaacgagttggacatggcgttccgtctttactgaacaccgagcgtcgatatacggacacgtagagtcactgcgtccgttgggaagccaaaaatagtgccacaacccgccacgacggcacggggccaaaacaacaacggatattgtcgctgactcttcgcacaaaattgctttcagaattcctatgtgttttttttttttgttctgaatgaatatatatatatatatatatataattatattgccactcgacgtcagctagcgttttctctacaaattcaattggtaatccgttggggccgacgcgtcgtttgctactagccatcacatttcggaaaatcgtcgccactggggccacaaaaaaaaaaaaaaaaaccaacaaccagcaggcgagcgacacttcccgagaggatttatttattgccatgtcgccggccttccaatggccacttgtggagcgtttagtgttcattctgccggagagtcagcgggagaaattcagagatttcgagctgtacgagattttttgagatctccgagatcggagagattcagcggcacgcatgcattccaacctggctgatccggctggcgtgcattcgtgcccgtggctataaatagtccagaatgggcacatgttcgccccgacatggccgagaaatgtttcaaaatgaacatcaagtctccggccgtatcgcccatccggctctcaccgtcactttctcccccgcacacaatgcccatggcgtacgaattaagttaattgctcggattaactgtgttatgaaatatatttcaggcgggcggcccgggaattctgcgattctcacttactctatggtctctctagagattagagataatgagaaaataaaagtggaa

SEQ ID NO: 30200 - DNA, 390 bp, DROSOPHILA
atggactggtatccggaggaggatgaggaggacctcatgttctcgccggctttgttggccagaagagccagcgaaagctggatcgttgagccccccgtcgagtcggtgcccatcaatgtgacgctgcagcgaaagaagtccatgcccgatttccaggaactgccgcgagccacggaggccatgagccgggaggaggtgtccgccttgggttccgcccgacgggaggcagtgcgtcgccagatcgaggtcaacgagcggctcaaggcaaatcccttgctgtatttggtcagtccacaggttaaggactggtttgtgcgccagcagctgatgctgctcgtcctgattttcaacgtggcgttggcgcttctatttgtctacatgctcacctag

SEQ ID NO: 30201 - protein, 129 aa, DROSOPHILA
MDWYPEEDEEDLMFSPALLARRASESWIVEPPVESVPINVTLQRKKSMPDFQELPRATEAMSREEVSALGSARREAVRRQIEVNERLKANPLLYLVSPQVKDWFVRQQLMLLVLIFNVALALLFVYMLT

SEQ ID NO: 30202 - DNA, 2630 bp, DROSOPHILA
aatgcccagtcatgttgttgatcggacgaagtagcctctagctaatggtctgggttttctgatccaatcacactcattcacgattcaaactaatcgcatccactgacgcaaattttgaatacacctgtgaaatgtgatgaatatctcacaagttttcatgcccaagagaaagaactctctccatggggattattcaccttgaacctgttccaagatacgggctgtcagatcgtacagattgatttcgacagtgcaattagacgcaattaatgagagactatctatattagctgcagtcgtgtatgaaatcaccccaaaagtattttataatatcgaaaattcatcaccgttcggagacaaagacgaggggcaatttaccttaccaaagcgcttaaatcacataatgaattatttaagtccagcatgaatcacactacgtaactgcaaaaaaaaaaaaaaaaaaaaaactcaagatcaagactcagctcgaaatttcgcctgtcaacctgagtggcttaccaaatgatctaagagatgcaaatccgcaagacaaacaaaacgctcaaattgtcactcaacctgtttgcacattataatgtaattcgattccaactacgagtggatatctcggaagagaaatcaaaatcggcatcggaagaagttgccaaccagccagggtgacccccaaagccagttccaagaaatggcgcaaatattcctgggatccacttgtgacgtagagcccatttgtttacgctccactagtggaatgataaagcgttatccgactgataaccggctcaaaggccccacgacgatgcactcacttgggcactcgggtgcttaagtctgagcccgacttcggatcttggcagttcgattgcggtcggtgctgtaatacgagggtttatatatagcgcgatgaggcgcgcgtcgtcatttagtcacgaagccttaaccaagccgcatcgaaacgcgaatagatcgaagcctagccaccatgtttcagaaaaggattatcgagctgatcacggtgctggtgtattgggtgatcatcacgcccaccacctacaagtactgcacacaaaacggaataattaggatgagctttgacaccctggttggcactgtgggcgatcactgcaccctggccctctgcctgatgatcggatacgttgtcttctaccgtatcattatcttcatttacatgaagttgaaggtctgtgacattcggatgtgggatgaactgcagcgagccaaagaggatccggaggcgcatctggacaaaaagtcctactaccagcccgtctccaccgagaatatcgatgtcgtggactctggcaagaagaagaacaagccaacgactccgaagatgataaggaccatcagcaatccgctgctcatcgaaagcgatctggcgcgcattcacatcaagcacgaaacacggcctttggaaagtgccaccctacccagactgcagcaggcaatggtccaccctagtccgagtcccagcttgaggagcgcaccaccagtgccccaaatgcagaaaagtgccactctaccgaatcagcacagcaaaggtgtgattatgtctcccaaagttctaatgcccagaactcaacaggtgtagacagcgagtgattagtgctttaaagtgtgctcatgattgcgattaccagtcttagtttctgtgaaattttgagctcaacttaagaggactacgtccgcattcaagtattagctactgcccaaagatcgataatcgaaataaacccgaaattagtcaattatcacattccagtgtactcgttcgcgcgagctaaattaatagtttagttagtgaatatatttattactagacgtaagacagatattgttatccatgcgtaaatatgcgtgagtttattaaagctaaataaattaaatgcatctcttgtaaaacgaaatctctgttatttttgtgggacaaacgggcacggaaaatcataagcctataggtgagttggataattatggcgttatgagctttagctcgatattatcataaatcctatccatcaatgttgcagcaggttcaccctaatccaaatcgtatcttgaaatgtgcagcacttaagtcacagacacaataagaatatacatccaatattaaaaacccactaccaagtttataatcttacataaatgagttaaaaattaaataatattattgcaaggaccttttttgagtggacaagcaaactctatatacctcgttcaagatattaacctgcagctgtgaatgatacggtgtgcacatgagttgtgttagacagagcaagaagcatcggcaatgttctaaataaaggtgttctacgcatgcgtacatatctcgttcttctcccacactcaatccgtctcactcgctctcgctagcagcatgcagcggtatgggttcgagtcccggctgaagtctaagatcatcaacaacaagatcaagttcaaattcaagcagtgtgtgcaaggtttctttctgggattcggattcactcgcatgcagagtactcttcgggtcgtgtcaggagtgtatgccccgtgtcgttgtgtctgtgggtgtgtgtgagtgagtgggcgtgttcggtgggtgtggg

SEQ ID NO: 30203 - DNA, 630 bp, DROSOPHILA
atgtttcagaaaaggattatcgagctgatcacggtgctggtgtattgggtgatcatcacgcccaccacctacaagtactgcacacaaaacggaataattaggatgagctttgacaccctggttggcactgtgggcgatcactgcaccctggccctctgcctgatgatcggatacgttgtcttctaccgtatcattatcttcatttacatgaagttgaaggtctgtgacattcggatgtgggatgaactgcagcgagccaaagaggatccggaggcgcatctggacaaaaagtcctactaccagcccgtctccaccgagaatatcgatgtcgtggactctggcaagaagaagaacaagccaacgactccgaagatgataaggaccatcagcaatccgctgctcatcgaaagcgatctggcgcgcattcacatcaagcacgaaacacggcctttggaaagtgccaccctacccagactgcagcaggcaatggtccaccctagtccgagtcccagcttgaggagcgcaccaccagtgccccaaatgcagaaaagtgccactctaccgaatcagcacagcaaaggtgtgattatgtctcccaaagttctaatgcccagaactcaacaggtgtag

SEQ ID NO: 30204 - protein, 209 aa, DROSOPHILA
MFQKRIIELITVLVYWVIITPTTYKYCTQNGIIRMSFDTLVGTVGDHCTLALCLMIGYVVFYRIIIFIYMKLKVCDIRMWDELQRAKEDPEAHLDKKSYYQPVSTENIDVVDSGKKKNKPTTPKMIRTISNPLLIESDLARIHIKHETRPLESATLPRLQQAMVHPSPSPSLRSAPPVPQMQKSATLPNQHSKGVIMSPKVLMPRTQQV

SEQ ID NO: 30205 - DNA, 2621 bp, DROSOPHILA
aaatgcatgttccctacaggtgttaaaaaatctcgaattaataattaaagacttttgcatagcaatgattacgccatcgaatcattatatataaatgaaaatattccatctatggagccaacacgagcccctcgaagttgagctggtcatcaaattgttattggttcacttgctgaaggtaactaaataatgactattaaatattatttattatttattgtatctgattgtttattgtccatgtgggcgtctgcctctcagtttgccacatgctcgccacataaaatacttcatcagggggcgaagggaaaccagttccgagtgccgcaaatgaaatgccacaattttactaagcgattgcagtggtcgtgagctcagaaagcaccagacttcagacggtagagatggcatcgtgaccaatctcgaaagtaattagcattcgaaatgaaacaagtttctagttctactgcctgcacattcaatcgtagaagtggaaatctcattaaaaaagtttttttatttttatcacactacttttgaagactacatttgatgatgtcattcaacagctgagcttgagttaagtcaaaacaaagaaacacatcagataagaaaagttgaagaagataaacatatatggggcttaaaagtttggagtttgcaaattgaagccatagaaatgacatttattgaatatttagctctaaagtttcgttataatattcaaccatcgacaagtgcgaggatagcagttactttatgctaacctaaggtttcttagtgggatcaactctactgctggaacctcacgaccccatccacatgtgggattcgagcccactcacacactcacagcggatacgtgatatgcgtcatgcgaacgagacgcgttgtttacggagcaagcgaagtcgtaaccagagaacaaagccacatcagaatgctctgcggctgtcgccgcactcgcagtgcgaattcgcaatcagttcgcaagtgggaaccgattcattcagatggcagccgcagtagtccaaagtttcggccaggaggagctcttcgtcagccgggccacaattcagttgcagttgccccagggcggagccagttcgcccatcttcgagtggcgcacacaggtggccacgcccacgtctgccgctgatcccgcccacgaggagaagtgcattagtgggcaccagagcacggaagctgccacgcccaagagcaatatctacacgcccccacgaatcctgggcacggaggcgaagcgcaagaatctgccccaaacgttgagcaatttcttcgaggcggagcgctactccagcgcctggaatcgcgtgaccaaataggctgctcttccagtcccaatccgagttccaatcccgaaaaccaaacgaagggaggcctaatcgattaacccattaagtggcaagagctgcaggatagtgaaattccattccgttgccaaaaattcatgccccaaaattgcttaccggattcgggagtcggaatgggaggatagaaatggctgcccagggctaaaccaactatgtatataagcatcccatgaatatttatgtgccaccctcctgtaccctgataatgcaataaaagtattatttgatagataaagcggaattctctgagcaatgtcgccctcccaaggggttaaacttcattagggtccgataagcaggggcccaaatgactttgggacttgttggcggattttcagctttctgctacgtcatcagtgtgcataaatcacggctgaacaaacgcacgaaaattacagggagtcaaagaaaaatcgcacgcctcgccggaagttcattatggtagctcaaagcggaagtgccagctacacacacacaaacacacactcatactaagaaaactggtgtccgcgcgttttcacgctctctgacccgcggaaaagcgggcacctgccgtgaaagcacctgctaatttatcagagagacagcgccctgtggcacgggccaaaacgctccaccgagagcggccagagtttcaaggtggctggcgaatcgattagccagccaaacagcgaagcagctaaacagccaaaatcagagcaagccaaacgtgcaatgcacatgcaagccatcgccagcggcaagagctgagccacactgcgagaaaatatcacttggattagtcaccactgcgataacagcagctatttgttgtcatttatgtggcagtaaaccccaacagaatagccctatcattagtatgtgaatcatttttaaattcagtaataagcaagaaaaattattttaattgtatactctgataacgatacgatgacaatggattgttcaactattgccgttaaatgttaatatttatatttttaattaaaacagatcaacttgtatcgcgtttctctcagtgcatgcagggttgtcaagtggctgttgaatcaatgcaggctgcgagaagagcctcgttcgtcctggcgcagtgtgcccaatacgcggagcgggtggaggcgattctgaatgtgaatgtggatgtggatgggggctgaagctcttaaggattgccatagaaggtttatcacggctatgagcagctgtcaatgaaggttgctcgttggc

SEQ ID NO: 30206 - DNA, 621 bp, DROSOPHILA
ccgattcattcagatggcagccgcagtagtccaaagtttcggccaggaggagctcttcgtcagccgggccacaattcagttgcagttgccccagggcggagccagttcgcccatcttcgagtggcgcacacaggtggccacgcccacgtctgccgctgatcccgcccacgaggagaagtgcattagtgggcaccagagcacggaagctgccacgcccaagagcaatatctacacgcccccacgaatcctgggcacggaggcgaagcgcaagaatctgccccaaacgttgagcaatttcttcgaggcggagcgctactccagcgcctggaatcgcgtgaccaaataggctgctcttccagtcccaatccgagttccaatcccgaaaaccaaacgaagggaggcctaatcgattaacccattaagtggcaagagctgcaggatagtgaaattccattccgttgccaaaaattcatgccccaaaattgcttaccggattcgggagtcggaatgggaggatagaaatggctgcccagggctaaaccaactatgtatataagcatcccatgaatatttatgtgccaccctcctgtaccctgataatgcaataaaagtattatttga

SEQ ID NO: 30207 - protein, 110 aa, DROSOPHILA
MAAAVVQSFGQEELFVSRATIQLQLPQGGASSPIFEWRTQVATPTSAADPAHEEKCISGHQSTEAATPKSNIYTPPRILGTEAKRKNLPQTLSNFFEAERYSSAWNRVTK

SEQ ID NO: 30208 - DNA, 3138 bp, DROSOPHILA
catgctggaaaaacggtgcccattgtgaaaggcggagagtccactcgcatggaggaggatgaattctacgccattgagacgttcggctcgacgggtcgcggtctggtccatgacgatatggactgctcgcattacatgaagaactttgatctgccgtttgtgccgctgcgcctgcagtcatccaagcagctgcttggcaccatcaacaaaaacttcggcaccctggccttctgcaagcgttggctggaccgcgccggtgccacgaagtaccagatggctctcaaggatctgtgcgacaagggcattgtggaggcttatccgccgttgtgcgacattaagggctgctacacggctcagtacgaacacacaattatgctgcgacccacctgcaaagaagtcgtttcccgtggcgacgactactagtgggatgaggaactggacagtgaccgattttcggcgatgtatggcttgcattatatacggtttttgatataagttcattctattgttgattttttgtgagcatgcgccaaccgaattatatatacaatgtattatgctcagaatataagcggagtgagattattttcgaagttgttcttgtcttggcagattgctacggagctcacgccagtaaagtgaatagttgtgattgataggctccttatctaataagaatgacctgtatatgtagacaaatcctttgcctgtaagatagtacaggatctctatgtaactgactatgctgaaaccgtacataagcgagagaatgcctccaaagcgatctaaagggttagttaatattttttaactactcgtcttagttatttactgtactcacttagcagaacaacccaactgctaaccatttgagattttgtggcttgggcaaagcgcagtttaaagaaaagctttataatggctaatggtcgctcgttggtcaatccctttctaaaatattcgatattcattatttatcaaagaaattgtggtacatcacttacagcaacccggtaaagtaaccactgctattataagtccgtctcaaaggagccacgttggtggtgatactcatgctaactccgttgcaggtgggcaaacagtgctcgcactgcctctggaccaagttctcttccttgttctgcaggtaggcgaagtcactgtagccataccaaatgctcttccatctcattaggcatggaagatcgggaagcatacaatagtcgagatccatggaactgccggtcaagggcggagatacacagccgcaatgatcgatcatgctcttcatgcggcataccagaaggcactcgtccagggagtagtacgatctgtaggaacgatgttcaccaggtattccgcggattggtttctaattacttactggttcagcaaccgcatgccttcttcgggatagtaacaacgtcgtatatgtggcgggactccgcgaaccccatcgcctgaactaaaaaacatcggctggatgggaatctccactatgctgtagtgatccaccagcacctctcccaaagtcgtagactgaatggtggcgtagtcctcttgggggaaaattatgagctaaggataatagcaaaaaaaaggataggagactacaatttggaatcctatcaactcacttgaaaagcactattggaatgaaaggtatttgtgatatcttcctttggagtatcctgcagcacaaattggacgctgttcaaaatggaattcgattcaaagacaaccattggaacagctctcatttcggagtcttcctcagctcgcttggtccttaaaaacttgtatattagatagccatataatgtacgatacacttacagaaattgggaatagctcggccgtctatagttaaatatgcagcacacattcgacgatgttggtcttttgaggaacagttgactggcattgacgggcaacccgaagacaatgcccctaatcaccagatccccgcaaccgggcgacaagtccctcagtatatcgcgcaccgagtaaccagcgccgttgtggtaagcgacgagcagccgatgcagtcgatccagctccgtggcattccaacgttcatgatcggattcgagggggtttaggtagaactgagccagcaccagcaggcgattggccatatcgtccagatctagggccaccgcctgcagcgaggagttgccctggtgatggaatctattggagtcgtggagtgttacaatcagaaattagtatgcctcactgcactcggatggggtataaaaggcccggggcaagactaaccctggactagtgccaatatgaagctactgctgttgctactgtcggttaatattcttattttttgcttggctgaacgccagaggttcgacaactacaaggtctatagagtaagtccagtgaaggcgaatcaactggagggactgcgatctttggaggcgaatagcgaggatgctctggtcctaaacaatctgcatcttgggcccacggattttctggtggcgcccgacttcgatggaacctttctgaaactcgtcaaagatttggatctctcgcctgaactcatcgacgcgaatgcccaaacgagtctatcgctggacatagagcccattgcggatgctaatcggcgaagtgatgactactcatggagtgaataccacgaacttaacgacacgcatcgctggatgcagaatctggtggggaagtatccggatgtcgtcagtgtatttgtggcgggtcagagttacgagggtcgtgagctgctgggcctgaggattaatcataacgatggaagagctgagaagcaatccatattcttggaggccggaatgcatgctagggaatggattggtcctgccacggccacctactttgctaacgagctactctcctctcagcagcaggagatcatgaatctagccagatcctatgtttggtacatattgccccatgccaatccagacggttatgtctacacccacaaaacggtaagctggtactgcaactgatatccaataagatattaaccattttccctttagaatcgcatgtggcgcaagacaaggagtccgcaggacaagaactgcgttggaacggatcccaatcgtaactgggacttccactggcgtgaggtgggagcca

SEQ ID NO: 30209 - DNA, 978 bp, DROSOPHILA
atggccaatcgcctgctggtgctggctcagttctacctaaaccccctcgaatccgatcatgaacgttggaatgccacggagctggatcgactgcatcggctgctcgtcgcttaccacaacggcgctggttactcggtgcgcgatatactgagggacttgtcgcccggttgcggggatctggtgattaggggcattgtcttcgggttgcccgtcaatgccagtcaactgttcctcaaaagaccaacatcgtcgaatgtgtgctgcatatttaactatagacggccgagctattcccaatttctgaccaagcgagctgaggaagactccgaaatgagagctgttccaatggttgtctttgaatcgaattccattttgaacagcgtccaatttgtgctgcaggatactccaaaggaagatatcacaaatacctttcattccaatagtgcttttcaactcataattttcccccaagaggactacgccaccattcagtctacgactttgggagaggtgctggtggatcactacagcatagtggagattcccatccagccgatgttttttagttcaggcgatggggttcgcggagtcccgccacatatacgacgttgttactatcccgaagaaggcatgcggttgctgaaccaatcgtactactccctggacgagtgccttctggtatgccgcatgaagagcatgatcgatcattgcggctgtgtatctccgcccttgaccggcagttccatggatctcgactattgtatgcttcccgatcttccatgcctaatgagatggaagagcatttggtatggctacagtgacttcgcctacctgcagaacaaggaagagaacttggtccagaggcagtgcgagcactgtttgcccacctgcaacggagttagcatgagtatcaccaccaacgtggctcctttgagacggacttataatagcagtggttactttaccgggttgctgtaa

SEQ ID NO: 30210 - protein, 325 aa, DROSOPHILA
MANRLLVLAQFYLNPLESDHERWNATELDRLHRLLVAYHNGAGYSVRDILRDLSPGCGDLVIRGIVFGLPVNASQLFLKRPTSSNVCCIFNYRRPSYSQFLTKRAEEDSEMRAVPMVVFESNSILNSVQFVLQDTPKEDITNTFHSNSAFQLIIFPQEDYATIQSTTLGEVLVDHYSIVEIPIQPMFFSSGDGVRGVPPHIRRCYYPEEGMRLLNQSYYSLDECLLVCRMKSMIDHCGCVSPPLTGSSMDLDYCMLPDLPCLMRWKSIWYGYSDFAYLQNKEENLVQRQCEHCLPTCNGVSMSITTNVAPLRRTYNSSGYFTGLL

SEQ ID NO: 30211 - DNA, 2602 bp, DROSOPHILA
cgagatcgacgagaaggtcgctatcaagggacgtgccaccaccgcctacaactgggcccagtactacgaactcgacgacacctatgcctggctccagtccctggcccagacgaatcccggagtggtcaccctcattgagggcggcaagacctaccagggacgctccatcctcggtgttaagatcaccaagggaggtgagaccataaacggcaaggccaagcccggcatcttcctggaggccggtatccatgcccgcgagtggattgctccagctgccgccacctttatcatcaaccaactgctgacctccgaggtggagaacatcaaggaattggccgagaactacacctggtacgtcctgccccacgccaatcccgatggctatgtctacacccacaccacgaatcgcttgtggcgcaagacccgtactccctacggcagctgcttcggcgccgatcccaacaggaactggggcttccactggaacgaggtgggtgccagcagcagtgcctgctccgatacctacgccggaccttccgctttctctgagatcgagacactgtcactgtccaagttcattgagggactgaagggcaaggtccagctgtacctctcgctgcatgcctactcccaatacctgctgtatccctatggacacacctctgatctgcctgacaatgtggccgactttgagaaggtcttcgatgcctccattgcagccgtgaacaagcgttacggtaccacgtacactggaggcaacatttacgatgccatctacccagcggctggtgccagtgtggactgggcctacggaacccaggatgtgcgcatggccttctgctatgaactgcgtccctcgtcgacctcctacctcaccggattcaagcttcccgccgagcaaatcgtacccgccagcgaggagctgcttgactccatcgtggccatggccaccgaggtcaagagcctgggctactttgactaagcgacactaataaagtactcacagcttttcggcataactacgaagcaggcgtccattgattttgtttgaggtgcataccccaaccgccggaaaggggctattggctacgtgcaccaggtctggggccatatggatctcggtgggctgcaccagatactccaggatgaggtcagcgatcacgatgtgggtgtaaatcataatggcggtgaggaaagccagccagatagctctgcaagtgggagataggtagctaaaggtaatgggataaggccaacttttttaaacattgagttggaattcgaacaagaagatacattccatgaagagatatccatcaaagcacaaattatatagacatttgcttagtttatcaagtttgtttagtttatctcagtctacatatacaatgtcttaaccacttcagtggtgctctaggccgacagtataagcaaagacactagaataacaagaattctagtgtctttggtataagccctttaaactcacttggcatatcgaacgggtgtatgatagagaaacggatgcagaccattgatgtaactctgacgcagaaactctcggaacaggcgccgatagtaggactcctccactcgagccattgtgtttgaagagtgcacgagttcaggcgatttatatagtgctaggtacttttgtagtgccactttgagctactgctcatcaatcagagctctaatgaaagtgtgtcaagtggagtgcaatgatggggtgtgtgcgaagatggctgggaactgccactctactcccggttgatgtagttgaaaactggacggaaggtaagaaagtatatgaactcgaatgccgtcactatgctgaatcccataattagtcccagcaagccgccaaatgaggctgtcaaaggaagtatgctaatcaataatctaacgcttatttaaacatttgttagcatacccaaggcggacagccagttctgaaatatgtccgttcgatatctggtgctcattagatcgctgaaaaacacatggagtagtatcctatctgtggcattgctgttcgggaaatcgcgattaattaaataaatagatatctagataaaagatagggtaaaatacttgaatgttggtcggttggcaaagtagcttatgtccaatcggccagtagtgctctcagaaacataatgattcgactggcagtccggcagacatccacagggaaaactatccgtctcccggacaattgagagcgagaaattcaaattggccagggcatgggaaaagagtcctggcaatacaatatttgtatataactaactagaaaatcttttgaaattactacccacttttactgtgaattatgcaattggtttgcagcacaccacaaactttgtagctgccgttgttgtaaacatacggtggtagacaaccacaaaggtccacagtcatccggacccggcattcgaacatgcagttgatgaaggaatagcgcctgaggccatgcatggtcatctcgcttccaaagaggcagttcctcagtgatagatccatgcggcgaatatcgttggttgcgtaggtggactctggatttattctcacaaaactttccctcgtcgtggtgaccact

SEQ ID NO: 30212 - DNA, 324 bp, DROSOPHILA
atggctcgagtggaggagtcctactatcggcgcctgttccgagagtttctgcgtcagagttacatcaatggtctgcatccgtttctctatcatacacccgttcgatatgccaaagctatctggctggctttcctcaccgccattatgatttacacccacatcgtgatcgctgacctcatcctggagtatctggtgcagcccaccgagatccatatggccccagacctggtgcacgtagccaatagcccctttccggcggttggggtatgcacctcaaacaaaatcaatggacgcctgcttcgtagttatgccgaaaagctgtga

SEQ ID NO: 30213 - protein, 107 aa, DROSOPHILA
MARVEESYYRRLFREFLRQSYINGLHPFLYHTPVRYAKAIWLAFLTAIMIYTHIVIADLILEYLVQPTEIHMAPDLVHVANSPFPAVGVCTSNKINGRLLRSYAEKL

SEQ ID NO: 30214 - DNA, 5386 bp, DROSOPHILA
atcggattggttttgatcagttcatattggctcggatcgccttctacgctgacagatcgttatttgttatggccaatgcttatggctcaattcgcataggcagcgcaaacaaaaacaaacgccaactttgcatactaagtgcctcattagggacacggcagtgccggggatctcggtcgtaaaccacacacgacgacccatcaagtggctccgcatttttatataagcataaacaaaacgggccgcctagaattttttttgccatttacccatgcattcggcttgaataattaattaacgccttcgtgagtcacaaaatgcattgcaatgttaaatattttgtatcaccttcttgcactgactaacaaatttattcatttcctttgttacagcggatacccaacgagaactgcgactatttgagtctacagagatcgggccaggcgccgaagaatcacatccaggcgcaggatccggctcagatgtccctgctcaagttcttggccattgtaagtaccccatgttgttagcacactcgtctcgtggcaattggccagaaactttccaccgtagcgcttcctggtcaggagcctcggacaatgtgcgatcggttggcctggcgagctgcctgcataaatttcacgtttacgaggctgtgagttgggcgtggcccgtcggctggcaaataaaattcgtttgattatttataatcgctgccggcggacagtaatgtttccctctggcgaaaaagatcgaggcaaacccgttcgcagccgcgataactgcaatttatcaatgaatgcgtatttcttgttatcctttactaagttaatttttttcttctttcgctttccagaatgccctagagctgagtgccccagcaacgccacatctcctccagcatcagcaggcccacaagcaggcgaagccacagggctggatgcagctatccggtcacccagagaggtaaggatcttaccaataacttaaattttgttttgaaaacaaacattttattagtcaatttactaactgctactattattcttattttgcagcattgttcccacatcgactggaatagtgcgcaaacggatctcaggactggaggatagcgaagtacatgcctaccgactgatctgcaaggaaccacagaccgctcagatagtgcccgcctactttggaatacaggagatgcaatcacagcactttattgagctgcaggatctgctggctggctttcgggatccgtgtgtgatggacatcaagatgggcagccgcacctttctcgaatcggaggtcagcaatgccacgctcagaccggacctctaccagaagatgatcgccgtggatgcgggagctcccacgcctgcggagcacgaggcacgagcgatcaccaagctgcggtacatgacattccgggagtccctgtcctcctcccactccaagggtttccggatcgaagcactgcgtctgcgcggacgaccgcctgtcaaggatttgaagacgtgccgaagcagcgagcagattgcccagacgatcgaacagtttctggctgctcggcgatccgtgcaaaaggagctgctgaagcgactaaagcacatgcgcctggtcatcgaacagtcgaccttcttcgccagccacgagatcattggctccagcatctttatcgtctacgatgacgatcgcgttggcgtttggctaattgacttcgccaagtgccgggagctgccaccccatgtgagggtggaccatcgaagtgcttgggcgcctggaaaccgagaggagggtctgctacgcggaatggacgagctcatccgctccttcgaggaggtctacgcccgctgtggctcccatcgcagctgccttaaaatctaatggatagacacggatcgattgcaccggcagctggatctgcaccaaaagactgatcacccaagctccatttgtacagatagaaagttagataagagaagaggattcaccgcatcgcccgggctgagctccaccctatattaactccttgttccatattggaaatatcgggattcagctcggttagaaagtttaagagtagctgaaaaaaaaaattacgattagtattgatcaacaagcagcatttgtttgattgaaacaggtttaaactaagtatttgtgcaaagcaatccaaatcagaacacaaaaaataaaatatcttaagaaagtgaagccttgagtttgaattcttataaaaggaaaatcgggagtaaatcaatctgtgtatacattttggtcgctttatattggtaaatatacaagtttacactataaatgagtttatttcaaacagggcgattattgtctgaagcatttaaagattggactagaatagtaaactaagaaagttcaaatagaattgaaaatctattcttatgtaacaattaagaatgactgcctaaattgaaaatatattaacgaataaacatttatgctttgtgaaactctcttaccttagccaaaaactcctcatactcgaataattgcaacgttgcagctatgtaaatcgcaccaaatgtgaagatggccaaggtacgtggtcgaccgaccgccggcaccaagaaagccaacgcttcaaccgactcagagaagcaaagggaggtggaaaaatgatttatcatgtagccaccaaggagggcgaaatgttcaagatcagatggaaaactatgggccaaaggatgattcctgagagccaagcaagaatctggcttgcgatgcactaatcgaaatgtaactcagaagaacgttgatgttaaggagctgcgcgaattgactaagatcgtcaaggccaggattgccgacatattgaccaccaataatggggaaaaaatcgttgtagaggattcggatgatgatgatagtgattccaatgtggacgcaaggctagggctcgtcaaacggcagaagatagcgatgacctgccctccatctccaaagcttggctcaccctggtccatacaaaactattaggcagaggctgaaaagcagggatagtaaatttaacccggaagagtgggcaataaataagtcaacatactttggcaaaggtatgcgcagcaccatttcctcaaaagttgcaaattggtcatctgtcagtagaggcgccaatagttcatcttcgtagctggccaccaagtccaagttgtacttgcccggttgttgaacttcgtagggcatcaaagagagcactgattcgccgaggcagctctttgctacctgaaagtcctgttcgcagctcaagcaggtgcgcacgcccatacaaccgcaactatgaattgtattcatcctaaaattgcgtaaaaacacattaacaacagtttattcgtggtaaaataccaatcataccatcaatgttatgtaaatgctggccagaatttcgaagaatgaactgagggttatatatctgtgtgctttgatttttctaatttaatctaatataatctatataataataatctcacctggggttgtactgatttgtcattctccatttctgcatcgtcatcggactccgaatccatttcagcagcattcttgccatttctaacggataaagtcggagccatgctcagcttgcttctttatcggcactagggtccacatcggagtcattagcattatcatccgaatccactacaaggattttttgccattattgggggtcgaagtgatggcattcctggcttcaagaatcttattcaattcgcgtaggcccttgaccttctgctgagttattttttgattaatgcatagcaagccaaattcttgcttgaatcccgggaatcatcatttgatccatagtttcccgtcttatattgaacattccgccctacttggaggcaacataatcaataacgtattccacttcctcttgctatttttgggttggttaaagagttggctttcttggtacggtcggtcgaccacatatcttggccaccctttacatttggagcggtcttcggtttagctgcaaccttctgcaaagcagcgaagatgagaaagtttaagttaattgtcctataaactaatgaatttgaaagtatgaggaattattggctaaggtaaccgccatataacgaaattaatttcgacttataaacattttctcatcagagtttcacattgtaatgtcttataagcatggactatgcatggagcatgctgctatcgaactaaaaaacgcgtggtggtggagcccagtggcagccagaccatctacagtacatgggcgtaagctcccggtagtaaagtaacgcggtagagtgggcgataattcaacttactttggcttaggtatgctcagcactgcacctgcaagctgaaggttgatgaaagggattcggagtccgatgacgatgcaaaaatagaggatgacaacccgtggtgagacaaagcgaaaaatccgagcatactagaccgaattaggtattattctccgaaattttggtcggtatttaccaaagcattaattctatgattggtattttattacgattattttcgaaattctggtcggtatttaccaaacattaattctatgattggtattttattacgataccgaagccggtatatttggaacatccggtaacactggcagtctgtttgtaattaacgtgcttttgcccaatttcaggatgaatacaattcgtccttgcggttgtaagggcgttcgcacctgcttgagctgcgaacaggactttcatatagcgaagacctcgctacgggaacaattccagcaactggaagcatggtcctactgtatccagtgcgaccttctgcagcgcggttgggataccaatcatgtccaaaaggatcatgaaaatcacaaaaaagatgagggcctcccactgccgggcatcctggtgcaggaggaattccttagcgttgatgagggcgcccaacttatagccgacttggatgacctgccatgggacatctcgcagagcggcaggcgaaaacagaacttcggacccaagaccaactttaaaaagcgcaaactgcggctgggatcctttgccggattccccaggacaacggaatatgtgcaacggcgcttcgaagacgttcccctgcttcgtggctttcagaccatcgaacagtgctccctggagtacgagcccagcaaaggagccagcatagatccgcacgtggacgattgctggatctggggcgagcgtgtggtcactgtcaactgcctcggcgactcagtgctcactttgacgccctacgaagttcaacaatcgggcaagtacaacttggacttggttgccagctacgaagatgaactattggcgcctctactgacagatgaccaacttgcaacttttgagggaaaggtgctgcg

SEQ ID NO: 30215 - DNA, 1597 bp, DROSOPHILA
gactccgaatccctttcatcaaccttcagcttgcaggtgcagtgctgagcatacctaagccaaaaaggttgcagctaaaccgaagaccgctccaaatgtaaagggtggccaagatatgtggtcgaccgaccgtaccaagaaagccaactctttaaccaacccaaaaatagcaagaggaagtggaatacgttattgattatgttgcctccaagtagggcggaatgttcaatataagacgggaaactatggatcaaatgatgattccccagattcttgcttggctctcaggaatcatcctttggcccatagttttccatctgatcttgaacatttcgccctccttggtggctacatgataaatcatttttccacctccctttgcttctctgagtcggttgaagcgttggctttcttggtgccggcggtcggtcgaccacgtaccttggccatcttcacatttggtgcgatttacatagctgcaacgttgcaattattcgagtatgaggagtttttggctaagctactcttaaactttctaaccgagctgaatcccgatatttccaatatggaacaaggagttaatatagggtggagctcagcccgggcgatgcggtgaatcctcttctcttatctaactttctatctgtacaaatggagcttgggtgatcagtcttttggtgcagatccagctgccggtgcaatcgatccgtgtctatccattagattttaaggcagctgcgatgggagccacagcgggcgtagacctcctcgaaggagcggatgagctcgtccattccgcgtagcagaccctcctctcggtttccaggcgcccaagcacttcgatggtccaccctcacatggggtggcagctcccggcacttggcgaagtcaattagccaaacgccaacgcgatcgtcatcgtagacgataaagatgctggagccaatgatctcgtggctggcgaagaaggtcgactgttcgatgaccaggcgcatgtgctttagtcgcttcagcagctccttttgcacggatcgccgagcagccagaaactgttcgatcgtctgggcaatctgctcgctgcttcggcacgtcttcaaatccttgacaggcggtcgtccgcgcagacgcagtgcttcgatccggaaacccttggagtgggaggaggacagggactcccggaatgtcatgtaccgcagcttggtgatcgctcgtgcctcgtgctccgcaggcgtgggagctcccgcatccacggcgatcatcttctggtagaggtccggtctgagcgtggcattgctgacctccgattcgagaaaggtgcggctgcccatcttgatgtccatcacacacggatcccgaaagccagccagcagatcctgcagctcaataaagtgctgtgattgcatctcctgtattccaaagtaggcgggcactatctgagcggtctgtggttccttgcagatcagtcggtaggcatgtacttcgctatcctccagtcctgagatccgtttgcgcactattccagtcgatgtgggaacaatgctgcaaaataagaataatagtagcagttagtaaattgactaataaaatgtttgttttc

SEQ ID NO: 30216 - protein, 111 aa, DROSOPHILA
MLEPMISWLAKKVDCSMTRRMCFSRFSSSFCTDRRAARNCSIVWAICSLLRHVFKSLTGGRPRRRSASIRKPLEWEEDRDSRNVMYRSLVIARASCSAGVGAPASTAIIFW

SEQ ID NO: 30217 - DNA, 3025 bp, DROSOPHILA
cgtccttgcggttgtaagggcgttcgcacctgcttgagctgcgaacaggactttcatatagcgaagacctcgctacgggaacaattccagcaactggaagcatggtcctactgtatccagtgcgaccttctgcagcgcggttgggataccaatcatgtccaaaaggatcatgaaaatcacaaaaaagatgagggcctcccactgccgggcatcctggtgcaggaggaattccttagcgttgatgagggcgcccaacttatagccgacttggatgacctgccatgggacatctcgcagagcggcaggcgaaaacagaacttcggacccaagaccaactttaaaaagcgcaaactgcggctgggatcctttgccggattccccaggacaacggaatatgtgcaacggcgcttcgaagacgttcccctgcttcgtggctttcagaccatcgaacagtgctccctggagtacgagcccagcaaaggagccagcatagatccgcacgtggacgattgctggatctggggcgagcgtgtggtcactgtcaactgcctcggcgactcagtgctcactttgacgccctacgaagttcaacaatcgggcaagtacaacttggacttggttgccagctacgaagatgaactattggcgcctctactgacagatgaccaacttgcaacttttgagggaaaggtgctgcgcatacctatgccaaagtaagtttacttatttattgccttctcttccgggttaaatttactatccctgcttttcagcctctccttgatagttttgtatgggccagcgaggtaccagtttgagcattctgtactacgcgaggatgtccaagagcgccgcgtttgtgtagcctaccgggagtttacgcccatgtacatcaatggcgtagacatccaaaagggagatcctgtccgagaaaagtctcagatattctggcaaataaactagcaaacaagaccaatgtaactatgtaatataatctttattatgagcgcggattatcccgatcctgactggctggcctgtaatccagcagtgccacctgtgcgggcagctgaactccatgaattttctttaagtgagccctcagattgctactggtactaaagttgttggagcagacaacgcactggtgatgcggatgcttctgccgaatatgctcattgagatcgcgaaccttggcgaaggcggtggtgcagtacttgcagacgtgcgaattgcgcacgtgggttttcagatattgaggcgaggcataagccagtgggcagtactggcacttgtagatggcctggctgccactgggctccacgtccagcaggcgattggcctcgttgtactcgtccaggttgtagtgtttcagttcgacggcagcatagtccacggtgcgcatctcgtatgctggggattccagttgctccagctgagagtcggatagatccagtcgtggttgggctgtggtggcaggtaaaaactcggagacaatcagcgaatcttggttggccagcctttgagagggtttcgtacagctatccgtccttctcctcgtttgtcttgtttctgtaggacgatcggggtctaaaaccacataatccagtggtatcctcctgaattcctccagtatctcgaattcatcactagcctggttttcgggctcttcctccgttgcgtccatcttaacttggcacatttctacctccgcctcgttgtagagctgcagtagctgctgattggcgaacgttagcttcctgaagaaggcgtactgctgcaggcaatcttccaagcaatcattacagatcatgggcagctcctcagtaagattaagtgctatgttctgttgaatattatacgtattcacttatgtttaagtcatttcgaaggtcttacccagccgaacatggcttctatcagctggaggactgtctgatccgaactgccaccgctcctgtgctcccgtatatccaccgaagcgctgtccacgaagcaaatgcggcacagtttacgcaggtccatgggttttattatttaattaatgtaaataaactgtaatgttaatgttaatataaatacattcaaagaaatgcagccatgtaaacaacagtgtggctaaatatggttaagttcacgttctttagtattgtgttagccatgcatgtattttcagtattaatatttagttttgtgacagtccatttacggtcgtactgcattttaaaatcgatgacgatgacaatgacgaaactgttactttttaaatctgcaaaaggagagaacaaagaataatgttcttattccgcagagattgtaataaagaaaaccactggtcgtttcaattctcttttcaaaataaatatttattcagttttttgtgtttttgttgcaatcatgtctctcgatttttaatattaatttgtttattatttaaatcaattaattccttggtttttctcttaaaattagttattatcgtcaatgtgacgaaagttatttgtctgccaataattcttattgacaacagacttcttgctaatttttttgctttttgacttagccatttccttttttacatgcataatattcgggaagatttttatggttttctttttcgcgattggcaatcgacagaaattcagtaacggtttaataattatgcaataagctatttaaattgatgtggtagttagacttgggacacaggtggagtcttggatttggattcgggttggctggcagatttctgctcgggtcagtttagtgctaaacattcgcggtttatagactaagtttttgttgtcgtttagttaaatgctaattttaaatatatttgccttgtttaaaaaagtgtttctcgaatcggtttttaatgcgctatttattgttgaactctgtttaattgccctggggggtttgagaacatgcggagtgcaattgaaacgaaactcgaactcttcggtttgctgatttctttattattatttgtttctttttttgtttgtaatacgaacaatttgaa

SEQ ID NO: 30218 - DNA, 972 bp, DROSOPHILA
atggacctgcgtaaactgtgccgcatttgcttcgtggacagcgcttcggtggatatacgggagcacaggagcggtggcagttcggatcagacagtcctccagctgatagaagccatgttcggctggaacatagcacttaatcttactgaggagctgcccatgatctgtaatgattgcttggaagattgcctgcagcagtacgccttcttcaggaagctaacgttcgccaatcagcagctactgcagctctacaacgaggcggaggtagaaatgtgccaagttaagatggacgcaacggaggaagagcccgaaaaccaggctagtgatgaattcgagatactggaggaattcaggaggataccactggattatgtggttttagaccccgatcgtcctacagaaacaagacaaacgaggagaaggacggatagctgtacgaaaccctctcaaaggctggccaaccaagattcgctgattgtctccgagtttttacctgccaccacagcccaaccacgactggatctatccgactctcagctggagcaactggaatccccagcatacgagatgcgcaccgtggactatgctgccgtcgaactgaaacactacaacctggacgagtacaacgaggccaatcgcctgctggacgtggagcccagtggcagccaggccatctacaagtgccagtactgcccactggcttatgcctcgcctcaatatctgaaaacccacgtgcgcaattcgcacgtctgcaagtactgcaccaccgccttcgccaaggttcgcgatctcaatgagcatattcggcagaagcatccgcatcaccagtgcgttgtctgctccaacaactttagtaccagtagcaatctgagggctcacttaaagaaaattcatggagttcagctgcccgcacaggtggcactgctggattacaggccagccagtcaggatcgggataatccgcgctcataa

SEQ ID NO: 30219 - protein, 323 aa, DROSOPHILA
MDLRKLCRICFVDSASVDIREHRSGGSSDQTVLQLIEAMFGWNIALNLTEELPMICNDCLEDCLQQYAFFRKLTFANQQLLQLYNEAEVEMCQVKMDATEEEPENQASDEFEILEEFRRIPLDYVVLDPDRPTETRQTRRRTDSCTKPSQRLANQDSLIVSEFLPATTAQPRLDLSDSQLEQLESPAYEMRTVDYAAVELKHYNLDEYNEANRLLDVEPSGSQAIYKCQYCPLAYASPQYLKTHVRNSHVCKYCTTAFAKVRDLNEHIRQKHPHHQCVVCSNNFSTSSNLRAHLKKIHGVQLPAQVALLDYRPASQDRDNPRS

SEQ ID NO: 30220 - DNA, 4457 bp, DROSOPHILA
tgcctttggagttgttattttctcagtggttggctcgttagttgtcttttgggttgttggcttggccgtcgatttaatggtggttatttttagagttgttgtttcctcactggttgtcactgttgactttgttgttgccagtgttgaaatctttgtggtcgaattattgccatcacccggaccaaatggacagcccgggagaaaaggatttatccagcagtaatcaggatatttttcagccgattctgtagttgattcgtccccaaacttaatttcactgccctccagcgctgcatttgcagagtgataaagggcaagccaaataaaacaacttagaacgacctatagttaaggacaatattggtatgaggtaactactaatcttatgttcgacttaccattgcaacttgtcgagcaagactctggatttttgagccttagttggtgcttaaatagggagcagaataaatggcatagcaggccgctgataaggtcgtccagggtcgtagttcaacaaagttcaacaggtaagcgcgagtcattattacaaaaccaaaaagataagtttttaaaatttgtatgcatttgaagcatactgttttattgtctttttgtttgtgatgaccaataatgcagtgccccgcataaaataaacttgcaccctcgtttgactagctgtgatttattacacataaatatatggattcacataaatgttgagccttagattatagcacagtccaaagatatcgaatccaagagttcgatcttatttggtactgtgcttggtgtgtagtgtgcaagtctcgggttagtttctctctatagctgctgccgaaataaatattgcttatgtctaggtaagaatacaataagataaatagaacagaagttttccaggccctaaatgcaatgcgacaacagaatcaattgctcatggtgtcctgatgcttgcacagtgcccttatccccgccatgtccccagctccagatctcgttcctaattgttagtgtgcgtgtagtaaagaaccgtattgcctggtagctgccagtgggaggccttcagctcgatgagttggagaagagtgcgccgaatggaggccgcagattcgccggcattcaaaaaggcatcgcgaaccagactcatgagtaactccagttgctggggcaactgctgctccatgtcctggccaatacaggtcaaaacataaaacaagcactcaatctgaaagttatgaatagtaatcacatgtattattccaaccacttgatcaatcaaaaacgtacctctgaaagtgatctaatgggtggacgcacgcaatccccgcaacatttggagagcagactaagcagtaccagtggcggaggagtgccctcgtggtgggtgcgtagctggagctgccgacgtttcagctgacaaaacatttccgtaaggaaggccataaaggcagtgaatcggacacgtgatggcgacttcatgccctggatggcaaacaacagctgcatgcggggtaaaagatttttaaatatgaaatgatcatggaaatttatgctgaattgcctaccttctcacgctcctggtaccactgacggcatgtgttgaggagcgcctcgagaaacgtttccttctgctcccgggcaatgatgttcagacacagtcgtgatattggcagagcaaaacggcgactctccaccgcgcgtttgatgaactgcgatgtcagttccatgagacagcgagagttcagtttattgggatcctccagggccgtgtcaataagcgcctggatctctggcgtgaactgtcctatgtcggccacctcgttgcccaaacctagtcccaatccggccattccacgagtaagggcatccgccgacgacaacgacttggagcgttgcagtgcatttccattcatgtaaggatctactccattaatattcgcctgataaggctgagcatagttgttgtttagttgaccaaactgattatgcgaagccactttgtgacctcggggctcaggtgcaaactttacacgatttgttgtctggaatttaggtgtttatttattgaaatattgtttttttttaccaatatttttaaattagagctcacgtgaagtatatttccactggatggcgagttcattagcggcagctgaccgctgagggcaccggtattgattggatacgtcaccaggatcgaccggtggttggccttcaagcccggcatgttgccgagggagtgtccggcctggcggcgattcacgtttccgtacggacccaaacccggtgcaactcccactccgggtccattggtgagcggaagtattagcgacgaactggaagaatgttgtagactgtagtttagctctgcaaggagacgggaagaggggtaaacaatggaattaaaagactttgcattaccggttgccgagtgcctcggccggtgccccggagctggttgtcattgtgaactcctgggcattgacgttcagcttgttggcgacaccaccgatagcaccattcggaccatcaccaccgacaccaccggctggagcggctagctctccgcgcacatctgagacagagtcaagtggggattattgttggggaagggtcggtatacccaagagtgtatgtgatgatgttggggggtaggacaacattgtgtggagggacggaatgtacagggtatgagacagagatatgaaaagaatcaaaagaaaaatgtggtctcagtaagtattaattggaactgataagctggcagcaaagaatagagcatcttaagctgggctggctgaagtacatatgtgactattgacatttaatatttacatttttaaatatgctcaatctcactttttaaggactaagctggaaaaaaaacggaaatagtccctataaaatatgcctataataaatatcgttatatgtacatgtatgtttttgattattcagtacctttctcgtccaaatgcatatatctacacttgatgtgtttgtatttctaagccaccactaaaataataccgattaaatatcctcgaaatataaaaattctctattatattgagttctttaacttctttagcaccgagcaccctgccaagcacccaagcgaattagagaatttataacgaatgactaaaacaactcactgggaggcctgtagatatccatggctggtttgcccctcatctgtcccgtctgattgccaggtacgttgaaagccagacttcgccgtttgttgatattctgaatgaacaaacaattatataaatatggctgctaatcgacatcgatatggtgtacccacctgttgatttgaggtgcgcacaaagctgcgttcgcgggagataacgccgggctgaaattccggtgatttgcgcaccttccgcgtatcattctgttggccattcatgctggcctgggccagtagttccaccttttcggccatcctgcgatttttgcgcgagtactgcttctgctctatttgggtaaaacctaattgaagatgaaagcctaatctttggtagattatcctccggttaatcgattcacaactgggattccgtcgaataaacgtctaaatgtgtggcttcagtatttgagtaaatttgtacatatcacaatagttggtttcctttcctcctttatcgagttgagttctcttcttaatacgatgttgagggatatcttccccttttgcagattcagattgccgggtctggaatacaatgaaaattaattatatacttcagcatatcgcattatattattgtcaacatatatcaagtaagatacacaaaaactctttaacccacatgcgagagggaggcgcaaactacttgatcttgtcgagcaaccaaccggctttatggccgagcgtaggagttgcatctggtttggaacctctggctagagcacttcatctccgaacatgacatcagcccccgagtaattcttattctgcggcccacaagaagtccgaagtgagtctccgcgaaagatacatacgaaagatacattgtacagtcaggcctctctaccatctattatcacaaaatgtggcttgaataaatctttgactcttcttacttatatgtaccatccacttatatcaataaaacaatgaacttgtcaaaatgtggtaattaacgaacttagagaatcttacataggttaactgccctgtgagagtgactactatcatagcaatgtgaacttgcctcgctaattgctctacacttcccattctcagattgccaaacagagtgctcggaataagctaggctggtattatgaatcagcgtcggatggacggatatactcaccttttagtgcaaaaatatttccttcaaattgtttcgttgttgctgctgctgttgctgcttgagcttttgtttatctctgtctatagtgtatatatagatgggtttgtttgtgcgttgttgcta

SEQ ID NO: 30221 - DNA, 1533 bp, DROSOPHILA
atggccgaaaaggtggaactactggcccaggccagcatgaatggccaacagaatgatacgcggaaggtgcgcaaatcaccggaatttcagcccggcgttatctcccgcgaacgcagctttgtgcgcacctcaaatcaacagaatatcaacaaacggcgaagtctggctttcaacgtacctggcaatcagacgggacagatgaggggcaaaccagccatggatatctacaggcctcccaatgtgcgcggagagctagccgctccagccggtggtgtcggtggtgatggtccgaatggtgctatcggtggtgtcgccaacaagctgaacgtcaatgcccaggagttcacaatgacaaccagctccggggcaccggccgaggcactcggcaaccgttcgtcgctaatacttccgctcaccaatggacccggagtgggagttgcaccgggtttgggtccgtacggaaacgtgaatcgccgccaggccggacactccctcggcaacatgccgggcttgaaggccaaccaccggtcgatcctggtgacgtatccaatcaataccggtgccctcagcggtcagctgccgctaatgaactcgccatccagtggaaatatacttcacacaacaaatcgtgtaaagtttgcacctgagccccgaggtcacaaagtggcttcgcataatcagtttggtcaactaaacaacaactatgctcagccttatcaggcgaatattaatggagtagatccttacatgaatggaaatgcactgcaacgctccaagtcgttgtcgtcggcggatgcccttactcgtggaatggccggattgggactaggtttgggcaacgaggtggccgacataggacagttcacgccagagatccaggcgcttattgacacggccctggaggatcccaataaactgaactctcgctgtctcatggaactgacatcgcagttcatcaaacgcgcggtggagagtcgccgttttgctctgccaatatcacgactgtgtctgaacatcattgcccgggagcagaaggaaacgtttctcgaggcgctcctcaacacatgccgtcagtggtaccaggagcgtgagaagctgttgtttgccatccagggcatgaagtcgccatcacgtgtccgattcactgcctttatggccttccttacggaaatgttttgtcagctgaaacgtcggcagctccagctacgcacccaccacgagggcactcctccgccactggtactgcttagtctgctctccaaatgttgcggggattgcgtgcgtccacccattagatcactttcagagattgagtgcttgttttatgttttgacctgtattggccaggacatggagcagcagttgccccagcaactggagttactcatgagtctggttcgcgatgcctttttgaatgccggcgaatctgcggcctccattcggcgcactcttctccaactcatcgagctgaaggcctcccactggcagctaccaggcaatacggttctttactacacgcacactaacaattag

SEQ ID NO: 30222 - protein, 510 aa, DROSOPHILA
MAEKVELLAQASMNGQQNDTRKVRKSPEFQPGVISRERSFVRTSNQQNINKRRSLAFNVPGNQTGQMRGKPAMDIYRPPNVRGELAAPAGGVGGDGPNGAIGGVANKLNVNAQEFTMTTSSGAPAEALGNRSSLILPLTNGPGVGVAPGLGPYGNVNRRQAGHSLGNMPGLKANHRSILVTYPINTGALSGQLPLMNSPSSGNILHTTNRVKFAPEPRGHKVASHNQFGQLNNNYAQPYQANINGVDPYMNGNALQRSKSLSSADALTRGMAGLGLGLGNEVADIGQFTPEIQALIDTALEDPNKLNSRCLMELTSQFIKRAVESRRFALPISRLCLNIIAREQKETFLEALLNTCRQWYQEREKLLFAIQGMKSPSRVRFTAFMAFLTEMFCQLKRRQLQLRTHHEGTPPPLVLLSLLSKCCGDCVRPPIRSLSEIECLFYVLTCIGQDMEQQLPQQLELLMSLVRDAFLNAGESAASIRRTLLQLIELKASHWQLPGNTVLYYTHTNN

SEQ ID NO: 30223 - DNA, 4067 bp, DROSOPHILA
cggggggcaatccctgcgatcccttgccaatggcgcgacttcaaagctgacaaccatagaggtcgatgataggagtgggattgccactctgtcaatgaacctgccaccggtgaacactttgaccatggagctgatgcacgacctcatcgattcaatcaatcagattgagagcaacaagagccgcggtctcatcctgacttcagtgggtttgcgccacccaaagtaaacattttcccattacatttaaatgtaaatctatgtattttacagagcaatgacaaggtcttctccgccggcctcgatctcaacgagatgctgaatccggatgtggagcgactgcgattattctggactcggttccaggatttgtggctggccctccatctttgtggccttcccacagcagcggcaatcaatgtaatttaaattattcttcgatcataaaatctctaaactagaatcataatttcagggacactcacctgccgcaggctgtgtcctggcaaccgcctgtgagtatcgcgtgatgttgccgaatctctttatcggtatacatgccacccggtttagcttcgtcatctcgaagtggatgatgaactcgtaccagagcgttctaccccgcagaattgtggagcgagcgctgaatcaaggtaagctcttcgccagccaggaagctctggatgtgggccttgtggacgagatcgcgtgtagcaaagaggaagcgctctccaagtgcgcagccttcatagccacctttgacaagaccaacccggtggccaggtgcctaaccaagcgaatgtgtcgggagccagatgtgcgggagctgcttcaggatagagctgcggatctgaaggagtgcgtcgactatgtcactactccgctattccaggagggactctgtgcccacttggagggtctcaagaagagaaaatagcggactgttataggaatgtgatcaaattgcatttattgtatatgtatgtaaatttttattaaaatgttaatccgatggggcttcctggtgcaattcacctggcagattggccaaagcctctgtcatcatttccataaaagagttgatctctagaatcttggcgcgatggcgatcaacctctttgctgtaaggatacataattagcttagctcaccatatagatatagacagaatatacttgttaagattcgtgatcatgtcatctataaactgcctgctgcgttgagctaggcgatcttcacgtttatccactcgcgatgtgtgagtagtcctcatgccctccaccagctggaggaccgcctctcgatcatccacacactgctttagttcttcgggaatggtattcagttcattgcgagccagcttggtggacagaaactggttcacaatatccgtcatattgtcggcaaagtagctacaaagatcgcgcagttgcaggaagatcacctgcgcctgctccacgaagttggacataagatcggagatcttgcggttaaattttagggtagaatcctggtggcatgaacaatatatacacatatttatttagtttctttgtagtaacatacttaattcacctcaactgcctcgtgcaaatgcagctcctgagccatcaggctttcccacagctcgttcagggaatcctcaaagttggccgttagtgtgtccaactgggcctgcaactgctccaaatcatcgtctcgctgatccagctctctccacttcaggcgcatctcgtcaaagattcgctccttgtactccaggaagtcttcgatctgccgttgtccctgggcctgcagctcctcctgcccctcatgcagattggcattgaagtcgcgaatctcctcatcgcgttcaccgaagcgctccaagcccaggcgatagatctgctgcgtcagctcgtacacatccttggaatactcctcgcacagctcctgagccggtgcacctaccaacataaggatgcgcccatcctcgtcgtctcgccacagggagtcgtacagttgcattccatccaagtgctccacaaaactggaggccagccgatctgcctcggccatttcacgagcctccgtttctaggccctgaatctcacgctcctgcttgtcttcgatttcgcgcagctcgcggctgtgggcagatgaaaatgaatctctgcgcttggtagcgtcttggaacagggacagcacttactaaaaacgtttttgggcctcctcacgcgtctccgtcttgatgaaaacgtattcgtagtagttcagctggggtagaatggcaatcacatagagggacaatgggaaatctggctgcttggctatgggattgccctccaaattaaggactttcaggctgctcacaaaccgtaatcgttcgatctggatgaaaaaccatactttaatttatgaactttttaatttcgacacaatctaaaaggggccatttttaatttagtgtttccgaaaaagaaatttatagtattatcgaaatgaaatagaaaaaaaccttacgccttctaccgtatcgatgagattgtttccaatgctaaggataacaagattctgcaaagtatgtatgttttcgattttcctgatgcgattgctaaacagggatagcttctccagcttgaccagtttttctagattctcaatccgtgtgatgtagttaaagctcagattcagatccttgagagcagttagcatttcgaggtgctcaatcacttcgattttgttgcagttcaaacagagctttgttagattcggcatcatccagagatggtcgattctaaggatgtctgaataaaggtccttgagtttatcttacattttacttggttaactacttactcttgaattccaatcgcatggtggtaatgcgatcgtagaccactggttccagttggtggagtcttctcgcctcgcccttcttgccctcctccaaataagcagtttcgatcatctgacgatctatgatgcccggttccgggcagttgatctcctccaggaaacctcttaggggctcctcttccgtctcctccacagcatcttctcctggctgactgctgaccggctcgtccattcttgctgtctctcgcagaacatatccctaatccgcgtggtcggtcaccaagaattcgacttcagctaggttgccatgggcaacccataaaacattgccctgcctagttaccttcgttcgtgtgccacccttaaaggacttcgggatccgctggaaccggagacccagtcaaccggctcggggaccttcggctctctagctttctctcccggattcgaagggtggtctagttagggctgcggttgcttgggccgttccgttgttgtggatatcgagtccgtcagttgttagtgtttccttcttaaataaactcctgttcgcagaggatatccgcatcgggagtagccataaattttatttaattcggaccacctctttgtatctagccccatctagcgtattcaaatgcaattacgtctgaggtacgaatgatgtgacgggtcttgcacttaaatccttttggtgtgagtgggttgtgcagggggaatcagggaatcctttgtgtcaacccccagtgttcaatcgataaagtgaccccgaacatttagctttgtttatttgcttgtaagcggtgcgaaaagtctcatagttgcttatcggatatagtggtgcatatagtaatcggctaatcggtcgtcggatgtgcgtgcccagagtttaagtgagtcaaatgtgagtggttcaaggctgtgactcagggtacaagctagagccagttcgaaacgtggctccaactgctccggatcctccgaccccgctcccgaaatcgcaaaccaaaacaatccgtatacatatgtatttgtatacatataccctaatgggatactgaaggtggtagcggttcgtatgccatgaataaattatcgcccaaggaaccaaattcgccaagtgaccgcaaaccaattacgacacatgaccataccgatttgagaactaaataaagttggcagcagtggaaatagggatacaaaagtgccaggtgcgatcgaattagttctaa

SEQ ID NO: 30224 - DNA, 1674 bp, DROSOPHILA
atggacgagccggtcagcagtcagccaggagaagatgctgtggaggagacggaagaggagcccctaagaggtttcctggaggagatcaactgcccggaaccgggcatcatagatcgtcagatgatcgaaactgcttatttggaggagggcaagaagggcgaggcgagaagactccaccaactggaaccagtggtctacgatcgcattaccaccatgcgattggaattcaagaacatccttagaatcgaccatctctggatgatgccgaatctaacaaagctctgtttgaactgcaacaaaatcgaagtgattgagcacctcgaaatgctaactgctctcaaggatctgaatctgagctttaactacatcacacggattgagaatctagaaaaactggtcaagctggagaagctatccctgtttagcaatcgcatcaggaaaatcgaaaacatacatactttgcagaatcttgttatccttagcattggaaacaatctcatcgatacggtagaaggcatcgaacgattacggtttgtgagcagcctgaaagtccttaatttggagggcaatcccatagccaagcagccagatttcccattgtccctctatgtgattgccattctaccccagctgaactactacgaatacgttttcatcaagacggagacgcgtgaggaggcccaaaaacgtttttaccgcgagctgcgcgaaatcgaagacaagcaggagcgtgagattcagggcctagaaacggaggctcgtgaaatggccgaggcagatcggctggcctccagttttgtggagcacttggatggaatgcaactgtacgactccctgtggcgagacgacgaggatgggcgcatccttatgttggtaggtgcaccggctcaggagctgtgcgaggagtattccaaggatgtgtacgagctgacgcagcagatctatcgcctgggcttggagcgcttcggtgaacgcgatgaggagattcgcgacttcaatgccaatctgcatgaggggcaggaggagctgcaggcccagggacaacggcagatcgaagacttcctggagtacaaggagcgaatctttgacgagatgcgcctgaagtggagagagctggatcagcgagacgatgatttggagcagttgcaggcccagttggacacactaacggccaactttgaggattccctgaacgagctgtgggaaagcctgatggctcaggagctgcatttgcacgaggcagttgagatctccgatcttatgtccaacttcgtggagcaggcgcaggtgatcttcctgcaactgcgcgatctttgtagctactttgccgacaatatgacggatattgtgaaccagtttctgtccaccaagctggctcgcaatgaactgaataccattcccgaagaactaaagcagtgtgtggatgatcgagaggcggtcctccagctggtggagggcatgaggactactcacacatcgcgagtggataaacgtgaagatcgcctagctcaacgcagcaggcagtttatagatgacatgatcacgaatcttaacaacaaagaggttgatcgccatcgcgccaagattctagagatcaactcttttatggaaatgatgacagaggctttggccaatctgccaggtgaattgcaccaggaagccccatcggattaa

SEQ ID NO: 30225 - protein, 557 aa, DROSOPHILA
MDEPVSSQPGEDAVEETEEEPLRGFLEEINCPEPGIIDRQMIETAYLEEGKKGEARRLHQLEPVVYDRITTMRLEFKNILRIDHLWMMPNLTKLCLNCNKIEVIEHLEMLTALKDLNLSFNYITRIENLEKLVKLEKLSLFSNRIRKIENIHTLQNLVILSIGNNLIDTVEGIERLRFVSSLKVLNLEGNPIAKQPDFPLSLYVIAILPQLNYYEYVFIKTETREEAQKRFYRELREIEDKQEREIQGLETEAREMAEADRLASSFVEHLDGMQLYDSLWRDDEDGRILMLVGAPAQELCEEYSKDVYELTQQIYRLGLERFGERDEEIRDFNANLHEGQEELQAQGQRQIEDFLEYKERIFDEMRLKWRELDQRDDDLEQLQAQLDTLTANFEDSLNELWESLMAQELHLHEAVEISDLMSNFVEQAQVIFLQLRDLCSYFADNMTDIVNQFLSTKLARNELNTIPEELKQCVDDREAVLQLVEGMRTTHTSRVDKREDRLAQRSRQFIDDMITNLNNKEVDRHRAKILEINSFMEMMTEALANLPGELHQEAPSD

SEQ ID NO: 30226 - DNA, 3513 bp, DROSOPHILA
ataaagatgaaaaattcactatcagccattatagtacaagattagatcaatgagttgctctaaatgaagtttaatagaagagtataagccctattatacgaagtctcacaggatagtcccttgttatgtatccacggctcgttgctctgaaacacaccttgttccaaagccaatccctaaaacccgatgtacatggaagtagtccttccgcacccactcccctttccatcggctagccacatttcgcgccccacattttggccttttccaaccacataatgtcctttgatggcacacaggacttcgaggtgcgatgaatggctacggggatgatccgcggtcgttaaaagggcgcgtctcccattaagacttcgaaactctcataactaaatgtcagccaaactgggattggcttacgaaacgcagatattcagtccagacatttcgactaagaaatctattatccctaattaaaagacaggagactctttgatttgccaaaacttgtattttggcatttaaatatatatttaacaacattattgtacaaatgaaatacgtttttaaattcaagacttaaacctaaaacgcataatgaaagcagtatgtgtatggcacctatatgtatgaacactgggcgtgctgaaatcgccgaccaatggtcagcccaaggctcctatatacaggtgacattatataacacaacgatccaaaccggcggggccaacccatccgcagtcgcatccgccttttgtcttgccatacattaaaatccagatgagggtgtgttggccgttgaacaaaatttagtatcaatgagcatgctcgcttgccatttgaattgtatggttaacttaaatgcaactgtttaattaaattcagctccacccgcaacgatttgtttgcacataattaagtcaactaattggatgccagttttagtatcaattagcttcaggtcgtgactttatgcctaatataattggttcaacatcttagactacgccaaaacaggtggttcctctgattcgattgattcttgtttgatttgcggctgtcccagcgacataggtaaacgatcaccccaccgactcacttttgcacaagaataggcagacctgcagagaaaatacaattgcttaagaggagtttaaaagccttttgtggttctacttactttccgtgcttggacttcgtgaagataacctcttggagagtgcccttttctgtgcagagccgacagatggcatgctttgaccttaccaaggtgggacgcacaatgcgcggccaggagcttgagctatcggattgggaacccttcttcaggatggcataactgtagagggaggtgtgacggtctgccaagaagtcgctacccaaacgcaggggagcgtaggagatgggaaaattgcagggcgttcgatcggccagatcccgaagtcgaggacagaccaaatcatgcggacactaaaggtatgtataaataagttagattactacccttacatcgcaaatacgttgaaacttactggtgccacagtgtgaccttcttgttcctgttccaacaaaaattgcctagcctcgttgactaactcgctgccacggcgcgttccctcctccacaatgaccaggtaaccatcgcacttccgccacagattccgcagcacatcctcccgctgctctttgttctccaactcaaaaagcgtatgagatataatgaccagatcataattggtttcgatggcgggcaggaactgtcgataaaatacattgcgcagggctatttgcttgttctcatggccatcgcgcagaatgagctctgatatctcattcatctccctggacctgtccacgttgtagtactcgaatatgtgttcgcgccacagttcgctggccacccacataccggttccaatgccggatccgaagtcaaagaagcttcgtggccgaaactgttcatcccgctgcgccagctccgtgagaacgcgcttcaacacggcgtactcctgggcaccacgagctatggcgtacacaagcgactcgtatgctccatattctattcgcttccaggcgtagatacgctgacccagcctcttgttgatctccagctcccgcttgcgcctccaacgctccgcctcgtcttcgtcgagtgtagctaggcgatccagaggcatcttcgtgttgacctcttcgataacgatgcgtttcttgttctcaatctcttccagcgtgggtggtggatggcgggatttgatataggcgttgagctgctggccatcgtggattagttttttgacgggatgatcccccacgatgcgctttagcgtatcattcaattgtttcggcagttccacatgattgggtctcactactccgggatgttttctgggcttcagtgtggcatgttccagggcagagaccacagctggttcaacgtccactgcaatcttgctggtgaatcggtgcagtcgtggcactagatttctcgttgtgaaattcagtgaaaaattcatattaaattctaattagttaagtaataagtaaccgagaaatcaaaacaaatgagagccacacgagtttaccggcgatttgccagtgctgtaaaagttccagtcccatcagctgacggtgctgccagacgttttgcctcaatcacagattcggctatattaatagcatcttttttctgtttgagttaacatttaatagaattcttaatatacatatgtcttaataataataattttactaccttcaaccatataagcaatttatataaataaatttaaaaagcaaccaaaaatagtcgagaaaacataacaattgaacaaaaagagtactataaccgtgacctctactgtgtgcttgctccttagaatctgaaaacaaacttgccatcagcactatgttgtaaataataaatttaaagaataatggaagaatacgaagcacaagtgagcaaaggtgataacatgagatcccaactatttttatgaaaatacttgcatcaaacagttgctcgttgtggagcaggcattggaaaatgccgcggatgatgcgcaacgccaggatcttttggccctaaagaacaatctgcaggagctgttggccctcacccgggaatcaggagatgaagcaccaatcgatgaactacctcagcagggcgacaatctggatgatgagctgcagcggctcaaaagcgaacttaatgacctagaggcggccggctcctcacaaaccgcgttggatgaagaacgccagctggctgacttgcgaaccaagtacaccgccatggtgggcgagaagtgctccgcaccacacgagcacagttggggcacctgctaccacaatgccctcatctgcggagtggacgacgaggtggttatgaacagcgaaggcgtcttggatgctcgactaagggttctctttacgaatcccacgcatcgagaaatgctgccctgttcgtattacctcgaaggcgagtgccgctttgatgaggccaagtgtcgcttt

SEQ ID NO: 30227 - DNA, 1392 bp, DROSOPHILA
atgaatttttcactgaatttcacaacgagaaatctagtgccacgactgcaccgattcaccagcaagattgcagtggacgttgaaccagctgtggtctctgccctggaacatgccacactgaagcccagaaaacatcccggagtagtgagacccaatcatgtggaactgccgaaacaattgaatgatacgctaaagcgcatcgtgggggatcatcccgtcaaaaaactaatccacgatggccagcagctcaacgcctatatcaaatcccgccatccaccacccacgctggaagagattgagaacaagaaacgcatcgttatcgaagaggtcaacacgaagatgcctctggatcgcctagctacactcgacgaagacgaggcggagcgttggaggcgcaagcgggagctggagatcaacaagaggctgggtcagcgtatctacgcctggaagcgaatagaatatggagcatacgagtcgcttgtgtacgccatagctcgtggtgcccaggagtacgccgtgttgaagcgcgttctcacggagctggcgcagcgggatgaacagtttcggccacgaagcttctttgacttcggatccggcattggaaccggtatgtgggtggccagcgaactgtggcgcgaacacatattcgagtactacaacgtggacaggtccagggagatgaatgagatatcagagctcattctgcgcgatggccatgagaacaagcaaatagccctgcgcaatgtattttatcgacagttcctgcccgccatcgaaaccaattatgatctggtcattatatctcatacgctttttgagttggagaacaaagagcagcgggaggatgtgctgcggaatctgtggcggaagtgcgatggttacctggtcattgtggaggagggaacgcgccgtggcagcgagttagtcaacgaggctaggcaatttttgttggaacaggaacaagaaggtcacactgtggcaccatgtccgcatgatttggtctgtcctcgacttcgggatctggccgatcgaacgccctgcaattttcccatctcctacgctcccctgcgtttgggtagcgacttcttggcagaccgtcacacctccctctacagttatgccatcctgaagaagggttcccaatccgatagctcaagctcctggccgcgcattgtgcgtcccaccttggtaaggtcaaagcatgccatctgtcggctctgcacagaaaagggcactctccaagaggttatcttcacgaagtccaagcacggaaagtctgcctattcttgtgcaaaagtgagtcggtggggtgatcgtttacctatgtcgctgggacagccgcaaatcaaacaagaatcaatcgaatcagaggaaccacctgttttggcgtag

SEQ ID NO: 30228 - protein, 463 aa, DROSOPHILA
MNFSLNFTTRNLVPRLHRFTSKIAVDVEPAVVSALEHATLKPRKHPGVVRPNHVELPKQLNDTLKRIVGDHPVKKLIHDGQQLNAYIKSRHPPPTLEEIENKKRIVIEEVNTKMPLDRLATLDEDEAERWRRKRELEINKRLGQRIYAWKRIEYGAYESLVYAIARGAQEYAVLKRVLTELAQRDEQFRPRSFFDFGSGIGTGMWVASELWREHIFEYYNVDRSREMNEISELILRDGHENKQIALRNVFYRQFLPAIETNYDLVIISHTLFELENKEQREDVLRNLWRKCDGYLVIVEEGTRRGSELVNEARQFLLEQEQEGHTVAPCPHDLVCPRLRDLADRTPCNFPISYAPLRLGSDFLADRHTSLYSYAILKKGSQSDSSSSWPRIVRPTLVRSKHAICRLCTEKGTLQEVIFTKSKHGKSAYSCAKVSRWGDRLPMSLGQPQIKQESIESEEPPVLA

SEQ ID NO: 30229 - DNA, 4205 bp, DROSOPHILA
gctgtcatttttacccactgtcatctagcccacttgttgtcactgaaccagcgggcaaacatgaagtagccgttttggccagccgttttgcatggcagtgcgaatgcggccaggaccaagctggaaaacacaacgcaaatgttgcgagtttagagccacgccttattgcgcccgggggcatgcaacaatatttgtcgtgcagttgataaaactgtccttaactgccctgccgttatcctgtggatacccgatggtggcgacgatttcactcgcaggacccaagcgttctgccgcattgtcgttgtgtctgatgagtttttaagtacagacaattacaaacgacaaccgaggagcaacaaatgcaacaaacgcaatcagccagccgcatgccccatagtcgctccgcttacttagccaagtcagtgccacgccccatttccttgtccttggtcctgagggggcccaacagcaaaaacccacccccgcaatcgcatttctgggcaatggttaccaactcagggacctgcgtttgcggttatcacattctgctgggcagtttagctgcgtaattgaattaaatttcgttttaaaatgtaaaaggcttttgatttggcttgcagtccttgatgttgtttcgtactccataaagtaattaacatttgtttcaattcctgagcaccaacttcggaccacgagctggcgaatgccacaaaatgggagtaaatcaacgataagtcctctttgactggaatttagattgggtttctttgaggactatttgtgtcgtgaagctgggtataaagtgaatataatttatacaaatcaaatcattttcggtaagaattccctcttcctgtggacaattcgtaatgcaattgtttaactaaaacccctattgcgtcgactcaaaacgaaaacaaaattcacagtaaacattccaaaaaacgtaattaaaaaaggaaaaatatttgtaaggttgtcagagaagtgtagctttgaaatgtccggaaaatccctgggcttccgccacaatatcgatagtgtgcgttggtatcgtggcatgtccgtcgtgcagatgaaagcctgtgatgaattgctccacgctttacgcgatgacatggagcagggatccacgtaccgggtgcgtcactgcatcacccagttgggcatctatccgccggtgggagctgcgcagatcaaggatattatagccatgagtcagggcagcgatctggcatttttgtggttcctatgggaattcgcctacaagagccccccaaagtgcgggaaggataattgcaactcggattcggagcactttacggtgaacgaacagttgctcttgtctggtattgcccatttggatatgccgtccacactgagagctttggatgccttgctgccacctgctacgcaatcgaaaaagctgaactcccaaattaaaaccgaacaaaaatcttcgattccaagacgccgaaaaccgaaaaactatgatctgccgtattttgctccgctggttcgacctcgtgaatatattccgaaatgcaaattccggccacccgagaccaagcttctctttccggaatattctcattatatagatcggatgaagcagatccccaatgagggctctcgttggtttgcccaatacaaattgtgtccggccaaaagagtggtgaacaagttgctcagagatcagctcaacgggatctccttgaaatgggatgataacttggaagacaatgctcctgtatgtgagacacatcgattcttgaagaaggtagagaatttacaaaaacaagagaaaatcttaaaacagccatgtgtaaccatgctggatgtggtaggagatgagttgaaagcccggcggaagcacattctaaacgatatcgaaaacaatgttaaatgggcaagtaaaaggatgaataggcaattgggaataacttcaggtccaggcaaacttccaaagggatcatgcactgcgagaaaaaagaaggaacccaccatattgatcggtcttggtaacgaagagaatctcaggttgcattcgtatgcccattcattgaataactcgatcagggttatgctcatgaagggaaatgagtcccatcgctgtggagcaggtgactgcaaaatcctggatgtggactgcgagatgaaaggatctgcggaaattactatgaaaccacaaaatgtgaaatcctttatcgaggagaaaccgagattgccaacttccagttttaagaaactcgcagatcttatacccgtctgcagtcgaactttgcgttcgttgaagaggtcatccccaaaggctcctgcagaggagtcctttacaaacaggtctattggtggctttcagttggactaccataagatattcgatgtaccatcgcctcctgttgagcccttgccatgggaggaggaggtcctggacttggaggacaagcaacctgtgatcgaaaggctctgcatcgatgcccttgggaatgacgacaacaagtccaagaaggagttgcttcggaataaatccaatccggtagtttcaagatcagctgccaaatgtgcagtgaatatgttccgttcaaaacttgcagaaaacgcagaaaatcaagacgacaaacatattaaacaaaatggggatatactaatcgacccggatgacgacgagcagattgagagtctcctgaaggaggcacttcgggttctccgtggcaatcgccaatacgtgctagccaccctttccaatgcccacaagatgccggtgctccttgattgggtggcagatcgctatggtaagtcgtactgccgagctgggatgaaatccattgtgaagacctcgttccggatatacgagaaggtgtatgagaaggagaggcggaacaagcggaatatgttggaactgaagagatctgtgacgggtctgggtagttccatcagctatgccagccacaagaagttcatgtcccaagtcgttcagcggaaggccgagtacaacaacaagctcaatgaactggctctggaacagtcgcgtctcacctggttggccctgcgaggatattcccatctgggcggcagcatcaaggacaccttctttgcctacatgccagccaggccgcaggatatcaagcgtcagcatatttggaaatcctataatttcctggatatggtgaattttcgtctaagaaaccgacgaatacacatttgaaaatggtgcttttaaattgtggacatcgtgtatttcgttctgccatttggaaaccacatcctcaaggactggttccacatgacagatcgaaaaacatgcatgtccatggttttcgttctgccatttgaaaacaccattacattctctggttttgcatatatctacatatatgtatcgcatgatctgcttagtggctactacactcgaaaaaacattcaatgaaatttgtcattcgccattgcggccgactacttatgtaaaccaaactatgtataatcccaattaaaaatgctgatgcccaactaaaacgccacggacggcaaatgaatagcaaacacggtcgagtcgaggcttagttttagattttcagctatcgcttggtcgccagattgccgatggcccgttgttgctcattaattaaaaacggggtggtgaaacaatgggtggggaaagtggcatgccccatgccccatgccccgtgccccatgcccgcattgaatggcgaaaagtggaaaagcggaaagggggaaaaacaacagactggcaagctgctgctgctgctgctgctggccatgtaatggcgctccaatgacgcacgtgacacgtgtggcatggcgctgacaattcaaaatcgactcgctgacagcgggcagatgacgtcgctaggagcgcacatggaggaggacatttttggtcggcgatggcagcgtactggctgatggcagcggtctgcccgcagcactttgtgtattgaatcggttgagcatgtgacaggattatgatataaatcattgcatactttacggcgatcgatttaaggacgcctggcatttttattttgataaactgaaacaacgagaacaacggacgggcttctctgccattgatgagagcttaattatttatttacttcgttatttatatatttcatttgtaaacagtaaatcagaagtcgcgaaagccttataattggtttagcaaattaatatacatacgattt

SEQ ID NO: 30230 - DNA, 2205 bp, DROSOPHILA
atgtccggaaaatccctgggcttccgccacaatatcgatagtgtgcgttggtatcgtggcatgtccgtcgtgcagatgaaagcctgtgatgaattgctccacgctttacgcgatgacatggagcagggatccacgtaccgggtgcgtcactgcatcacccagttgggcatctatccgccggtgggagctgcgcagatcaaggatattatagccatgagtcagggcagcgatctggcatttttgtggttcctatgggaattcgcctacaagagccccccaaagtgcgggaaggataattgcaactcggattcggagcactttacggtgaacgaacagttgctcttgtctggtattgcccatttggatatgccgtccacactgagagctttggatgccttgctgccacctgctacgcaatcgaaaaagctgaactcccaaattaaaaccgaacaaaaatcttcgattccaagacgccgaaaaccgaaaaactatgatctgccgtattttgctccgctggttcgacctcgtgaatatattccgaaatgcaaattccggccacccgagaccaagcttctctttccggaatattctcattatatagatcggatgaagcagatccccaatgagggctctcgttggtttgcccaatacaaattgtgtccggccaaaagagtggtgaacaagttgctcagagatcagctcaacgggatctccttgaaatgggatgataacttggaagacaatgctcctgtatgtgagacacatcgattcttgaagaaggtagagaatttacaaaaacaagagaaaatcttaaaacagccatgtgtaaccatgctggatgtggtaggagatgagttgaaagcccggcggaagcacattctaaacgatatcgaaaacaatgttaaatgggcaagtaaaaggatgaataggcaattgggaataacttcaggtccaggcaaacttccaaagggatcatgcactgcgagaaaaaagaaggaacccaccatattgatcggtcttggtaacgaagagaatctcaggttgcattcgtatgcccattcattgaataactcgatcagggttatgctcatgaagggaaatgagtcccatcgctgtggagcaggtgactgcaaaatcctggatgtggactgcgagatgaaaggatctgcggaaattactatgaaaccacaaaatgtgaaatcctttatcgaggagaaaccgagattgccaacttccagttttaagaaactcgcagatcttatacccgtctgcagtcgaactttgcgttcgttgaagaggtcatccccaaaggctcctgcagaggagtcctttacaaacaggtctattggtggctttcagttggactaccataagatattcgatgtaccatcgcctcctgttgagcccttgccatgggaggaggaggtcctggacttggaggacaagcaacctgtgatcgaaaggctctgcatcgatgcccttgggaatgacgacaacaagtccaagaaggagttgcttcggaataaatccaatccggtagtttcaagatcagctgccaaatgtgcagtgaatatgttccgttcaaaacttgcagaaaacgcagaaaatcaagacgacaaacatattaaacaaaatggggatatactaatcgacccggatgacgacgagcagattgagagtctcctgaaggaggcacttcgggttctccgtggcaatcgccaatacgtgctagccaccctttccaatgcccacaagatgccggtgctccttgattgggtggcagatcgctatggtaagtcgtactgccgagctgggatgaaatccattgtgaagacctcgttccggatatacgagaaggtgtatgagaaggagaggcggaacaagcggaatatgttggaactgaagagatctgtgacgggtctgggtagttccatcagctatgccagccacaagaagttcatgtcccaagtcgttcagcggaaggccgagtacaacaacaagctcaatgaactggctctggaacagtcgcgtctcacctggttggccctgcgaggatattcccatctgggcggcagcatcaaggacaccttctttgcctacatgccagccaggccgcaggatatcaagcgtcagcatatttggaaatcctataatttcctggatatggtgaattttcgtctaagaaaccgacgaatacacatttga

SEQ ID NO: 30231 - protein, 734 aa, DROSOPHILA
MSGKSLGFRHNIDSVRWYRGMSVVQMKACDELLHALRDDMEQGSTYRVRHCITQLGIYPPVGAAQIKDIIAMSQGSDLAFLWFLWEFAYKSPPKCGKDNCNSDSEHFTVNEQLLLSGIAHLDMPSTLRALDALLPPATQSKKLNSQIKTEQKSSIPRRRKPKNYDLPYFAPLVRPREYIPKCKFRPPETKLLFPEYSHYIDRMKQIPNEGSRWFAQYKLCPAKRVVNKLLRDQLNGISLKWDDNLEDNAPVCETHRFLKKVENLQKQEKILKQPCVTMLDVVGDELKARRKHILNDIENNVKWASKRMNRQLGITSGPGKLPKGSCTARKKKEPTILIGLGNEENLRLHSYAHSLNNSIRVMLMKGNESHRCGAGDCKILDVDCEMKGSAEITMKPQNVKSFIEEKPRLPTSSFKKLADLIPVCSRTLRSLKRSSPKAPAEESFTNRSIGGFQLDYHKIFDVPSPPVEPLPWEEEVLDLEDKQPVIERLCIDALGNDDNKSKKELLRNKSNPVVSRSAAKCAVNMFRSKLAENAENQDDKHIKQNGDILIDPDDDEQIESLLKEALRVLRGNRQYVLATLSNAHKMPVLLDWVADRYGKSYCRAGMKSIVKTSFRIYEKVYEKERRNKRNMLELKRSVTGLGSSISYASHKKFMSQVVQRKAEYNNKLNELALEQSRLTWLALRGYSHLGGSIKDTFFAYMPARPQDIKRQHIWKSYNFLDMVNFRLRNRRIHI

SEQ ID NO: 30232 - DNA, 3520 bp, DROSOPHILA
tcggctcataggtgtcacacataaatcatggatacctcaattccatggcgacctgaaacgtagaatgcctgcgaattaaatagacaaagaagcccatcgaggaggagcatcgatggccaccagtttggatgctgcggaaagtgctgactttgtggaacttttgccaccagagaaactatgcgaaacaaactcagagatactccccacacacacacacacacacatacacacatagaagggtcctgggtcctgggccacgaaagtcctggcctaagcgcatttaagccttattttggcatttgtcaatgtggcgggacttatattacatttcgatgtctgtcgtctggctccgcttgttggcataataaattgtgatcctttgtgtggtttttatgtagactttgatttgatttttcgcccgccactttatttatatatacatttatttatttatttatttagcacaagtggagcttaggcctataactttttcgtcgatttttacagggccacaaactttaatttaaacataagtcatccgataaattgcataacaacacgcattatttgttcaccgttgcccggccatttaattagcgtaatttgaagcaaaaatgagcttagcggtcgaaaaggtacaaacacacacacacacacacacactggcagcaaaaccaaatatttgttaagcgcttaactgaatccaaaaatatcactacaatttacgctaattacattataaatagtgcgattcccgtgaattaactaattagagtcgaattaagccggcgttccaaaacaatgccaaatatccgaattcaattttggtattccgagtatccaagcaacctaatcaccgtctgccaccttgcgccacccattcaacccatccaacccatcgatcctctccatttccatggtccatgcaatcgacgagtccaacttaatggcaaatcagcttacgtttatgtacacggccacatcaccttttcattaacccatgccaggcacctcaaataatgccctgctggagacgtcgtctgccgttggcattggcagccatccgggacacctcactggtggccatggtggccatactgcggtcactgcagccgccaatggtggtggcaacaataatctgaacatcaatcttccggagaataacaacgcaatactacgactcgaagttgaattacgtgacaagaatgtgcccaagtatcgtcgtggcggaggcggtgggcgtggcggtggcccaggcatcggacaagtgggcggcggacaagtaggcaagcgaaccgcaggaggcgcaggtggtgcaggaggaacgggcaccggagtccagattttgccagctgacacctcaacggtggtgggtgctcccatggacaaacgtaatttagtggtgccgctcgaaaaggtaagtcgtcgaacggttagttacgagttaggagcaggttcggtcaagtgggcagagctttatgccttccccgagcacttaaagttgattttcgtgtgcgttgtgtgaaggaggagtagtaggagtggacatgggttcactgccagcttggagtgcgatctaagcactgagaagaaaaatgttacaattaaagaagaaggaataagtgacagcttgatatctgttttatagccatttagtgaagtgggtagtatcgttaagaatgttctcatgagtaccagtcagaatgaatgtaaatatatatatctatcatttcgaaaggctatcccatttttctcagtgccttcctgcgattgcggtggcgattggaactgcgacaacgattgttgctccgcttgtaaggatgcacttaactggacgagaacgtgactcgagcggtgtgctgtgcaagaggttacccaaatcgtatcttgggaaagattatactgatgaatgaggtggcttagccacagaagattgatgaatgctggtgcatctgggccagctaaggccggaacaaatcgtgccatcagtcagggagcaatgaattctaggactatacacttatacttataatcacattcagtcgatccaattaaatgccaaggccatgaaaccatgcgccataagctataagctataagctataagcctgcgaaaatgccatcctaagctgttgcttctctcgtttgtccaggtactggaggagctgcttgtcaagctggaaattgagcacgttacttggacgaccagcaagaagggatatttccatcacgtcgtttttccgctgcaggcgggatccccctgcgagacgacgctgcactgcctcacggaactgggcattggcactaaattgaattccagtgtcaggtaagttgagacattcaaggggtggcaacaaatggcgggcgtcaaacgccaaacaccgaacgtgtccgggaaactcaaggagctgctgcgagctgggtgccaagggactaggaactagccccagcaaggagcaacagctggccgagctcatccgtggtccatctggtggtgcatcctccatgggggtgcaataaaatggcagaaagatgaggagtccggccggctgaccgaagaactcccacgttgccaaggtccttgagttttgcattttgattgcttgtagcggatgcagtgctgcttaccaaatccgaatacgtttcgataatgtaaatgcaattttccaccgactacaacgaatccaattaaaacccttttgcaaaaatgtttaacaaccggtatatatttatatatgtaccttgccttcgaactgtgaaattccgctagtaattaaattaagcaaaacacaatagagctgaacaatgaacaatgaacccgactacttaagtaaggctactgctgaatttaatataaacgagtaaaagagcaggaatggcagcagaagtatgtggtggaaggggtcagtcggtgaaaagtaggtgtgataatcatttaatggcattaagcagggggattaaaatgcagttgaaggtgtgacccgatgaaaacgagactcttgagtcagtccgagccggtgggcaaagggcaaagggcagagggcaaacagcagatgtttccatgacctcaaggagccgagtggccagacaaagtgcgacttaagcttattaatatgcgctgaaattcaattaagaacgtagctgctggaatgcaacttgcgttgattgagtgccaccagtgtaatctataattcagacttcgccccgtccagagcatctcgagatctcgatgccagcagccaagtgccatgctgcagtgcatcctttgatggccccacgaaatgcgcacgacttgttttacagatatgcgcttgcatatatcaatttcaaacgtatctacactgggcgaaagtttctgaacctatgctatgaaaaaagaaaatacattggcaagctgtgttatgcacttacaactaaattagtgagaagtaaattcagtgcttatatggcatatgcaaccatagtgttttttttgtagccccattaatatattatgttttttttctctgtgtactttcgc

SEQ ID NO: 30233 - DNA, 705 bp, DROSOPHILA
atgccaggcacctcaaataatgccctgctggagacgtcgtctgccgttggcattggcagccatccgggacacctcactggtggccatggtggccatactgcggtcactgcagccgccaatggtggtggcaacaataatctgaacatcaatcttccggagaataacaacgcaatactacgactcgaagttgaattacgtgacaagaatgtgcccaagtatcgtcgtggcggaggcggtgggcgtggcggtggcccaggcatcggacaagtgggcggcggacaagtaggcaagcgaaccgcaggaggcgcaggtggtgcaggaggaacgggcaccggagtccagattttgccagctgacacctcaacggtggtgggtgctcccatggacaaacgtaatttagtggtgccgctcgaaaaggtactggaggagctgcttgtcaagctggaaattgagcacgttacttggacgaccagcaagaagggatatttccatcacgtcgtttttccgctgcaggcgggatccccctgcgagacgacgctgcactgcctcacggaactgggcattggcactaaattgaattccagtgtcaggagctgctgcgagctgggtgccaagggactaggaactagccccagcaaggagcaacagctggccgagctcatccgtggtccatctggtggtgcatcctccatgggggtgcaataa

SEQ ID NO: 30234 - protein, 234 aa, DROSOPHILA
MPGTSNNALLETSSAVGIGSHPGHLTGGHGGHTAVTAAANGGGNNNLNINLPENNNAILRLEVELRDKNVPKYRRGGGGGRGGGPGIGQVGGGQVGKRTAGGAGGAGGTGTGVQILPADTSTVVGAPMDKRNLVVPLEKVLEELLVKLEIEHVTWTTSKKGYFHHVVFPLQAGSPCETTLHCLTELGIGTKLNSSVRSCCELGAKGLGTSPSKEQQLAELIRGPSGGASSMGVQ

SEQ ID NO: 30235 - DNA, 2297 bp, DROSOPHILA
aaacttgcagcacagcggcgcaataattgcaactcttaattttggcttattaaattgccagcgagccaatttatgtggcatgtatacatgaactccacaatgccataaagcggtctgcaacgcctttactttcaaatccgagcacgcaataatttagcccgaaacggtcgtaaattcgaataatagcgaaaatagaaagtaagtcgggcaaagaaaagtcatgagctcgcacacaaatggaaaaacaaacacacacttcacagatttgtggattttacagcggaggtggcgttattagcagcagtatgatataaatttcaggagttcaaagttcaagacaagaaatgatctctttaaaatttctcattatgaaatgtttttttttcattatgcaagtttaacttcctttttactgcaaacttttattcacctttttataaaaaaatatgaacatctaatgctattttttttagtacacacatctaataagctttaaaagcaaagcgattaagacagcagtacctaagtttataggattatattcttaagatggtataatgatgagctgaccgcaatagtacgtgggtttatatagaaaaggcacgcacttccggacttgctgagcaatgtgctgagtcattataatttataatagcagagagaaggatacagagaaaaatcgaaaaaaaaaaaaataaccgaagagcgaatggcagaaggaggagaatgaactgaaaatgcgacaatggagttctatctagtactagtgggtggtggtgggtgttcttggggcgattgtgtggcgcccatgctcacacatatgctgcaaagttatagcatttcaaggccggctgccactgtttggtatgccaacgggaacgccatctaaccggaactgggcacgcggcgaccttatgacctcgaaccgaaccacacacacacacacacacacacacatgaccatgggaatggaacttcaaagtcacagctacccacccatatgctcttcttcttttttgcgcctgtgttgcagggtctcttctggtcactggcctgcatttggctcatctatccggagaagcggattccgcacttgaagaacgaggcgatgaacgcgactagtgcataccccttcctctacaccaactatctgcccaccgagttcctgatcaacggcatcgtgtccgcctgcctgaccatcgtgaatgtcatttgcatatttatcacggccataatcgtattgaaaattaaagaggtctcggcgccatatacggccagtccggatttaaagcggtgagtaggcagttctgtttttaagtcgatgacgacatgtagtcgatgctcgtctgggaaaacttttagggtggaccttgctttttttttattatttaaatgaaatttattatagtaaaaagaaaaaattaatacatttataaaattaaatacgggcagcaaatattaagaactaataatataatatataaaacaggaatgtctatttagtgtttttaaaatttttgtaagaattaaataaattaatgcacatgcagattttgatttgggtgtttgtaagtacccgcgatgcgagtgttgagtggcacccgcactcaaaattgttgagtgtgagtcgcgtggcaaaaaaatgccacccttgcagttcatactacaaatagcagcaaattaaaaacgtacacagcgagatgcgctggagtgtgtttaatgatggcgaagcaagtgcttttgagcttatcatttccgtaatgtacgcttggtcagttggccattagtaagtgtaattaataacgacaacagacagacgcagagacaaaatcacaatggtcaacaaaatgggttgttcggcgagaattcccagttaataaccatttaaaatgcacatctattagtatgcgaattatatattacgtcaacattgccattgacttaatctacgatgggttaataaatcagatcttgtctgcattgtgtattaagtccatcttagatttctccattcaaacaatgtgcaaacacatatgaccaactagttttggaggaaattagcccacatagctcaacacttgccatcctgcatagtacaaatcaagaaaggagctgagtcctgtggcggaattcgaacataggattctaaagttgtaattttggggcaagcatttcccttttgactttgtatgtactcttagacactccgatttgtagccaatgctttttgatttgctctccgtacgataatccttagaaatgtctgtctgcgcaagtgtttcgctccaaaaatgata

SEQ ID NO: 30236 - DNA, 297 bp, DROSOPHILA
atgctcttcttcttttttgcgcctgtgttgcagggtctcttctggtcactggcctgcatttggctcatctatccggagaagcggattccgcacttgaagaacgaggcgatgaacgcgactagtgcataccccttcctctacaccaactatctgcccaccgagttcctgatcaacggcatcgtgtccgcctgcctgaccatcgtgaatgtcatttgcatatttatcacggccataatcgtattgaaaattaaagaggtctcggcgccatatacggccagtccggatttaaagcggtga

SEQ ID NO: 30237 - protein, 98 aa, DROSOPHILA
MLFFFFAPVLQGLFWSLACIWLIYPEKRIPHLKNEAMNATSAYPFLYTNYLPTEFLINGIVSACLTIVNVICIFITAIIVLKIKEVSAPYTASPDLKR

SEQ ID NO: 30238 - DNA, 2800 bp, DROSOPHILA
cgacgatgattatggtgatgatgatgatgatgatgacgacgatgtgattgaaacaaaacatcttattattaccttaccttcgaccggccaaaggaacgaccccgtgcgacctcgacgtaaaaacaagcgaaaaatacgaaataaaaagtgaaaaacaaaaagtcagacacacacacagagagtgtgtgcaaaataattcccacgctcagaggtcccagagccagagccttttgtcgtctcgtctccttcggcgtctcctccgcatcatcatccccattatcatcatcgtcatcatcatggtgctccaacgtgccatatatggcaacgtccttccgacggccccctgccttcctccgccccttttttttccgaagtttgtcggaaaaaaaataatgtacaaaatcgcaacagtgacgaaatttctgaggcctcctcgctttcttcgagtccctcttttcttgtggccgggcaaagaagtctgcgtgattgatttcacttcgtccacggagtggcgaacctaatttcttaactttcacagctcattgggcttgaagaatcactcgactcacacgaggacagcttgacaattgacaggtaagggtatcaagtggttagggctcataattatagtttttagtgatgcggaaaatgtgaaccggtgagaatggcccctttttcggcatctccctttggagtttctggcccgaaagtgcactcaagaaaatggtcaatcttaaagtacttaaatctctacataaagaatttaatgtcatacatacatacatattaaatcacaaaaaggcttcatcttgtaatctataatggatgtgttttaatttattatcttattatcgatatgttcgggaataaaatatgtataattttatatatactaactattatagcaactatatcataactataattttcccttggcgaattccagtgtgatggtcctgggatcgaaatcagttttattttaatacaccgagttaaccacaaaagtggcatgcccaactcatctaatgaaagtttttgcccattcgggcagattattttacatttcattaatgtgtcgaaaaagggaaatgctttcaatgaaagctgctcccaggcccagctgcctgtgttccccatcatcatcatcatcatcctcattctcatcgtcgcaaccatcatcatcatcatcatctttgggtcccgggaatctggaatctgtgttattgatcagtgctgcgcaattaacttagcaacttatgattatgattatgctgccgaatgggtggtgagtacgaggcattactcatgtatggcggtaaaaccaacaggttgacaggacctctgtttcgtttccattccgttccaatgcactgagcatattttggaaactgtgaaatcaatatatttgatattaaatattatcttatgaggttatttaatgtataaaatgtggcttttacttagaagtgtgcaactaaaaaattatttatataagtaagtataagttgttggaaattacttatacgtttatataagtatatcgttcaaaatatatataggaaagataatgatattaaaacgttgtttttgcttgcagatttccatcgtttgctgcgtgacaaatgcaccttatttatttctcagtgcaggggttgcttatccaccactgcgtcggtggagtgggcagctgtttcgctgccgccgccgagcgatagtggtggtggtgttggtggtgagttgtgttgcaacttcaacttgttcctgagggccgtggacgtcgatgtcggcgagcagaagcaacctgactctgactcgactcggttattcgctcaccactcgcgcttgaatacggacgtgttttcggttcgaagtcaaagtcaaagtagaaggcgaatcacaacggatcggtcgaaagttcagaaactcgtcaattgacataaattgagtgcaatttgcagtgtgcgaaatgtgtgtctaagtgaagccaatcgaccagccaacaattcgccagcttcgccgcctcttgtcgcgtgtttcgctcaattcaactacttaattagtagacataaacaaatcgtgctttgagtccgacatggccgacgaaagtctgcacaccgtgcccctggagcacaacatagactaccacatcgtgacgctattcgagcgcctggaggcgatgcgtaaggactcgcacggcggtggccacggggtcaacaatcgcctgtccagcaccctgcaggctcccaagcggagcatgcaggctgagattcgcacgctggagttttggaggtaagtcaagcctgccctaggacaaatacttatatagatatacgggattaactatgttatttaatgactgaaattcggaaaaacgtcttttgccaaaaacttgatatttacaagcggcatttttgtcataacttcgctaaaacttctcatattgatgaaagaataactgttttgagcagctatttaccagagctatcgaaccctatcactttttgaaggatttaggaaaattaatttttgggtgaattttcacattttttgtaaggggtaacatcatcaaaatttgaaaaaaaatggcaaaaaaattgaattgtcgtttttaaatacagttcgattaggaatttaattgcgagtttaacgaggtataacattcaatattcagacaactattttaaatgttctgataaaaaaactgataatttttgtgcagaaaattagagtaatgatttgggaaaaatgtcatttttactaagatttttttaagattttaaataaaaccacaatctgttgt

SEQ ID NO: 30239 - DNA, 560 bp, DROSOPHILA
ttgcttctgctcgccgacatcgacgtccacggccctcaggaacaagttgaagttgcaacacaactcaccaccaacaccaccaccactatcgctcggcggcggcagcgaaacagctgcccactccaccgacgcagtggtggataagcaacccctgcactgagaaataaataagtttccaaaatatgctcagtgcattggaacggaatggaaacgaaacagaggtcctgtcaacctgttggttttaccgccatacatgagtaatgcctcgtactcaccacccattcggcagcataatcataatcataagttgctaagttaattgcgcagcactgatcaataacacagattccagattcccgggacccaaagatgatgatgatgatgatggttgcgacgatgagaatgaggatgatgatgatgatgatggggaacacaggcagctgggcctgggagcagctttcattgaaagcatttccctttttcgacacattaatgaaatgtaaaataatctgcccgaatgggcaaaaactttcattagatgagttgggcatgccactttt

SEQ ID NO: 30240 - protein, 63 aa, DROSOPHILA
MMMMMMVATMRMRMMMMMMGNTGSWAWEQLSLKAFPFFDTLMKCKIICPNGQKLSLDELGMPL

SEQ ID NO: 30241 - DNA, 3661 bp, DROSOPHILA
gggatggttaaaactatctgcttttcgtgtggtgaacgacaattcaagattttcgtatagagtgctacgactttcgaatttttctggcggagatggatcaacagaatgacacgggtctttgtggtttataggttgctcctttggactcgctatatgaggtattggagtacagcttccgctaatgttatccgaacttcgataggatagcagctcgttgggactaatgtcagggatgcgaaactcaaagagagacgaaggcggatcatccggaagaatattctccttgatatagcatttcgtggcttgaccgatattcaccaactcaccaacataagtaggaaccagtattttggggataactagactcctatgagatacagtctcgcagaattgtatcactccccagttgaacgatggctccttatgtctacgtaattgaaagttattatccgatatttgagattggtttaaattcacaactttaagtgcgattctgggtcgtttttgaagacattcgtggtgtatcttggaaggagtgatctttgattgatcatttactttggctggattgttatccctcggtgggatatgatctattttttcttgtagatttaaacattttgaagtgctatgatcttttattggagtctgtgattccgaagaatcatcctgataaattcgttgtgctttcctttgaatgtttgtatttatggattgcagtcttaaattttcctcttttggtttgtcattcgtagctttttgtttttgcatacgtagggtttctctaaaaatctcgggaattactccttgatctgctagttttagggatttctgcccttcgtgttcgtgttttttacattcctgtgctccagaaaaggatcttaagctattgagcttttgctttatggcgcatcctatttttttatttagccatatttgattcgcatcggatttttttggaattctactatcttttattttaattttagcaactatatcttcacgatgcttttgttgtccgcagcgagcacacttatataatgtcgatttgggtttgttatcacaaaatcgttcccaaatggaattgcttatgcttagtgtttttgaaacgggcttggaataatcattatagttgtttgttttatttgaagaaaatacactgtgctcatttgatacattacttttcaaagaaaccgattcagggtcctcgacgaacatgtcgttgatcggcttattaatatcctccaattctggtatcttgtcatcatcgcagtttccatttgagcttttcgattcctgtgagctgaaaactttgtccatgattgaggttaaaatggaagatctttcgaagtcttccaacgcttccggtttattttcccgattgttctgctgagtaactgccggtttggaggccaagttcttggctgggctggttttacctgaaatatggcattcgtttccaatgttatcaatggttttcttaagatttttacgaactgaatccgccatgaataggatgcctgatagattgtcagcgattggactctttgtgtccttagtagagctcaactgaaagttcaacgattcaatgcgattgttgcgcaaatcctgtcgtggttcgatgtgcagtgatttcggtcgatgaagcatataacgagcgttattcacgacaagagcatcttcggatggaccttcatagtgatcaaatggacaaaactggctagccagctcggaatcggtcgattgcgagtccttacaattggagctactcaatccaccacccatctctctgtcatccgtcgagttctggctgctcaagatgttggttaagactttggaaagtggtggcagcgggcgactcctgtggctgcgtggtggacgaatgctgttcctgctcctcttggatatagctcccccgaaggtatccgtaatgggactttgtaagggtataaagttactgacaaatagattgttgtagttctgtagcgggctgttttttggattaaaaacgttatgggccatggccaccaggcttggcatctccgaacgtggtgattccaattcttgacgcggaggtggtggtggtggtggtggtgctgtgggcgatggcggtgatgaaggcaatggcgatagcgttggagatgacgacggcgtcgaaggtggcggtgctttgggcgccagctgtcgacgactcatcattcccttcggtttcgagtgcaagccatgacgccccgggtaccgtttgcacttcatctctttgggtgcttcagtactttcctggccaacttcagctttggccaagccaccacacttgtggcaatttgtccggcaacaattcttggctttcggcttcttgcccctaatggttacctttacccgagtcttttggctttttttgggctcctccacgtggctgggctctggtataatcgtcttctgctcctcggtgctctgatctgcatccttatcgctggaggaatcgagtccagcctgggggcgcctggccaatccgcacacctggcagatcagacgatggttcaccgggatgtggagcaccgcccgcggcagttttccgcacaggcaccactcccgcggccatgcaactccactactggtcatgttgttcatgtacaacgagtacaacttgtagaagcgaaacatcaaaagccagctattttgatttttagacggccaatcaggtcgacttacttaacaagcaacgaaatggcacatagattccggcaattttcgtcaaatatgttttcttaacttttagttttatcacacattcctaaatatatagtctatatgttcgttgttaacgggtacttaaaatatttagacatatttgtcaactctatttcgagcttatgtttcgaaaattaggttttttatgtgagtattgatggtaaaatgacgaaaaaactgctaaaaggctaaaaaaattgatacatttgcaccagcagtttttcggcctttaaagtaacttgttattaaatcattaaatccgattgattctttcagaactcacaatcgactatattcttaattaatttcattcaagctgtatgttctggaattattaaaatttctattgtctttgtttgcggcttctgtaatttgcaattgaagtttgtgtggccgaatggctctgattgtacgtgtttctagccactcactcagttgggaaatttaattaagtttctgctgcatttttaatatacgcattcaatggagtattattgagttttttgcactgttgttcgaataaagtagattttgctgaaagccagacagcgtccttcgagaacaacagttcgcaaaatactatttaatatagtatgcatacccgcccacttcctgcaaaaggagattagtttcatgccattttaagtgaaaatgcatgtttcatatgcaattactgctcggggaaaaggattacagcacacacacacaaacatatctacaaatatatgtattaacacttataattgacaagcacacttcactatgccattcaatcgtagttggaatttatttcaatttttactgcaataaatatgcaaaatgcatttagcaagcgcaaggtgcatgcagcttgacccaatttctcgactccttcggcagcatcttgtttaattaactttatagcatttgatgg

SEQ ID NO: 30242 - DNA, 1512 bp, DROSOPHILA
atgtttcgcttctacaagttgtactcgttgtacatgaacaacatgaccagtagtggagttgcatggccgcgggagtggtgcctgtgcggaaaactgccgcgggcggtgctccacatcccggtgaaccatcgtctgatctgccaggtgtgcggattggccaggcgcccccaggctggactcgattcctccagcgataaggatgcagatcagagcaccgaggagcagaagacgattataccagagcccagccacgtggaggagcccaaaaaaagccaaaagactcgggtaaaggtaaccattaggggcaagaagccgaaagccaagaattgttgccggacaaattgccacaagtgtggtggcttggccaaagctgaagttggccaggaaagtactgaagcacccaaagagatgaagtgcaaacggtacccggggcgtcatggcttgcactcgaaaccgaagggaatgatgagtcgtcgacagctggcgcccaaagcaccgccaccttcgacgccgtcgtcatctccaacgctatcgccattgccttcatcaccgccatcgcccacagcaccaccaccaccaccaccacctccgcgtcaagaattggaatcaccacgttcggagatgccaagcctggtggccatggcccataacgtttttaatccaaaaaacagcccgctacagaactacaacaatctatttgtcagtaactttatacccttacaaagtcccattacggataccttcgggggagctatatccaagaggagcaggaacagcattcgtccaccacgcagccacaggagtcgcccgctgccaccactttccaaagtcttaaccaacatcttgagcagccagaactcgacggatgacagagagatgggtggtggattgagtagctccaattgtaaggactcgcaatcgaccgattccgagctggctagccagttttgtccatttgatcactatgaaggtccatccgaagatgctcttgtcgtgaataacgctcgttatatgcttcatcgaccgaaatcactgcacatcgaaccacgacaggatttgcgcaacaatcgcattgaatcgttgaactttcagttgagctctactaaggacacaaagagtccaatcgctgacaatctatcaggcatcctattcatggcggattcagttcgtaaaaatcttaagaaaaccattgataacattggaaacgaatgccatatttcaggtaaaaccagcccagccaagaacttggcctccaaaccggcagttactcagcagaacaatcgggaaaataaaccggaagcgttggaagacttcgaaagatcttccattttaacctcaatcatggacaaagttttcagctcacaggaatcgaaaagctcaaatggaaactgcgatgatgacaagataccagaattggaggatattaataagccgatcaacgacatgttcgtcgaggaccctgaatcggtttctttgaaaatgtgctcgctgcggacaacaaaagcatcgtga

SEQ ID NO: 30243 - protein, 503 aa, DROSOPHILA
MFRFYKLYSLYMNNMTSSGVAWPREWCLCGKLPRAVLHIPVNHRLICQVCGLARRPQAGLDSSSDKDADQSTEEQKTIIPEPSHVEEPKKSQKTRVKVTIRGKKPKAKNCCRTNCHKCGGLAKAEVGQESTEAPKEMKCKRYPGRHGLHSKPKGMMSRRQLAPKAPPPSTPSSSPTLSPLPSSPPSPTAPPPPPPPPRQELESPRSEMPSLVAMAHNVFNPKNSPLQNYNNLFVSNFIPLQSPITDTFGGAISKRSRNSIRPPRSHRSRPLPPLSKVLTNILSSQNSTDDREMGGGLSSSNCKDSQSTDSELASQFCPFDHYEGPSEDALVVNNARYMLHRPKSLHIEPRQDLRNNRIESLNFQLSSTKDTKSPIADNLSGILFMADSVRKNLKKTIDNIGNECHISGKTSPAKNLASKPAVTQQNNRENKPEALEDFERSSILTSIMDKVFSSQESKSSNGNCDDDKIPELEDINKPINDMFVEDPESVSLKMCSLRTTKAS

SEQ ID NO: 30244 - DNA, 7148 bp, DROSOPHILA
gaatgtgacctatctgatgggtcacgtggtggaattttaaaaattcttaaaatttagatacacggaagggtagtgcaatatgttaacttctataaaactaagtaaaataaaactaatatttactaaacaagtaatatcgatgtatgaatgcttcggaatatatgatcgattttttgtatttgttgcaaaatgaaaatggtttaaaatttctatgaaaattattataaaaatctaaccacaatcttaccttgcatttccggcttgtcagtaatttttagtcatttaatatcatattttttttccaaattcaaacacacacttttaatagattttctaacaagagtctcgagtttatttaaagatatatctgtataatttgttttgttccagaaatagtcctgttatgtttattagttttacaattattgtattttgtatttaatctctgcttcttaatagggcttaattttggctttaattctaggaaactttaaatggaatcaaaaacatgttctcgctcattaatttgtttttttttttttcaatttcgttctcattgtattctccacaataggctttttgtaaatctagctaaaaagttatcctaagtttaaattcattcaattcgttttacatatgccatatgatgtaaactttaaattgtgttctaaatatgagtctaggttgattgatgcctaaatcactttgaaggacagtaactttgaacatttcatgaattgatagaactgaaaattggatggtcttatttgataaaaaattggtaaaaccaggagctgctaaactgattgttatccatatttggtatctatatccgatgcatacttagatagaatattcacagagatttgttttttactgtagtttagtttcgaaatttgatttacacatatgtacatctgttgatagaaaaacgaagcctcttaaatgcatcttagtgtgggcatttggcctacaaatgccatccaactcacggatattgctattgtttctgctgtccatcatcactggtgggcggtggggcaacgccgcctgcttcgccggcatccgcagcgcccctgttcagcaagtagtccagatcgagcgtgatccgatccagcgttgcatcattgcccccactgcagccgctttgcgtgggtgtgggcgtggctggcgtcgtagtcgccgtgctggtgacagtcgatgtggagaccaccgccgccaccatggtgggcagcagggggtcgaatgtcgtgcgggacgtcggctccaggatggtcactcgcttctgcgtcttcggcgtctgggtgggcagcgacatggtcggaatcgttggaattgccggcattgtctgcatcgccgttccactcaggtttccgcttatggtcggaggcggggccatgctcaggattagggagctgggcacaaagtccacgtagggattatgctgcagcggaacataatgagaagtgcttgtggcagtgggcattatggcactggtgtggatgccaattatactgtctgtgggttgaagagcagaggggagagcagagttggtaatcagacagtggatcgtgaataatgcatgcccatttggctttatccagcaagtatgtatatgtatatatatatatattacttttgcactgaagataaaataggttaaatactattaaaattgaaatgtgtaattttgggaaaatgattccaatatttgtatttacttaagttattccttaaatagttaaagtgctctcagttttgtaatattcacttctaattcgaagaattcattctattattgtctctgtgtacttaccagctgccacgccctgcagtatatccagcgtctcaacgcccacaaactcgccgcaggctccttggcgaaagtgcgtcggttgctgatgcaatgtgcgtcttcccaggctgcccgtgagtccgcccattcccatgcccatgcccatacccatgcccatggtgtacgcatcgtaggcagttccgccgcccaaaatggcacagcatcgggtgtccggcgagggcgccaccgagagggtctgtcggtcgcccaggaaggactcggtatttccatctgctgcgacctgacagcgcggcgccgtcgagatgattgtcaacggcagtgggacaccagatccctgtgctccggacatgtccaggcccaccttcgattgcaggggcggggcaccaccgaccacgccggctgacgaggccaaggatccgactgctgcggcggacacgcctgcattggacattgacaaggacacggcgcagtcgttctccttctccttgtcgtggttagtgtagactgccgagggagagaggagtggggttagtttggccaaagctggttaagattcaggtggcaagaacctacagctcagcggactattcacattcgccgtcgtcgtggtggtgcagtagttctcatccagactgctccggctcgtattgaatttggcctgcttgagggagctgttctggctgctcccgttgctggagaggaagggtggtccacgcagctgactctccgccttgatgacgaagcagatgaggatggccgagccctggaaaggcgattgaatcatggccgtgattgtgggcatggcataaacttccagcccatctggactgaccctaataaaattggtttttgtcaacgggatgggatgggatggtatgtcgactgaatggagtcattaagtcacggatgacccttcgattacggccaccttggtggccccgtttgccgtgaaatcaaaccaagcgattgggggattaaatgtatgaccaaaaggcggtcataaatcgaggccaaagcatatggtccatatatggctattatatccttttttcatgagcgcaattgatgggaggcatgctccaaattctaggccaggattttcgaacaaaattaattgcgaattttggtgtaagagccttaagctcaatcgactgaattgctctaattatatagattcgcttgggatgctcaaaagaggatattcaaattcatattagagggattgaaacacagagaaaagcgattatagtcatatgttaatatactaaaaagaagaaaggatgtgtctcatcttgaactttgaactttgcaactttaccatttgtactaaccaataaaagtttctctagttagttactcttgtagtaaattccttaatttggatttaacgatctaactgggatatatatttttctgcgtgtgccttgtacgacttggccactgtttaaataattaaatagcaagacagacgcaccattgaaaacgcccacaatcaaagtgattttggtgcacattaatagtcctggaccagcacgaccattgagcactgagagggttgtagacattgtggttttcgattcaaggaggcagcggcaacggcggctcgacctaatttgtttgtgtttgtgtttgaatttgaatgtgccatgtgcgcattacgcatacgccgagtggtacatcggtgcacacaagcgcgctctcacttgccggcttgccacatcaaagtgtgtgcgtgtaattatgtgattagttttgcccgtatactggcaggaggatacacttcgctgtgcagataattgtttatttaattggattgagctgattgctgggcgttctaggcgctgagcataaaaccggatggctaaatgccattccgttggctagaaaaatgaaatggggcctgcgtcctcagactttgactgatataaaattgaaacacaagaagatgacgccactcaagtggcaggtgggtaagtcgagcgcacttatttcatttgcacagcaaatcaccgagaagtggaataaaaagcaaacaataacagatgctgccgatggaagtggatgtggcaatggaagtggatgtgaaagtggatgaggatgtggtggtagtggcgatggaaacccaagtcaagtgtcaaagccaagggcagaataaacacgaaaaaggcttcttattcagctctttgatcaggcagttaatgcagtcgatggagttctggcgcgccacgcccactctcgctttccagcccatattccgggctgactttgcatgcataatttgcacggcatggcaggtgtaaaaatatgcaggctttacactttgataaaatatgcaacttaaataagtcgtcaggaaataaaaacgaaatgcgatttacataagcctgcgcggcaagtgagtgcaagtggtcctaatagttggaccggcaaatgggattgctaccgcatcaaacattcgaccttaatcccgtccagtgatatatatataggtatctgcgtatgtatgtacatatgtatatatattgattggttgttgcgcctaattgaatttcaattgccggtcgaactgacgtggctgtaagtggatataaacggttacccgcactcaccagcaatatgcacgatatgccgaacggatatgccaacaaagtatccggtgatgaattaacataagcgataaacagaccatcgttgcagattttggccaagagcaatccgcccgcccggtagagtaatccaaatctgtgggaatacattaaattagacggaagaagagaagagatttcacttttcagtttaacattgttggcagcaattgtttctttttcgctcttttatttgatcggattagatgtggcgagagacgggacgaaatggttggatagcagaagataccgatttcatgtactgggcggtcggtcattaaaatctaagtatttccctcgagtcttatctgtcaaactcgtttccattttccatttaccatctaccatttcgtccattcgagcctttctcgacttaccgcctgctcaaagccagattgaatttatccaacggatgcgtatgcacattgcgattcttgtgccacaaccacaaaagtttcttcattaaaatggcaaacagggcaaagaagagcaggatgaagagcaaatcgatgcagacgaacaggatgaagctgagagacggcgatggcgtcgcggaggagtcacccggaccggaagttaaaggcgcagctagcgcggcaacggaagtggaggtagagctggtggtactggtactggtactgaagctggtgatgccactccaagaggcactgaatccactgttacttgcacttccaatgcttgtgattgatgacgttgacgtggcaacatcatcatcgaccgcccgaccagtggatgatgatgacgatgatgcagatgatgtctctgttggcgggctgctcgttccatttcccatcactgcctccgattcgagcagtaaattatcgccgttgagcagcgagtgggctgaatagaaggcgccagaatcggaatccccggcctcgtctttgcccgcgccggcttccggggacgcagatcccgtccagagaacctcaagccaccagtggcgcggccactggccaatgatgctgcagattagcggggcggcgacggcgaagaggagcggcagaagccaactgatgccgatggcgccacgcattcccgccgtcgaactgggcggcgggcgccgctggccgggattgctcgagctggtggtagtggtaatggtggtggaggccgtggtggcccccaaaggcgactgagcccggatctgcgtgatgttgctcaaactatccagttcgcggtcccgttcccgatccctgtcccgttcccgttcccgctcccgctcctgttcccgcctgaggcgacgcttagttggcgttgcgggcttgctgccaatttgcagatacttcttcggcatcagctccgtgtggatggccaaggcaatcgcaatcagcgtggagatgcccagcaacaacagcgaggccagcgagctgctaatgatgccgtgccagctctgcaagaggaacggaaattatgaacggccgttaataaggaaatggagtgctttgacggctgagctgcaacatcgttatttttaattaaatataaaaagttgtcatcgtgtcgcatcagcagcagcagcagaagcaacacccatccaaagaagccatttggtgggattttttgcaacaccctaatggtgacaatttggcataaattttttactacactttttcggacgtcggacattggttattacaaagttgtaaacaatttgggggaacatcacttttttggtgaccggctttcacaaccaattaggaacctgtgtcaacagtatatagcataataaaagtgcatctaaaactgacttatagctatatcttacggcaaatagctttctaagcttctaagtacataattaaaataagaaaattaaatgtatataatagtaaggaattgaggaattctccttaaataatacagtagttatctttatatcttgtagcacaactttaaatctacaattaaatacttaataagcttagtcaagttaacgaactcaaccaacgggctttaagttacgactgcagcgatgggaatttatcatcttttagtagccttgaagccaaatgcgatgaaaacattttgtcaactttttaattttcaatttacaatacgaaaggaaatatgaatatttccgctccgacagtttgccagggaaaattatgagttaagtgcgcttaaaagctttcgcctttcacatgtcctgcttgagggcgggcgtacgggtcgtatgcgtaatttattttttcttatttatttattgttatttttgttgcttccccccctccccctctttgtcccgtttaactcactgtcgcactgaaactgtattttatttatgctcgcaaatatatgcaataagtaaaatgaatattttaattgtatttattgtggcattgcgtgggcgtggtcgcgttggtcgtggcctgatggtggctgcggttgacgtccgacgccgttggcagccgcgtcttcgttgctccagttcctcctcctgctccggctgctcctcctgctccggctgctgtgatcctgccgccgtgacacgtgtttcaaaccataaaatttgcatgtgtgcgcacatgttcggctgtggtactttttaataaagttgccctggccgcgtgtgcgcgcaattaatgtgcaataataataataacaataatgacatgtgtgtgtgtgttatcaagacaaagttttcccccgccgctttctgccag

SEQ ID NO: 30245 - DNA, 2409 bp, DROSOPHILA
atgttcccccaaattgtttacaactttagctggcacggcatcattagcagctcgctggcctcgctgttgttgctgggcatctccacgctgattgcgattgccttggccatccacacggagctgatgccgaagaagtatctgcaaattggcagcaagcccgcaacgccaactaagcgtcgcctcaggcgggaacaggagcgggagcgggaacgggaacgggacagggatcgggaacgggaccgcgaactggatagtttgagcaacatcacgcagatccgggctcagtcgcctttgggggccaccacggcctccaccaccattaccactaccaccagctcgagcaatcccggccagcggcgcccgccgcccagttcgacggcgggaatgcgtggcgccatcggcatcagttggcttctgccgctcctcttcgccgtcgccgccccgctaatctgcagcatcattggccagtggccgcgccactggtggcttgaggttctctggacgggatctgcgtccccggaagccggcgcgggcaaagacgaggccggggattccgattctggcgccttctattcagcccactcgctgctcaacggcgataatttactgctcgaatcggaggcagtgatgggaaatggaacgagcagcccgccaacagagacatcatctgcatcatcgtcatcatcatccactggtcgggcggtcgatgatgatgttgccacgtcaacgtcatcaatcacaagcattggaagtgcaagtaacagtggattcagtgcctcttggagtggcatcaccagcttcagtaccagtaccagtaccaccagctctacctccacttccgttgccgcgctagctgcgcctttaacttccggtccgggtgactcctccgcgacgccatcgccgtctctcagcttcatcctgttcgtctgcatcgatttgctcttcatcctgctcttctttgccctgtttgccattttaatgaagaaacttttgtggttgtggcacaagaatcgcaatgtgcatacgcatccgttggataaattcaatctggctttgagcaggcgatttggattactctaccgggcgggcggattgctcttggccaaaatctgcaacgatggtctgtttatcgcttatgttaattcatcaccggatactttgttggcatatccgttcggcatatcgtgcatattgctgggctcggccatcctcatctgcttcgtcatcaaggcggagagtcagctgcgtggaccacccttcctctccagcaacgggagcagccagaacagctccctcaagcaggccaaattcaatacgagccggagcagtctggatgagaactactgcaccaccacgacgacggcgaatgtgaatagtccgctgagcttctacactaaccacgacaaggagaaggagaacgactgcgccgtgtccttgtcaatgtccaatgcaggcgtgtccgccgcagcagtcggatccttggcctcgtcagccggcgtggtcggtggtgccccgcccctgcaatcgaaggtgggcctggacatgtccggagcacagggatctggtgtcccactgccgttgacaatcatctcgacggcgccgcgctgtcaggtcgcagcagatggaaataccgagtccttcctgggcgaccgacagaccctctcggtggcgccctcgccggacacccgatgctgtgccattttgggcggcggaactgcctacgatgcgtacaccatgggcatgggtatgggcatgggcatgggaatgggcggactcacgggcagcctgggaagacgcacattgcatcagcaaccgacgcactttcgccaaggagcctgcggcgagtttgtgggcgttgagacgctggatatactgcagggcgtggcagctgacagtataattggcatccacaccagtgccataatgcccactgccacaagcacttctcattatgttccgctgcagcataatccctacgtggactttgtgcccagctccctaatcctgagcatggccccgcctccgaccataagcggaaacctgagtggaacggcgatgcagacaatgccggcaattccaacgattccgaccatgtcgctgcccacccagacgccgaagacgcagaagcgagtgaccatcctggagccgacgtcccgcacgacattcgaccccctgctgcccaccatggtggcggcggtggtctccacatcgactgtcaccagcacggcgactacgacgccagccacgcccacacccacgcaaagcggctgcagtgggggcaatgatgcaacgctggatcggatcacgctcgatctggactacttgctgaacaggggcgctgcggatgccggcgaagcaggcggcgttgccccaccgcccaccagtgatgatggacagcagaaacaatag

SEQ ID NO: 30246 - protein, 802 aa, DROSOPHILA
MFPQIVYNFSWHGIISSSLASLLLLGISTLIAIALAIHTELMPKKYLQIGSKPATPTKRRLRREQERERERERDRDRERDRELDSLSNITQIRAQSPLGATTASTTITTTTSSSNPGQRRPPPSSTAGMRGAIGISWLLPLLFAVAAPLICSIIGQWPRHWWLEVLWTGSASPEAGAGKDEAGDSDSGAFYSAHSLLNGDNLLLESEAVMGNGTSSPPTETSSASSSSSSTGRAVDDDVATSTSSITSIGSASNSGFSASWSGITSFSTSTSTTSSTSTSVAALAAPLTSGPGDSSATPSPSLSFILFVCIDLLFILLFFALFAILMKKLLWLWHKNRNVHTHPLDKFNLALSRRFGLLYRAGGLLLAKICNDGLFIAYVNSSPDTLLAYPFGISCILLGSAILICFVIKAESQLRGPPFLSSNGSSQNSSLKQAKFNTSRSSLDENYCTTTTTANVNSPLSFYTNHDKEKENDCAVSLSMSNAGVSAAAVGSLASSAGVVGGAPPLQSKVGLDMSGAQGSGVPLPLTIISTAPRCQVAADGNTESFLGDRQTLSVAPSPDTRCCAILGGGTAYDAYTMGMGMGMGMGMGGLTGSLGRRTLHQQPTHFRQGACGEFVGVETLDILQGVAADSIIGIHTSAIMPTATSTSHYVPLQHNPYVDFVPSSLILSMAPPPTISGNLSGTAMQTMPAIPTIPTMSLPTQTPKTQKRVTILEPTSRTTFDPLLPTMVAAVVSTSTVTSTATTTPATPTPTQSGCSGGNDATLDRITLDLDYLLNRGAADAGEAGGVAPPPTSDDGQQKQ

SEQ ID NO: 30247 - DNA, 2654 bp, DROSOPHILA
agctatgttttattcccttttttttagaattttcttgggtcgatagccaaactaaaatacatatgtacgtatgcctacgtctattatacacttctagctgactagctgggtttctttattgtctttttatgggccatgtgcccgaggatacgaacacagacaagaaaaacacaaaaggtgttagtgaattttattcaaatttgacgctaatcaaaagctgcgtgacaggaaagttaaaagcagcgagaaatccaattcgcttgggttttgaattcgagctgaagttttcccagaggcatgatttatccctgatttgggtttgttttcccgattagctggaggatattttcattcggattgtacttgaaataacaacttggtggaatgaaacattgttatctttaaataccttgatccgatttgatttagaattcattaaatgtaaatatattttccagtgaaatgttcatcttcattatatttaataattaagctcgaagaaaatgaacagccattgcaaaatacagtacaaaataaaacagaataccgtttaaataaatgataagattaaaggtgttaaattatttcttcgaaaaatctggaaatattcaaaactctcctgttttctgataaagtcctttattggcgttaaacaaaatcacaagcggatatgaactcttaaacgttatattgaagctaccttaagaaaattctacaaaatgttgacttcgccatatttgctcacgtttcgaacgaaggactacgtgctatctaagctggaacccaggaacaatccgagtgattttggtttccacgaaaaactccaacgtgcatgtgcgccaggtgactggaatgtgcttcgactgtctctccgtctgatatactgcaactgccctccaaccgatcgactgcctctggcggcctaaacgcatttggacttccgcctccactttggtatgagcaagcggaaccgccgcgcaaccgccagacgtcgccggcttcatttgtccatcgccgtgccagcaggattagcctctccaccatcgccgtccacatccgcctgctcgatagccttgggcgccgtgggatcggacacgctgccaaagtaattgcccgtgggctcaatctcgatctcgcgctccacgtcgtccagtttcggtggtgctggcaccgtaatcatcagtattccgtccgcagagaaggtggcccgtgcctgtgtggcatcgtagtgccgtggtagcttgtaggatcgcgtaaactcgcgagtgatgcacaactgacccttctccgcccggtcatccgcctgcttgccctccacgcacacggtgtcgctgtttttggccttcaccgtgagctcagagatctgaaagtggtgcacgtccagcaccaccttgaaggtgccccgacccagggagtccggttcggtgccggtctctatgaccactcgcccaaccagacaggatccatggcaccaggcactgtcgtccatccgcaagtgaaagtcccgcgcacatacgtccaggtcgtgggagagatagtagtgcctctgccggcacttggactccccggtggaccagtggcgacgcggcggttgccagtgatggtgaccatgctcgtgatcatgctcccaatcccagtcccagtggatgggcatgactgcgccaccggttcccgatgcacggactccggttcgttggacacacggagcaagcgtgttgatttttggcttatgtggccaaaaaaaccgttgccctccgcccggttcgactcttacaagctaactgagtggatgaggttatggtaatcgctggaacttggagctgcacaactgtacctggcaccaaagccactctaactgagcatatttctgttccaccttcaatggcgtttttaagtacagtgactcttcagtaggtgcgactccaattcgatgcaggaaaggatcatttagaaacatgcacgtaaaccaaaagatattcttttaattaagttggctacaggtaaatggctttttactaagtgataactctcaatcagttacatatatcaggattttactgtatcgcgttccttcagtgggacacgcgttcccgggaaagtgggtctcagccttgtccgacaactcgaactgtttgatcaatacccgtcccaccagcagtccaatcagccgcggagcttcgtccttttattgcacaagcggcgccaaggagccggaatcggaagacgggacaaggagagcacagtgcacacagcgcgagttgagccagttatgagataatgccaaaaattttgaatcaaaccgagtgctggaggaatggcgaatggtgtcactaattgtaccattgtcaccccgccacgggaagagcaaagcaaatccgagcaactgaactcggcagacgagtatggcagacgcattgtggcaaatgaaactaatgaaaatcgtgaccccacagcaacattggatacttatgcactaagagaaactgcatggatatctatgaaaatcgaaagctactccatgaagagtggcaaaagtccttgttaaaattgtatacttattttaaaatttgaaatacactttttttagtgcgttttttttttcagtgtgactgcagtgctatccaaacagctgttaacagggtgctatcttttac

SEQ ID NO: 30248 - DNA, 654 bp, DROSOPHILA
atgcccatccactgggactgggattgggagcatgatcacgagcatggtcaccatcactggcaaccgccgcgtcgccactggtccaccggggagtccaagtgccggcagaggcactactatctctcccacgacctggacgtatgtgcgcgggactttcacttgcggatggacgacagtgcctggtgccatggatcctgtctggttgggcgagtggtcatagagaccggcaccgaaccggactccctgggtcggggcaccttcaaggtggtgctggacgtgcaccactttcagatctctgagctcacggtgaaggccaaaaacagcgacaccgtgtgcgtggagggcaagcaggcggatgaccgggcggagaagggtcagttgtgcatcactcgcgagtttacgcgatcctacaagctaccacggcactacgatgccacacaggcacgggccaccttctctgcggacggaatactgatgattacggtgccagcaccaccgaaactggacgacgtggagcgcgagatcgagattgagcccacgggcaattactttggcagcgtgtccgatcccacggcgcccaaggctatcgagcaggcggatgtggacggcgatggtggagaggctaatcctgctggcacggcgatggacaaatga

SEQ ID NO: 30249 - protein, 217 aa, DROSOPHILA
MPIHWDWDWEHDHEHGHHHWQPPRRHWSTGESKCRQRHYYLSHDLDVCARDFHLRMDDSAWCHGSCLVGRVVIETGTEPDSLGRGTFKVVLDVHHFQISELTVKAKNSDTVCVEGKQADDRAEKGQLCITREFTRSYKLPRHYDATQARATFSADGILMITVPAPPKLDDVEREIEIEPTGNYFGSVSDPTAPKAIEQADVDGDGGEANPAGTAMDK

SEQ ID NO: 30250 - DNA, 3507 bp, DROSOPHILA
acgcgttgtcccagaatggcgaaagccagcctgccaaggcttaaaattttgttaatgaattgcgaattctatcggcatctgcaccgccctgcgcaccgcgtactcatttaaccaatcctttccaaggacctccgtttcgctcgtttgccattcacgcaacacatttaaagtttgagctttgtggtggtgctttcggctgcaaggcgaattgtcaaggcaacatgacgggcggaaagtgggtggtgttgctcctggtagggctaagctgctcataacccctgccaagtcgcccaagtaacagcccctcgttagttacggccatatgctttttatgtaatacacccacactacccgccagccaagtggatccgaaagtggatctgaattgcggggttgtggagcctgtagtcggaagtctgaggcattccggaatggaatgggcatgccattcgtatatgttggccaacacatgtgttccggctggcccactctgtaggatttatgatcaatcattcggttaggcttactgcggttaggtttcggtctggtccagaactcagtatcccagccagcctccagttcccagctagcaacttaccaacttgtaccccgtccttcgtccatggccactgacaaatctttatctttgccctgacttatttatcctttttggccatttcatttttattccgcctggcgtttttatgtcatgtttattgatgtgtaaaagtcataaagtcaaattgaacacttgtgacgagagtcatccctcgcgatttccacccgtcttcacccgtttctgactttccgagtgtgacattgatttttgccatattctttcgattctatactattttattaaaactccagactccgtttcacagttttctaggcactactccattctcattccatattccattacgcgggcagcaagtttatggcatttcgagctggttgtggaagataagcagctgcgacatgtatatatatagttcactcacctcgtcgatttgctggcattaaccacagcgccatccttgaaccactggaactgcatccgggatgagccttgggccgtgcaggatatgatgaactcgctggcctcgcggactcctgattgcggctgattgacggtcagctcctgcgaaaggggagacaatgtcacactaattagacacaggatggctgtggttcggttttcggttcgaggttttgagctcatcggtttgggattgcttgtgttcctttgggtgccagtccgtcaaacatttggcagtggtgggataggatgggggggggatataccactgaggtttggcggcttgttcgtcatgttaatgccacttaattgccggccaactctgatgagtccaattgttcgggcgaactggccgcaattaataaataattattttcgttgccgttttcggttcgagtgtcaagtgccacactgttgacatatttatgtgcatatttattaacacggcactttgctacattggctattatgtttttattccggcacacggctcaatagttaataaattattgtttaatatgtatcggaaatggatggtagtgacccacccatgtgggtaggtggccctatatatatttattacgcttttaatagccgagatggtccggctcggatgcgaattaatgaaaataccattcggcgaaaatcaatgatggaatgcctccgattgatggatgtgcccagagtgcaaagtgaaatataaaatttatttgtgcacaaatttcaataggacagcgtagagctctataaataaaacactacgagtgtctgcctcgaacgtagaattccgtaagaatcaattggtaaatgctttttttactagctactcaccagcaagccgagcggaggattctcgtcgaagtgatggaaattcgccaccagtgtgaagtttcctatcctgccgcgctccaccatccgtgtgatggcatcccggatacgctgtgagtcacctttcacgccaaagaagtgaaaggtgatgtccaggcgatcggtggaatttgatatcagctccagatcgctaatctttgtgatgttgaagttgcgcaggacacgaccaagctaaaaaaaaaaaggagaacatttcatttagttcagatgcttaacacttcgttgtattaaagggatacaactttggccaacatattaacccttaaccattttttgttcgtagcctagctcaaagccccaagctcgttgaatgcgtcgccactttttcataattcgaaattaatgataatatattcctgcgaatagcactactgggcattgggcccgcatcggaatacaggcacacattggccaaaaagatacgaaaatgttggagcacaactagggctcacctggcatgccaggatgacgcaggagagcgcttaaagtgtccttggatgctcaccttttcggttgctttgttcttatcgcctggctttaagctgcgggccaagcttttcccgctcaaattggccataaaaggcatttttccggacttgcctgcaccgggttgtgtcagaatgcccggccggcctgcaggactcagctcaactcaaggcatatccttgtttaaatgattatgcattatgctaaagccattttccttggtaaagtcggtgggtcggtgggtcgttgttccacctaagtcctagtacggttgttagttttgttgtccgaaagttttagcaactttatctgtgttagtccggctttttgttgcatgcttaaatattcatactattgagtcacatcttctttatgccccaagagcttgaagtcaatgggtgttttcttcttttttttttcattttcaaaagagccaaagctgcaaagttcttgaattcccaatttgattgtgataaaggagtggactttacttttaattgggaattatttagtgacccacaaaggggtgttaaacttgcagagttcgcctttttgttcgactctcagacataaccaattagagcgttttaattaagatgccactagacgctcacaatagtgcgggaaaatgggaaaaacttggcggaaaatgtggcaagccatgaaatcaaagctgacagggaaagtctcctcgagcacaccggtcactatggtttgtgtggccaaaacttattgaaagtaattatgggccaccatcgcgcctttttaaaaaccttgaactatttcaattggctttttgatgcctgggcttacctattttctttttttttcggtgcaccactgcaatttgtaattatttgtgccgaatgcgaaaaactaatgcaattctggtggcctaattagtgcgacgacgatgggtactcatacaaattactggcaggcagcttcattgttgcggggcacacaaacacttggatcgacaataccagaatgctagagaatgccagatgaaatccggctgtacaagtggaaagcaaagctcggaaggatggagtctccggctttgcactcttcacaagtggtcgcggccg

SEQ ID NO: 30251 - DNA, 444 bp, DROSOPHILA
atggccaatttgagcgggaaaagcttggcccgcagcttaaagccaggcgataagaacaaagcaaccgaaaagcttggtcgtgtcctgcgcaacttcaacatcacaaagattagcgatctggagctgatatcaaattccaccgatcgcctggacatcacctttcacttctttggcgtgaaaggtgactcacagcgtatccgggatgccatcacacggatggtggagcgcggcaggataggaaacttcacactggtggcgaatttccatcacttcgacgagaatcctccgctcggcttgctggagctgaccgtcaatcagccgcaatcaggagtccgcgaggccagcgagttcatcatatcctgcacggcccaaggctcatcccggatgcagttccagtggttcaaggatggcgctgtggttaatgccagcaaatcgacgaggtga

SEQ ID NO: 30252 - protein, 147 aa, DROSOPHILA
MANLSGKSLARSLKPGDKNKATEKLGRVLRNFNITKISDLELISNSTDRLDITFHFFGVKGDSQRIRDAITRMVERGRIGNFTLVANFHHFDENPPLGLLELTVNQPQSGVREASEFIISCTAQGSSRMQFQWFKDGAVVNASKSTR

SEQ ID NO: 30253 - DNA, 2399 bp, DROSOPHILA
aatggctataaaatatggaagaaaaaatgcaactgaaagttggaagccatccaagtggctgaatattttgcaaaaatctgcttcaaatgcccaacacaatttgtatgctttttcaacttttaaatgcaacgtatactactgaattaattaaaagcaaccgaatcgatatgtatatatatatatatatacacaggcagctctaatttggattgaccttagggcggattgaaaacgcgcattctctgtaaatgactctaaaataaacaagttaatgcctgaaaatgcaatgcgagaatgttgcacattctgttggacattataacaatgcaaatgcatgcaacaaattaacacacggctgtaagctttttaatttagcacaaaaagggccagcaccatttgtttacacgaaactaacaaaaagccataaatgttttcctgcacgccgggcgtatccatttttccgctccgacgcgtcattcaaagttcgtggcattgttgcacaaaaattaacacttgtttgccacgccacgcccattttctattttgccctcccccacagtggcgccctctatcacggcctggacgagcgtgatgcccagatggacaatgcgctggaaagggctctggcccaggcggagaacgatgccacattcaggaaggtcaagcggatgagctactccagcaatgcggctggcgaggtgaggaatattctgcacaggtgtcagtacttcgctgattaccaaattaggttggagctagtctataagtacttcataaataccctttttcatagttactttatacatatcccttatcagttaacatattatttatttatcaaaaacatttgaatttaaactttctttaaaaaaataatttattatttgtgggcccagtttaaaattgatttgtttacttaaaactaaagctgtttaggagtacagggtagcattgccttgtcattgttgttatcattcttgagcgattgagcgtccagtgcttagcccgagttttggctcctcctattgttcctgcctcggttgctcctcctcttcttgatcttcctggggcggctcaccttacgcctgaaggtcctcctcacgcgcttcttgccactgcctccggatgaggcggtggtcgtgtcggtggccgaagcggctgcggtggtggtttctccatcggcactggccgctgtggttacctctgcggcagctgtggttacctccggagcagccgtggttgtggtacaatcggcttcagctgcattcgcggtatctgtgcaatcgatgcaagccgtatcggtgggatcatcggcacacgagacggctagaccaactggcagatgggccagaaagatggtcaccaggagggagccaacgatcagtagtgatttcctcatgttgctgatgcttgcggcagatggcgaatgataatctttccctatgaaatccaatgcttttatagcaactacaccaccgattgatttcaattcgcacaagtgtgcacaggtgtgctttcggctttcagccagttttcgcactctatcagtgtttgattagtcattgtgcctaagattgggcctaacattcggttcaatcaaaatatttgacaagtttttattcatcaatgggtggatgggcatatgccgttgtgttataatatttacacagttgctacaacactctgtttgccagtcatccatcgatttttgaaataaaatgtcaagcacatctgtttatctgtgtgtttatctgctgccaaaacaatgggtcacccccttaaagaacttatttaaataaactagttttgaatcgattcaagtttggccaagtttcgggcgacaggaatatctcttcaaattgcatttctcattgccccaaggaacggaaggccaaccagcatttaagcttaattgccggcaattatttggcggatgggcagagagcagacgttggccaactgacctcaatcattagttgataagccctgcgaggcggacaagaaaatgcacggtgaccgggagaaaaagtgccggccaaacgatgcgacaataaaccaagttgggaagatcataaatcatgggagcccagaatgggaaagcaaaagaaggggtcacttggggcagttgcaacaaaaaaaaaaaaaaaaaaacggagcagcagagcaacaactgagtagttgaaaatcatgtaagatttatggttaagccagatgaacctgttgcaagacgaaaataaactccttacggttttcatgcactagatgaaactagatccactggacaaaatctgtcatattgtagcataaaaaccgaagcttggtgcatgcagctcagcgcttaagaccttgtcattgggttttggttcagtgtggtgcttttttcagcacgaaaatcatgc

SEQ ID NO: 30254 - DNA, 399 bp, DROSOPHILA
atgaggaaatcactactgatcgttggctccctcctggtgaccatctttctggcccatctgccagttggtctagccgtctcgtgtgccgatgatcccaccgatacggcttgcatcgattgcacagataccgcgaatgcagctgaagccgattgtaccacaaccacggctgctccggaggtaaccacagctgccgcagaggtaaccacagcggccagtgccgatggagaaaccaccaccgcagccgcttcggccaccgacacgaccaccgcctcatccggaggcagtggcaagaagcgcgtgaggaggaccttcaggcgtaaggtgagccgccccaggaagatcaagaagaggaggagcaaccgaggcaggaacaataggaggagccaaaactcgggctaa

SEQ ID NO: 30255 - protein, 132 aa, DROSOPHILA
MRKSLLIVGSLLVTIFLAHLPVGLAVSCADDPTDTACIDCTDTANAAEADCTTTTAAPEVTTAAAEVTTAASADGETTTAAASATDTTTASSGGSGKKRVRRTFRRKVSRPRKIKKRRSNRGRNNRRSQNSG

SEQ ID NO: 30256 - DNA, 2501 bp, DROSOPHILA
caccacgccctctggcggcagcttgtaatcagtttaaagtgagtcctggccactaaaactcaattaaccccatttgaatggagcacgaggcaattgaaaaaacacagaaaacatgaaatgaaaacgaaaacgaagcgaagagcgagcaaatcaaggcaaaagattaaaaacggaaatggtcggccattgagatagggtggatggttggatggttggatgaatgggtgggttgatggctgggtgaatgggtgggtggatggatgggtggatggatgggtgggtggctcagatggttgccaaaggttggcagcatttttcacttaaaaccgcattgatactcaattaccaggtcgattcccccgccagttggacaaaacaaacggcggacgcggagctcaggaaaacggaagcactttgcaacggaaatgaaacatcaattaaagtcgcacaccgagcgaccgagcgagaatccttcgaaggcgaaatgtggcaggctgcaaaactgtttgcctcccgtcaaccagtcagccagtttgccagtttgcctacacttcgtcctttcgtccttcgttgcaacgaggcacttggaagccgctgcagagcgaacacttgttcggttgccacagggcctaagggcacatttcgttagtttttattgcttaattgtaatttcgcatatgggaaaacggaaagtttaattggctccgctgaagtatcagtcctgaagtctcacaggcgatttattagaaagagttggcagttgggaaacaaggccagaatggcaatctaattgggtagagcggaaataagcagctatttttctttcaaagtgttgcgatattagatcatttgaaatcagaaagtggtaccttttactttaatgaattctccttgattttttcagctaaccgagcgactggcaaagatagccggcctaaaccgcctaaagacagatggtgatccaggacaaacgggatcgggcagtctgtctggcagtcgaatgaactccattccgaactcccagttgaatgtggatctgaaggcgctggacaagctggtaagcactcttctggagcagcacacttcgggtgccaagggagccacctcctttaagcccgaaacgggcacacgcactccgccgctgcagcgaatggcctccaagaagctgaaccgttggcgtccactctcccgatctgcccacagctacaagcgtcacgagagcagtgatctcatcggtggtagcttcacccagctgatggagcgcgttgatccgccggcgacttccgcccagcatccacccaacatgccaacgatcatggagagcagtgccggcagtccaactccgaacaatgcccagcaacaggcgggtcatccgcccatgtggaatgcatccttggacgcgacgccaggtgcggtgagaaatgtgctgcacggagcagctagtggagccagaaatgaggccgaggatcagctcaatttgacgcaaaactatgtggactgagcattctcttatattataaaaaatattttacaaagtgttgtttccaaaaattattttatatttatttgaagatgatattgatataaataaaaatatttgtgctttaaattatatgataaagttggggataaaatgctggatttccatgaattatatattatatactttgcgtgtaaaaagcccaaatatttcatttaaatattaccaacatattttttcacgctattcaaacatttagtgacgcacgtactttctgaaaagtatcatttgagtaaacaagtaatatcaacatattgtatgcaaatatgtgtgctttttttatattattcgtatcactttaaagtcttcttaagagtatcttgagctcacctgtctttccataacgcccgacaactgctcacggtcggcatggcgatagtatcctgtaagattggcgcccagtcgcatggttacctcgtatcgggtttttccactgcgtgccgcattccgattgcctttggatgcggaataactctggccaggaggtgagatggagcggccgaaattgtcaaagtcgcaggcctggtggcattcgatggagctggagttgctggtgcagcctgaaaggatggataacatttggtaattgcttccataaaaggtcgaagctaagacatggatgtgtatgtgtacctatgtggaccgacacctgtggcaacattaacccctgccccgtccagtgagtggatggagatgctcttgcaattgccacaagaagaatcctttaaatctccttggggcatggagctgaataaaggacataacatcatgcagcaaaaatatgagaggcatgtgccaggtattcgtttggataatctctcggttcttaaccatcccatcaagctgctcttattcatttttgtcatagccaaaaaaaaaaaggtatggagtctctaaatcgattcaattggaatttttcagtagacatccgcttttggtgaacatttctcggtgcacattt

SEQ ID NO: 30257 - DNA, 501 bp, DROSOPHILA
atgaactccattccgaactcccagttgaatgtggatctgaaggcgctggacaagctggtaagcactcttctggagcagcacacttcgggtgccaagggagccacctcctttaagcccgaaacgggcacacgcactccgccgctgcagcgaatggcctccaagaagctgaaccgttggcgtccactctcccgatctgcccacagctacaagcgtcacgagagcagtgatctcatcggtggtagcttcacccagctgatggagcgcgttgatccgccggcgacttccgcccagcatccacccaacatgccaacgatcatggagagcagtgccggcagtccaactccgaacaatgcccagcaacaggcgggtcatccgcccatgtggaatgcatccttggacgcgacgccaggtgcggtgagaaatgtgctgcacggagcagctagtggagccagaaatgaggccgaggatcagctcaatttgacgcaaaactatgtggactga

SEQ ID NO: 30258 - protein, 166 aa, DROSOPHILA
MNSIPNSQLNVDLKALDKLVSTLLEQHTSGAKGATSFKPETGTRTPPLQRMASKKLNRWRPLSRSAHSYKRHESSDLIGGSFTQLMERVDPPATSAQHPPNMPTIMESSAGSPTPNNAQQQAGHPPMWNASLDATPGAVRNVLHGAASGARNEAEDQLNLTQNYVD

SEQ ID NO: 30259 - DNA, 2714 bp, DROSOPHILA
ttgtaccacaaaccctctcacgtcaaactcaattgctgagcttattcataaaacccactacctggatttttgtcagggaaaatgcatcaagctttcccgcttttcttttgacttttggctgactagcgtgtgtatgtatgtacatacatacatacgtttgtatgctgtgtgtacttttcttttcactgacatgggttgccgtccattgtttcagttcagacgtcctccacttttccgccgtgggaaatccggccgggtttttcgcttgttttcgggctccacttattgaaacattacaaatgtatggctcccacttggttttaggatgaagcaagagcggcagccttgaaccgatcccgaatccaaatccgaatccaaaaccaaagccaaagccaaagcgaaaagaacgaaagattgatgtgcgcgcagttaacaatttcaacggctaccggttggtgatttccatcgccatgtatatggatttgtctgaattttaaacccaacattttcactttcccttcgccgtattttgagtgtccacacggtggaaggtcgatgggagacgaaaaagttttgccttcgcttaaatatgctacatgctaccggacgcaggtgctcatgtccatggggaaaccaggctggattgctcgcggagttcacatatatttcagttgaactgccttttgaactttagcgaaaaactgacttttggctggctgtaatcggaatgtttaactctggttgcaaataaactcagtgcaagagtaataaattaaagttctatgattaccaatcaacgtctatctaaaaaaaaaatcgaaggcaacgctgtcaattaaaaggtccatgcaaaaattactcatacgccatgttgaccatattcagtaaaatgtaagaactatcaataatttagaatggttttcaaaccctttcttgcaatttaactttttagaactatttaataattatacttaattttagcacaaattttgaaacgaactcacctgtaatcttcacttgcatagcaatctccaaggaatctgcactgcaacgtattgcactgtgttgtcttcacctcgttctgcacttcgtaggtaatgttgaatccatagacgtccagcaggcgatccagggcacgcaggtgtgtaccatccagggtggccatggtgaaacggatctccaggtactggctatggaacttcacccatgtcacctgcgtgacatcgtcctcggtgagcgtgaagacgcggtgggctggtaccttaaagtcatccgagtagtacatgtactccgtaaacttaagcccgctgagcacgtacaactgggtcaggtacaccacaatggacacattcgcctggccctgcggcggcatatcggacgcatcgattatccacacgcattcgatgggcgtggcgaatcggtgcgggaaattgggcgtctggatgttgccatggcgtgcctttagcatacccccgcatcctggactggacgaggaataggaggagtggctgtgtccgccggcggcatgctctccgccggcaaatgcgttcagcgcaaagtgattcttgccgggctgaaagggtggcggcggtgggagcggcacggcgggcagtgagaatttctggtctgcatctggaggcgtctggtgtggcaggaccgccggcagcaggagcgtcagcagccatatggtcgccgatggccggacgagggtcattgacttggctttggcaattggggcccgctcttaaggatttccttttgcttttttcctttcggtttcggttttttacgccgccagctagcttatcattcggcgaggacatgaattggaatcctggcggctgccacggcccagtcactcattgacatttggcccatttttctgtctcttttttttttttggccaactgcggcccagctgcaagcagagaagaaaaaaagagagagggaaaagataaagttgaatttttagttaaaaccattttgacagctgtcgtttgcatttgaataactgccgctggcttttcacgttgactctccgctgtcagcgtgaaaaaagcaatttggaaatccactaaaacgcgaaggagctcgaggagcgcatcaatcatggccttcatgggtgtcgtcgagcgtggctggtcataaaacaaaagcacaaagggtcccgcctctccaaattgttttcccatatttcaagagcccactttcttgcagccgccacatatttactttttttttttttttgaacaaagacatgccccaaaatctggcgggttaataaatgtattcaagtggtggctagaaatgcaatcaaatcttatcaaatttagacttcaattcaaaagtaagtgcatgtagcatgtggcatgtggcatgtggcatgtggcggggcaatgcaaacacagacggttgtaattaggatgggctaatcggataagtaaaaacttggcaagccaaatcaaaatgcgaattgccacagagccacaggcaagttgtcaacaattctggccaaatgccgctgcctgggaattgggatgcataaattattcagcattcatagagtgctatctttttttttttttttttattatttgacttacggtaggaaaattaaaatcttctaaagataccacctaccgtccgtaggtggcatgcacgattcataagccctattggaattatgcctacgtactaaaacaaaaacctccgcg

SEQ ID NO: 30260 - DNA, 714 bp, DROSOPHILA
atgaccctcgtccggccatcggcgaccatatggctgctgacgctcctgctgccggcggtcctgccacaccagacgcctccagatgcagaccagaaattctcactgcccgccgtgccgctcccaccgccgccaccctttcagcccggcaagaatcactttgcgctgaacgcatttgccggcggagagcatgccgccggcggacacagccactcctcctattcctcgtccagtccaggatgcgggggtatgctaaaggcacgccatggcaacatccagacgcccaatttcccgcaccgattcgccacgcccatcgaatgcgtgtggataatcgatgcgtccgatatgccgccgcagggccaggcgaatgtgtccattgtggtgtacctgacccagttgtacgtgctcagcgggcttaagtttacggagtacatgtactactcggatgactttaaggtaccagcccaccgcgtcttcacgctcaccgaggacgatgtcacgcaggtgacatgggtgaagttccatagccagtacctggagatccgtttcaccatggccaccctggatggtacacacctgcgtgccctggatcgcctgctggacgtctatggattcaacattacctacgaagtgcagaacgaggtgaagacaacacagtgcaatacgttgcagtgcagattccttggagattgctatgcaagtgaagattacaggtga

SEQ ID NO: 30261 - protein, 237 aa, DROSOPHILA
MTLVRPSATIWLLTLLLPAVLPHQTPPDADQKFSLPAVPLPPPPPFQPGKNHFALNAFAGGEHAAGGHSHSSYSSSSPGCGGMLKARHGNIQTPNFPHRFATPIECVWIIDASDMPPQGQANVSIVVYLTQLYVLSGLKFTEYMYYSDDFKVPAHRVFTLTEDDVTQVTWVKFHSQYLEIRFTMATLDGTHLRALDRLLDVYGFNITYEVQNEVKTTQCNTLQCRFLGDCYASEDYR

SEQ ID NO: 30262 - DNA, 3014 bp, DROSOPHILA
tgcttaaaaacaaaggattcaattaaattattttacctattaaaattgttttttcttttttgaattcgcgctgacagacgcacttcaaatttttacaagccgcctgacaataaaacaacgaatcgaactcattgaaaattattcgtttgactcgcttatgctaaataaatcgaattcgattatgagtagattaaatattgatctgcataatattaaagcgattatttaaattcctcgtacccctccaatccttggatacccaaaagggggggcataaaggcatctatcggcgtatttttagaaaatacctagagcatggcgagggaaaataaaacatattttctatatcgccgttttgggatgagaggatgagaggtaaactgctgacagcgctgaccagaaactgcatcgccaaagccatttatcaaaactaatagccgccaagataaagcctgaaaaagtggaaaacgatgggcgagaaagtaaagccattaggtggaatgcaaccagaaataagaaaggcaagctagcatcgataaagatgaaatggaagtatcggtagcaggagcatacttttgaaacaccaaaggtatatgtttcaactgaaagatatagcaagctagaagttttccaacattcacttgatcacaaagtattagaatatatcaaacagaagcaaaaaaaaagtaaaatgcaacgatcaaatgaagagtttcgtgaaacaaacgctccaatttgcaataatcaacagcaaagatgtgttgattttgtcaggaacaacgcaaatataggcaatcgaactgaagaggtgctcaatttactatgggaactggccaacgagtattggcaatggtttctacaaaaacttggccaactcaagagactctgttttcgtcccgaatgccgcatcgatccggagattctggagaggattagccaaacacggggctggaaaacgtcagtcattcgatttattgagtgccatccgagcagctcgttaatggcatttctaaccaacgatgatgtggttctgatctgcgacaaaaattacgattgccccaccaaaattcaatccgttaggcaaaaggacaccacctgtgtcgcctttcgtccttggtcgcaaacttgtgaatttgccgtgggttgtgcagccggtatatgtttgtggtcggatagtcgtcgtctcaatgccaatcgaaatattcgacgtatgatgggcactcatcacttgcaagtcctgcaggataaagggcacaactatgtgacttcgatgcaatggaatgaagatggcactattctggttaccgccgcatttggctcatcgcacatcatgctctgggagccggactgtcagcaaaagatacgtttgataccgaatccgaagagtttaggctccttctccctactgcgttttagtcccgatttccatgtgctcttctgcgcctcctgcgatgcgggcgccagtctttgtcaactgaatcgatcgaaatggaagttgaaacagatccttgggcagcaacgcattcaatcggccgtctggacaacatgcggttccactttgctctatgcgtgttacggcagcactcgcgtctactcatgtaccagcgatggtgaggacagtgtcttcctgcggccccagtcaatatggcgcgttcagttgataatggatctgcagcttgtgaccacctgtgctggccagcgactttgctgcggtgagccccaatgcctcgccatggatccactgggcatctacatggccagcatcttcaaggagcagtcctttgtgctgctctgcattctgcatacatcgcgatggggtaatgttaaactgctgccagtggaattcatttattgcgatatggatggtgaccaatatccagcttacatttcctttggcgttttgaaagcggaaattagatttttgataatcgcctggaatacaggacactttcagcgatatgacatcacagcgcagtgtttcagagatgcccaactatatcacaacattaactaaaatataaatgtattaataataaaaactttattcgaatgcaccattttgcaaggcgagctattaaaatctcacatgaatattcagcggaagcgcttatgcaaatggaaaagaactcaagttggcgagcaaccagtttcaggataaccaccaccactacttccttcgccaatttcagcccaaaaaaatacgtgaatgtcctttatgctgctggtattttgtattcacctgacagccgtgaagtaagcttaaaggtaataaatctttgccgcgatctctgattgcagaccgaaaaattggttttacacagactttactcttttgtaattgacgtttttcaggacgcgaaggttacgcaattgaaaataatgctatcaaccgattgtttttgccaaaaaaaattccatttgacatacgaccttttgccgcatccgtaagattaatatgtatctatttgctttatggacttattctatttttgggttaaactgctctttaacgactccctgggcactaaattaaaatgacataccggacataccggaaaaaggaaaacaaatctaacgagcaaatctcaaaggatactgacgattcaaagttaatctaaggactaatggaaattgatttcatgcttcgtttgctcgctctaaatagccatttgtactcggtttttaagtaaacaacagaatagaaaaaatatgcaacaaattcgcaaactatcttgacaagtaaataatgaagaaagaacgtcacaatcaagagcgtttacccacttgactacttcaatattgaccaaccaacaatgggcacaaaaaaaagaaagcaataatctggttgcaaacggaggcaaaaactgcaagtaaaattgagtagggaaaccacataatcgcaatcttcagatccactcatcggcgaaccaacattgagtttggtctgcaactttccctaggtaaacaacttactaccaaaatgcctttcctgccataaagtaatttttccgagg

SEQ ID NO: 30263 - DNA, 1014 bp, DROSOPHILA
atggcatttctaaccaacgatgatgtggttctgatctgcgacaaaaattacgattgccccaccaaaattcaatccgttaggcaaaaggacaccacctgtgtcgcctttcgtccttggtcgcaaacttgtgaatttgccgtgggttgtgcagccggtatatgtttgtggtcggatagtcgtcgtctcaatgccaatcgaaatattcgacgtatgatgggcactcatcacttgcaagtcctgcaggataaagggcacaactatgtgacttcgatgcaatggaatgaagatggcactattctggttaccgccgcatttggctcatcgcacatcatgctctgggagccggactgtcagcaaaagatacgtttgataccgaatccgaagagtttaggctccttctccctactgcgttttagtcccgatttccatgtgctcttctgcgcctcctgcgatgcgggcgccagtctttgtcaactgaatcgatcgaaatggaagttgaaacagatccttgggcagcaacgcattcaatcggccgtctggacaacatgcggttccactttgctctatgcgtgttacggcagcactcgcgtctactcatgtaccagcgatggtgaggacagtgtcttcctgcggccccagtcaatatggcgcgttcagttgataatggatctgcagcttgtgaccacctgtgctggccagcgactttgctgcggtgagccccaatgcctcgccatggatccactgggcatctacatggccagcatcttcaaggagcagtcctttgtgctgctctgcattctgcatacatcgcgatggggtaatgttaaactgctgccagtggaattcatttattgcgatatggatggtgaccaatatccagcttacatttcctttggcgttttgaaagcggaaattagatttttgataatcgcctggaatacaggacactttcagcgatatgacatcacagcgcagtgtttcagagatgcccaactatatcacaacattaactaa

SEQ ID NO: 30264 - protein, 337 aa, DROSOPHILA
MAFLTNDDVVLICDKNYDCPTKIQSVRQKDTTCVAFRPWSQTCEFAVGCAAGICLWSDSRRLNANRNIRRMMGTHHLQVLQDKGHNYVTSMQWNEDGTILVTAAFGSSHIMLWEPDCQQKIRLIPNPKSLGSFSLLRFSPDFHVLFCASCDAGASLCQLNRSKWKLKQILGQQRIQSAVWTTCGSTLLYACYGSTRVYSCTSDGEDSVFLRPQSIWRVQLIMDLQLVTTCAGQRLCCGEPQCLAMDPLGIYMASIFKEQSFVLLCILHTSRWGNVKLLPVEFIYCDMDGDQYPAYISFGVLKAEIRFLIIAWNTGHFQRYDITAQCFRDAQLYHNIN

SEQ ID NO: 30265 - DNA, 3383 bp, DROSOPHILA
tataataacatttgtattagtaattaaataaaaaggatatacaaaatgtattggtcataagtgtttttttatgaaaaattttaaagagcatgctatatatttggcagagagtattctacagtcgagttaaaactgttaaacgaaataatcaatgatactcgatgtgacggattctgtttgtaactgcttagtttgcagtcgcttacatacatatgtacatatgcacgtaagtatgtaagagacatcaggttgctgtaacagtagttcaataaacattccattgtttttacgctaatttcaatcttgcattaaatatttatttgccaaggaggactgcacagaacaagtaacaggaaatacatgcataacaaacacaattcgttagcaacttttccctaattgataaaaacaatgacacacaacaatcgcgactacattggtttaataatattgctgttcgctgaaataccaaatgaccaattaagtttttagcgcaaccctgtttgagttttaatacaaacacacataaattgaactaacaaataaaaaggtgtttatatcctggatttttgtttagtatttataaaatttgtgtcttttagaatgcgattggaatgaattctggatatcgttatcgattttaccgcaatcgacaattgttgggggtaatcttgaaccaaaaaaatacaatacagtcaaaaaaacaaagtaataacggtttaaaaacggttttattatatagaatatgtaacagtatattgcgatttgtttgtcgttgcttgttaggcttagtatgttttattgcttatgaattttatcataaacttttaacaacaacaaaataaacaattttatatattctaatatgcattatattttatattaagcaacttattttttagcattttttttattgtggggaaaaagtcttttaaaagtctgtcaggtatataataattctctgaataggattatttacgctaaacatttgattagattatcacttttgagcaccttctgctgaagcggattggattggcagttccacatgtataggactttgaaaggccattggttggagttgtacaaactgaaatggtatggagaatggcataccgcgataggcattagccgattcctgtggacttaggtctacgttggagctattgacaaagtctggagcagagttggcggtctccaaatcctttcccgtgatattgaaaggagtagggggaccgacgagtttcagggaaaccccatcccgtccaggagaagtcgattcaatgctagttttgggtacgtattcctggttatactgcgaatcaaaactactttttgttacgtaatcgtgcttaaattgaggatcaatactacttttcgtcacgtaatcgtgcttaaattgaggatcaatactacttttcgtcacgtaatcgtgcttaaattgaggatcaatactacttttcgtcacgtactcgtttttaaactgctgatcgagattagttttcgttgcgtaatcgtgctttaactgtgtgggcacggagctttgatagtcctccatcctcggaggatgatccaattccctagatttgtatatcctgttgtagtagtttgaggatggtaggctggatggttcgtgttctctgggcggtggatgatccatttccatgttaaatttgaactcctcgccgcgtggataactttcgtagagtgatgatgactcgaacttatatggctcgctggaacgaatgtaaacgggaacctttcgttctacctcaaccttatagggcactggtaccttcttctcgagatgaactggcacctttatttcgaccggatacggaacagtccggagcactggatacggtttcggtacgtggactattttctcaattatcttttcgaccacatatggtttgggcacttggactggctttgggatgtgaatcaccttttccactatcttttcgataggcacgtgcactattttctcaactgtaacattcaccagcttgggcacatgtacgatcttctcgacaattttctcaatgggcacatggacgaccttttccacgggatacggttgtggtactgttttgatcagctcctttatgtggttgtgatgatggtggtgatgatgatgcttgattttcaccttcatccgcttcgcatccttcttactcgagtgctcgacatgttcgtgcagaatcgcttgtgttccgacctgttcggatgcctggtattgaccatcgtcctcatcgatatgctcgtggatctcttcgaatgtatgataatgcctactttccgtactctcatccgcataattgggactcacattttttcttcgagcaccagatggcttatatttcagtttattcctcgtcattttatcgccttgcttttgatagtttttcacaccgcgtttcaaagtcacattgcgttcggtttcccgattataatgttgcagatccagcttttccgatcttcttccggtattgtgagtagatccttttccgtattcaggatagctccactcggcactttcgacactattggttttattcacagcataggaattactgtgtgcagtacttccaataattattaaggttatgaataggtatccaggaatcaaagttaactgaaatagaaaggatgcgcgtaaatgaagtatgtacatacaaaatatctcctatcaaaaagacaaattggaaatatagcttaccattgggttcattttttgttaagtatatagtctcgcttggatttgaagtggtttaatcaacgccttcaacagaaatgatttgagccaatcgaagaaagtatttatatgagcacgaaacataattaaaatgtgcagaagcaaatttcttcgcttgaagtttgtacactctatatttttcttaaattaagaaattatacaaaaacatcaagaactaatttgttttggtttgattatttaaaatgtatgcatgtttttattcatttttaattagatatacaaatgtgtagctttgaaatgccgtcagaaataaacgacctttttaaaagagaataaaactgcacaagtttacttatatttttttttacgattgaaagcccacggtcgcgtgacgcaagttgtgtgtgtgtttgaagaagtgtacaagtgcaatatctttataaatgtttgaaatttctctaggtgaatatttcacagaagcccgtaaatgtaataattaaagtgcattgagctccgctttacggaaatgctatggattgtgtaatttcctgcagtatccgttgctgttttcaagactaccaaaactacgttttccggatacccattttggaatgcagagaacagggttaattaacacataacattggagctcctctcgaaaggc

SEQ ID NO: 30266 - DNA, 1383 bp, DROSOPHILA
atgacgaggaataaactgaaatataagccatctggtgctcgaagaaaaaatgtgagtcccaattatgcggatgagagtacggaaagtaggcattatcatacattcgaagagatccacgagcatatcgatgaggacgatggtcaataccaggcatccgaacaggtcggaacacaagcgattctgcacgaacatgtcgagcactcgagtaagaaggatgcgaagcggatgaaggtgaaaatcaagcatcatcatcaccaccatcatcacaaccacataaaggagctgatcaaaacagtaccacaaccgtatcccgtggaaaaggtcgtccatgtgcccattgagaaaattgtcgagaagatcgtacatgtgcccaagctggtgaatgttacagttgagaaaatagtgcacgtgcctatcgaaaagatagtggaaaaggtgattcacatcccaaagccagtccaagtgcccaaaccatatgtggtcgaaaagataattgagaaaatagtccacgtaccgaaaccgtatccagtgctccggactgttccgtatccggtcgaaataaaggtgccagttcatctcgagaagaaggtaccagtgccctataaggttgaggtagaacgaaaggttcccgtttacattcgttccagcgagccatataagttcgagtcatcatcactctacgaaagttatccacgcggcgaggagttcaaatttaacatggaaatggatcatccaccgcccagagaacacgaaccatccagcctaccatcctcaaactactacaacaggatatacaaatctagggaattggatcatcctccgaggatggaggactatcaaagctccgtgcccacacagttaaagcacgattacgcaacgaaaactaatctcgatcagcagtttaaaaacgagtacgtgacgaaaagtagtattgatcctcaatttaagcacgattacgtgacgaaaagtagtattgatcctcaatttaagcacgattacgtgacgaaaagtagtattgatcctcaatttaagcacgattacgtaacaaaaagtagttttgattcgcagtataaccaggaatacgtacccaaaactagcattgaatcgacttctcctggacgggatggggtttccctgaaactcgtcggtccccctactcctttcaatatcacgggaaaggatttggagaccgccaactctgctccagactttgtcaatagctccaacgtagacctaagtccacaggaatcggctaatgcctatcgcggtatgccattctccataccatttcagtttgtacaactccaaccaatggcctttcaaagtcctatacatgtggaactgccaatccaatccgcttcagcagaaggtgctcaaaagtga

SEQ ID NO: 30267 - protein, 460 aa, DROSOPHILA
MTRNKLKYKPSGARRKNVSPNYADESTESRHYHTFEEIHEHIDEDDGQYQASEQVGTQAILHEHVEHSSKKDAKRMKVKIKHHHHHHHHNHIKELIKTVPQPYPVEKVVHVPIEKIVEKIVHVPKLVNVTVEKIVHVPIEKIVEKVIHIPKPVQVPKPYVVEKIIEKIVHVPKPYPVLRTVPYPVEIKVPVHLEKKVPVPYKVEVERKVPVYIRSSEPYKFESSSLYESYPRGEEFKFNMEMDHPPPREHEPSSLPSSNYYNRIYKSRELDHPPRMEDYQSSVPTQLKHDYATKTNLDQQFKNEYVTKSSIDPQFKHDYVTKSSIDPQFKHDYVTKSSIDPQFKHDYVTKSSFDSQYNQEYVPKTSIESTSPGRDGVSLKLVGPPTPFNITGKDLETANSAPDFVNSSNVDLSPQESANAYRGMPFSIPFQFVQLQPMAFQSPIHVELPIQSASAEGAQK

SEQ ID NO: 30268 - DNA, 3032 bp, DROSOPHILA
aatttatggagctttggagttcagttgtgaatgtaaacagagtttattgcttccaccttttgtctcttgatatttatcagcattcgcggggcttaagtatattcactccgtttatattgaatttgatatttggtggaataattctaatctatttttagggtttcctctgtgtttgcctaatatgaaaagtttatatttatttgggaattaaacatttttgttcagtaaaccaaaatattttcccagctagctagcttttgtttgcatcttgttagccttttcccgctaaatgacgtctggcttttttctggtggccaacagttggcaacactgcggcacagtaatgtatccagttttttttacattgctgcagaaaggtttctcgtctcgctggtgaccttagtggtccgttctcctggataaaataaaagtgaaaattaacaatatgagtgtataaaacgaaatgtaaatgcaaaagaggtataaatctaacaaataaacatatactcgtgcaaatgaacataaaaagactcacttaagatgtgcaattgttcactaataattgtgtttgtgttaaaattatgacctaatacggcaattggtacaaaatacatacgcatttaacaaactttccgaccacaccgaatcgaaagacttaggcgacaaactcgtaattgccgagggatgttgcgatgtacatatgtttaaagacgtggcagtgtcaccagtgcaacaatacatctcttgtatgtatgtaaacatatgctgttaatgtataatatttcctgtctgatgaaatcaagatcgaaactaattaccgacacttcaatggacttttagtgaacaaaaaattaaattaacacatgtactaagtatttgtagccaataaattaattagatgttaatttctgcagccactgaatgatatgcggttttatttgtgctgaaaacgaaacccgaaaccattctttgttcaacacaatattgaataatcttaaaaatggtctatcccgaagaacctttttgggttttaccaaccgtaactggattttacgaggatagagattatagaggtgagtttgatttgtgtttgtttttttttttatctattagtataaaccagtcgcataattcgcatatcgttcagtaaatgtcgttgaagccctacaagagttttggcaaatgaagcagtctcgtggagctgaattgaaaaatggagctcttgtgatttacgaatcgattccgtctaatagccagccatacatttgcttcgtaacacttcctggaggaagctgctttggaagttttcaagtaactacgttattagcaaagtgttgacgcagtgttttgtaacacatttactacattttagaactgtcccaccaaggcagaggctcgtcgcagttcggccaagatcgccctaatgaattccgtctttaatgagcatccatcgcgtcgaatcagcgatgagttcattcaaaaggcggttcaggatgctcgcacttccttcaagggcacatcgcaaatcaacgagggcacagaatcgggcatcggagcattcaggtgggttccataaaccataatatatgcacttgctattgaaaccctatctttctaagtattatgaattaataaacatttttctgagtttagattcatgctggaggcgaacaagggaagaaccatgctggagttccaggagcttatgaccgtgttccaactgcttcactggaacggatcgctgaaagcaatgcgcgaacgccactgctccaggcaggaagtggtggctcattattcgaaccggagcctggacgacgagatgcgatcgcagatggcattggattggattgccagggagcacgataatccaggcgttattcgcagggagttggtgctcgccgagagggagctggagacctttcgcatggctgggcgtgaattgcgctttccgaaggagaagaaggatatccttatgatagcacataatcagctgggcggcagtgcccttaactcggctaccattgatgattaattggaaaaattaataagcacgatcgaaattaaccctttttttagataaatcgtataatttcaactttaacgacgatcaatatttatttaattggcataccatatgatctccatgatgaaaaacaagcggaaattattacacttcccacaaacacttccaaattatgaaaattaatttaaaaatctttgaaaatgtgatttttaaaacagctgctacacaaataagactaaatccaataaaataaatataatattttaacttaaaagttcatttgtattttatgaatgctaatattgtttagctaaccaaatatattgtggaatccaaggcaagggaagctacaaagttgaattcaacttttgtacaaactcatatttctgatgtgtttcagctaatctaaagcaaaagtaatttatttcaagttatttatataataaattatttttggttaaggaatggtaagaccatatttctaatttctcattccgtcgttccaacacacagtctagcacaaattgggatacagtccatccctggatattagtgtgatttgtgtcgctaccttatctgttattctgtgaatgtaacacatacatacaatagaaataggaaaaaacgaacaaaaagtttacaaaagcatccaattgctttcaataacattgagcaaacatcgaacacgttagcgtaggccacacggaaaagaaagtactgtgacccagcagcacaatggccaccgaagagctaccagctgatctggacaagttgaaaataacacagactcatcgtatcgtcaagagtgtgaggcgaaatccattttacgatgcagataacggattcgatccatctgatggctgcgaaggcgccacaactgatggcgccaagcaccgaccacaacatcgctggaagtgcagaccacgtcgtagatccgagagttgtctgcaggactgcaagcaagaggactcctttgttccagaagaatcctttgagattgttagtccgc

SEQ ID NO: 30269 - DNA, 807 bp, DROSOPHILA
atggtctatcccgaagaacctttttgggttttaccaaccgtaactggattttacgaggatagagattatagagtaaatgtcgttgaagccctacaagagttttggcaaatgaagcagtctcgtggagctgaattgaaaaatggagctcttgtgatttacgaatcgattccgtctaatagccagccatacatttgcttcgtaacacttcctggaggaagctgctttggaagttttcaaaactgtcccaccaaggcagaggctcgtcgcagttcggccaagatcgccctaatgaattccgtctttaatgagcatccatcgcgtcgaatcagcgatgagttcattcaaaaggcggttcaggatgctcgcacttccttcaagggcacatcgcaaatcaacgagggcacagaatcgggcatcggagcattcagattcatgctggaggcgaacaagggaagaaccatgctggagttccaggagcttatgaccgtgttccaactgcttcactggaacggatcgctgaaagcaatgcgcgaacgccactgctccaggcaggaagtggtggctcattattcgaaccggagcctggacgacgagatgcgatcgcagatggcattggattggattgccagggagcacgataatccaggcgttattcgcagggagttggtgctcgccgagagggagctggagacctttcgcatggctgggcgtgaattgcgctttccgaaggagaagaaggatatccttatgatagcacataatcagctgggcggcagtgcccttaactcggctaccattgatgattaa

SEQ ID NO: 30270 - protein, 268 aa, DROSOPHILA
MVYPEEPFWVLPTVTGFYEDRDYRVNVVEALQEFWQMKQSRGAELKNGALVIYESIPSNSQPYICFVTLPGGSCFGSFQNCPTKAEARRSSAKIALMNSVFNEHPSRRISDEFIQKAVQDARTSFKGTSQINEGTESGIGAFRFMLEANKGRTMLEFQELMTVFQLLHWNGSLKAMRERHCSRQEVVAHYSNRSLDDEMRSQMALDWIAREHDNPGVIRRELVLAERELETFRMAGRELRFPKEKKDILMIAHNQLGGSALNSATIDD

SEQ ID NO: 30271 - DNA, 2664 bp, DROSOPHILA
gcttttgaaggtaaataaaaaaaaatattaaataccaagagaaattagtgaacgaaaaattttatttctatgcaaaagtaattaaaaataaaacgaaagctatgaaaacgaaagctatgaaggcatagataaaagatacatttttaagtttcatttttacattttacatttttaagttttttttttttaacatttcaccgcaaatcactttggattcattcatttcatgtgatttttgacacatttatattaagagattttgtttaatattcattgaacaaccatttcagatgtcgggaagatcacttcgtctcaaaatcattttggtaacaccttacaaagtcaatttaatacgaagaacaacactcgagttattgcacaaaagggaggacttgccattctgccctgtgtggtcaaagttaactccccagccacggtgagatatatgtttttcttaaaatttatacatcgattctaatacttagaccttttgcaacatttcaggtttcctggatacgtagaaaggacttccagctcctgacagtgggcctatccacccacagtagtgacaagcgattcttggtggagcacacgcggcacatgggccactggtccctgagaattaaggcagttcgggaggaagatcgcggtttttacgagtgtcaattgtctatttatccaactcagtcaatagttatagaattaaagattgtcggtaagtggacgcagctgccttacaaagttcaaagcttaacgggtattgaatcttttcgttgtatagaagcggtagctgagatttctagtgcaccggaattgcatattgatgagacttctactctgcgactcgaatgcaaactgaagcgagctaccgagaatcctgcatttgttttttggtatgaaaaataatatgagttagatttgtaaaattttatattattctaaacataagacccaacttaaccgaatgcaatttcttcaatttaggtaccatgatagtaaaatgatcaattacgactcacaaggcggcttcgttgtgacatcgattgggcaaagcaatccgcagagtggccagttttaccgtagctcgccggcgaacaaatcgcgcgccaccatgcccatggagtccagcaatggggtgctcaacagcctgctgggcagctcggatgctatcaaggcaccggccgccaatgtgccctcctccacgccctatatgacgcaacagcatcaatccgcctatctcctgaatccctcggtcagtgtgcttactgtgaagcaagtcaatttccgtcatgccggcaactatacatgtgctccatcaaatgcccgtcctgccagcattacagtgcatgttctaaggggtaagaccgccgccggtcgatatttaaatatatgtcatactcattgtaattataataggtgagaaaacggcggccatgcagcacgccaatcggagcattttggatacggagaccaacggcaacggcaccttcggattgatcacattgggtggactgaatggaactagcggcgtaactctggccgggggaatcctctacttctctgggctgttcctgctgatgggcgcggtggtattcgatcgattctcgttggcggcaactcacaaggtattcgtagcatttataatagtcactatgcatagctgaaacttataatcgatggtatttggaatggagcaacttcaatcattcgaggatattatatttgagaatatttgttttaaaatagaagattgtaaatagatcattgacataccatattgagatgccggcgtgggcatggtaagacatttaaagtaatctaagaataaactgtaaatagacttccattacatgcaatgtattgaattgagaaataagatgagaattcacgaacttgttaccacaaaacttataaaatgcatacctatgccaataagtcatgggggattgaaaaccgcatattttgatggttcatagtggtacgtaagatataatgtatgcttagatgttcatatttattgactggtactggtactgacattttaatgttacaaacaatggaattagcgtaaaatgataatgataaagccatacagatttgttacctaataactcggaaaatttgatcgtcacctttaaactgttattctgctcagtgttcgatatttagtatatagattgatttatgtaagcacctttagaagtatgctaattcatatactgtatgtacaactgtaaataaatattacttccgtgagcgttttcaaaagcgctgtcttcaatccaaaatgggcagaagtgccagtttcgttttgtttaccctcgaatacggagtgcaaaacgacttttaaattttgttgccgacataagaacgttttaaataaacagatcaattttaagaaacccgcttctggttaagttatttgctcttcagttgggtggtacacatttaaaaaatgaatacgaaaatgttatgaatatttttgaactcattttcaaatgtaagacccccttccgatttctgtttcatataccgcagttccgtgaggtgcaatcttagcttgtcgttgtatttgacacaagttatcgataattctacatagctgaactaccatcgctgaaaaatgttggcaaaacaaaaagatgagatccgaaattttggcaa

SEQ ID NO: 30272 - DNA, 606 bp, DROSOPHILA
atgatcaattacgactcacaaggcggcttcgttgtgacatcgattgggcaaagcaatccgcagagtggccagttttaccgtagctcgccggcgaacaaatcgcgcgccaccatgcccatggagtccagcaatggggtgctcaacagcctgctgggcagctcggatgctatcaaggcaccggccgccaatgtgccctcctccacgccctatatgacgcaacagcatcaatccgcctatctcctgaatccctcggtcagtgtgcttactgtgaagcaagtcaatttccgtcatgccggcaactatacatgtgctccatcaaatgcccgtcctgccagcattacagtgcatgttctaaggggtgagaaaacggcggccatgcagcacgccaatcggagcattttggatacggagaccaacggcaacggcaccttcggattgatcacattgggtggactgaatggaactagcggcgtaactctggccgggggaatcctctacttctctgggctgttcctgctgatgggcgcggtggtattcgatcgattctcgttggcggcaactcacaaggtattcgtagcatttataatagtcactatgcatagctga

SEQ ID NO: 30273 - protein, 201 aa, DROSOPHILA
MINYDSQGGFVVTSIGQSNPQSGQFYRSSPANKSRATMPMESSNGVLNSLLGSSDAIKAPAANVPSSTPYMTQQHQSAYLLNPSVSVLTVKQVNFRHAGNYTCAPSNARPASITVHVLRGEKTAAMQHANRSILDTETNGNGTFGLITLGGLNGTSGVTLAGGILYFSGLFLLMGAVVFDRFSLAATHKVFVAFIIVTMHS

SEQ ID NO: 30274 - DNA, 3728 bp, DROSOPHILA
gagcgatgcaaatgggggcatccaaatctccagcctggagccagtctgcgaggaggcacgcctgcgatcgtcgaacatagatggggtcaactatttggccagccagatcggtggctatgcctatcgggactccgtcgagcattcttccactgagagcggcctgaccgtaaatggttacgatcatccgaggaaacacaatgaggccagacagcacggctcctactcgcccaatctgtactacggacaatcggatggcgccgtgaactccagttcgccagccgatagcttcctgcacgcggatccatccacgcgaaaggttaagaagttccgcaaattccacctactgcacgccttcgttccgtccgtgatttttgttgctttcgcgatggccggaacggctgtgttcatcatggaatccgaatcggaggccttcgagcagctgcgcaactcacccgaaatgctttgtctgcgctatcagtactatcagccactgaaggagttcgttctggagaagttgggtcgaagtgggaagtaggagcttctacctatggaagatccacctaactaactatggtcccagttactccagctgcatcgggtattttaatagtgtacttaaggcaattctttaatatttatgctataatgattccatattaaaaccaaagcctgaaatttaattttaacattaatacaatttgttttgattgggtgaaataaaactttggtattgaaccatcatttgaaaaatcatttggaaaacaaaaatttaagaatgagatgatcaattgaagcattagatgatccacgatcacgttcaaaaacagttcttttatttgtcgatattggttttaagtcattcttattcattagatttattaagtaagactttaattaaataaataaatgtggctatcctttttattactttggtgctagacgcaattccaccgcaccatcgattgaatgtacatgtctacgttctactaccaggtggtcactagagcaccatgtccgcctgcagacccaacgattccgagtgcttcttggccttcatccggagatcggctatcgaagagctcttgctgtgggcggcggcgaaggcggccagatttatggagtactggggcacagaaaacaatccagccggcacggttccattagttatagcagctgcgtactgaaatcagcaaaagaatagatatatagatacatatacattaaattgtatctattttgcttaactcgtattgggaccattagaaataaagattatattcaatatttagaagaattttcttggcaaggattcttcagaatctcatatttttatgctcttagtacatacaaacttcaatgtgaaatatttcaaatgaaaaacggcttttttccaaactttgtcgtataagttagttatcataaaaacgatacgcattattataagtaattaagcttttaagctttgcactaatgaataacttttcgatggtttaaataaataaaatctttaaaattttgtcgagattataaaattgtatgtttaaccagcgcctgcctcaatcgattacaatattttaagttcaggattggcatcgctgaatctgccaggatcatagatgcaatactaccatttggaattttacctgatgagctgccaccgaaataatggccggatcgaaagcggaaaaggcggcggctgctgccacggtgctggaaaactgtttgatagccgagcgcgatatcgccggattgtgattatgtggtgagtccacggtgaccaccttgccggaactgctggttccggagacaccgggtgcctggggattcgagctggtcgctgcggcaggatgggatggaacggatgagctgcgaagggcggccaggctgacgtagggagccacacgacatggttccagcggagtggcaatcggcggactccggctgcccacgaggaatcctttaagatataagtggattacatgagacgtgttgcacttggatggggcttgtggaactaaagtgtagatttaagtttgactttcattgtaagaaagtaaggtttaaggtttaaggttgaaaaaggttagttagggaaaggttttttaagtttacagtttgtataatctgttcaaattttggatcaattatgtaatgtggcttaaattgttataatttaagatctttagtgcgattaagttgttaagctctttaactttcattgaccattaaaatacgaacatttaaaaacattcgctaaaaatgaaacatgcaggtaagacaaaattctgcttgtaactgaaaagacgaatacagtttatatattagtaataatatataattattaataatgtacttaaacaaaaaggttaagaactgcaaaactttttgtgtaaggttatagagtaaaaacaggtaataagtacaaacttatttgcattaagttttcagtgtataaaaaagtgatttaaatttttaagatgcaccaaagaaataagcaatattttaaggattatccgaaggattcactgccggcaatcactctgcttagatggatatgtaccgtacctgctagattggcaaatcgttttaagattcagtgacaagtaattgaattcattttgtaatttattgctcggaaaacgccccggaaagtcggaaagccggatggccggaaccacagggacgtgttaccgctggcgggtgaaatttctggagtggagcggcacatacaaatgggtctcctgggaactggaggccaggttaacgtcttgtttatgggtggttcaccgtggcaaagagcctgagaattgatatggacccataaagtgctggccattccattcgccgtgtctgccgtgctttttatgccaaaatttcaatttgattacatttccgaaaagttttttatgcccgaaggtccagtattgaaatacggccgcattaggcggcaaatttgataaatgcgattatatcttttttaatccaattaggctgagctacccgaatgcgatttatatttatgtgaaaaagcacacacactcaggaagtcataaatgcgtaaatgtattgatttgcattcttctaaactcgaaaataaattttttcgcgcacctcaacacctccgggttttcagttcagtttgtttgcccttcgaattataatcaggactcacaaacgcatctgctcagattttagccagcgaaatcccttcggcaatatatacataaaataagaacgcttctctttttttttttagcgacagcaaagcacaaatcattgctaacttcatcaaattaaatattcgggcaataaaacgaaggatacaaattctatcgagtggcgtagggcggggaagttgatggatggatgggggggttaagtccttggaaacgagggttgaacggaaacggaaagccaaatgaattaatgaagagacatttaaacaactgtgaaaaccgtaacatattggccccagcaagttgataagccagaaaatgaacagcagcattccgaaatgtaaatgttctagcctgatttttgtgtacttaactaattgcaatttacactttcattaagcttaattggcgcaaacttggcgaaggtgagaggggtgcttaaaaaaaaggggcaccaatttatgctagtttttaattacattaatgttttaaagttaacttagaaggagccttagttatttgctcacctttgtgcatttggttttcgtgctt

SEQ ID NO: 30275 - DNA, 531 bp, DROSOPHILA
atgtgccgctccactccagaaatttcacccgccagcggattcctcgtgggcagccggagtccgccgattgccactccgctggaaccatgtcgtgtggctccctacgtcagcctggccgcccttcgcagctcatccgttccatcccatcctgccgcagcgaccagctcgaatccccaggcacccggtgtctccggaaccagcagttccggcaaggtggtcaccgtggactcaccacataatcacaatccggcgatatcgcgctcggctatcaaacagttttccagcaccgtggcagcagccgccgccttttccgctttcgatccggccattatttcggtggcagctcatcagtacgcagctgctataactaatggaaccgtgccggctggattgttttctgtgccccagtactccataaatctggccgccttcgccgccgcccacagcaagagctcttcgatagccgatctccggatgaaggccaagaagcactcggaatcgttgggtctgcaggcggacatggtgctctag

SEQ ID NO: 30276 - protein, 176 aa, DROSOPHILA
MCRSTPEISPASGFLVGSRSPPIATPLEPCRVAPYVSLAALRSSSVPSHPAAATSSNPQAPGVSGTSSSGKVVTVDSPHNHNPAISRSAIKQFSSTVAAAAAFSAFDPAIISVAAHQYAAAITNGTVPAGLFSVPQYSINLAAFAAAHSKSSSIADLRMKAKKHSESLGLQADMVL

SEQ ID NO: 30277 - DNA, 3098 bp, DROSOPHILA
tgtgatagaatatatattaaaaaaagcgaaatttgtgcaaaacctaaatatttatgtttcagtctaataaaaggggacatggaaagccgtttggccaatttaaagctgaatggaaatgtacacgatgagcagctgaaagacaagcaacaggaaattgagcaagaatgcgtaagttggactttaaccagaatatttagcggagttgacaatctaattttactttttaggatgaccatattaaggaacttaacaatatattttctaaggttgacgaacgtcgaaaggtaagaaactaaaggaaaaataaccaatattaaaaatattgttctaatattgttatttacatattacagaaacgtgaagttcccgattttctatgtggcaaaataagttttgaaatattaacagaccctgtgataactccatctggaattacgtatgaacgaaaagatatagaagaacacttgcagcgggttggacatttcgatcctgtgacacgcgttaagctcactcaggatcaactaataccaaatttttcaatgaaggaagtggttgactcttttattgccgagaatgaatggtctttagattattaagttacttattagttggcattgtcattgtaattgattagatgttagaacccagttcccattgtctaaaaaccagataagtgataataaatgtggatctgcaattgagatttatattgtaaatggataaattgtaattattaataaattaaacagcataatgttcaaaatataaataaaaaagcttttgcacgatatcgatagagagttagcggtagtgtgaaaacaatatagtttcgatcacccgttccagttagtcaaaaagttggtgatatcttgaccaaacaaattatcgatatacagctgcttacagatttgcagaaatcattttcaaagaaatttgtttatgtgaattcacaattggattaacttcgctcttctttgtttagtatttatttaacaataatatggattcgtctgaaagccaatcgcaaatggatgaccaagatgctcgcatactgcgtctgcaaaatctgatcgaaaagaatattgagataggtaagttaaatcataaattactaatatctgaaataactatatgaattgcagagcaacaaatcgaaaacaacaccatcggagagtctatcacggccatagaggaaatcattcagacagccaacgatatcagcaagggacatgaagaccgccgtacaaactccacggaacttgtcctggacacggagctactgcgtcgcaatttcgaagttgtgggaaaagctatccaacataacaccaacgtcacggatcgaatggtggccacggcgatcgtaggtgcactgtgtactttatttatgcctgatcgtaatgtttgatcctattacagaacgatttggttttcaaagagagcgaagaagattgggatgctctttgttcattggctattcagttcggaagaccactcttcaccaatgatagcatgctgcccttcatagatgttactccaaaggtggtggttcaaaagcaacgtgctcctcgcaaaacgaaatctcaagtaagtcatttgttaaacaatttctcacagtaatatttgttcatattattatggatcttgtaggtagatgagaagcgtccagaaaagagtgaccaattggaacgcaaggacgaaggagcagcgtccgtaacccacatgctgaagcaaataagacaaatatatcgagatggcaatcaagagccgattccgtactttaaactgatttgcaatccaaacaattttatggacaccgttcagaacgctttgcaactgtcgtttcttgtcaaggagaactatatttccatcgaaaatggcgaggatggtttgccattggttcgcgttgtgaattccaaatcggtcgaaggaaacgcaccgtcccaggctatttgttccatcgatgttaccttttgtgaggttcgtatttcaattattgtttaaagcattataattgatatgatttaaattacagaaaatggtaaagcactacaacctacatgagccaatgttaaaaagacttccggttagtgagaaatagatatatcacttagttcatattaatagtttatattgttattaataaaacacatagaacgtttaaagttactcatgtacggcataaataatcgggtaattgaaagtgttctttcccccaaacattaagtaattaacgtaatatcaacacaaaatcattaaatgaattttattactcaagcagttacttcatagttcaaacacttcccccaatattttactacgaatccgcccctgccattatgtcaatttttatgaccgcctacaaattgtgaaatatgtagaaggggcacttgtgaagttatagcaatataaaatgtatgtatgttatatttaggaactaaatattagttaagttgtttacttataactttaaccagtttcggattatgttcttaatccgtttttcctggtctcaatgggtggcataccaagaattaaacaaataaattactttgcagagtggaataatgaatgaatgaatgattggtccattaattaaaaaatcactcctgtgctcgaaattagtgcactttccgttgcacagcggcttttaattgaattccgttaacttaattccacaaagagaaattaagattaattaagatttattgcacaatgaagcttagggttaattgcatctttgcggtcgacggagtttaaaaggctttctatggagtatagccttttctaagagatcagtgcttctattcaaactggatgtagtagatcaagttactcgatgcactattgtctgagattttggggctttcaacttcatgtgggcgaagagagttgacccaagtgcaggaaactaagctaatgtgtaattatatataaaaccaaaatgaagatttattgctccatatcagcatagcaacaaacgacccaattaatagccacccaatcttcaaaatacaaaattaatgatgcacaagcgcagtttcaataagttgccaagttgggtttgtcttagtaaattccattgaagaattctacttcta

SEQ ID NO: 30278 - DNA, 810 bp, DROSOPHILA
atggattcgtctgaaagccaatcgcaaatggatgaccaagatgctcgcatactgcgtctgcaaaatctgatcgaaaagaatattgagatagagcaacaaatcgaaaacaacaccatcggagagtctatcacggccatagaggaaatcattcagacagccaacgatatcagcaagggacatgaagaccgccgtacaaactccacggaacttgtcctggacacggagctactgcgtcgcaatttcgaagttgtgggaaaagctatccaacataacaccaacgtcacggatcgaatggtggccacggcgatcttcggaagaccactcttcaccaatgatagcatgctgcccttcatagatgttactccaaaggtggtggttcaaaagcaacgtgctcctcgcaaaacgaaatctcaagtagatgagaagcgtccagaaaagagtgaccaattggaacgcaaggacgaaggagcagcgtccgtaacccacatgctgaagcaaataagacaaatatatcgagatggcaatcaagagccgattccgtactttaaactgatttgcaatccaaacaattttatggacaccgttcagaacgctttgcaactgtcgtttcttgtcaaggagaactatatttccatcgaaaatggcgaggatggtttgccattggttcgcgttgtgaattccaaatcggtcgaaggaaacgcaccgtcccaggctatttgttccatcgatgttaccttttgtgagaaaatggtaaagcactacaacctacatgagccaatgttaaaaagacttccggttagtgagaaatag

SEQ ID NO: 30279 - protein, 269 aa, DROSOPHILA
MDSSESQSQMDDQDARILRLQNLIEKNIEIEQQIENNTIGESITAIEEIIQTANDISKGHEDRRTNSTELVLDTELLRRNFEVVGKAIQHNTNVTDRMVATAIFGRPLFTNDSMLPFIDVTPKVVVQKQRAPRKTKSQVDEKRPEKSDQLERKDEGAASVTHMLKQIRQIYRDGNQEPIPYFKLICNPNNFMDTVQNALQLSFLVKENYISIENGEDGLPLVRVVNSKSVEGNAPSQAICSIDVTFCEKMVKHYNLHEPMLKRLPVSEK

SEQ ID NO: 30280 - DNA, 2759 bp, DROSOPHILA
cattaaacaatggaaaacatcgcacatctgggagctactctactagtagctacatatatgtatgtatgtatatatatgtttggagtaaggctatagccaactataaccttgaccagctcattcggctgcccgctcaccacttggcttatgaaatcatcgggtttcaaaagatagccactgcaaatagctggtaagtaggtatattataaggcggctttagccaagcggaaaatcttggagccaaaagagctcgatgttcatgccgaaaaacgcaactgagctggctcctaaaaacaaaacaaaaaaaaaaacatatcgagaagattttattgttaaataacatacacactcgaccatatgctttcaaatgtgaaataatttgttattaattttgacatcgctgtcggcttgaattgtgcaacacctcgttatggggcaacatcaacgcttggaagaccaattagtggtggttaggtttttatttgctcactcgcgggattgcgatttaattgtggattatagaaaggaaatcgagtgtacttagtttacattattttgtgaaagtgtaaatcactgccatattttgtataagcaaagaattaattaggcacaagcaatcacaagtgatttggttttctatttatttgcataactaattttttatagttacatgaggaactgaagaactttttgtgtttatgtcttgattaaacaaaagcagctaagcagtaatccatcaattgttttatccattaagaagatttctgtttcttgttcttaattaagaaacgtgtatatattatacaatgaagtattcaatataccaattatgaatgatcaagaaaacaaaaaaggcaatgaaactgctccaccctttaacgtaacatatttccatcattaagataatagtttcatgtgagactatctttcgtatattattgtaccactaagttagttactgatattttgcctcagtgcacttgtctacgtaatttaagtactagccttcgctcaagtacgaatagtgcctatcattacaagtactaagcaaactgcaactcaccttcttattaatcggcacctcggcacttggcaagacctgaatggctgggagcggaggcgccggactgcgcagcaggttgagattgatggacgacaggtgattcagttcctggtgcggcaggcagttaagtggctggaccatggagcaggcggccggagctgtccgttgggccatttgcacgggcacctggacgggcacttgagccgtcgtctgctggttggccaaatggccagcagttgctcctccggtggcggccaatagagattgctgggcagccgtggtcaggggaacgccaccaaaggccgagtgacctgcgccggcggcgggtgcatagtacgcaccaagtggcagggaagagaacatggcggagtgcatcagtgcgttctggttcagctgtccggcgttgaggagctgcggtgccagatggctatacggggatcccatgtggaagtgtggtgcgcctggtgcggcgcttggatgcaaagcgggctgctgatagtttgccggcggtgctgctgccgtattgggcgacaattgttgctgcatctgcggctggccagcgaagatgccgcccaccgatgtggcgcccatcttgtccagaaacggcgactgcatttgcagcatcttttgctggtgctgctgggcggccagggaccagggcaagtaccaggcacacggagccggagaattctgcattgttgacacgatcctgggcaattattcacttcactgagaggaaactgcagattggatgggtttttttttgttgttgatcgaaaatgacattaatatcgctgcggatagaaaacttcacggatacattcccgagttatacgatcatctgttgtttacttcgattgcgatagcattatggctcttaaagtcaattacaaatcgttttgtgtacttgtacgtgtttacaaattgtcttggccgtacatatgctgtttcgactgttttatttgaaaagtcgaagcgattttcgggcttgtataatgcgaattaaaaacctaaacaaacgacttatttattttttatagtgtttatgaacacctataccaaagcttgcatattaggctccacgaaatgcgttaatttgtggtttctattagcggattggcgttaaaaaatagcccatcgcacacacacacacacacacacaaaagtcggaacaatatgttgattagcttttgcactgcattaactttgtctatcgtgtgcgcgttaatatttttttaacaataatattttcattggccatacatacacaagagcattattggatcaaagaatttctattcgcatgagagttgtagattccttttgctaaatacaagccaaacgataatggatactttgaaaatacatttggaatacacgcgggggccatctgctacttggctactctaattgcacgagacaaagtctaatatatcctctagaatacgtataaacctacattcggaaccgtacatgcgtctgtcagaattctggcaagaagaaatgcgtatgggggtgcctatatattggactgtttggatgtgtaatggatggaataatacgtatacgagaccaggcattaggaggatatcggctcacgatttagaatgtttagaatcaggtatatatatatgtacatatgtatatatagcgtgcatatatacctcaccacctactgagacaaatggcacaaatg

SEQ ID NO: 30281 - DNA, 759 bp, DROSOPHILA
atgcagaattctccggctccgtgtgcctggtacttgccctggtccctggccgcccagcagcaccagcaaaagatgctgcaaatgcagtcgccgtttctggacaagatgggcgccacatcggtgggcggcatcttcgctggccagccgcagatgcagcaacaattgtcgcccaatacggcagcagcaccgccggcaaactatcagcagcccgctttgcatccaagcgccgcaccaggcgcaccacacttccacatgggatccccgtatagccatctggcaccgcagctcctcaacgccggacagctgaaccagaacgcactgatgcactccgccatgttctcttccctgccacttggtgcgtactatgcacccgccgccggcgcaggtcactcggcctttggtggcgttcccctgaccacggctgcccagcaatctctattggccgccaccggaggagcaactgctggccatttggccaaccagcagacgacggctcaagtgcccgtccaggtgcccgtgcaaatggcccaacggacagctccggccgcctgctccatggtccagccacttaactgcctgccgcaccaggaactgaatcacctgtcgtccatcaatctcaacctgctgcgcagtccggcgcctccgctcccagccattcaggtcttgccaagtgccgaggtgccgattaataagaaggtgagttgcagtttgcttagtacttgtaatgataggcactattcgtacttgagcgaaggctag

SEQ ID NO: 30282 - protein, 252 aa, DROSOPHILA
MQNSPAPCAWYLPWSLAAQQHQQKMLQMQSPFLDKMGATSVGGIFAGQPQMQQQLSPNTAAAPPANYQQPALHPSAAPGAPHFHMGSPYSHLAPQLLNAGQLNQNALMHSAMFSSLPLGAYYAPAAGAGHSAFGGVPLTTAAQQSLLAATGGATAGHLANQQTTAQVPVQVPVQMAQRTAPAACSMVQPLNCLPHQELNHLSSINLNLLRSPAPPLPAIQVLPSAEVPINKKVSCSLLSTCNDRHYSYLSEG

SEQ ID NO: 30283 - DNA, 2876 bp, DROSOPHILA
accgcgcagcctgctcatcctcaaggacacgctgtacaccgactatctgcacgccatctccgagactagcgaggatgtgctctgcgatcgcatctccaactacgatctgtgcgagaatacctacaagatcggggatcacttagtacgccgatcgccgcgcatctccctcaccatccgtaatgtgcccaagaccagcaagatgaagctcaagttctgctaggttcattccgccattcgatgttctttggcattaaagattacagattacacagatgttgactagctgcacgttaaacgaacccactgaagagatccctgggatccaaaaagaactatgataatctgcaacctgaatcttccgctagatgttaaagcactccgcactagcagcacacttgttcgcaagcaaatccatgttggcccacacaaaagtgctttatttataccgctagcattgtgtacatatatataaatgtttgtattacgtattacggagcaataagttgtcctgatcggcggacaggctcgagctgtatcctcagattccacctgaccgccggcggcctttagatttagttgtgcgagcagttgttgcaggaatccatggcctagatttgtgaaatatgtggttaactttgtatatgggcatgtgcgacaactgattttgattatgattgtcctaatgctttgtacaatagaatctacacagaatttatgtaaaatctttctgattgaaaatgttccttacgttaactactaagcaaatcaattgcagccaaagaaatcataatgatgatcagttgacgagataccccttatatgtatgttgaatggagcagccagcacactggttaccatagtcgtgtgctccatgctccggcctcctgtgtccaagtgtatttttgtaaccgttttttccaccgcgcaccgcaaaaaagagcgaagaattgccaataaacgttattgtccacctaactcatcctttaaaccatttaatccactaggcctcctcatccagccactccagccggaactcgcgctcaaagaccaggcgatcgtacagccgcacctcgctaatcctcgccgagatgtccagccgcagttcgctgaccgccaggtggaaattctgacgcaccgttcgctgtttgtccggtgtcaattgattgagaggtttgcgaaagatgctgatgatgcgctgcagatggtattccacgctggcacagcgaccgatgcaaacccacaagttctccggatcgtgaatgttacccgggaagcgggtgcgttgatcgaagggcgccttgccggacagcagagctctcacctcggccacgatctcctggtgcgtcctcagatcgcgtgtgctgagggtggtgaactcatacttgtcgcaaaagtacatgagctcggagatggccacccacgactgggagcagagtgtggcatggtgattcgaccagttggtgtagccagctggactggaggtcttggtagccacggcagcggttgacgaggaacttgcattgggagtcggtgaagtgctcgttggactgcctgtcttgggcttgggcgtatccgaaccatttatgatggaccttctttctgtgcgctgcagctgctccatttcccgctcgtgctccttggcccttaaataggcctccttcttctgctgcaactcctgaagcttggtcatctttggtggcgacaacgactttgtgaagatcgagggcggtggcggcgcaggagcagcctggtcgccgtctgtgtgtgcaattggtgtgccgtttgtgtccagcgatgcactgcgtccgtacttggccctatagcgctccagcgtgtccagcgagaagctgagctccttcttgatggccttctgcatggttctggttttctggctttatgtaatcaccttgggtgcttcgatgctccgaattgcacgcgttcccttcgagaatttacaggcgaatgcgagcgcacattccgcataaagagaggccgatctctttatttttatcttttatcaatcggcggcgagccatgtgcactttatttcggtctctgccaatacattttgatcgcattcgcatacgaatgcgtacggattttacgtttggatttaaagcagcatttgaaaaagattcacagatgcagaaactcacagatattcaaatgccgaacgcacattttgggggaattcatgacgaaatgaccgaaattttgaatgggttcaattcagatcaaggttgggatagggaacttatgcacattatgcttatgtttggtaagttaacttctctttaacttattgatataaaaaaatagtcattaaccagctttctcaagtacaaagtttacatcttttatttcatatattatttcaataatatttgcaaatggcacacatatgtttgtgatctttcgctttaagtacaaacattttactgatcgttacaaatggtttcttgtgtgctgtgaatcatatttgaagaaatgcacaaagtacatttaatacttttcgttcttttcgtcggccagctcaaccggcggaggtggtattcctctcacatggatgttaaataaatatcgccttaacgcatacgcataatagaaaaatgtacaaaattacaatcatgtcgtcacacacagaacagataaacagataggactaactatagaatgacgtattaaaaactacaaagcgggtgtttggcggaaggcacggtatacacagagtcgtcatgtccttggtgggacacatgggtcacaagtagaaaagagggtgatgagcccagtcttaaaactaggttccataatttacaatacagttgggcggagttgattccgcctaaacgcagtacgccgccggcacctcgaaaatg

SEQ ID NO: 30284 - DNA, 876 bp, DROSOPHILA
atgcagaaggccatcaagaaggagctcagcttctcgctggacacgctggagcgctatagggccaagtacggacgcagtgcatcgctggacacaaacggcacaccaattgcacacacagacggcgaccaggctgctcctgcgccgccaccgccctcgatcttcacaaagtcgttgtcgccaccaaagatgaccaagcttcaggagttgcagcagaagaaggaggcctatttaagggccaaggagcacgagcgggaaatggagcagctgcagcgcacagaaagaaggtccatcataaatggttcggatacgcccaagcccaagacaggcagtccaacgagcacttcaccgactcccaatgcaagttcctcgtcaaccgctgccgtggctaccaagacctccagtccagctggctacaccaactggtcgaatcaccatgccacactctgctcccagtcgtgggtggccatctccgagctcatgtacttttgcgacaagtatgagttcaccaccctcagcacacgcgatctgaggacgcaccaggagatcgtggccgaggtgagagctctgctgtccggcaaggcgcccttcgatcaacgcacccgcttcccgggtaacattcacgatccggagaacttgtgggtttgcatcggtcgctgtgccagcgtggaataccatctgcagcgcatcatcagcatctttcgcaaacctctcaatcaattgacaccggacaaacagcgaacggtgcgtcagaatttccacctggcggtcagcgaactgcggctggacatctcggcgaggattagcgaggtgcggctgtacgatcgcctggtctttgagcgcgagttccggctggagtggctggatgaggaggcctag

SEQ ID NO: 30285 - protein, 291 aa, DROSOPHILA
MQKAIKKELSFSLDTLERYRAKYGRSASLDTNGTPIAHTDGDQAAPAPPPPSIFTKSLSPPKMTKLQELQQKKEAYLRAKEHEREMEQLQRTERRSIINGSDTPKPKTGSPTSTSPTPNASSSSTAAVATKTSSPAGYTNWSNHHATLCSQSWVAISELMYFCDKYEFTTLSTRDLRTHQEIVAEVRALLSGKAPFDQRTRFPGNIHDPENLWVCIGRCASVEYHLQRIISIFRKPLNQLTPDKQRTVRQNFHLAVSELRLDISARISEVRLYDRLVFEREFRLEWLDEEA

SEQ ID NO: 30286 - DNA, 2924 bp, DROSOPHILA
ggccaaaaaaaacaacaacaaaacaaaaaatgccactgaagttctgtgaaatgaaattccaaaaggtaggaaaacgaaacttatcgctgaattagcgtgccaaagttgcgagattgtggcacttggaaggttccgtcaaaacaaaagctaacgaaggtgggtagaagttgtaaagaatttgctttaatgaaatacttcaactggctaacagactcagagatacccctttcaaaatgtttgtctgcagttgtgaaatgtacaaaaattcttagtattttttcaagccttgttgttatccttttctacagttccacattcataatacaatttcgttgatttgcaagctgctttaagcaccaatattcccaaatacttgcagcaaaacaatgttgcatgaaaaatgttcggggccacaagacaagccataaattttccacaaaaaagccagacgaaaggcaacagtagaaatggaatacaatcaactaaaaaggaggaagcaagccaggatgtggccaggatatgcgatgccttcgccagcaaatacatatttatttcatgaggtccctactttcgcccctaattagtttgcctcaatgccgtatttttcttcgacccccccaaaaaggactcttttgattcctggcaatgaatttccggacatcacggtcatatcattggcctttattggctctacacaaactgctgggatctgaacttggtttgcataaataaccaattcctatttggtatttctttaattagcacatcttccctcttctgtctttcaaataaaagcactttgtttaccaataaattaaacaaatatttgtatttgtctggctgttagtagaatggtctgcaatattgactgaaggattcgagcatattgtgcatttaacaaattaatttaataaatacttgtacttgtagtatagattcaagcagtttctcgttttgatatggcatatgcaactcgcaatcattaaagtcaactatttaactatcgaaatcccatcacacaactcaccttttgagccttgcaggtgacgttgatggactggacgtcgtgtgcctggtggcgcaattctccgatgcaaagtccgcaggcgggagccttgcagctgaggcagtactgggagagggtctcctcgtgctccccgcagacggactccctctgctgggcggcgccgcgcggcttgaccagcgtgtgcttggccagcggtccgcgggcggggtgggtcaactcgcggcaggcgtcgcagtagcgaatctcgcactgctcgcagatcagggaagcgaccttgggatcggtctcgcacatctggcagcggagggcctcgcgggcgcaaaagcgatccacaatggcctccatggcgcggtaggtgggcagattcctaacgcctccgtcgtcgaagaagacgagcttgcggcagagcggacaggtgagacagtaggcggctccaggcggtgccaccacattgcccactcctggcagcagtcctgtgccggcataggacaccggacgcgatgtgttcgagcagcagaccacgcccgagtccgcctcgctgaagatgctcaccttgtccgactgatcctggtcggaggtgacgctctcgcttccggtattcgagctggccgtgctggcagcggagctgtgcgagctgtgccgtgtgccgggtccattgggatttgtgactggagcagctgctccgccgccggcaccgcctccattgccatgcaacccattgtgtcccgctgccgaagctgcacccgctccgttgacagcgcccggtagagccgatcccggactgtacggcgtctggatgtccagggcacagcccaggcagagggcgtggaaacatggcagcagcaccggattggcgtacagctgcttgcacgtgggacagcgcagttcgtcctccatgtctggtggttataatccgcaagagcaatgcgattcggattgagttggcgaggtcagaggtcctgtttaaatcggttttatcctcgctttagttgggttgcactctttgggacaacatgtctttggtaatcctcgaattattcactttacactttaataaaatcgcgtttaaaatcctgtttcttgtttacaacttgtgcgttaaaaccaaatcataaattgttttccacatttgaaacttgcgcaatttttgtttagttcgtagtttttggtatctcaacagtaccacactttttaccaatcttcactttgaattcaatttcaagtccttggaaaattcacttttcacaaattttgttaaaaatgtcctttgtttttttttatatatatattttgcagtttgttttctttctattcaactttcttgccactttgattacgcgcctaacttttgaacgcgaccaatttcgattttgggcatccgcaacacgaccgatccgcttgagatttttgaacgactggcagtggaataacttgcttccgcagtcgaggtttcaattcgaactcgaatgcgttcgactgagcgaaccaacttcttcataccgaacttcttcaagttcgaatgaaattaaactattgtctaataaccgctgaaacatacgcaaaaataattattgtaaaacgtataaacgtaaaataaaattattattatttttttttttgttttttttattgttttttatttgtcatgtgagttagttgttatttgttgactgaagttcgattcgaacatgagctggctcgattcgaacattctaacttgacagtttgactacagtttgagagcgactgcttaagaataattttctgagtaagcactggaaattaagaatttgatataaggatattaaaaataatataataataaataaaaatatttcaacaaagcattaaaaacaaatatgcgttcaatttcactatcgcattttctatcgtaatg

SEQ ID NO: 30287 - DNA, 924 bp, DROSOPHILA
atggaggacgaactgcgctgtcccacgtgcaagcagctgtacgccaatccggtgctgctgccatgtttccacgccctctgcctgggctgtgccctggacatccagacgccgtacagtccgggatcggctctaccgggcgctgtcaacggagcgggtgcagcttcggcagcgggacacaatgggttgcatggcaatggaggcggtgccggcggcggagcagctgctccagtcacaaatcccaatggacccggcacacggcacagctcgcacagctccgctgccagcacggccagctcgaataccggaagcgagagcgtcacctccgaccaggatcagtcggacaaggtgagcatcttcagcgaggcggactcgggcgtggtctgctgctcgaacacatcgcgtccggtgtcctatgccggcacaggactgctgccaggagtgggcaatgtggtggcaccgcctggagccgcctactgtctcacctgtccgctctgccgcaagctcgtcttcttcgacgacggaggcgttaggaatctgcccacctaccgcgccatggaggccattgtggatcgcttttgcgcccgcgaggccctccgctgccagatgtgcgagaccgatcccaaggtcgcttccctgatctgcgagcagtgcgagattcgctactgcgacgcctgccgcgagttgacccaccccgcccgcggaccgctggccaagcacacgctggtcaagccgcgcggcgccgcccagcagagggagtccgtctgcggggagcacgaggagaccctctcccagtactgcctcagctgcaaggctcccgcctgcggactttgcatcggagaattgcgccaccaggcacacgacgtccagtccatcaacgtcacctgcaaggctcaaaaggtgagttgtgtgatgggatttcgatag

SEQ ID NO: 30288 - protein, 307 aa, DROSOPHILA
MEDELRCPTCKQLYANPVLLPCFHALCLGCALDIQTPYSPGSALPGAVNGAGAASAAGHNGLHGNGGGAGGGAAAPVTNPNGPGTRHSSHSSAASTASSNTGSESVTSDQDQSDKVSIFSEADSGVVCCSNTSRPVSYAGTGLLPGVGNVVAPPGAAYCLTCPLCRKLVFFDDGGVRNLPTYRAMEAIVDRFCAREALRCQMCETDPKVASLICEQCEIRYCDACRELTHPARGPLAKHTLVKPRGAAQQRESVCGEHEETLSQYCLSCKAPACGLCIGELRHQAHDVQSINVTCKAQKVSCVMGFR

SEQ ID NO: 30289 - DNA, 2467 bp, DROSOPHILA
ttgcccaactccccctgatttccatggctttccctttccatttttctttttttttttgggcattgataactgacacgcagttgaaactgaaaacacgttagatgtatttgcttagcataatggatttgaggcactcggtgtttcggtactcggtactcgtataattgaaaatcgaatcaaatcgcgtgaaatttaatcaacttaagaaccctggaaactcgagagccaacttcaatgcggatcgggttcacaactccccaggcgagcgagcgaggaaatggaaaaattagcacaaatccatgtgataaactggctactatttgctttgaatcgagttactccacaaaagcccccgccgaaccgggagctccacctcaacggcaggaggattggcgaatgcgatggaggccactaagcgcacaggaagcccgtcggaacggatgccgcagctccggccatctgaactctagactctaatgcacgattaatgcccaatcccagacgcactgcttccacctccatatgcgatgtgcatttcctagtaacaacagtcgagcttcgacaaaaggaagacactgaattgatatacatctacaaatacatccagatatgcagatgtgtatttgaaacttataaaaatattaaaatgtgtagtatttggtagatatattattctatctcctagcaatatgtttggtttttaagttcaagctacagaagtcccactgtacttgacttcagatggagccgatgtcgtgggcgaatgtcgatggcatgtccattttcagaaattaagccctgtaagcggctttcatgggactttgcccacgacactcgcccatctggccacttgggccatgtggagctatgtgtggctttgccactggacggggaaacggaatggagttggagtcactttcgttgacgaccctttatttgataccatcaaagtcatcaacagtacagtatacagtgttctgtaagcagatttgtcacttcttcacttgttggcgcgacgacggcagttgccaaagatgcgcaggtgtttgctccggatgagctccctggcttcccattgactcagctcgtagatctccttctccatttgctggatctgggcagctatggccgccggcgggagtagacttagttctggagaaagttttgtttgtatatatatgaatttatcacctcgggaaaccacttaccatacatcttgcgcaggtcgttctccctttccacatcctgttcaccggctgcctcctgttcctggtcgttttgctcgaccatatcgtcgatgatggagtccgcttgcttttgatcccgctgactttcctcttcgctttccccattagaactgcccctttccatcttttccaactcgaattcgattgggtcctcctccaaagtgtactcctcatcgctgggacttccttcccgcttaatggacttcgtaacttttttcatattttcgctaaattattaacttttcaataggcttccttgttgtttgttgaagaaatgctgtgccagcgtgaaatcgcctaattgagcttaccaccttgctaatagaatatatcaaaacagaagggacccaagaaattagcttccgtacaccactttttgctggaatgacaggtttaaaatcccgaatataaatccacccttggcgaaagtttttccaacgcctaatgagctgtacaaaattaattgtcaccgcaggagggttgccaccttcaaaaaaggaatacgtaatgtgcaaatttccaggagttgccagggctgcagccaaggtcaatgtgggaagccctgcaagaactgaataccggccattagaaagcgtttttcaaaggactcggcttcttgtaaacaatcgatcgcaggcgttttccatcccccagaaaggaatcacctcttcagcccaagcaactttctttacaggggtgtatgatcaaaattatttaaaaggggatttttagtattataattgtgaataattgatatattgatattaataataataataatatgatgatatgaggaagatagaagattcaagaacttactaatacatttcataacaataatatttaaatcttaatgtccttgaacccctaaagccccctctttgtactcactacctccattgtccttgtcgcacgtgtccgcttgcttcggtggcggcttagcagccgaaggacatggacatggagtatatgtatgtcctgatggtgacaaagggacgcgtgctcattattccccctgtccagccgtgtattccgtctgcttttgtagctgctttatggccaaagtttttgggcaaagtatcgtttatagccgggtccgcgactcatgcaaattgaacaagttaaacttttgaaggggtcgctgttcgccccacccccaggactctccagaagcgttttccccagggtggctggcgtctgtgtaaacagtgtttgcaccg

SEQ ID NO: 30290 - DNA, 411 bp, DROSOPHILA
atgaaaaaagttacgaagtccattaagcgggaaggaagtcccagcgatgaggagtacactttggaggaggacccaatcgaattcgagttggaaaagatggaaaggggcagttctaatggggaaagcgaagaggaaagtcagcgggatcaaaagcaagcggactccatcatcgacgatatggtcgagcaaaacgaccaggaacaggaggcagccggtgaacaggatgtggaaagggagaacgacctgcgcaagatgtatgaactaagtctactcccgccggcggccatagctgcccagatccagcaaatggagaaggagatctacgagctgagtcaatgggaagccagggagctcatccggagcaaacacctgcgcatctttggcaactgccgtcgtcgcgccaacaagtga

SEQ ID NO: 30291 - protein, 136 aa, DROSOPHILA
MKKVTKSIKREGSPSDEEYTLEEDPIEFELEKMERGSSNGESEEESQRDQKQADSIIDDMVEQNDQEQEAAGEQDVERENDLRKMYELSLLPPAAIAAQIQQMEKEIYELSQWEARELIRSKHLRIFGNCRRRANK

SEQ ID NO: 30292 - DNA, 3688 bp, DROSOPHILA
gctatgcagtgacaccttttcttggtggctaagtgccctgggtcgattggtgctcatacagatccttccactctgggattggcggccctactatcatgccaagtgcctgataccacgcgatcaaagtgtccaagagcaggcaccatcattgggtaaagcggagaccttgcggcagaattgcgatctctgtgaaggtttgggtgagttcagttttcgatttgtttattacctatatttttaatcatttaattttcagagggaataggcacggtttccaatgtaagctactcctccttggagtctgagcacctagaacgtgggcaaccagtgattataacagacactggactgcaaacggatgtttttagtctcctagagcaaatagagaagaagtcacctcagtggctaaccagtgaaccttgtgatgtttccagcaatctgttgctgaggaaactttttaacctagaggcggctctggataagattcattcctggcagggacagacatcgaattcttggcaccttcaactgaggaactgccagaagaaggcggtgaagtcctctcggctttttctggatcgtccctactactacccacttcacctggccccgtattactccagctggctattggcagtccatcagcaaaagcgaaaccaagccgatatatacgtgcgtggcctagtgctcatccagcaactgagtggccactttgagatggttctccatccaaagaagccctgcaataaaggaatatgtccaagcttgcggatgcgactgaatgcaggagaaggtctgatctttaccacggatatctggagcctaagttatggtctggagaaaccccacggaaagctgacctccctggctagcattttcgagatagactggcagccgtagagtgttttagttagccgaaattgtatttacacacccaactagatacagacgaatcgaagcctaaagttatcgaaatttactgggagggaacagattcatcttaggcccggcggcacttggcctccaccaacttttgcagcgtgcccgtcaggctgttgatggcatcgatcttcatgcgctcaatccgctcctgctgcaccagtgacattttttggatctgcacctgttcgcgctgcaaactccgttgtagctctatcttctcccgctccacttccagttttctttcaaagtagtccttccaccagatgtcatcggggatgccagaagcttggtgcgagcccatgggtcgtgccagatcgtagagcttgccattaacttccagatgttggctgctatcgtttgtacgttcagcctccgcaacttgatcgccatcgtactccatcttgggttgacggactacctccgacatgctgttgctatcctcatcgaactcatcgttggacttgctgtccagattcatctgggcctgcagcaggacctgatccacaggtgtaatatacggctggctgtccttggccgcagtctggggtggaagttgcacctgcatttggggtgttcccggctttaggctcaccggagtaggttgaagctgtaaaggttgctggggaatacccggattcgggttttgcccattagccgaatgtggagcttgtggcgcatttgaagtctgttgtggcaactgcatatcaaagtcagccttcttgccctgcagatacttgaacatctcctcgaagaactcccagtgcacatagccggatacgtattttttgttcagattcttgttgtaggtgatgaggatgttatgccacttcttctgcacctttgcggcggagtagcgaaatcccagtcgctgtagttgccgggtgcagtgcagccaaagagcagtccgtttttgtctgtaagggagttacttttacaaagatgtctttacggtggaataaaaaccttgctcacctgccctctgtaaagctaccctccatgggaccgcgtatgtgaatcaatgccctggtggcctctgtggtccaagcacgctcgtaaggaccacgtcccacattattgcctgcccctgaggtatctgcctcctcgagcaagcaatcatcatccaggtcatccaaatcatcgtcacttatttgataggctatggaaataaaagaaataagttacctttaattattgtccttgttttgaataatataaaagcttacagattataataattatatttgatacccctttatacactacgaaattaactaacgaaatcgaggtagttctagccttatctgatttagcttaagttcaaaaacttgttgcttttgggcagcagtggcatctctggcgctctcgcagcatcctttcagacatttctctctctttgttatcctgctctcatgctcgctctcccgtttaagttatcacccaacgccaggccaaaaagcatcctagctatgtcaaagatgctagctgctgctgacatacacctttatgatacatacatatatacctacatatatcctgatacatgacacacactatgtgcgtaggtatgcacatatgtccttccactaggactgtgcagaccaacacttgtgcactttccgggcaatcactcaattttctattatgatttcacaattgccaatcggcagacttacgttcattatcctcgacattatttccgttgctaggggcttgcccatttcctgcgttgagctgaacttgagccattgcggctatcagacttttgaagtccaatctgccttttctgccagaatatgagcaattttagacctttcgcctgtcaatagttttctcgtactaacaggacaattttcgggctgcagcttccaggcgccgtgaacgtgaacttcgagtgcgcctactctctcgcgccttctccgctcctctctcgctcgctcttagatctggaaaagatgggaggctgcggctagccgaggagtagtggtattagtttccaagaaatgggcctctagaatggcgtggttgggtggctgggcggtgcagtgggcgccggagtgcagcatctgcgcactttgcactctgacttcgcaggtctgttagccgcagccacagcctcactggaatggctttatgtgattggaaagtctaacctaaatagttctagtccggctggattggaaggctatttatgaaatatttgggaaatatcaagatctgaatgctaaatgcatgtgtcaagttatgattgaagggccacatgcgaacgtctatatttgaaacctataaaataggtttctaaacctattcgcgtgaaatatataccaatttaactgtaatgctacaataatagataaataatggggcgcacacgtgctttccatgtatattttatttgtataaatctataagcgatcatcagatctaagatgtcataccttgatttaagtaagatttagtaagctaaagaaaatgtataaagtactgtatcacaattttctaactggctttttaaaacaagaactatcgttttatcgatacaccttcggtgttaccagctgattgtcccggcattttattgtgctaggtggcaactccaacgccgcgaatttgcgcgtggaacagaatacatttgttattaaataattttttattgtagttgttaagagacagagcctagacaatgcctgcggtggaaaagagcgtgatgtgagtatcggcagtgcgacaatattgaatgactaaataa

SEQ ID NO: 30293 - DNA, 1113 bp, DROSOPHILA
atggctcaagttcagctcaacgcaggaaatgggcaagcccctagcaacggaaataatgtcgaggataatgaaccctatcaaataagtgacgatgatttggatgacctggatgatgattgcttgctcgaggaggcagatacctcaggggcaggcaataatgtgggacgtggtccttacgagcgtgcttggaccacagaggccaccagggcattgattcacatacgcggtcccatggagggtagctttacagagggcagacaaaaacggactgctctttggctgcactgcacccggcaactacagcgactgggatttcgctactccgccgcaaaggtgcagaagaagtggcataacatcctcatcacctacaacaagaatctgaacaaaaaatacgtatccggctatgtgcactgggagttcttcgaggagatgttcaagtatctgcagggcaagaaggctgactttgatatgcagttgccacaacagacttcaaatgcgccacaagctccacattcggctaatgggcaaaacccgaatccgggtattccccagcaacctttacagcttcaacctactccggtgagcctaaagccgggaacaccccaaatgcaggtgcaacttccaccccagactgcggccaaggacagccagccgtatattacacctgtggatcaggtcctgctgcaggcccagatgaatctggacagcaagtccaacgatgagttcgatgaggatagcaacagcatgtcggaggtagtccgtcaacccaagatggagtacgatggcgatcaagttgcggaggctgaacgtacaaacgatagcagccaacatctggaagttaatggcaagctctacgatctggcacgacccatgggctcgcaccaagcttctggcatccccgatgacatctggtggaaggactactttgaaagaaaactggaagtggagcgggagaagatagagctacaacggagtttgcagcgcgaacaggtgcagatccaaaaaatgtcactggtgcagcaggagcggattgagcgcatgaagatcgatgccatcaacagcctgacgggcacgctgcaaaagttggtggaggccaagtgccgccgggcctaa

SEQ ID NO: 30294 - protein, 370 aa, DROSOPHILA
MAQVQLNAGNGQAPSNGNNVEDNEPYQISDDDLDDLDDDCLLEEADTSGAGNNVGRGPYERAWTTEATRALIHIRGPMEGSFTEGRQKRTALWLHCTRQLQRLGFRYSAAKVQKKWHNILITYNKNLNKKYVSGYVHWEFFEEMFKYLQGKKADFDMQLPQQTSNAPQAPHSANGQNPNPGIPQQPLQLQPTPVSLKPGTPQMQVQLPPQTAAKDSQPYITPVDQVLLQAQMNLDSKSNDEFDEDSNSMSEVVRQPKMEYDGDQVAEAERTNDSSQHLEVNGKLYDLARPMGSHQASGIPDDIWWKDYFERKLEVEREKIELQRSLQREQVQIQKMSLVQQERIERMKIDAINSLTGTLQKLVEAKCRRA

SEQ ID NO: 30295 - DNA, 3815 bp, DROSOPHILA
cgcaagctccagcagttggaggcactggcggagacctgtcggcagctggagcacccgttctcacagacctacgcggatctggcgcccttccgcgccatcgccctgtggaacaatggtaacgccgacgtggccctgatgacgctacatcgcggttacggggtaagcatgacttcggaggagggcaggcggatggcgcgctccgcattccgcaccatttccgaggagactctggcccagaagagtgaggcggtgctagtgtcgctgctggaggtagcgcgtgccattcaccgcgagcacaaggacatctttgtggtggcctgtgtgtggaagcaatgcttcgctagcgattggttttgcgatcaaaaatcggcttcggaactgtttgagcactacaaggagctgcaagagctagtggagaggaggtaagtcgctttaatttctttaaaaacccgaaatttgaatcccaatgtaaccttccttgcagagccagttctttgtgctcttcatttctggcccgtaacaatgttgatgcggtgcatcggctaatcgaggcgttcttgcagcaccagcagcgtttggcctgctccagctgcctcagcttgctctttaactatcaatgtgagtctgtgcaacacaaccgaatattatgtaactcccgtttcgtttttagatatgcgcaaggatctgcgagcctgcgctgagattgtcaaatcctgcagtgaattagagatgccgctaaatgagctgcagaacgaacagttcctcagtctgttcctcgaccagagcgatcctgtggactcttcgggaatggccagcaagtacaaggcacccaagtccttccagtacaagttctagtccccagtttccatcgttaagccgttgtcatcgtagttacagcacaagtgtttgcaccattgagcaatattgcaagcatccccatattgcaagcccccacaaggaatgtagtgtctcttcaataaatgttatttaatatccatcttcaggtggctccttcatccaccatgttgccctcgggcagttggccaggcaaaatgccgacgcattcgtagcagcgggatatcaagtggttgccgcatcgatgttgcaagcactgttggcaccgcgtccgcgatttagtgccacgcttatttcgagcgcagggcttgcacctgcgatgcttctctccgtaccgactagccaaattaatgcccaagggcaggctcatcttgtcgggtgttagcacgcctacgctgtgcgttagtttcgcctcgccggtcgcctcactgagcagccgctgactggattggcccaggatttcgcagatttgcagtcgcatcacgagcgaagtgctggtggatcttcgctgaaggcgtcgctgtaatctctgctgtgtgaggaagagtcccaactgtctctggaagtcgcgctgatccatagcggcatcgcctttgggcgaaagtcgtaacaggatccatgcattcacggcagccgcgttgagcacaaagtgaagtagttgcagaaaaggattgatctgctttttcaagggtgcgggcgtagcgtgggctgtgctgaagcgctgggagtgttcgtaaaactgctgacaggcttctgaggtttgctcatatgcctggactgcatctacttgggagctaagaccgcagcagaagactgcgtcgccatcgagcggaatgagttttgagctgccaccaaacaagggtgattctgtgggccactgccgcggccaatgtggcgaattggcctccagcttacccaacgagcttatttgccgctgcgccaactgctcgcactgcgtcaagtttagataccgtgatcccagcgttacatttcttcccgtggtcttgaaatcgcagatcagttgttctacatccttgtccggacatctctggtttctgcttaccactgcattggccatgtacagtgtcctggcatcacagcagagggtcatccgtgacttggccaccgcgcagaatgtctcatccacggtcaaccaactgctgcagccgtagtaggatctgcaattgattataaggcgctgccagagcttttggccctcggaccagccgcaatttcccgccagacactcggaaatgctttcgaatcgagcgagcgacatggatgctcggaatatggcattgcccagctccagggtccacagctcatccaatggcccattgtgcctggcatttcggaacactccacaaaggtagcttagacccaagaatgcccgcagctccacaacgtctaggggtctctggacacttgtggccgttctccgcttacgcatctgttcattgatatggcgaagtaaagaccgcagcatttcatcatcgaagagcagcatccatgcttccactgcattggacactgttcgggcgggtcccttgccacaggcctgttgccccaaaaggggtagatcctctgcagaaatatctgggctcctggtcacgctccatagctgcccacaaggagatgtgtagtttccgttattatttggtggacgaccacgtcctcgcttcggggcagctggcctggcggaatcctccttcttcagcaccacgtcagccagttggtcctcgttcatcagcatgtcgctgtcctcgaaaatccagggaaaattgcatactgcttcctgtagcggatcggagtcatctccgttaaaggaggcactttggactgtggaatcgaccggcggcagccgctcctccacctccatcttttcaccatcctcgtcttcttcctcctggtcgctacatttaatattggccagcagctcctcgtccagcacgcattccattgtttgtttataaacttgcaacaaaacaaaccttttcagtcgtcgataggttaggacagtaacgtctatacatatcgataatttatatagttatcgaaaaagacatttaaaacataaatcttaagcttgaaaggttgaaaacttataaaaaaaatagtttgttctatttagaaaaaattatgtacattctaaatataacttatttattttaaatgtagatttaatttccagcgtagagataactagtgtatgtttataattcttaaacaaattatacttaacaaaacttgtatttattcttggcgccactgttcaaatttcaaatgaacctgccaactgaactaactccccagtggacccccatccatgatttatcgcacataagcggctatcggatttctttcgccactaatttgttgtttggcacgcagcaaggaaaaggaataaaacgctttaaaaccagtgccaaaatagctttccccaacgttcgttactatatttacgttgtctgcaaaaagagtttgtctaattggcctcgatactacggttgtgacgactgccccgtcactacagtttgctgagtgcagtaaccggggcctggctgaaacactgggaaaaccagtgtttagtgtaaataaatgatagtggcacccattcggacatcgcaggtgaatccccgggagctcaagacgcccgttatttgggcgcgcagtgaatttgtcaaaatattttggttaaagtgtcaatttgacatgttatatgtcatggtctctcgtgtgccagtgcgatagttatcgatagatagccccaacttaatttgttttaaatatttttaaatttcttctttacttaattcactactgtaatacgttcgtttaatgtatagttccttggaaattaatcgatttagcaagtagaccgattggaaagaaatcaaaaatcgatttgaaatgcgtatttgaaccttagttggccatgactttggtgtctgaatgacgcc

SEQ ID NO: 30296 - DNA, 1815 bp, DROSOPHILA
atggaatgcgtgctggacgaggagctgctggccaatattaaatgtagcgaccaggaggaagaagacgaggatggtgaaaagatggaggtggaggagcggctgccgccggtcgattccacagtccaaagtgcctcctttaacggagatgactccgatccgctacaggaagcagtatgcaattttccctggattttcgaggacagcgacatgctgatgaacgaggaccaactggctgacgtggtgctgaagaaggaggattccgccaggccagctgccccgaagcgaggacgtggtcgtccaccaaataataacggaaactacacatctccttgtgggcagctatggagcgtgaccaggagcccagatatttctgcagaggatctaccccttttggggcaacaggcctgtggcaagggacccgcccgaacagtgtccaatgcagtggaagcatggatgctgctcttcgatgatgaaatgctgcggtctttacttcgccatatcaatgaacagatgcgtaagcggagaacggccacaagtgtccagagacccctagacgttgtggagctgcgggcattcttgggtctaagctacctttgtggagtgttccgaaatgccaggcacaatgggccattggatgagctgtggaccctggagctgggcaatgccatattccgagcatccatgtcgctcgctcgattcgaaagcatttccgagtgtctggcgggaaattgcggctggtccgagggccaaaagctctggcagcgccttataatcaattgcagatcctactacggctgcagcagttggttgaccgtggatgagacattctgcgcggtggccaagtcacggatgaccctctgctgtgatgccaggacactgtacatggccaatgcagtggtaagcagaaaccagagatgtccggacaaggatgtagaacaactgatctgcgatttcaagaccacgggaagaaatgtaacgctgggatcacggtatctaaacttgacgcagtgcgagcagttggcgcagcggcaaataagctcgttgggtaagctggaggccaattcgccacattggccgcggcagtggcccacagaatcacccttgtttggtggcagctcaaaactcattccgctcgatggcgacgcagtcttctgctgcggtcttagctcccaagtagatgcagtccaggcatatgagcaaacctcagaagcctgtcagcagttttacgaacactcccagcgcttcagcacagcccacgctacgcccgcacccttgaaaaagcagatcaatccttttctgcaactacttcactttgtgctcaacgcggctgccgtgaatgcatggatcctgttacgactttcgcccaaaggcgatgccgctatggatcagcgcgacttccagagacagttgggactcttcctcacacagcagagattacagcgacgccttcagcgaagatccaccagcacttcgctcgtgatgcgactgcaaatctgcgaaatcctgggccaatccagtcagcggctgctcagtgaggcgaccggcgaggcgaaactaacgcacagcgtaggcgtgctaacacccgacaagatgagcctgcccttgggcattaatttggctagtcggtacggagagaagcatcgcaggtgcaagccctgcgctcgaaataagcgtggcactaaatcgcggacgcggtgccaacagtgcttgcaacatcgatgcggcaaccacttgatatcccgctgctacgaatgcgtcggcattttgcctggccaactgcccgagggcaacatggtggatgaaggagccacctga

SEQ ID NO: 30297 - protein, 604 aa, DROSOPHILA
MECVLDEELLANIKCSDQEEEDEDGEKMEVEERLPPVDSTVQSASFNGDDSDPLQEAVCNFPWIFEDSDMLMNEDQLADVVLKKEDSARPAAPKRGRGRPPNNNGNYTSPCGQLWSVTRSPDISAEDLPLLGQQACGKGPARTVSNAVEAWMLLFDDEMLRSLLRHINEQMRKRRTATSVQRPLDVVELRAFLGLSYLCGVFRNARHNGPLDELWTLELGNAIFRASMSLARFESISECLAGNCGWSEGQKLWQRLIINCRSYYGCSSWLTVDETFCAVAKSRMTLCCDARTLYMANAVVSRNQRCPDKDVEQLICDFKTTGRNVTLGSRYLNLTQCEQLAQRQISSLGKLEANSPHWPRQWPTESPLFGGSSKLIPLDGDAVFCCGLSSQVDAVQAYEQTSEACQQFYEHSQRFSTAHATPAPLKKQINPFLQLLHFVLNAAAVNAWILLRLSPKGDAAMDQRDFQRQLGLFLTQQRLQRRLQRRSTSTSLVMRLQICEILGQSSQRLLSEATGEAKLTHSVGVLTPDKMSLPLGINLASRYGEKHRRCKPCARNKRGTKSRTRCQQCLQHRCGNHLISRCYECVGILPGQLPEGNMVDEGAT

SEQ ID NO: 30298 - DNA, 4771 bp, DROSOPHILA
tgacttcccaggccgttgatgctctcggtgattgcctctattctggtatacaggatacgttcgaacagttttcctactatatccagtaggcatagagggcggtagctgtttgcagcatgtgctggtcccttgcctttcggcaacaggactagcttctggcttttccaccttgttgggaagattccgtccagaaggcattgctggaaggtggccctgaagatttcaggtctacccagcgccactgcttttataacagctccaggaataccgtctagtccaggggctttgttgggtttgatgcggaaaagtggaggtggaaaatcgcaaaggggtgggaaaatgtggtgacgggcggcgagcggttgggtggtgttgctgttttcttgccgcttgttagacgttggctttggcgatttgtttgcatgccatttcttgctctgctttcgttttttatcatcccgcctgcgtttcccgcctccgtttttaatgcaaaatcaatcggattgcgcccagccgagcattctaaactaaaaactgttcgcgtggaataaggcgaaggttgcggattgaggttgcttattaaaccgcttgttgcgttcaattacaatttttgattttattgatacgagtacttgacacgaacatttacagggatatgcactggcttagctctaaaacatttaaacgttaaaattattgttatccgttttgcttaaaatgttattttctctgtactgagagcgtgatatttttgtcaacctttttaactcaaaaacacctaaagtaagtgtgcttttcatagcatatcaaagaaagattctagccatctttttaggtggttgagattcaatgaaataactgaaaactaaactagtttcttattctgcagtaataacacatgaattcaccaatctcaacctatcttaatcatagttaaagcacgattgtggtttaggtttcggtttgcagccatacaactaatgtgaactgcttgttaggctcacacataaccactggactccagtttgatggcaccctcgtatgtgggcagccccgatctatcgatgattttgctcatgtccaggctgatgattccattctcgttgatgttgtccaagttctgctcctcttgctccttctgctggcctgtggccagctcatcctcccccgattgcccgtgggatgttgctggtgcgtcggaagttgatggtgtgtccgatgttgctgcgttgtcgttttcatcgttggcagcagttatggaaaagagcacggcatcattttgaggttgctcatcgagagtggcggccagaaaattgccgttggcctcatcctgcagatcgtcaccagaaatgtggttgccattgccattgtcgatgtcgctggggcaggggcagatagacggctcatcctcctccctgcgcccgcccatgttcagaccgctctccacggacagagcggtcagtggttcatcatcgacctcaccttcatagcggaacttgccgcacagcggacagccacgccggtagtggtttgcactatgctgatggctttgctgcaggtaccgccgtccgaaggtgttcaatctgacattctgtgccggcttacgtacctgcagcgtctccatttccaggcaatttccgttccgggcagccaccgccgccgcagcagcattccacatgctttccacctcggcccgctgcagcgagcagcaggattgggcatttagggccagttgcaactgcttgttgaccagcaggccattggaacctcctggtgcgcactgcacactgccactggccaccgcatccacactgccatctggtgtgccgcgaccgaagctcgttgccggctggccgctgatgtccaacgaggatcggtatcctggcggcggcgagacgcgttgcatcagcagctgttgctgttgctgcagttgcagctgtaattgctgttgctgctgttgctccagctgctgctggtggagctgctgttcgtgcagcaccactgcatcgtacgagggcggtggttcgtggtgcaaggcgggcacggcggacagaccatcagtggagtcgcctaggaacaggccagaagtctcgtagcactgagggattaaacgaacaattaaaatcgattagcaggaggataaaagaggaatttgcaaagattgtaaggtttgattttctaaaagcaatgtaatttttccctgatgtggagctggtatataactctcaaggtcgtgactaattgccgatctccgcttggtcgctctgtaaattactttcttaatggagacgcggtggacaagtgaaatttacgcgatcaaataaaaagtttaaattgcacacatcataaatttatttgtctctgccgcgcaatctgcaatcccattctcattcctattgccactcccatgctcccgtgctagaaacccgccttcttctgtccgcagttgacatctgtgcctggccagactaacgttgatttacgtggagccttttgccgccactttccccccacccccctttcccagcgggccaacaaacaacaatgaactgaatgatggcctatggtggggctggtgggtggttggatggttgtttggttggtttgcgggttggtcggtggattgtgggccgaatgggaaggcggctcgtaacctaataaagagcacggccaagtgagtgcgacttctgggccacttgcactggcttggctggctgtatggccagccgcaattgtcgcgcccttttggtcaactgaacccactttcccccggatgtggcacctgttaaatgcggcgcataaatatccattacactcctgctgctccatcctctcccgcactttcagttttcgacttactttcaaactgtcgccacgaaatgttggcttacacttgaaaagggacaattatggccggattgtgtgttgttctagcgcccaaatgcctaaaacatcagaatggtggatattattattattattattgtgatttcggccaccaattggaaaactgggctgatttgattgaagctgaaagctgaaatcgaaaaaactaaattgtttgcttggaaagtttgttgtgtagtttgcttaatatcatatatgtatatatttgcactcttttcagccagcacttaaacttaatagtcgctaattgatttttagcatttgatcgctttgaaattgtattcgtattgacaaaagcaaattgacaagccaatcactgataaattgccattcatttaggtatttagcatgctttgaatctggttaatgtaagcctaggacttgtataactttatttatttaagagccagacttactctcccatttttcacacacgtttggaatgtgtgctacttatttgaaccaccaaagagaagtaaatagcacatactgccattactggatatgattaataaaattctggtttcccccgaataagcaatgatgtccgtcgtccacttccattgtggcccaactatcatccacttggaatgccgttgacatccgtttgcaactatggctgggtggacaacaaagctctctgccagaaccccgggcatcatggaccatctatgcataggctttgagcatatactcgtattagctcctccaactcacctgctccacgctgtatatttccatgttgggatcgccctcgagccactgatgctgctgctgcctgtaggcggcctccgttcgctttttgatgttgcgatggcaacaatagcagaccacacacaatatagtcgtcaccagggaaagcattgctctgcaacaaattaaatcgaacggggatgtgaatgcaatgctattcattgaatgttataatgttattccaacgacgaaacagacatcaggccaacattcaaacatatttatttgctttggctggtgacacgaaattgattgcgggccttcgataaatgaccagtgcgataataacgtattaatacgcattcggtatttattaattttgccatacaaattgctagtgcttgtatgtttatttatattgggttggctttgccagcattttgatagcataaatttgccacgaaatattgacatttatacatcatggtagcggaaattactcttcttgccttctcggttttaattagataatgcagttttggcttttaattcgactcccaactcatcttgcagccaaacaaagggcaatttcaatgctcgcaagtatgaaatgtagagcatattgccaattatctcgatttaactaagctgccacaaacacacacacacacacacacacatttcaaatcggcttggagaatgtgtgtgttagcctaataatattccacatttcgccttttgtctaaagagctaatattatggatttatcaaattttaattgtctgtcgttaggtggcttagaatagtcagattatgtcaagtgcttttgtttattaaacaaacacaatatgccttgaaatttggtcaacaaattccccatagctggtatcagtgaattcggaaaggtgtagctctatctgttccttaattcgtcaataaatccgaaatgaccccaccactatcaactggattgccagttatcaaattttccttttagcgctgtcggccaatttatgtcggtttattgaaacccactggtttatttggtcggaaatggtttcgtgtcgtgtcgatttcgtagctccaggcatttccatgacgtcacttaatccactttagaatgcaacattgtgtcccacttgtctgttcactgtcttccactggcccacgt

SEQ ID NO: 30299 - DNA, 1374 bp, DROSOPHILA
atgctttccctggtgacgactatattgtgtgtggtctgctattgttgccatcgcaacatcaaaaagcgaacggaggccgcctacaggcagcagcagcatcagtggctcgagggcgatcccaacatggaaatatacagcgtggagcagtgtaagccaacatttcgtggcgacagtttgaaagtaagtcgaaaactgaaagtgcgggagaggatggagcagcaggagtgtaatggatatttatgcgccgcatttaacaggtgccacatccgggggaaatgctacgagacttctggcctgttcctaggcgactccactgatggtctgtccgccgtgcccgccttgcaccacgaaccaccgccctcgtacgatgcagtggtgctgcacgaacagcagctccaccagcagcagctggagcaacagcagcaacagcaattacagctgcaactgcagcaacagcaacagctgctgatgcaacgcgtctcgccgccgccaggataccgatcctcgttggacatcagcggccagccggcaacgagcttcggtcgcggcacaccagatggcagtgtggatgcggtggccagtggcagtgtgcagtgcgcaccaggaggttccaatggcctgctggtcaacaagcagttgcaactggccctaaatgcccaatcctgctgctcgctgcagcgggccgaggtggaaagcatgtggaatgctgctgcggcggcggtggctgcccggaacggaaattgcctggaaatggagacgctgcaggtacgtaagccggcacagaatgtcagattgaacaccttcggacggcggtacctgcagcaaagccatcagcatagtgcaaaccactaccggcgtggctgtccgctgtgcggcaagttccgctatgaaggtgaggtcgatgatgaaccactgaccgctctgtccgtggagagcggtctgaacatgggcgggcgcagggaggaggatgagccgtctatctgcccctgccccagcgacatcgacaatggcaatggcaaccacatttctggtgacgatctgcaggatgaggccaacggcaattttctggccgccactctcgatgagcaacctcaaaatgatgccgtgctcttttccataactgctgccaacgatgaaaacgacaacgcagcaacatcggacacaccatcaacttccgacgcaccagcaacatcccacgggcaatcgggggaggatgagctggccacaggccagcagaaggagcaagaggagcagaacttggacaacatcaacgagaatggaatcatcagcctggacatgagcaaaatcatcgatagatcggggctgcccacatacgagggtgccatcaaactggagtccagtggttatgtgtga

SEQ ID NO: 30300 - protein, 457 aa, DROSOPHILA
MLSLVTTILCVVCYCCHRNIKKRTEAAYRQQQHQWLEGDPNMEIYSVEQCKPTFRGDSLKVSRKLKVRERMEQQECNGYLCAAFNRCHIRGKCYETSGLFLGDSTDGLSAVPALHHEPPPSYDAVVLHEQQLHQQQLEQQQQQQLQLQLQQQQQLLMQRVSPPPGYRSSLDISGQPATSFGRGTPDGSVDAVASGSVQCAPGGSNGLLVNKQLQLALNAQSCCSLQRAEVESMWNAAAAAVAARNGNCLEMETLQVRKPAQNVRLNTFGRRYLQQSHQHSANHYRRGCPLCGKFRYEGEVDDEPLTALSVESGLNMGGRREEDEPSICPCPSDIDNGNGNHISGDDLQDEANGNFLAATLDEQPQNDAVLFSITAANDENDNAATSDTPSTSDAPATSHGQSGEDELATGQQKEQEEQNLDNINENGIISLDMSKIIDRSGLPTYEGAIKLESSGYV

SEQ ID NO: 30301 - DNA, 2366 bp, DROSOPHILA
ctcgcatgtcaacagttcattagggcccttttttttggggggctcagcttttccggccttcccattccgcagcgacgaaaacagacaacagcgatttcccccactccggttttttattttagctattttcaatgaactgcccaagacaatcgataaaaaagtagttaaaataaattttttttttggcttgtgtgggtcgcgcgtgatgtttgcagacactaagaaaaccccataaaagcgtgtttacaaaacctctttgttgctctgcggttactccgaaaaaatagaatagctcgtgttgcacatgaaagtttttttttttttttacattttattaacaagcaaagccagtgctaggatgctagggtttcgacgaagcaaaaccgaaagtaaaaaaatgccccggcacaattataattatgattttcagcgcagaagagcggaagcctgacatcttctcttgctgttgatgcttattaattcgcagctccttcccataaatcaagtggtgccaggcattatgatctatggtagtatcttgtaatatgcttcttgagtgttcttaccaaaggggtacttgctgcaaacatttcactggaattttcaagatgctccttgttgtcgaacgaaaacttagtggttagctctgattattgaatggcaaactaacttgtggcagtaaactattagctggaatgacagccacatttcgtatgaattatctatatgaaatgattgcggtatcctttaaaaatactgaagagagcttctttaaaatgtaaatacttgaacaattccgctctcgttagctgcgaagccaattgttttgggcgaactttcttggcaactctaattaattaattgccaaatgactgaggggaatgctcagctatttgccaaaacttccagacactctttcgcatttcccacgggccaaaaggtgacttaacttatcgcttgaacttcgcatcagtcgtatgttccaactggcaggacagacttacccgccgagcagcagattcacattgccgttgacaacatttgcatatgtctggggtccactaggtcctccgccgccaccgacgcccgagatgacggatccggagccactgcgctgctggtgatattgccccaatccgccggtgtagtaggtggtgtgtgtgacaatcgaggaggaggatgagacatgctcctgggactgcagctgttcctcgctgacgaaacttccaaacgctgacgaagatgatgatggcggcaatggtggttccgttgtggaaaccagcgatattgttgtggccgggattgtgtgattctgattctgattttgaccaaaggccagcagagttgcataacgtttgagagacatttcactgcgagtggaaatcgagccacggcgattgcataacgattagcgcggcgcactcattacatggccattagcacgcacacttcagccccgaaggaggcgcatctagcctggctaacagcgaatacctcggctctagaccgcagcaaggacgaaaggcgactgccaggagctagccctcgcaaatcgacgagccgaaggctacggcgacttcagcacgacagcagcaccgagtcaaacataaaactttggactaaaactaacacaaacactaaacgaaacacaagtttaatacttttttataaaagtttccttgacttgtcatatgtttaaatatttattttcgaatttcatacaaatttatggattaagtaagtttgaggatatatttcattaatatcttcttaaagtttatttattttcttttaatagttttcacagttgaaattaaatttgcgtcacctttatctatcatatgttattatttatgtagtattatgtacatatatatattattttaatgcactataatcatgaacttgcaaagaggtttggaattcgatacgattttttcctttctaaggaattaacactttttcatagccacattgtttgcataactcaatgcatttaaaactttaagccattatagccttttttttttctgagtgtaactggtagaacgatcgatggccaaggcaagtctatttccgtaactcttagttttggccgcgaaccgcgagttgtgcgtctgggcaaatgcgttgcgctgctgcaactgagctccggcttgacttgctgactagtttactggctggctggctggtcgtcctgtcccgaggactttggcttggcttatccttttgttgtgaacccgacgaagttgccttggcaaccgaacgggccagccttcggcttggactcagcacttcggctgtttagctgctgatgtctgtggttacttctgctcgctgctgctcgcctgttccacgttgcgttg

SEQ ID NO: 30302 - DNA, 366 bp, DROSOPHILA
atgtctctcaaacgttatgcaactctgctggcctttggtcaaaatcagaatcagaatcacacaatcccggccacaacaatatcgctggtttccacaacggaaccaccattgccgccatcatcatcttcgtcagcgtttggaagtttcgtcagcgaggaacagctgcagtcccaggagcatgtctcatcctcctcctcgattgtcacacacaccacctactacaccggcggattggggcaatatcaccagcagcgcagtggctccggatccgtcatctcgggcgtcggtggcggcggaggacctagtggaccccagacatatgcaaatgttgtcaacggcaatgtgaatctgctgctcggcgggtaa

SEQ ID NO: 30303 - protein, 121 aa, DROSOPHILA
MSLKRYATLLAFGQNQNQNHTIPATTISLVSTTEPPLPPSSSSSAFGSFVSEEQLQSQEHVSSSSSIVTHTTYYTGGLGQYHQQRSGSGSVISGVGGGGGPSGPQTYANVVNGNVNLLLGG

SEQ ID NO: 30304 - DNA, 2961 bp, DROSOPHILA
tggccgagctcagtcatcgcatactaagggtagggacacctagttaaatacccaactttatttttacattcagaaatccgcatttttcaaccacagataatagtgaaacaagagtgcacccgcaaggtgggcacttccctgacgcccgaggaggaggccttgcgcaccaagctacagaacatgctggctgtcgtctccgcacccacccaattcaagggccgactcagcgagctcctctcccagatgcgcatgcagcgcaatcaattcgcagccaacggtggtgccgagtatgccctcgacaaggaagcggaggacgagatgaagacctttctgacgatgcagcagcgcgccatggaggtgctgagcgataccgtcaacaaggacctgagggcgctggatgttataattaaaggactgcccgagctgcgacaatcgtgataggaatggaaatgagctgatacgttgaataaaacccacatatgtgtaacacaacccggtgattttcgatgatcgagacaacgaacaagttgtggccgttacacttttgccattatgtcgtcgtttagcatttcctgtagctttgaacttgcacttttacgggcaatggagtcgaaacaatcgaaacgagttcacacattcgtcgccaatgctgcggaaataattgtgtgggtcaatgcacttgcaccgcacagctcttggaccgcccgacttttcctcggccactgtctgaaattgtccaatttcgacggctaggcagaaggcaatcgctcggactcattatgagtggcaaacggttcgtctctggcagttccagtttgttcaactcccagcatcggtatcaccatcgttgttacattaacattattatgtgctctggcgtgtgcatacatgtgcagtctagttagttggctcgttacatatttatttcttgtgtgggaaactagttttctcccagtcaaccagccagccagggtccgtgcaggttttttgttggccattgatggcggagacttccgagcttccgtttggagcatgtagcgccagtataaatgaattggccagctccaaggaggcctcacatcgtttcagatctaagaaagtgaaggtggttcaattggagcactgcatatgaggagctgaaagtgaaacgttcagagctatgggaattaaattggacatgaatggtttattggttgtgagttgtttggcttgaccgctcaatgcgaaaatcggactaagttttcacatccttgcagttgtttttgtgcgccttttgctgcagcgtggtggccaaaccaccgacagctcggcgggcacagctgcacgacgatgtccagcttatccatccccacatcatcaccatagagcgtttagagaatttgctgcggcgtgctggggaaatctttggtccggctctagaggaagatgccatggcggaggccagtagtcaggtgcaggagcaagtgcagccgcagcagcgaatgctgccgccaacggagcagccgtataacttctatttacctctatacgacttcgtggagcccaagctggatgccaagagccgaatgctggagaagattgctcctccgccgcaaaagacggagcacaactactacgcggaaaagccaaaaaagaagccaaagaagtttaacgctgccaacaagcacatcaacctcaatctcaagtggcttaacacctacgagagggccatgggcggagcaactgcgcccaaagccatgtatctggagcaggacgagcgcaaccgaataaacttcgacgactccttctttgcggtggacatgcaggtaaagattccggataatcagccccacaaggagccagctgcgcccacagagctcttgcagcatggcgaagagcaggccgaggaagatttgatggcggctcctgcgcagttagcctttaacttcaagtctcccgtccaggaagaacgtcgaacatagatgcggttttttttgctataggttttagtcagttgtataaaaaagctacaataaatgcacttagagtgagtaaagtccagaatacggattcgaccagttggcctcctcctacttcttccgcagctccttgcagaaggtctcggcagcagcagcctcgcgagacacgggcacatttttctgagcctcatcctcctcgagttttttgacaccctgacgcacaacgcgttcaatgtcgtccagcaatccggaggctccgaaacggaacctctcgggacgcaaccagcggatgccaagagtttcgttgaccaacgtcatccaggcgatcgcatctcgtacagtctttactcctccggctggcttaaggcccacaatctggcacgtgcgtcgtttgaattcctgaatggcaaatatcatgaccaggccaacgggcagggtggcgttgactgtctcctttcccgttgaggtcttgataaaatccgctccggccatcatgcaaaccatggctgctttgtaaacctaaagaaattaatggatttgaatggtattttagtatagggattaggcgatattgatctcacattatccatggtgcccagctccccgatggccagaattgtttttaggtgagccctttgtccacaggcactgcgcataaggaccacctcgttgtacatggcctcccagtcgccaacgagggccaactggcgattgatcacaatgtcgatctctgtggctccagcaagaatggcgtggctgatctcctgcaggcgggtctgcaggccgtactggcccgtgggaaatcccgtggccaccgctgcaatagccaccttatccagtttgtcgtactgttggatagctaaataggcgtcctttaccctggcgggataaacgcaaacggcggccgtgtgcatctctgggatgagagcccggtcgaagaacttgtcaaagaactgcggctcgaagggatagcaggcgcgtaggcatagtctccgcacattgg

SEQ ID NO: 30305 - DNA, 804 bp, DROSOPHILA
atggcggagacttccgagcttccgtttggagcatgtagcgccagtataaatgaattggccagctccaaggaggcctcacatcgtttcagatctaagaaattgtttttgtgcgccttttgctgcagcgtggtggccaaaccaccgacagctcggcgggcacagctgcacgacgatgtccagcttatccatccccacatcatcaccatagagcgtttagagaatttgctgcggcgtgctggggaaatctttggtccggctctagaggaagatgccatggcggaggccagtagtcaggtgcaggagcaagtgcagccgcagcagcgaatgctgccgccaacggagcagccgtataacttctatttacctctatacgacttcgtggagcccaagctggatgccaagagccgaatgctggagaagattgctcctccgccgcaaaagacggagcacaactactacgcggaaaagccaaaaaagaagccaaagaagtttaacgctgccaacaagcacatcaacctcaatctcaagtggcttaacacctacgagagggccatgggcggagcaactgcgcccaaagccatgtatctggagcaggacgagcgcaaccgaataaacttcgacgactccttctttgcggtggacatgcaggtaaagattccggataatcagccccacaaggagccagctgcgcccacagagctcttgcagcatggcgaagagcaggccgaggaagatttgatggcggctcctgcgcagttagcctttaacttcaagtctcccgtccaggaagaacgtcgaacatag

SEQ ID NO: 30306 - protein, 267 aa, DROSOPHILA
MAETSELPFGACSASINELASSKEASHRFRSKKLFLCAFCCSVVAKPPTARRAQLHDDVQLIHPHIITIERLENLLRRAGEIFGPALEEDAMAEASSQVQEQVQPQQRMLPPTEQPYNFYLPLYDFVEPKLDAKSRMLEKIAPPPQKTEHNYYAEKPKKKPKKFNAANKHINLNLKWLNTYERAMGGATAPKAMYLEQDERNRINFDDSFFAVDMQVKIPDNQPHKEPAAPTELLQHGEEQAEEDLMAAPAQLAFNFKSPVQEERRT

SEQ ID NO: 30307 - DNA, 2773 bp, DROSOPHILA
cccgcaagttcaagagttcgaatcgataaaccttgttttgggggcgtggctgcctttgatttctcacatcgttttaaatattctagaatctcggatctaccgcgatgttgtgattaccaaaatcatcggctctgacaattgattaatggatatcgaattggatgcattgattgattgacagccattgttgttattaatactcattaatgcaaaacgggcgtttcattgtttatgatgcggcttaaatttgatttaagcgacactaattacctttgatcccattggatttgctgaaatgtaaacaaattgaaactcgtctggccaatcgatcttcgttgaatgaagcagttgaatgtctttttcggggatcatctcttctgggttcgggaagctgattcacaaatcgataaatccagaggtgaatgacttgcatcgatttagttcaggtttctaaacaagaagctacaattttgaaacaaatcaaagggaaattatttcgattcgttgttatgtataagacttatccaacatttaaaaatttaaaatgactttttcatgggacttttgaaaaagagctagtgttatcaatcattcgtagtatatcttaatacacaactaattatggtatttaaacacaacttaattaatgccatttgtctcctgcagatgtcgcccccaatttttgaaccggctcctccgcgtcgacttgcatctcagaaaggttaaaggcgatccgctactgccaatgcaaactagttgcccactaagttgtttccaaatggcttgttagtatgcaaagaattctagacggataagctgatatcgattcgttagccaccgaataaacccgcgtcgcgcctgtattaaagccatctaaacgatctcgtcttgggcgtaaagaccgcgatttattatccgcacaacaatcgtcggcggggaggcaaactaaaatggccagcgggtgcattggggtcgaatcagacgtaatcaagtagtcgatatggacacacgcttgctgactgcactattgctgatcgcggcttgcagggccgaggatccagatttgggtcaggatcaggatcaggcgaagatcacgtttaagccgggccgatatgtgccacgcctgcacggtgccacgggttggtatgttccggatgatagtggaaagtaccggcacgatcccaggccctatgacggcggctatggagatcgtggtgttccctatgactccgatttgagcggcattttccggaatgcccagcgccaactggaggcaaaggtccaggaggccggtgaaggtctatccctcggtccacgagatcatctgcgattcatgatcgactttaatttcaatggcaccggctggcagataatccagtttcaatgggtacgagatggcgatgagtcccatccagacaccaaggagtacagctacttgacggagaacaagctatgggactcggatcaggcctatgcgtaccaggagcccgacgatggctgccatatcaactgtcagccggagacggcggtatacccgctacaatcggagcctgtccaggagccagtggtgcagccaactcaggagcagcaacagtccagaacaaacatcaattcagagcaggatgtgagtagtcaaaaaatatctaaaattctagaattgctaagtaaagtattgctttcctttagcctggcaagattcatgataccatcaatgaagtcctggagtacatacaacaacgaatcctgcctacgttgccaattaaaggggagtaaatcggtttcagaaacattcaataaataatgaaaataaataaacagtgtggtttttatatcaaggtatatcaaactttagtagatatactagagtttagctcacggctcatatatattacacttgaaaaatccataaactattaagaatatttatcccttaatctgataaaattaaactaacttacggacttcagaaacaggatgtagataattgaaagtatttggtcctcttgattgaaacacctttgaattcctatggcacatcaatttattcaatttaaaatgtatacacttgtaaaatccaactttatttcttcgtcttggcatttgcttccaaaaaggcgagtaacttttccacatagggcggtggtggtggcgctgtgggcaggtgggcggcacttggcacaaagccattgtcgtctgctacatagtccacgcggtagaggatgccgtcgggtccagtgtactcgtagaatcccttggaacgaagtccctcctcctcggtcagcttttcgatgcgtccactttcctcgcctaagatgccgttctcagtttcccaactaaaaagcatggttttaaaatgcgtcacattgaaagttacacaatacccacagatagtgatagccatccacctccacatcgtcttcctggcggatgatggcccatccgttgcctccttcgccggtgccacgtcccttgggaagattggcagttggatcggcaatagccggcggcgctgcagtggtgggtcttggttgaggcctggctgaggttctgggcactacaactgctgctccaccaccacctgccccggatccaccttcaccaccaccaccaccgccaccaccgcctccaccacccctgttcttgtcccccacatagcgacctgcatcgccggagtaatccccaccaggacgatcgtcgtgcttgtacttgttgtccatgtgcacgtagcgtccatcgttgccacccgagtatcgtccatcgcctccaccgcgat

SEQ ID NO: 30308 - DNA, 711 bp, DROSOPHILA
atggacacacgcttgctgactgcactattgctgatcgcggcttgcagggccgaggatccagatttgggtcaggatcaggatcaggcgaagatcacgtttaagccgggccgatatgtgccacgcctgcacggtgccacgggttggtatgttccggatgatagtggaaagtaccggcacgatcccaggccctatgacggcggctatggagatcgtggtgttccctatgactccgatttgagcggcattttccggaatgcccagcgccaactggaggcaaaggtccaggaggccggtgaaggtctatccctcggtccacgagatcatctgcgattcatgatcgactttaatttcaatggcaccggctggcagataatccagtttcaatgggtacgagatggcgatgagtcccatccagacaccaaggagtacagctacttgacggagaacaagctatgggactcggatcaggcctatgcgtaccaggagcccgacgatggctgccatatcaactgtcagccggagacggcggtatacccgctacaatcggagcctgtccaggagccagtggtgcagccaactcaggagcagcaacagtccagaacaaacatcaattcagagcaggatcctggcaagattcatgataccatcaatgaagtcctggagtacatacaacaacgaatcctgcctacgttgccaattaaaggggagtaa

SEQ ID NO: 30309 - protein, 236 aa, DROSOPHILA
MDTRLLTALLLIAACRAEDPDLGQDQDQAKITFKPGRYVPRLHGATGWYVPDDSGKYRHDPRPYDGGYGDRGVPYDSDLSGIFRNAQRQLEAKVQEAGEGLSLGPRDHLRFMIDFNFNGTGWQIIQFQWVRDGDESHPDTKEYSYLTENKLWDSDQAYAYQEPDDGCHINCQPETAVYPLQSEPVQEPVVQPTQEQQQSRTNINSEQDPGKIHDTINEVLEYIQQRILPTLPIKGE

SEQ ID NO: 30310 - DNA, 2303 bp, DROSOPHILA
acaccttatataggagaagttagtgaagcgccgaagattatttgggatccgctgaaactatcaatattaaatcatactgaggaatttgaacgattgaataatgaaattaaatttatgaaagagaaccatcaaaaattgaaagatttacatttccatcatatttccggacatgctggattaattattgctttaatactaatgatagtattaataatatatttcatacaggaaatgtgctgtgcaacaaagaatgcaagcaataacctttgcaggtccgttgccagtactataaatatcaatagtaaataaccaataaaataatataacaaataaaaatatacagtccactatattcgttgtttaatagaaaatgtacttctacatagaaaaagcaaaatgtttaaaataagttaattgagtacaaattgttgaattaaaaataatataaaccataattggaatccaataaaattaaaagccagaaaaactaggcccattgaaatcttagttgcaaaataaatgaacatatatcaaataaatacagtccactactgttataaatgcaactaatatactaatgtacatctcagctttgctggccctttggcagaatgttcacacatggaacacgaaatatatttaaagacttacaattttgggctccgttcatatcttatgtaaatgaatcgagagcgataaattatatttaggattttgttatctaaggcgacatgggtgcattgctcaaaaacatgtaatttaagtgcacactacatgagtcagtcacttgagatctttccccgccttctaaaatagtcccttagtgggagaccacagataaggtcctcgccgctcaagataggcagatgtgccccgagcgtgggacctcgataaggcggggactatttacttaggcctctgcagtaggccatttactttaagatgcgattctcatgtcacctatttaaaccgaaaatatttccaaataaaatcagttttcttacaaaaactcaacgagtaaagtcttcttatttgggattttacaccagtcgtcgagactcacccgcttgccaccagatgctagggcctccagggatgcctgctcctcctcccgctgctgctgctgttgacactgtagcgtgcggttctggagctgccccccactgctgccctgctgggcgccaattagggcgctggcccgctgcagcatgtccacggagaagttggcgatgaccttggccaggtcctcctgcgaggcgtcatccaggctatcgaccagtgccctcaaatcgtcgtctgccatgtgttggagcctggtcgggctgttgatgtgttctcgacgagcgtttgatgcaatatggaagacggcaggaacctgtcagcgaggcgtctccgctcctgaactctggcacttcacgggcactttctccctctttgccgtgcgatgcgcaattaaacgaatctgcgcaaataagccaagaaagaagtattcgttatcagttcaaataaagagtcttggccaccgaaaaagcagcaaaatctgatttcaagcccacaacccagaaccgagaacagcctccattcgttcatacaggtatagagatatgctatatattataaaaagcatttattagcttgctggttaaatatttttggttgccgtgacttaacaaattatccagaaggccaaaactcaagggtccatatagtgttgattgaggaaaataaatacatacacatataggaaacctggcaactagtagagcatttttggaaaaacgctctcggtttccacgatgaatggttttcgcattttatgttagtgtgtatacaaactataaaaaaaaaatctgtataaataatacatgcgaatatcacgtgcccatgtggctctcttttatgggagtgggctcctcagattaaattcagataactgcggcgcaatctttatggacatcgcagtgggtttgtcatgggcaaccaaagggcaggaactcagtgaaatacttttccacaaccaaagcaacggaattgaatcgttcgaaatccatcgttccagaccgtctgtcattatatttggtcccacaccccgatcaattattgcctcgtccagccattagatccccattagcagccataactctttcccgctcgataatgtttgctgtaagctgtcgcaatggagattgcatgccagagataaacattccgattcgcacgggtgggaatgagattggatggcattcgtgggatactcggtcggagatttaattggacttgatggagctgatagttcgggcggt

SEQ ID NO: 30311 - DNA, 303 bp, DROSOPHILA
atggcagacgacgatttgagggcactggtcgatagcctggatgacgcctcgcaggaggacctggccaaggtcatcgccaacttctccgtggacatgctgcagcgggccagcgccctaattggcgcccagcagggcagcagtggggggcagctccagaaccgcacgctacagtgtcaacagcagcagcagcgggaggaggagcaggcatccctggaggccctagcatctggtggcaagcgggtgagtctcgacgactggtgtaaaatcccaaataagaagactttactcgttgagtttttgtaa

SEQ ID NO: 30312 - protein, 100 aa, DROSOPHILA
MADDDLRALVDSLDDASQEDLAKVIANFSVDMLQRASALIGAQQGSSGGQLQNRTLQCQQQQQREEEQASLEALASGGKRVSLDDWCKIPNKKTLLVEFL

SEQ ID NO: 30313 - DNA, 4370 bp, DROSOPHILA
agagacttccctccattcaaaagcagctccatgctggtgtccagtttacggataaactaccagccaatcccaatggaaagacacttcgtcggttggcgcgagaggatttcaatgcgaaaaaggggtctgtgaaataagatttcagtaaccctcctggtaaaattaaaaattaacttatagtgtcaaatgagaattttgctgtacaaaattgttatattgtagattaaaaacaagagagaatgctatagtccatttccctgactatcagatacaccttacttgtctggaataaatatatgggaattatattaaaaggtgtgcctggttctaggacaatgatattatttatttattgcttttctttaatagccaactttagccatttcatgatgtgatttgcacaataatagggtgttgaaaaactgaatagtacttaaaaaaataataaaataatatttaatagtttttgcgacgagaggaatatatttcagtttagtaggtgtgttaagctgactgttttaaattaaaagcgtctttcgaaactgctataaattgtaaaatttgagactcagtgatttagtgattagtgcgatataacacagtgaacgtgtttacttgagcttcctttcaacattatcaaatccaactttacaatgcttatcagccaatattccggtttgaagctaatgcttttgatggttggactgggaatggcatcctcgtatgaaattatcagacaatgtcctgtacatttcgttttcaaaaataactattgccagtatcagcccatgtagggttaagaattaataacaagaaataaataatttctgaacattaaagaatattggctgttttaataacagcattgcttactacttttcgaactttgtactgattaacaggaagggcgcacttattgtcactttacaaggacactctattgctcagagcccggcagccaacccataaatttgaaagttctttcccttttaaaacaatttcacttgggtgagaatgtggctgtcataaataaatgtaatcatagtttggttaggcttctggtaagcttaaaaattagtctggaatatatgtatatattatactaaaatctaaagctgttaaatattttccctactttccggttctaggagattctttttgcaaaggtttctacaattgataataatgtcgttactttgatgcaatgctggctttcacagttaggcatcatctgatatgatccaatccaataaatacattatgtatataaaaataaattttgattgattccatacactctgacgcttgactgattagatacgaacaattcgtagtaagcatgatatgcattcgattagattcaatttactgcatttttggatgggttatctttacacctcgactggatgtcctacctagttatataattatttcattacagttctacaacgaatagtatttttctatgaatgaaattgttaatcaaaaaatccatagagataaggaatgcttaagaattcattatctacataagtgcaggtcgttatcagcttttgtttacgccttcgactaatcgactaaaggtaggatacgaaaaaaggtagattagagagttattctaaattcattgaaatatatgaaaaatatattcttcttagagataaacaagttgatgacccatcaatttccacccaaaataaaaaaacagctgaagtgaattgtatgggttggcttaggtttaattgttaagtaagtgtaattagcgaatagcccctgagttgtgttaaggtcaagtgatactaaatttaaatactattttctcgccggaagctccaagcaataacgaggagcaccgcgagcgtgccaagtgatctttgcggggatccggcgccggaatcactcggtatagccacttgggttggctgtatatccatatctgcatctagtatctcctgctgcctcgtcacctgttctacctgcggacgagcatgaccaggacgtatctccaccttgggaagggggaagcagtagaccctttcgacctccaccaactggggcacaatgctgtcggaggaaagcgaagtttccgagacggtgagaggcacacatatggttggctcctcagaggcatttcgatcctcgtaaggaatgcccacccgggttatattcagcggcacggtctctggaacactcagttcgctgtgcatctgggcggagtttagagaatcctcgtagtacttgtattcgtccacaggatcagagacgctctcgtcgcgccggtcaatgctcccctgaatgctcccatctatcctttcggtgctcaccgtaagggatgtgctatcgatgaaatcagtgggccaattcaatagacccgcagtggatctagtgggctgtgtgggaaccggtggatgcaccaccgaggattgcataaatcctggtaccacggagctcgttgcaggtggagctggcattgtggtatcgtaaggatacggatacggcaggggcaaccagttgtcgtcggcggaattcttggaattccttcgattgtccgtcgtcgtctccacggactcgttgatctgcttggatattgccttcaatatgggttccgaatcgttgaccctggccaactcgaattgttgtggcacctgctgagtactgatgcgccggcgtccatatttctctgctgaactttcacgactgactggtcgggaataggcaggattctggtagccaccaggggcaataggagcggacagctcttcgctggaacttgatggcttggcatcaatagctgcggcatagaagtatttgagacatgagcaaacaatttcgaaacagagaccaaattaaacgctacatgaagatctttttaaaaagatgtttaggtttcaatatagttatcattaatataaatcaataacattagagattaataattcaggttattgaaaatatatttaacctattaaataaaagactaagcagactttagtttcattaaattctagcagcgtttgcttgtttttaatgatacttatattaataggaaattcacattcgaagttgaattcttaccatctgccggcaatcccatgagcatggcttccaggcgtccgtagacccgctccttgggctgcggttccgaatcgattttcgtgtccaccttctcgggcctctccggatgctctggcttccagttgccgtacaccaccgcctcctgactgggcgtggccggcaggggggcggtctcctcgcgccacagtggaatgtgggtgtgcacagtggaactgatggggcctgcagccggcacaattggccagtttcccaatgcctgagcaggtgctccgccgactgaaacgggattttgcatatccgcaatgcgtatacgccccctgggacggggaggaccctgcagctgctgtgtggcaattagctggcagccactgagggctatcagcgaccacagtagacactctttccaatgactaaccatatttaaattgaacacgtctatcttctttttttgcagatgctgtgctacttttcaattttacagttcgtttttataggtttattgattcattctcgttttcagcagccacaataacaatctattgtttaatttttggcttctgctattttttctttgacgttgcttcgatgtcaatgtaatattcacatctacagttcttcacatcttcacttttctgtcgatcaaccacttcacttccccatttcttttcactccccacaaacaaatatttgtattatcgctaccagttttcggtgtaacgctcttgcgaattcgatcttcagctttcttatagatattgtatattgtagaggaagtatctcttttgctggcgatttgcgatctgcacgcgacggcttgtaaacggcaactgagttggccaaatcaattccagcaccgcacaggcccacaagaaagattctttctaatcacgggccatagaaattttcctttgttcggcttcgttattatatggtttttttttcgtcttaattatgcgcaagagcgttgaaacttaatggcgaataaacattcttcggggccccgctttcggggtctgtttctacggcggtggtgaaaatgcagcggatttgatttatattcagctagaaataaccgcagagtatagtcagtgtgtttacgttatatgcaaatatgttaggtggccaaatcgtttgccgttttgtggcccaaaaggttattcggttgtttgttctttcaacctgatgacagtggtttttggtttcaatatttgcgtagccaagggctactccattcgaaatgccaaacggtaaaggtagcctacgttaaatacaataattggcagaacgaagaggtt

SEQ ID NO: 30314 - DNA, 1206 bp, DROSOPHILA
atgcaaaatcccgtttcagtcggcggagcacctgctcaggcattgggaaactggccaattgtgccggctgcaggccccatcagttccactgtgcacacccacattccactgtggcgcgaggagaccgcccccctgccggccacgcccagtcaggaggcggtggtgtacggcaactggaagccagagcatccggagaggcccgagaaggtggacacgaaaatcgattcggaaccgcagcccaaggagcgggtctacggacgcctggaagccatgctcatgggattgccggcagatgctattgatgccaagccatcaagttccagcgaagagctgtccgctcctattgcccctggtggctaccagaatcctgcctattcccgaccagtcagtcgtgaaagttcagcagagaaatatggacgccggcgcatcagtactcagcaggtgccacaacaattcgagttggccagggtcaacgattcggaacccatattgaaggcaatatccaagcagatcaacgagtccgtggagacgacgacggacaatcgaaggaattccaagaattccgccgacgacaactggttgcccctgccgtatccgtatccttacgataccacaatgccagctccacctgcaacgagctccgtggtaccaggatttatgcaatcctcggtggtgcatccaccggttcccacacagcccactagatccactgcgggtctattgaattggcccactgatttcatcgatagcacatcccttacggtgagcaccgaaaggatagatgggagcattcaggggagcattgaccggcgcgacgagagcgtctctgatcctgtggacgaatacaagtactacgaggattctctaaactccgcccagatgcacagcgaactgagtgttccagagaccgtgccgctgaatataacccgggtgggcattccttacgaggatcgaaatgcctctgaggagccaaccatatgtgtgcctctcaccgtctcggaaacttcgctttcctccgacagcattgtgccccagttggtggaggtcgaaagggtctactgcttcccccttcccaaggtggagatacgtcctggtcatgctcgtccgcaggtagaacaggtgacgaggcagcaggagatactagatgcagatatggatatacagccaacccaagtggctataccgaccacattctcacccaagtga

SEQ ID NO: 30315 - protein, 401 aa, DROSOPHILA
MQNPVSVGGAPAQALGNWPIVPAAGPISSTVHTHIPLWREETAPLPATPSQEAVVYGNWKPEHPERPEKVDTKIDSEPQPKERVYGRLEAMLMGLPADAIDAKPSSSSEELSAPIAPGGYQNPAYSRPVSRESSAEKYGRRRISTQQVPQQFELARVNDSEPILKAISKQINESVETTTDNRRNSKNSADDNWLPLPYPYPYDTTMPAPPATSSVVPGFMQSSVVHPPVPTQPTRSTAGLLNWPTDFIDSTSLTVSTERIDGSIQGSIDRRDESVSDPVDEYKYYEDSLNSAQMHSELSVPETVPLNITRVGIPYEDRNASEEPTICVPLTVSETSLSSDSIVPQLVEVERVYCFPLPKVEIRPGHARPQVEQVTRQQEILDADMDIQPTQVAIPTTFSPK

SEQ ID NO: 30316 - DNA, 3360 bp, DROSOPHILA
tcactttgtcgggccagtctattttgaccaccaagaattacggcctccacattgcccataatggattttaggtaacaacgagctgcgaattgcacaccattaacacttccttccacttgtaaaagatacaaatcacgccaggcttcgtgggaagtgggaaacctcatagtaaatgccggaatattaatgaaaggaccatcggtggtatatgatgcaaactgtgctgtggaaaggatggatagaaaagatgatttggtacacggaactactcacttaacccaacaaaatctcttagactccagtgatatttagccctcactggtagttcacaggactccagaaataatgcattaatcgaaatgccacgagtgatcagaacttttcgtggtgataggggatctgaacactttggcactgtcaattgtggcgcacaacgcgggggcaaacttacttcaatgggaatagatactttgatctcatagatcctatttaattttattcgacccagaagcgttagcaccttatcactgaccgaccaaaaagttgcacttaaatcggcaaagtatccctgttcatattcgggtttcgttttcgacttgattccataaatagaaagctcctcactgattgatgaggtgcttctgaagctgggacccattccgttagctacatttcccaactcaaaaaaggataataggtagctgggagtactgagcaagatagttactttgtacttaacaggaatactttccatggctatgacgatattagtgcgaattccgtagggtacatattcactgcaatacactttaatattcgcttcttttagttcattcgttttcgcaatctgcaccgtcagatatagtaatagaagcacatgtatttttttaattttagacataaagtcatttttaacaaaaattgatagaaaagtcaacgatacataggcaataccatcaatttcatatgaggaaaactacttatataccttaaaattagcttacttttctacagtttgtcgtataaccgcgaaaaatctgtatgtgatggtcatcaactacgaaggaatagccaatttgttaaaaaaaaaaacacttctacaatgccatactcactattttaaaggtgtcgagggatatgataattactcccctggctgaaatctccaaaggtcgttgagcctgtgccattagaatgagtatctcctttttgtatcgcaaagatccttcataccacttgctttcaaaggcagccttggctaaatttgtactctgaaaagtgactttaagcaggtgtcctatgaccatccattacattatacccaccaaatctattaacatttgtccgtgtgagctgacaacgtagaactgggcagctacactagcaaagagcatcatataggaaatgccctcccaattgaaaccttcgacgacggtatagtacgccatgcagcaaagtaaacaggatgtggtaaacagattagatgccaataagagtccaaaaacatagttcacgtccttttgaagcctgtaatatattgcttataatattataattcaatataatcaaatttgcttaagttacctgatcattagttgatgtctctttataatgctggccaagaagtcacagtcttgttgttccgtttctggacttggtcgaatggaggccaacatattggccagatagcccaagtgcatcgatatttggcttgagacgcacatcatccacagatctgtgcccaggctcacattcactatgaactggctataggtgaagtctatcacgtaggccaacacatagcccaaaggtttttcagaatcgaaagtgaggcgcgtgggaaaaatgcgtttataggtaaaatcagcttttccaaagcctatcaggtacataatgcacgactgaacgaggggttccagtgccatgacgaccattacaaagtagtacacgtacaaaacattgcgcgtggaacaggataggtagtatttattcacctcgtacttcctttgattttgctctttatgaggatacaactctttcaaacgatggctcagctgcagtaggcgtttgcgatttatcatgaatgtgataaatttcaattggctactcaacatgtaaaagaagtgcagaccctgtcgcattattttggagggacttccggccaaggattcccactcaattatccttgtcgtcaccatggaagcctcgtaaaagttgctgatcgtgcacaaaacgaagtatcctcgcacaagcagatagcgccaccagggtttgggtgtatggaatagatcgtagccaagggtcttgaacatcatgttggccatgaagatgaaatcctcataggaacgtagtttttccattttcagattctatttttgtgcttacacgtcggctcttaacattaactgggcccaaagcattcgggaagtaatacatttatagggactggcttggtccattttttataaagtgtctagttaataattaatgttgtaattgttttgtcacttaggtgctaagctatttgttctctctaccaactctaaatgccttctggcatttcgagtgtgagaagttaattaataatttaaggtgcggttgcatttatcctaccacttgtcaacgattgcctcaaccgaattaatatggcctacagccggtataatatgatatttaaattaccgcagaccgattcaaatggaaccccttgaatggtcttgattacaagagaagtctgctgtttgataatttatcaaaccacaagccacagtgaaaagtttgtacacttaagaacgctgcaaacttaagctcccaatgaatatttaaatacaaatgttaaataaattcgagccaattaattagatgacaaattttcagcggctcgtttatgcaaataacccaatacagatcttttgtcccaaccataggcagctcttatttaacgcattccgcagagctgcgactcggagaatcggaaccataaaatatacgaatgaccagtatttggacatttatacaatcagatgtggccgacggcgggttttgttttgaatagaaatcacatttgtttgtggcacactcggtttgcccattgatctcaatttgttttgtctcagctagcttagacataaaaatgctaatttcagcgcttaagtaaatagtattctcgttttaagggggcacataaaaggcaccaattaataaaaaaaaaacgaaaacccaacccaactggcacgtgacttttgctgactagtgtagacacaattacgttgctattgttgcactcgttgactgctgtcaaatcgcacgcgaaatgtgaaggccggcgttgcaatcaagatggcttcccccgatcctccg

SEQ ID NO: 30317 - DNA, 903 bp, DROSOPHILA
atggaaaaactacgttcctatgaggatttcatcttcatggccaacatgatgttcaagacccttggctacgatctattccatacacccaaaccctggtggcgctatctgcttgtgcgaggatacttcgttttgtgcacgatcagcaacttttacgaggcttccatggtgacgacaaggataattgagtgggaatccttggccggaagtccctccaaaataatgcgacagggtctgcacttcttttacatgttgagtagccaattgaaatttatcacattcatgataaatcgcaaacgcctactgcagctgagccatcgtttgaaagagttgtatcctcataaagagcaaaatcaaaggaagtacgaggtgaataaatactacctatcctgttccacgcgcaatgttttgtacgtgtactactttgtaatggtcgtcatggcactggaacccctcgttcagtcccagttcatagtgaatgtgagcctgggcacagatctgtggatgatgtgcgtctcaagccaaatatcgatgcacttgggctatctggccaatatgttggcctccattcgaccaagtccagaaacggaacaacaagactgtgacttcttggccagcattataaagagacatcaactaatgatcaggcttcaaaaggacgtgaactatgtttttggactcttattggcatctaatctgtttaccacatcctgtttactttgctgcatggcgtactataccgtcgtcgaaggtttcaattgggagggcatttcctatatgatgctctttgctagtgtagctgcccagttctacgttgtcagctcacacggacaaatgttaatagatttgttgatgaccatcacatacagatttttcgcggttatacgacaaactgtagaaaagtaa

SEQ ID NO: 30318 - protein, 300 aa, DROSOPHILA
MEKLRSYEDFIFMANMMFKTLGYDLFHTPKPWWRYLLVRGYFVLCTISNFYEASMVTTRIIEWESLAGSPSKIMRQGLHFFYMLSSQLKFITFMINRKRLLQLSHRLKELYPHKEQNQRKYEVNKYYLSCSTRNVLYVYYFVMVVMALEPLVQSQFIVNVSLGTDLWMMCVSSQISMHLGYLANMLASIRPSPETEQQDCDFLASIIKRHQLMIRLQKDVNYVFGLLLASNLFTTSCLLCCMAYYTVVEGFNWEGISYMMLFASVAAQFYVVSSHGQMLIDLLMTITYRFFAVIRQTVEK

SEQ ID NO: 30319 - DNA, 2231 bp, DROSOPHILA
tttataccaaatcgcttgaacttttgcacacagacactattgcagttggagattaaagagtgaacgcctagcattttgaagacccgccgatcggaagcctcttttaggtggctcttgtcggaggccaataccatctcccatggagcgcaaatgaaccgaaccggaccggaccgaatcgaatcgaatccacctacaagtgcacgacccatccgatatgctgcaatttgtcgaatgagttgtctacatgacagccacagtggggactctactttatcattagagcaaagaaaaatatagtttagtataatatctcacaacattaagttgttatgctggaagttatcatcagcacagttgcatcttcaattgcttgctgcaatagaaactatcctagctagccatcgcccactgtgcacctgtattgcgaggggcgttggaggcactatgatcatctcggatcgtgttgaacatgaccagcttgacattcataactcatcctcggcagcgtgagaggaatagggacagactgctgcattcctacatcaatttgtcagtgcagtcattagacatttgactcaacggcttgatgatcatcattggcgggattatgactgccacctgaccatgatcatgtctggctggccaactgacttactcaccagctaactgaatgtggcaagtgccgcttgacctttgcggcagccgaacagatgtttcttgaacaggtccggccaaaaggcggtaatgcctgagccggggcgttccgttgccagttgagcaaatgtcagttaccgccgaagtagaaatggaggtggaggtggaagtaaagccccaaatgtcccaccgcccaatgctacgtgagatggttaacttcgattgcggtattgtgtgagagcaagagacggcgcttgtttgttttttggtatttggtgtttttatttggctattcaggtgatgaggatcgtatcaagtggcagcatcgtggatcggatgggcggctctatccggacttcttgttgaacagcagggacaggagctgttgcttgattggcttagtggtggtggtgtccgtggtgtaggtgtaggtggggtaggtcggggtggtagtataggtgtacgtcgtcgtcgtgggcgaagagggcgttgtgggagtgctggttgtagttgcggtagatgccattgcgatggccaggacagcggagaaacagacgaggacagcgaagaacttcatgttgattggattttttgggcttttaggattgctggctggctgttgcttatcgacggacgagctgctgaactctgagtgtgtctttcgctggtccaggcctcactatttatacccatattttgactgcggcagtcgtagtattccctgtaatgtttgcacaaatggttcctttaccgtttgctacattgctagctttcccccaccaatgtttaccgaccaactcattgtgaaatgcatccaatgtttgatccccttccattttccgaaaaataaaagtttttcgggttgggagtgtcaatgacttggtattcttattagctaactatcctagaatatatgccgttcgtagctactgggccactccatcgagaaggcaaagtccggaagtgtggcaaggaactccaggctcaacgcatcccgcttatcatgtggactgacatagtgtccagagacgcccatctcaaagacgggttcattgaagttgccatcgtccttctaagaatcagttagttagtatagttatcagaacgacccattaaatacgcacagaaagttccacgaagaattcgatgggagtgttatcaataccgtaggttaacatgacctccagaggaggcctgtaagtggccggattatccagcattgcgggagcaaacgtccatcggagtagttttacaccatccagtggcttgaagaacagacccatatttggcggaccagttagccggaactcatagcgcacctgatagccaccggacagaactgtcttgctaaggaactccaagaccgttggataaggcagttccacgggctcctctcgagcaagccaaagtgcatgctcccgggcactacaatatcggtagcagggaataccgcacatcagctcggagtcgcaatcctcgcccaggcgtaccaggttggtcaggttcatgtgatcgcgcagaggtgcctctttgtttcgatcccccagatggaagtagtagccagaatcctcgtggct

SEQ ID NO: 30320 - DNA, 231 bp, DROSOPHILA
atgaagttcttcgctgtcctcgtctgtttctccgctgtcctggccatcgcaatggcatctaccgcaactacaaccagcactcccacaacgccctcttcgcccacgacgacgacgtacacctatactaccaccccgacctaccccacctacacctacaccacggacaccaccaccactaagccaatcaagcaacagctcctgtccctgctgttcaacaagaagtccggatag

SEQ ID NO: 30321 - protein, 76 aa, DROSOPHILA
MKFFAVLVCFSAVLAIAMASTATTTSTPTTPSSPTTTTYTYTTTPTYPTYTYTTDTTTTKPIKQQLLSLLFNKKSG

SEQ ID NO: 30322 - DNA, 5380 bp, DROSOPHILA
gtcattagacatttgactcaacggcttgatgatcatcattggcgggattatgactgccacctgaccatgatcatgtctggctggccaactgacttactcaccagctaactgaatgtggcaagtgccgcttgacctttgcggcagccgaacagatgtttcttgaacaggtccggccaaaaggcggtaatgcctgagccggggcgttccgttgccagttgagcaaatgtcagttaccgccgaagtagaaatggaggtggaggtggaagtaaagccccaaatgtcccaccgcccaatgctacgtgagatggttaacttcgattgcggtattgtgtgagagcaagagacggcgcttgtttgttttttggtatttggtgtttttatttggctattcaggtgatgaggatcgtatcaagtggcagcatcgtggatcggatgggcggctctatccggacttcttgttgaacagcagggacaggagctgttgcttgattggcttagtggtggtggtgtccgtggtgtaggtgtaggtggggtaggtcggggtggtagtataggtgtacgtcgtcgtcgtgggcgaagagggcgttgtgggagtgctggttgtagttgcggtagatgccattgcgatggccaggacagcggagaaacagacgaggacagcgaagaacttcatgttgattggattttttgggcttttaggattgctggctggctgttgcttatcgacggacgagctgctgaactctgagtgtgtctttcgctggtccaggcctcactatttatacccatattttgactgcggcagtcgtagtattccctgtaatgtttgcacaaatggttcctttaccgtttgctacattgctagctttcccccaccaatgtttaccgaccaactcattgtgaaatgcatccaatgtttgatccccttccattttccgaaaaataaaagtttttcgggttgggagtgtcaatgacttggtattcttattagctaactatcctagaatatatgccgttcgtagctactgggccactccatcgagaaggcaaagtccggaagtgtggcaaggaactccaggctcaacgcatcccgcttatcatgtggactgacatagtgtccagagacgcccatctcaaagacgggttcattgaagttgccatcgtccttctaagaatcagttagttagtatagttatcagaacgacccattaaatacgcacagaaagttccacgaagaattcgatgggagtgttatcaataccgtaggttaacatgacctccagaggaggcctgtaagtggccggattatccagcattgcgggagcaaacgtccatcggagtagttttacaccatccagtggcttgaagaacagacccatatttggcggaccagttagccggaactcatagcgcacctgatagccaccggacagaactgtcttgctaaggaactccaagaccgttggataaggcagttccacgggctcctctcgagcaagccaaagtgcatgctcccgggcactacaatatcggtagcagggaataccgcacatcagctcggagtcgcaatcctcgcccaggcgtaccaggttggtcaggttcatgtgatcgcgcagaggtgcctctttgtttcgatcccccagatggaagtagtagccagaatcctcgtggctgatggaaccattgtactcgaaaaatttgcgatgcacttgctgctccgacaaagaatagaacttagtcgtctttcaaaggatgcttattagtgtttcccttaccatgaagtcggcacgcatgacatttgttttgggccgatacgggaatccgacatccgagacggcaatcatgcagaaaataaacataaccagtgccagaccacccagcatgcagttcggtcgccgaaagacattgattaaaggagcctaagtgaaactgattaagtaaagtagtcaataaatgtgaataactttcttacagcaaaagataacgccaaaattgtgccaaaaccacatagagcgccgattagtatatccggattggtggagacgccaaagcgaccagtcatcggaatgagaataagtatgaacatgtggaacaagtaggcgtggtaaatgaagggtataatctggaaaacaatcagcaccagtgaccacagataacctaaagtgttggcatgaatcattaaaagttctccacgaatatataagctaacttaccgcgacaatggagacgggtcagtaggttaatgatcagagcagcaacgtagaaaatgagagagatcagaaatagataggcactacggtatttaagagccgttgcacccaaacacaagatggccaaaaggacacagttcgcgtgacccacaatatgcaagtaataagtatgggggatcttgttctgcagaggatagcttagtataacaaaataacttcgttaacaagtgatactacttacacacttcgtatgcgtcaagtagagggtcatgggcagtacaaggccaataaccgatggacaaatgtacaacccaatgaccagccaactgttgctaaaataggtcaacgttctatttccccaatcataaaaggtggccatcagcagaggaaaggccacggcgaggagagcaccagctagggctagcaggaataggagtccaaagacgccggcataggtgcccatagtctgtccagtaacccgggacattcgccacaacgagatgcagaccagcaaaatggcaccgaacgagaagaagagattcagggccaagctagtcgactcctggtaatggacaaagaacagtccaataaagtcgaagaatactgcatgtcccgccgcgtgtgcctgttgaaagattaccatgaaaaatggacaaaagccactcgaaagaggaaacccacctctgtgtcgtacatttcttcggcattcgaaatactccataccaaggccagtaaattgtcgccggaattctgcagggaatcgagacttatcaccgcgtagcgatcgaatttcgtgtgataaacgaatccattgtacacgccggccatgtccaagcctgaaagagaagagctcctgagtagtgtggttgaaaaggatattttcttgcgccgagattcccacctggcacaactccaaagtcccgaaagatccggaaatcagtatccgatggtatgataccagcctcgaacatctcctcggccgttgtggtggcgaacgggtgcggggcactgtttctgtaatgctaagataaggcggaagattagattaattgatcagcagccagacgggtgatatagcagcccccatatcggaaatgcgatcagagcattcccaaatatatgaatcaccaatggcgttgccgactttcggggggtttttagctccacaaacaggggaacttacctccatcagccagggatgattgggaccgccctggaagagcaaatcacgtccaccagcgccagcggaatccaagttcagtagagccctgtttggatagcggattagagattccggtgatctccgcctgagactcaaactcacttgcagttggcagcccatctgtgctgcgtgatgaaaccatgtgatccctgcattggctgctcttcggcaccattgaaaaggaatataatcggatgcaggaagggatcccctgaaacggcgaccagacgcagtacctccagcattacgacaaccatggcagcatcatctccggcacctgtggacaatagttattgaaggcctatccgaaatgcagtccatcattagactcaccaggtgaacccggcttggtatcgtagtgactattgaccaaaaggtaggaggtgctatttgagctcttcgtactcagtctaacgatcacattctgcacaccctgatagtgattcgttaggcctttgatcaagtaggatccggatgcccgttgcacctccacctccatttcatagacatcgtctcgcagcacctggcgcactttttcgatttcagcgagcagcaaattcacaactgtgacttcattatcaacatcacccaccacacggggtcccaatcgacttatttgcagcagtatttcctgagctctctcggccacgaattgtcccggtttatccgcctcctcggagattttgattccggtgggcaaggcctggaaaagtggatatatgacggcgaagaagagacccacccagaacaggaggtagatgggggcaaagtaccaggaatactgcttgcaacggatcttgtcctcatccacctcgattattaggttctcagaccccgaaagggactgctgttgaaagtagagaatattataattgatctctttgggatgatcctaaatgggtaaatcaatatgaaatcacacaccttgccattcctagtggctcccatttttttttgaagagattcgagaaccgtccaagcaagagcacctttcacgactcccgaagcacgactaactcgccggacatctccatccgcaatttaaagtttcggctcgggtttatggtgcgatatggttgatatcttcagcatagtataaagatattcgatatttatggcgtaatggcgcgtgttattcacgctttcgtatcagtatgcgtacatacctaacacaactttcgtctatgccatcgataaattcgcaacccagcgaaactagtgagggcctcgagggaccaacgacgttatttcccccaaaacaaaccaaaccaatccaaaaatcataaccgctgactttgccccatattgtaatcgcacttgttgactattgcggatttatgcatttattgtatcgcatctggtcggcagtgccaaaagttagggctgtaatttccgctcctttcaatcagttgaataggttgaataccaaatctttgttgcgccaaaatcgccttattgaaaaggaaggacttctatggtaggcaacgaaatatttggtataatatcgagtccgcaaaggaagcaaaatgtgattagtcatgtcaatatcataaatgtgacttggtcaaatttcgcttttcattgaaactaggtggtagttagtaacagctatcttttatcgtaaccaatttgataacgtttacttgctatccaaagagctaagataaatattccataactttcctaagtaaatcatataactgttcagaaatgagccacatacattcattattaattttatttcacaaatcttattgttatgtaagcttgtctatctcagaatatatatctttcataggatgttggccactccatgggatgggcaaagtccggcagatcttcaatgaatttttgggtagtcgcatcgcgtttacttagatgactcatatagtgcccagaaatacccagctcaaccactggcccgtcaaagttgccatcgtccttctgc

SEQ ID NO: 30323 - DNA, 2628 bp, DROSOPHILA
atgggagccactaggaatggcaagcagtccctttcggggtctgagaacctaataatcgaggtggatgaggacaagatccgttgcaagcagtattcctggtactttgcccccatctacctcctgttctgggtgggtctcttcttcgccgtcatatatccacttttccaggccttgcccaccggaatcaaaatctccgaggaggcggataaaccgggacaattcgtggccgagagagctcaggaaatactgctgcaaataagtcgattgggaccccgtgtggtgggtgatgttgataatgaagtcacagttgtgaatttgctgctcgctgaaatcgaaaaagtgcgccaggtgctgcgagacgatgtctatgaaatggaggtggaggtgcaacgggcatccggatcctacttgatcaaaggcctaacgaatcactatcagggtgtgcagaatgtgatcgttagactgagtacgaagagctcaaatagcacctcctaccttttggtcaatagtcactacgataccaagccgggttcacctggtgccggagatgatgctgccatggttgtcgtaatgctggaggtactgcgtctggtcgccgtttcaggggatcccttcctgcatccgattatattccttttcaatggtgccgaagagcagccaatgcagggatcacatggtttcatcacgcagcacagatgggctgccaactgcaaggctctactgaacttggattccgctggcgctggtggacgtgatttgctcttccagggcggtcccaatcatccctggctgatggagcattacagaaacagtgccccgcacccgttcgccaccacaacggccgaggagatgttcgaggctggtatcataccatcggatactgatttccggatctttcgggactttggagttgtgccaggcttggacatggccggcgtgtacaatggattcgtttatcacacgaaattcgatcgctacgcggtgataagtctcgattccctgcagaattccggcgacaatttactggccttggtatggagtatttcgaatgccgaagaaatgtacgacacagaggcacacgcggcgggacatgcagtattcttcgactttattggactgttctttgtccattaccaggagtcgactagcttggccctgaatctcttcttctcgttcggtgccattttgctggtctgcatctcgttgtggcgaatgtcccgggttactggacagactatgggcacctatgccggcgtctttggactcctattcctgctagccctagctggtgctctcctcgccgtggcctttcctctgctgatggccaccttttatgattggggaaatagaacgttgacctattttagcaacagttggctggtcattgggttgtacatttgtccatcggttattggccttgtactgcccatgaccctctacttgacgcatacgaagtgtaacaagatcccccatacttattacttgcatattgtgggtcacgcgaactgtgtccttttggccatcttgtgtttgggtgcaacggctcttaaataccgtagtgcctatctatttctgatctctctcattttctacgttgctgctctgatcattaacctactgacccgtctccattgtcgcggttatctgtggtcactggtgctgattgttttccagattatacccttcatttaccacgcctacttgttccacatgttcatacttattctcattccgatgactggtcgctttggcgtctccaccaatccggatatactaatcggcgctctatgtggttttggcacaattttggcgttatcttttgctgctcctttaatcaatgtctttcggcgaccgaactgcatgctgggtggtctggcactggttatgtttattttctgcatgattgccgtctcggatgtcggattcccgtatcggcccaaaacaaatgtcatgcgtgccgacttcatgcaagtgcatcgcaaatttttcgagtacaatggttccatcagccacgaggattctggctactacttccatctgggggatcgaaacaaagaggcacctctgcgcgatcacatgaacctgaccaacctggtacgcctgggcgaggattgcgactccgagctgatgtgcggtattccctgctaccgatattgtagtgcccgggagcatgcactttggcttgctcgagaggagcccgtggaactgccttatccaacggtcttggagttccttagcaagacagttctgtccggtggctatcaggtgcgctatgagttccggctaactggtccgccaaatatgggtctgttcttcaagccactggatggtgtaaaactactccgatggacgtttgctcccgcaatgctggataatccggccacttacaggcctcctctggaggtcatgttaacctacggtattgataacactcccatcgaattcttcgtggaactttctaaggacgatggcaacttcaatgaacccgtctttgagatgggcgtctctggacactatgtcagtccacatgataagcgggatgcgttgagcctggagttccttgccacacttccggactttgccttctcgatggagtggcccagtagctacgaacggcatatattctag

SEQ ID NO: 30324 - protein, 875 aa, DROSOPHILA
MGATRNGKQSLSGSENLIIEVDEDKIRCKQYSWYFAPIYLLFWVGLFFAVIYPLFQALPTGIKISEEADKPGQFVAERAQEILLQISRLGPRVVGDVDNEVTVVNLLLAEIEKVRQVLRDDVYEMEVEVQRASGSYLIKGLTNHYQGVQNVIVRLSTKSSNSTSYLLVNSHYDTKPGSPGAGDDAAMVVVMLEVLRLVAVSGDPFLHPIIFLFNGAEEQPMQGSHGFITQHRWAANCKALLNLDSAGAGGRDLLFQGGPNHPWLMEHYRNSAPHPFATTTAEEMFEAGIIPSDTDFRIFRDFGVVPGLDMAGVYNGFVYHTKFDRYAVISLDSLQNSGDNLLALVWSISNAEEMYDTEAHAAGHAVFFDFIGLFFVHYQESTSLALNLFFSFGAILLVCISLWRMSRVTGQTMGTYAGVFGLLFLLALAGALLAVAFPLLMATFYDWGNRTLTYFSNSWLVIGLYICPSVIGLVLPMTLYLTHTKCNKIPHTYYLHIVGHANCVLLAILCLGATALKYRSAYLFLISLIFYVAALIINLLTRLHCRGYLWSLVLIVFQIIPFIYHAYLFHMFILILIPMTGRFGVSTNPDILIGALCGFGTILALSFAAPLINVFRRPNCMLGGLALVMFIFCMIAVSDVGFPYRPKTNVMRADFMQVHRKFFEYNGSISHEDSGYYFHLGDRNKEAPLRDHMNLTNLVRLGEDCDSELMCGIPCYRYCSAREHALWLAREEPVELPYPTVLEFLSKTVLSGGYQVRYEFRLTGPPNMGLFFKPLDGVKLLRWTFAPAMLDNPATYRPPLEVMLTYGIDNTPIEFFVELSKDDGNFNEPVFEMGVSGHYVSPHDKRDALSLEFLATLPDFAFSMEWPSSYERHIF

SEQ ID NO: 30325 - DNA, 13381 bp, DROSOPHILA
gaatactgcttgcaacggatcttgtcctcatccacctcgattattaggttctcagaccccgaaagggactgctgttgaaagtagagaatattataattgatctctttgggatgatcctaaatgggtaaatcaatatgaaatcacacaccttgccattcctagtggctcccatttttttttgaagagattcgagaaccgtccaagcaagagcacctttcacgactcccgaagcacgactaactcgccggacatctccatccgcaatttaaagtttcggctcgggtttatggtgcgatatggttgatatcttcagcatagtataaagatattcgatatttatggcgtaatggcgcgtgttattcacgctttcgtatcagtatgcgtacatacctaacacaactttcgtctatgccatcgataaattcgcaacccagcgaaactagtgagggcctcgagggaccaacgacgttatttcccccaaaacaaaccaaaccaatccaaaaatcataaccgctgactttgccccatattgtaatcgcacttgttgactattgcggatttatgcatttattgtatcgcatctggtcggcagtgccaaaagttagggctgtaatttccgctcctttcaatcagttgaataggttgaataccaaatctttgttgcgccaaaatcgccttattgaaaaggaaggacttctatggtaggcaacgaaatatttggtataatatcgagtccgcaaaggaagcaaaatgtgattagtcatgtcaatatcataaatgtgacttggtcaaatttcgcttttcattgaaactaggtggtagttagtaacagctatcttttatcgtaaccaatttgataacgtttacttgctatccaaagagctaagataaatattccataactttcctaagtaaatcatataactgttcagaaatgagccacatacattcattattaattttatttcacaaatcttattgttatgtaagcttgtctatctcagaatatatatctttcataggatgttggccactccatgggatgggcaaagtccggcagatcttcaatgaatttttgggtagtcgcatcgcgtttacttagatgactcatatagtgcccagaaatacccagctcaaccactggcccgtcaaagttgccatcgtccttctgcaatataaatacaaattcaaatatataatatatttgggtattaatttaaagtaattgtattgctactaaccgtcatttcgaaatagaattccacaggcgaatcgtcgctgccatagccaaagaatatgtgatatggtggcttgtaaaccgatggattgtccagcatacccttgaggaacgaccagctgagcatccttactccatcccgaggctgtacaaagaaactcatcctcggcggtcccgatgacacgacgaagtagtatagagcccttggagcagactcagtacccaacacagtcttgtttagaaattgcaaaatcggagtaccaggcaaatcgacgggctcatccctaggtaaccaacgggcgtcatttacggcggagcaccaacgatggttaaagcacggcaatccgcaatacatctccgttttgcagtagtcatcaacacgcgttattccagtgagattgatcttatccagcagtggattctcaaagcgcctgtcctgcaagtcgaagtagtaaccactgtcctccaagctaattgaaccgtcgaactcgtaaaacttgcgatgtacctcctagaaacgcaggaaagctcaagtattacaataaggcctttgatctcctcctacatatgactcaccaaaaagtggagacgcatcacgtttgttgtggggcgatatggaaagccaacatccgaaacagaaatcatgcagaaaatgaacataaccaatgtcaaacctcctatcatggcctttggtcgtcggaagagattcagcagaggagcctgaaacgatgtatttgtcatcacataatgtcctctcataggaatggcagatccctaccagaaacaccattgctaaaattgagcccagtgcgcactccaaggagatcaataaatcgggattagcatccatgcccttgcgactcgtcatcggaatggtgataacaagaagagcatggaacaggtatgtgaagtacagatagggaagtatctgacaaacacagagcaccagagcccaaagatagcctaaatgagacgaagaggtgtcatcaaagcacttttatctcattccgttcttacctttatcatgaagtcgagtagctaggttgatgatcaaagctcccaagtagaagaatacacacatcatgaagagatacgcagtgcgaatacctacgacggttagtagaatgcacagcacagccataaaaacacagtaggcatgtccaacgatctgcaggtgataggtgtgcggaattttctcctgagaagaaagggaaagtattcatctgtaacctagtaatggaagttctggccacgtacgctgggtctcagggacaagtagagggtcgcaggcaagactagtccaataatagaggggcagatgaagagaccaatgaccaaccagctgttgctgaagtacgtcatcgtgcgatcgccggcatcgtagaacacagacatcagcaatgggaagccgagggccagcaagaaacccagaatggcgaggaggaactgcatcccgaaggcgcgggcgtaggtgcccaatctccgatccgtgaccttggccatgcgccacaaggaaaggcatataaccagaatggcgcccagtgagaacgagatattaagagctgtgccagttgactccgtgtagtaaacgaagaaaagccccagatagtcgaagaaaacggagtgaccctcagagtgagcctattaaaacgtaattacatatttaaggtaactaaatagtaacaatttcctacctctgtatcatacatttcctccgcattggatatactgcggaccaaagaaagcacattatcgccagtgttttgtagagcacctcgggaaataaccttgtagcgatcaaacttggtgtgatacacgaaaccattgtagcaaccagccatgtccagacctggacatcgagatatatatggatataggggaaactggtataatacacctagcttatatgggtcacccacctggcactgggccaaagtctcggaagatacggaaatctgtgtcggaaggtatcagatcggcctggaagatttcctctgccattgtcgtggcaaagggatgcttggcactctttttgtattgctaatgtgaaatagaaaacgatttttattggatatcggatcgtaaatggcgataagataggcacgcctgtaaatgcgctttcatagctttatggctcggtcattaagataaaattcaagtggaatgcgcgattttgacttgccttcattagccagggatggttgggacccccctggaagagaatttcacgaccaccagctccggccgaatccaggttgactaacgccctgatttggaattgccacattatcagttgcaatggaagatgtaatagtccactcacttgcagttcgccgaccatcgatggttggatatgaacgagtgtgaaccatggaagggctgctcctcagcgccattgaacaggaatactattgggtgcagaaaggtctcctcggacgtggccatcaagcggagtgtttccagcatggtcacgaccatcaactcagcatcaccagttcctacagagaacataacgttgaatccatagattgatagatgacttggattacctacccacactgctgggcttggagtcgtaatgactgttcaccaataggtaggaggtgctgttggaactcttggaactcagtttcacgaccacgttttgaatgccctggtacatgttaatcatttgccaatggagaaaagaaccactggagcgttgtacatccacctccatatcatagagatcgttcctcatctcgtcccgcacctttgatatctcgccaagcaaaaactcaaccatttccacctccgtcacgtaatcccccgctatcttggggcccataagatccagccggatcagtatgctctccgcccgctgggccacaaaggtgcccggtaagttggcctcctcctctatcttgactccagtgggcaggtggttaaacagtggatagcaaactgcgaagaatagtccgacccagaagagcaaatatgctggtgagtagtaccattccagttgcttagagaatctagacttctgtttcaattcgatcagcgtaacattgctgcagccctcttcaggatctatcccatcggtaaccaattgcacggtattttttttgttctctgtgtacgatgtatcagagtgctccgaaagcttgtcctcttcaaaacctccattgtgcttctccatattctccatattgccggcgtactgcgtttatcagcatcaaatcacaacgaagaaccgcacgcgactgagcaaaactcttcgcgcttatcaaatttaaaccttttgatgtctgcttcgggattgatatccaacttgcagcccacaagtcccagtatatttatgatagccggtataatcgattttataatcttcctggagtcaaagtcttcagcaattttcataaagtgatttagttttataccgcggcatctgaatagtgctccctagagatgtgcatcaagaatattcttaataatattcttaataatattaatgccaaattactttattttacatcatagcaaaacattatcatatagagaagaaaagctataatttgatttaattttcaaataccgaattaaggatactttttatgatttaatggttgaatctgaacatatgtatttttacaagctatgaaatgcgcgattatgtatgcccttcaagcattttcaaatgataccgaaaatatatcacacaagggcccatgaattgaaatgttattgctatataaagacagtaaaataagaccataaattttgcatcaattttataagccctaaatcaaaaacgataaaaagctaatatcaagattagatatacaatcattatgagttttgggaatcctaccacgcaaagcacaaatttttgcaacagttatggacaaagctccagaaatgtctagacacaaaagagctaaggcaaaacggtatttacaagttgattcttatataaaaaaaataattagcaatatgccgaaaagttgcactttattacaaataaatttatagtttctaaaatatatatcctttaaaaatcgagggccattccattgcatgaacaaaattgggtagatcggacaaaaattccttagcatgtacatccctgtcaaattcatagctgataaaatgtccaacaactccgagttccataagaggaccactaagatcaccatcggacttctgaagaaggaaagattttaaaactgctcattatggaaatgttaaacgtaccgtcatttcaacaaagaacttcagggaactgtcgtctatgccatatgaaatgtatacaaagtagggtggttggtatgtatcctccaatagttttcgatcgaaggtccaatccgtgaccttggcaacacccactggctggatgaatacgttcatttggggcggtccagtgagctcaaactcaaatcgagtggtcttgccatccgggagaaccgatttctccaatagctccaagattatatccccgggtatgttaacatcacgaggcagccaaccagcccttcttcttccccacaaaagtaaaagcacggagccccacacatcacatacttatcgcaatcaggctccattgatgttaatccagtcaggttgacattgaagtcctttagcggactcagaccgcgtctatcctggtatatgaagtagtatcccgaatcactgtgagtcaacgtgccattatagtcgtagaaaatgcgtttagtttgcttaaaaagtataggttatcttaaaaacctcataaagcttatagaaaacagcttaccataaaattaactcgcatcacattggtctggggtcgataggggaatcccacttccgaaacagcaatcatgcaaaagataaaggacaccactcccaaaccaaggagaatgagctttggccagcgaaatacattgataaattgagcctagaattccattgttaaaagtaaaacttttcatcaactaaagcaagaacacttacaacaaatcccagtatgcaaagtatgtgcaaatgccacacaagagtgatataatcagatccggattcgagcttattccgtttcttccagtgattggaaaaaatacgacgagtaacatgtataacagataggagaagtaacaaaatggaatcacctgaaatgatatcacactgatggaccaataatagcctaaaatgtatttaacaagttaagaccagtttttggataaatgattaccatatctcttaccgcggtcatgcaatctacttatcagatttatcaacacagcacctccataaaagatcaatgatataaggcacaagtattgggaacgcgtaccaatagccgttaaaataagaataagcaaggccaaaaccacgaactctgcgtgcaaactcatttggatgagatatgggtggctcagtttatcctgaaatcgattgactgagctatggcaaggatatcagatgccttatcaattgtcttacattgggcagcagggtgaagtagagggtcaatgggagtactagcccaatgatggcgggacacacatagagtccaaaaaccaaccagttgctggtgaagtaggtgagagatcgatctccagcatcgaatagaactgccatcagaagagggaggccaatgcacaatagaaagcccaccacatgcagtcctaagataatcagaaattggatcaaaatctggcccatcgacgccttctccgattggcgtgacattcgccagagggagcagccaatcaaaaccaggcttaggactccaatcacggagttcaggacaatgccagtggactccgtgtagtacacaaagaacagtccgagaacgtcaaagaagacggcatggctatcatcagtattctgaaaattaatttagtaatttttatgaaataagtattaatcgattgtcacctctgtctcgcttaattcactggcattcgcgtaagctcttgcaagtgcaagaatattgttccccgtgttctgtatagatcgtcctggaattactttaaaggtgtcaaaggctgtatggtacacatagccattattggcctgcgcaatgtccaagcctgttcattttaatattaatatatatattttggttcataaccatataagcttaccgggcacgtttccgaagtcccgaaaaattcggaaatctgtgtcggatggtataattccagcctgccacgtttcctcggctagtgtagttgcaaaaggatgtttcgcatgctgtctgtagtactacacatgagtgcagttcaatagaaacataaaattagatactataattataaaataagattctttgctaccttcatcagccacggagtattgggtccactctgaaataaaagatctcgcccaccgctgccgcccgactcaaggtttataagggctctatgagaaatgtttataactacattttttgaaatactagaccacttttgaatcacctgcaatttggggcccatttatgttgggttataaagccgtgggctccttgaagggcgttttcttcggcgccgttgaacagaaatataattccgtgttgaaatggtatttcagatgtggccatttgtcgcaggacctccaacatcaccacaaccatgacgccatcatctccggaccctagttattctgcacttaatgtccgcattttttaacttgcattgctcatacccacctggacttcctggctttgagtcgaaatgactgttgattagcaggtaagactcactttgcgactccttcgttgtcaacttaacaatgacattctggatgccttggtacatgttccacatacccgcaatcaaaaatccaccagaaggcgactgaacctcaacctccaactcgtaaagatcactgcgcaactccaatttaatcttgtccacttcggccaagagaaacttaaccgtttccacctcattcgctcgactgcccacaactttgggtccaattcgctcaaagtcatggagctgtttttccgcccttcccgccacgaactctccccgctttgaaggttcctcggcgatggttaccctttccggaagtctgttgtacagtgggatcacgatggcaaagaagagcgccagccagaggagcagaaaggaaggagcatagtaccaagacaattttcgcgtgcctacggaatctcctttaagctcctattaaacgccacttatcatcaaagtatcctgttttcaagaacactcatactcactttatcaattttctctctcatgataatatcttcggaaagtcgaactgctctgattgcaatatcaagagaaactaatcgtttggtccgcaaaggcaatgcattaaagcctctcaagatatctgggctataaagataaaattgtgcaaagacgaaacatattaccttatcacccaatatattttcaacttaacgtttctatgtattttttatcgacacatgcggagagtaatggataagggtttattatcatacggtcaatggcattttaatacatgtggtctacaaaatttaaagcttactctttttccgcaatgtaatagggtcatgaaagttttaaggcttcggtaggaaaaacttccaaccgcttaaagataaatacatttttttaagtttatgggattctctgcgttagtgggattctctgcgtttgtgggattctctgcgattatgggattctctgcgttcatgggattctcaaactcattaatataacataacattctcttatccgaaatatttaacaattttcatccaattgttctcttttcggaggtgatggatggagtatcttgtacgattgtaaatggatacctactgctatttaatgcctaaaaaatatatcgcttaaatatagatggccattccatgacgtggacaaagtcggggaaggcggccacaaaatctttagcctctgcatccctttcgtactcgaagctgacccagtgtcccacagctgcgagttccaaggtgggagtatcgaaaataccatcaggtttctccatatcaatgaagaacttcaaggaggtattatcggttccatacgaatggaagatctggtacggcggttggaactcctctggttcgtccagcattttcctcacaaatgaccagtcgtcgaccttggcggatcccaccggctggataaacaaattcatgtggggcggaccggccaactcgaattcgtaacgagctactgttccggactcgagcaccgtatatcccagaaagtccagggtaagttcaccgggtaaaatcacctccgattcgcggggcagccatccatcccactggcgccacttgcaccagctgtagtagaagcacggaatgccgcacatcacgtaatcatcacagcgatttgccaccggctccaatccggtcaggtcaagtgcagagtcctcgagtggggcaaatgctcgtctatcctggtagttgaaatagtaaccggaatcactgcggctcacagaaccatcatgctcgtagaaaatgcgacgagtgtgctggaagagataatccataagatatggtccaatcgttatggaatgacaacataccaagcagttggctcgcatcacattcgtcttggctcggtaggggaatcccacatctgagacggctatcatgcaaaagataaaggtcattacacccaatccgagaagtatgagctttggccaccggaacatattaataagttgagcctgtgagattaaagttataagtcctggtaaaaaactaaatatctaatccaaaactaaccgcaaatccaagagcaaagaagacgcaaacgccgcacaatagaccaacgataaggtctggatttgtactatagccattcctgcccagcaccggaatgaagatcacgaggaacatgtagaacaagtagcagaagtacgagaacggtagcacttgcagaaacatcacaatcggcacccaatagtagcctggaatataaatcaaagtcacaaaatcgcttagattaatcgctatactataacttaccacgatcgtgcagcgtgcttactaggttaatcaggagggcccctccataaaagatcatggaaatgaggcacaggtactgggatcgtagacccatggcggtcagtataagggccaacagggcctgcacaaccaggtgagcgtgcaaactgagctgcagctggtaagcctggctaagtttttcctgcaaattaatcaaagtttaaatcaagtactacagatggttttataaaagaaaaagacttacattgggcagcagggtatagtagagggtcaatgggagtactagcccaatgatggccggacacacgtagagtccaaaaaccaaccagttgctggtgaagtaggtgagagatcgatctccagcatcgaatagaactgccatcagaagaggcaggcaaatgcacaacagaaagcccaccacgtgcagtcccaaaatgctgaggaaccaaatcgaaatctgaggaagagacgcctcctccgactggtggcacattctccagacggagcagccaaccaaaaccagacttagcactccaatcacacagttgacaacaatgcccgtggtctccgtgtagtaaacgaagaagagtccgaggaagtcaaagaagacggcatggctatcatcactctacaaaatccttacataagatttagctcgcttattagtacatggataaacttacctctgtgttatacaactcactggcattgctgtaggcacgcaccagagcaaggacattgtttccggagttctgaatggatcggccaggaacgttctcataggtatcaaaggctgtgtggtaaacatagccgttctcgatctgggcaatgtccaaaccttcgaaatgccacatggttatcaatgcccccatacagaatgtgtgactcatctactcaccagctatgttaccataatctcggaaaattcgaaagtctgaatcagagggcaaaaccccactctgaaagatctcctccgccattgtggtcgcgaacgggtgcttcgcgtgttgcctgtagtactataaaatgtcggtttagtatatatcggccgtaaaataaatgaccataaatataaattcggccataaagtgtatagggtatatggggtagccataagctactttttcctatgaaattatagcactcaccttcattagccaaggattatttggaccgctctggaataacaagtcacgtcctccgcttccgccgacttcgaggttgataaaggccctaaattaaattatggttgaaaaaaagatcaaaaactccgctttttcgactcacttgcacttttccgcccacttgtgttgcgtaataaagccatgggaagcctgaagaggattctcctcagctccgttaaacaggaacacaattggatgctcgaatgggatctccgatatagacatttggcgaaggacctccatcatgaccacaaccattgtgccatcatcaccggagcctaaggacctcgatcagaacctggtcttcaaattggcaacaggatataactcacctgggcttcctggctttgagtcgaaatggctgttgagcaacaggtacgattcactctgggagctcttggaactcagcttgacgatcacattgtgaataccctgatacatgttaaccatgtcgttgaatacgtatccacccgttggtgactggacatccaattcgaggtcgtagaggtcactacgcatctctgcacgaatcttttccgtttcgtttacgaggaactcaaccgtggtcacctcgttcgcatagctgccagttactttgggtccaatgcggtcgtatgtgtacagatattgctgtgcccgctcggccacgaattctcctggcctgtgtgactcctcggatatggtcaacctatccggaagtctgtagtagagcgggatcacgatggcataaaagagcgccagccagaggagcagaaaggagggggcatagtaccaggacaatcgcggccggcggacgtatccttttcgcagcgaaagggattcgactagttcagtgtcgatgggattctcctgataagtacgcaagcactgttaatcccttcccccacattattcaactaaatcaaaactcactttatcagtcttttcctccatggtaagattgcggtatagcgagagccaagtcaaacccttccgatgcccgatcaacgcataactgaacgtctgtaccccgagcatatcgactcgaagccttccgccgtactagagaccataaagataaagcccgtgtgtcgcttgataccccggtaccccggtgcctcggtaccctgataccctggtaccctgatacccagggggaaattgttttgtcttaaggcgcaccaggacggctgggacagaactgaactgaaccatgcccatggctatggtatctaaatttgacgggtttacgacttgatataaatatacataagtggcgattccggcgcacgcgaggggcagctgcaaattaaagcttattcatttaccgatgtctggcagattaaggtgacgcttgatggggtttcagagattaatatttatttttctatcagccgctggcttatcgagtgcactatcaaagcacttggaattccgcgaatataatggatgcaaactgaatgatccacaggaagtggttcctagaagatgtaacgcataaacagagatggccattccatggtataaacaaagtccggcaaatcagctatgaaccgaagggttgtctcatccctctcgaaatcctggtttacgtaatgtccaacaacgcccagttcgaaaatcggtccatccaattgtccatcggatttctgaaagttagataatcggtaatattttttttaaaacctttctaactgcaacttaccacgaactcgatgtggaatttgaatggggagctatccacgccgtaagagaagtatatttgatagggcggtgagtatttttctggctggtccagcatcgttcgtataaaggaccaatcctccacagctactccatccagcggtcttatatacaggcccatgtgcggtggaccagccaattcaaactcgaatcttgcagaacttcccgatttcgagagtgttttattaagaaagttcagttccaggtttcccggcactgtcacctcctcatcgcgaggtagccaagcagcactggaga

SEQ ID NO: 30326 - DNA, 6680 bp, DROSOPHILA
ggcatcggaagggtttgacttggctctcgctataccgcaatcttaccatggaggaaaagactgataaagagaatcccatcgacactgaactagtcgaatccctttcgctgcgaaaaggatacgtccgccggccgcgattgtcctggtactatgccccctcctttctgctcctctggctggcgctcttttatgccatcgtgatcccgctctactacagacttccggataggttgaccatatccgaggagtcacacaggccaggagaattcgtggccgagcgggcacagcaatatctgtacacatacgaccgcattggacccaaagtaactggcagctatgcgaacgaggtgaccacggttgagttcctcgtaaacgaaacggaaaagattcgtgcagagatgcgtagtgacctctacgacctcgaattggatgtccagtcaccaacgggtggatacgtattcaacgacatggttaacatgtatcagggtattcacaatgtgatcgtcaagctgagttccaagagctcccagagtgaatcgtacctgttgctcaacagccatttcgactcaaagccaggaagcccaggctccggtgatgatggcacaatggttgtggtcatgatggaggtccttcgccaaatgtctatatcggagatcccattcgagcatccaattgtgttcctgtttaacggagctgaggagaatcctcttcaggcttcccatggctttattacgcaacacaagtgggcggaaaagtgcaaggcctttatcaacctcgaagtcggcggaagcggaggacgtgacttgttattccagagcggtccaaataatccttggctaatgaagtactacaggcaacacgcgaagcacccgttcgcgaccacaatggcggaggagatctttcagagtggggttttgccctctgattcagactttcgaattttccgagattatggtaacatagctggtttggacattgcccagatcgagaacggctatgtttaccacacagcctttgatacctatgagaacgttcctggccgatccattcagaactccggaaacaatgtccttgctctggtgcgtgcctacagcaatgccagtgagttgtataacacagagagtgatgatagccatgccgtcttctttgacttcctcggactcttcttcgtttactacacggagaccacgggcattgttgtcaactgtgtgattggagtgctaagtctggttttggttggctgctccgtctggagaatgtgccaccagtcggaggaggcgtctcttcctcagatttcgatttggttcctcagcattttgggactgcacgtggtgggctttctgttgtgcatttgcctgcctcttctgatggcagttctattcgatgctggagatcgatctctcacctacttcaccagcaactggttggtttttggactctacgtgtgtccggccatcattgggctagtactcccattgaccctctactataccctgctgcccaatgaaaaacttagccaggcttaccagctgcagctcagtttgcacgctcacctggttgtgcaggccctgttggcccttatactgaccgccatgggtctacgatcccagtacctgtgcctcatttccatgatcttttatggaggggccctcctgattaacctagtaagcacgctgcacgatcgtggctactattgggtgccgattgtgatgtttctgcaagtgctaccgttctcgtacttctgctacttgttctacatgttcctcgtgatcttcattccggtgctgggcaggaatggctatagtacaaatccagaccttatcgttggtctattgtgcggcgtttgcgtcttctttgctcttggatttgcggctcaacttattaatatgttccggtggccaaagctcatacttctcggattgggtgtaatgacctttatcttttgcatgatagccgtctcagatgtgggattcccctaccgagccaagacgaatgtgatgcgagccaactgcttgcacactcgtcgcattttctacgagcatgatggttctgtgagccgcagtgattccggttactatttcaactaccaggatagacgagcatttgccccactcgaggactctgcacttgacctgaccggattggagccggtggcaaatcgctgtgatgattacgtgatgtgcggcattccgtgcttctactacagctggtgcaagtggcgccagtgggatggatggctgccccgcgaatcggaggtgattttacccggtgaacttaccctggactttctgggatatacggtgctcgagtccggaacagtagctcgttacgaattcgagttggccggtccgccccacatgaatttgtttatccagccggtgggatccgccaaggtcgacgactggtcatttgtgaggaaaatgctggacgaaccagaggagttccaaccgccgtaccagatcttccattcgtatggaaccgataatacctccttgaagttcttcattgatatggagaaacctgatggtattttcgatactcccaccttggaactcgcagctgtgggacactgggtcagcttcgagtacgaaagggatgcagaggctaaagattttgtggccgccttccccgactttgtccacgagcttaaaggagattccgtaggcacgcgaaaattgtcttggtactatgctccttcctttctgctcctctggctggcgctcttctttgccatcgtgatcccactgtacaacagacttccggaaagggtaaccatcgccgaggaaccttcaaagcggggagagttcgtggcgggaagggcggaaaaacagctccatgactttgagcgaattggacccaaagttgtgggcagtcgagcgaatgaggtggaaacggttaagtttctcttggccgaagtggacaagattaaattggagttgcgcagtgatctttacgagttggaggttgaggttcagtcgccttctggtggatttttgattgcgggtatgtggaacatgtaccaaggcatccagaatgtcattgttaagttgacaacgaaggagtcgcaaagcttggacattgcgcaggccaataatggctatgtgtaccatacagcctttgacacctttaaaaatactgatgatagccatgccgtcttctttgacgttctcggactgttctttgtgtactacacggagtccactggcattgtcctgaactccgtgattggagtcctaagcctggttttgattggctgctccctctggcgaatgtcacgccaatcggagaaggcgtcgatgggccagattttgatccaatttctgattatcttaggactgcatgtggtgggctttctattgtgcattggcctccctcttctgatggcagttctattcgatgctggagatcgatctctcacctacttcaccagcaactggttggtttttggactctatgtgtgtcccgccatcattgggctagtactcccattgaccctctacttcaccctgctgcccaatgctcaatttatcaatgtatttcgctggccaaagctcattctccttggtttgggagtggtgtcctttatcttttgcatgattgctgtttcggaagtgggattcccctatcgaccccagaccaatgtgatgcgagttaattttatgcaaactaaacgcattttctacgactataatggcacgttgactcacagtgattcgggatactacttcatataccaggatagacgcggtctgagtccgctaaaggacttcaatgtcaacctgactggattaacatcaatggagcctgattgcgataagtatctattggagaaatcggttctcccggatggcaagaccactcgatttgagtttgagctcactggaccgccccaaatgaacgtattcatccagccagtgggtgttgccaaggtcacggattggaccttcgatcgaaaactattggaggatacataccaaccaccctactttgtatacatttcatatggcatagacgacagttccctgaagttctttgttgaaatgacgtacgccggcaatatggagaatatggagaagcacaatggaggttttgaagaggacaagctttcggagcactctgatacatcgtacacagagaacaaaaaaaataccgtgcaattggttaccgatgggatagatcctgaagagggctgcagcaatgttacgctgatcgaattgaaacagaagtctagattctctaagcaactggaatggtactactcaccagcatatttgctcttctgggtcggactattcttcgcagtttgctatccactgtttaaccacctgcccactggagtcaagatagaggaggaggccaacttaccgggcacctttgtggcccagcgggcggagagcatactgatccggctggatcttatgggccccaagatagcgggggattacgtgacggaggtggaaatggttgagtttttgcttggcgagatatcaaaggtgcgggacgagatgaggaacgatctctatgatatggaggtggatgtacaacgctccagtggttcttttctccattggcaaatgattaacatgtaccagggcattcaaaacgtggtcgtgaaactgagttccaagagttccaacagcacctcctacctattggtgaacagtcattacgactccaagcccagcagtgtgggaactggtgatgctgagttgatggtcgtgaccatgctggaaacactccgcttgatggccacgtccgaggagacctttctgcacccaatagtattcctgttcaatggcgctgaggagcagcccttccatggttcacactcgttcatatccaaccatcgatggtcggcgaactgcaaggcgttagtcaacctggattcggccggagctggtggtcgtgaaattctcttccaggggggtcccaaccatccctggctaatgaaggcaagtctggacatggctggttgctacaatggtttcgtgtatcacaccaagtttgatcgctacaaggttatttcccgaggtgctctacaaaacactggcgataatgtgctttctttggtccgcagtatatccaatgcggaggaaatgtatgatacagaggctcactctgagggtcactccgttttcttcgactatctggggcttttcttcgtttactacacggagtcaactggcacagctcttaatatctcgttctcactgggcgccattctggttatatgcctttccttgtggcgcatggccaaggtcacggatcggagattgggcacctacgcccgcgccttcgggatgcagttcctcctcgccattctgggtttcttgctggccctcggcttcccattgctgatgtctgtgttctacgatgccggcgatcgcacgatgacgtacttcagcaacagctggttggtcattggtctcttcatctgcccctctattattggactagtcttgcctgcgaccctctacttgtccctgagacccagcgagaaaattccgcacacctatcacctgcagatcgttggacatgcctactgtgtttttatggctgtgctgtgcattctactaaccgtcgtaggtattcgcactgcgtatctcttcatgatgtgtgtattcttctacttgggagctttgatcatcaacctagctactcgacttcatgataaaggctatctttgggctctggtgctctgtgtttgtcagatacttccctatctgtacttcacatacctgttccatgctcttcttgttatcaccattccgatgacgagtcgcaagggcatggatgctaatcccgatttattgatctccttggagtgcgcactgggctcaattttagcaatggtgtttctggctcctctgctgaatctcttccgacgaccaaaggccatgataggaggtttgacattggttatgttcattttctgcatgatttctgtttcggatgttggctttccatatcgccccacaacaaacgtgatgcgtctccactttttggaggtacatcgcaagttttacgagttcgacggttcaattagcttggaggacagtggttactacttcgacttgcaggacaggcgctttgagaatccactgctggataagatcaatctcactggaataacgcgtgttgatgactactgcaaaacggagatgtattgcggattgccgtgctttaaccatcgttggtgctccgccgtaaatgacgcccgttggttacctagggatgagcccgtcgatttgcctggtactccgattttgcaatttctaaacaagactgtgttgggtactgagtctgctccaagggctctatactacttcgtcgtgtcatcgggaccgccgaggatgagtttctttgtacagcctcgggatggagtaaggatgctcagctggtcgttcctcaagggtatgctggacaatccatcggtttacaagccaccatatcacatattctttggctatggcagcgacgattcgcctgtggaattctatttcgaaatgacgaaggacgatggcaactttgacgggccagtggttgagctgggtatttctgggcactatatgagtcatctaagtaaacgcgatgcgactacccaaaaattcattgaagatctgccggactttgcccatcccatggagtggccaacatcctatgaaagatatatattctga

SEQ ID NO: 30327 - protein, 2210 aa, DROSOPHILA
MEEKTDKENPIDTELVESLSLRKGYVRRPRLSWYYAPSFLLLWLALFYAIVIPLYYRLPDRLTISEESHRPGEFVAERAQQYLYTYDRIGPKVTGSYANEVTTVEFLVNETEKIRAEMRSDLYDLELDVQSPTGGYVFNDMVNMYQGIHNVIVKLSSKSSQSESYLLLNSHFDSKPGSPGSGDDGTMVVVMMEVLRQMSISEIPFEHPIVFLFNGAEENPLQASHGFITQHKWAEKCKAFINLEVGGSGGRDLLFQSGPNNPWLMKYYRQHAKHPFATTMAEEIFQSGVLPSDSDFRIFRDYGNIAGLDIAQIENGYVYHTAFDTYENVPGRSIQNSGNNVLALVRAYSNASELYNTESDDSHAVFFDFLGLFFVYYTETTGIVVNCVIGVLSLVLVGCSVWRMCHQSEEASLPQISIWFLSILGLHVVGFLLCICLPLLMAVLFDAGDRSLTYFTSNWLVFGLYVCPAIIGLVLPLTLYYTLLPNEKLSQAYQLQLSLHAHLVVQALLALILTAMGLRSQYLCLISMIFYGGALLINLVSTLHDRGYYWVPIVMFLQVLPFSYFCYLFYMFLVIFIPVLGRNGYSTNPDLIVGLLCGVCVFFALGFAAQLINMFRWPKLILLGLGVMTFIFCMIAVSDVGFPYRAKTNVMRANCLHTRRIFYEHDGSVSRSDSGYYFNYQDRRAFAPLEDSALDLTGLEPVANRCDDYVMCGIPCFYYSWCKWRQWDGWLPRESEVILPGELTLDFLGYTVLESGTVARYEFELAGPPHMNLFIQPVGSAKVDDWSFVRKMLDEPEEFQPPYQIFHSYGTDNTSLKFFIDMEKPDGIFDTPTLELAAVGHWVSFEYERDAEAKDFVAAFPDFVHELKGDSVGTRKLSWYYAPSFLLLWLALFFAIVIPLYNRLPERVTIAEEPSKRGEFVAGRAEKQLHDFERIGPKVVGSRANEVETVKFLLAEVDKIKLELRSDLYELEVEVQSPSGGFLIAGMWNMYQGIQNVIVKLTTKESQSLDIAQANNGYVYHTAFDTFKNTDDSHAVFFDVLGLFFVYYTESTGIVLNSVIGVLSLVLIGCSLWRMSRQSEKASMGQILIQFLIILGLHVVGFLLCIGLPLLMAVLFDAGDRSLTYFTSNWLVFGLYVCPAIIGLVLPLTLYFTLLPNAQFINVFRWPKLILLGLGVVSFIFCMIAVSEVGFPYRPQTNVMRVNFMQTKRIFYDYNGTLTHSDSGYYFIYQDRRGLSPLKDFNVNLTGLTSMEPDCDKYLLEKSVLPDGKTTRFEFELTGPPQMNVFIQPVGVAKVTDWTFDRKLLEDTYQPPYFVYISYGIDDSSLKFFVEMTYAGNMENMEKHNGGFEEDKLSEHSDTSYTENKKNTVQLVTDGIDPEEGCSNVTLIELKQKSRFSKQLEWYYSPAYLLFWVGLFFAVCYPLFNHLPTGVKIEEEANLPGTFVAQRAESILIRLDLMGPKIAGDYVTEVEMVEFLLGEISKVRDEMRNDLYDMEVDVQRSSGSFLHWQMINMYQGIQNVVVKLSSKSSNSTSYLLVNSHYDSKPSSVGTGDAELMVVTMLETLRLMATSEETFLHPIVFLFNGAEEQPFHGSHSFISNHRWSANCKALVNLDSAGAGGREILFQGGPNHPWLMKASLDMAGCYNGFVYHTKFDRYKVISRGALQNTGDNVLSLVRSISNAEEMYDTEAHSEGHSVFFDYLGLFFVYYTESTGTALNISFSLGAILVICLSLWRMAKVTDRRLGTYARAFGMQFLLAILGFLLALGFPLLMSVFYDAGDRTMTYFSNSWLVIGLFICPSIIGLVLPATLYLSLRPSEKIPHTYHLQIVGHAYCVFMAVLCILLTVVGIRTAYLFMMCVFFYLGALIINLATRLHDKGYLWALVLCVCQILPYLYFTYLFHALLVITIPMTSRKGMDANPDLLISLECALGSILAMVFLAPLLNLFRRPKAMIGGLTLVMFIFCMISVSDVGFPYRPTTNVMRLHFLEVHRKFYEFDGSISLEDSGYYFDLQDRRFENPLLDKINLTGITRVDDYCKTEMYCGLPCFNHRWCSAVNDARWLPRDEPVDLPGTPILQFLNKTVLGTESAPRALYYFVVSSGPPRMSFFVQPRDGVRMLSWSFLKGMLDNPSVYKPPYHIFFGYGSDDSPVEFYFEMTKDDGNFDGPVVELGISGHYMSHLSKRDATTQKFIEDLPDFAHPMEWPTSYERYIF

SEQ ID NO: 30328 - DNA, 7993 bp, DROSOPHILA
gggcaggcgatggtacaaaggatataccactgcgtagaatagagccacccataggaggagaaaggatggtgcgtagtaccagggcaatctgtgccttctcagcttttgctgcgataaaacattgaccagtgccacgtccgagttactagccgcagacccctttaaaatcgattaatggattaattaaaacacattgatttcttaaatccaaacttacattcttttccctcgacttcatgtcgacaaattgtagtttctgatcggtcgcggaagtcgaacagttcctttggccagtcgggactgaactgaaagtgccattgacttggggcaccgaaagttgaaggtggacggatattatcagcagtgattcgcactttgaatcccataaagataaatcgctttatgcacgccatatagcgttcgatgctaacgagaatgtgacaaacgcgacggatactttccagttgcttcccagttggttttgcaggttttagtatctaaatggcaggatttatggactgctatctttatactctttactcactttaaactagattgaaagcattgtttttggcacgcttgttctattcagccagtcactacggccaatcacttcatcgaaagtcttatctttatgtccatatgcggttgctgcatacattctcgtcttgggcttcttcagtaccacatcttattgagaccacaaaatgcccaataagctccatattagggtagttcaatgacaaagtaatcagttatggggttcagatgtttatttccattagttaagaacgttgtgcaaacttaaaatgccttcaggcttcttcttacaacaaaattaaacggttgtgcattattatataaaaaagttacatatctcgtttcacagtcgaattacaaaagtccattacaaaagttacacattatacaaaaataaaacgactctgttataactatcctatcgatttgtacttgatcagagtgagtccatggtctgcgattattgtcgcatcgactccatcagtttctccagcaacttggcgagatcatttgcgtacggaacgcctgcgtacttattctcttcctccgagaagaccaccgacatctccacccgaaggccaatcagcagtttaaagagcttggtgccccgcagcatgcccttatatttggcaccgaaaccgaagagtttccacaacatgaggacagccaggcggtgctcctcgaaggagttcagcccgtttttctcggatgtgggtgctttttggaccctctgctccaaaatatcacgcagcaggttaataaagtcagccagctccacgagccgggggcgattaccattgaagaagcacatgttgcggagtattcgaaggcacaggatccgcttgtgactcaatggaggactacgccgaatcgtgtttataagagattgaagatggcaagcctttcctcctacgtcgtaccgggaaaatacctcccagaatccgagccatgcaatcagtacaggtggtcgcactttaagatgtgttgagcacggattagcaggaaggattgtgtcaaacatatccagcaaattcattttggacaaactcagccgaccctcggtgcagcaacagcagtttaccataacccttagtgcgggcaccatattcagagatggctctttgtttggaatctccttcttggtggtctcgaagtcagcgacgcgagccattaggtgtagcagggattgggcatgtcccgactgaagcagggatatctgtttacacatttcgaatgaatgctccgtaaggaacataatcagctggacagtaaccttttttaagtgatacgagtgcgataaccaaggccaaatgcggatgaggattttggcgatattcgcagccatactggtctggatgatctcagaattgggagaactatgccattgggatagcatgttaatcagtaccaagagattgcttatgatactttgcgccttgtgaggtcccactcgcttcacatagacggcggcgtttccgattttttcgtcattgagaaaatcgtccagaatgtgaactaccttgccaagcagcttcgattctccggctgctttcacggcccaggttgatgccttaagcagttcgccgagtgcttcacaaacctgcacctggcccactgcaggaagttccaaaaagtttaaggccttcgatagatagtaacggtcaaagagctgatccaagcgatggaaaattataatagccgcattagtggcctggatcgcatggtttggcctttgcttattgtcatccgaattatccgaggattcatcgtagatgcattgcgatacagattgcttcttttttgactcgaattcttgtttgccatctttagcaatatcaggatcactgaatgctaattcgaacttctccaactcacttagcatgcttatatcatacgcagcaagttgagctttggtgaacacaagtgataatgctgacagagtaaagcgctgaaatggcgaattaataagcttcacatgcaatccaaacaggaagaaatccatgaatagagatggcttattctttatctgttcgatgagaaatgagttcgaattcgagtccgtgcagaatatgagaaacatctttaataggggaatcaccatgtactcgggacattccaaactcaaaacatcgttgatcagcgttaaataattctgcaagaatacagaatctcgacaaatcgtcatcttaaggaactcaaagttattagtgtagcacatcgagtacaattcacaaatttgggatgcacacagttccacaagcggaatcgaacaggacgcctgcgacttgagttttttcatcacatcgctgagaccactcatcaaactgtggccgcagagcgcggcacaccactctggcttcatggccaccattttggtgcatatggcaacatagcagctaattacttcacacgaatgccgctcaccaactatcttcttgaacatccagggagtgtcgtgaattgctttcagcgaattgtaggcggtctttagtaagtcatgtttccgcaacaattccaagctactttcggcaccaatgagcggcatcagaaggataaatactcgtccggccaactccctgatcagcatcatttcgtgggcatccgtcagagtggttaaacagcaagccggcagtccgccgggtagaaaatccaggcgaggcagaatttctgctacctgcgagccacagatggttatccaattggccaacgatacccaggacaatgcacgcacttcactgtcaccgtgcccgcaaagtgttaagaaatagcgcaagaccttatatgaagctccgacatcgtttgggatactggccttgctggacgcctttggctcctgatatattagatggatctggagctgacagattatgtacaagcagtcccgctgccactcggatccggtttgagttgaggtacgtaaattgctggacaattggataaaatgctgagagtagctctgcggacaaaaattcaaggtaagaaatcaatatctaatgacgatgatcctttactcaccatcaactgagcattactaaatttcagatttcgctcgcttacaaagcgcagcatgcaaagtatgcagcgaacgtgctgcagctggcgcaattcaaagtgcgtcttggccacggcactcaattgcataaagaacttgccataccagttcatcgaatcatcactgagctcgttggacaaaagctgcatcatgcactggcaaatcaggaatagcttatccagagaaatttggctatcgtgcaggagtaattggaagctgtgatgatgatccgtttccagagcgtagctcagtccgttgatagcatgtggctggctgaagcgaatgcatgttacgcacagatccagcatggacttgtacaccttgtcatccgcttcgttccccggcgctaagcggatgtacttatggattaatttccacaagttctcagccaccgtatcacttaatgagtttcgcagaaccacgagaaatagctgaatggccgacacagttttttgcagatcctcgtgtttgctgcaattctccgctgcgataaactgacaacttagctgctcatttaagtcggaggatcttactaacgccaaatcggccattttgatcttaagagactcccttatatccaaagcgctcacagactccaaagtaatgctggatggaacctggcaaacgcgataggccatatacagtcgccaatgctgtgcagcttttgccctatctcgcccgaaatgggtcgcctccacattttgttgcagctccaatccttccgtaacggcagtgggtataactttatgttcaatttcataggttacaggcaaaatcaggggttccatattcgcattcagtaccagtttgtcttcagtggaggtgatacaattctggaacagcatttggaacaggcatatactgacatcctggcgcaactgttccaagtgggggaacaagaataaagccctcagcagtaaagtgtacaccccgaatgtgttcgcgacttctaatcgaaactcatcgtcattgaacagaagcttcatcaggatactcacagtgggcagcagaatatcagtgtcgttcccctttttcagagcgttgtgcagagactccataatcagtcgatatccatcctcctttgtggagaattcctcacaagctctccagtttcgtagcaagacatttaattgagtcattgttgactttcggatattcgactttatgtccttggcctggagtaatcggaacagggcgtccaagctgcgctgaccttgaaaccgctcatcagagcatttgatgaaaatgcttctataacagaatggtggttgaattatgcagagatcgttggcgatgtgctcaaccggtacgttgcttgcggtgggcaaatatctattcgtttgctcctgacattgcagcacgtaagcaattgtagtggtggcctcgctcctaacctcgccatccggatggaacatgaagtaaacgtacccgcgcagcatcaattgcggatccaaacggctggagtccggctctaaaacgttccatatgacgttgtgcaatatcttgtgtgtaaccgacctgctgatcagcagaggcagcacggggagtagcaacgggaaaacaacgctgaaatcctgcggagctagaatagcgtttagcttcataatcattataggatagtcgaggcaccactgctgcatacgttccgaagtatttgcttccgaactctgaattatcattctgcgtaacagcaggggagttagcggcacgcctaagatatgctgacgaatcagatccacattgctgcagccggtcatatagactgtcttgttcataaaggaatgaaagtgggccacggtggatttgatcattaaacgatatataagtgaacgaagtttgagagcaggcaaatcaacaagggtgtaaagcagctcatccgcatcctttcttagctttaaattgcccgcgtagaatggaatgcattttacaacagctccgaagagctgctttaccaatgtctcactgcccagttggacgagcacaaggcacacttgtctgtacttctggattagcagcgacccagtcagttccgtattcggatgtaattgatttagggccacgctgtaggcccgcttcagcttgatcaactcctcgtccggtgatggtccagaatccaaagacgatattagagtgtttagcgacttcatgcgctcgggcatgccagacaggtaagcgctgtccaaaactataggttggatgagtgctttggcttggcgtcggtccatgcgtttgtcatagtttatatttaaggccaccatatcgtgcagcacgccgttaaggatcagcgattgcaggcggggaatcctgagcgagtccatcagctgggtcatgcaactgccttctacactgttacaatacgccagcagacttttgaccgcgtccgcgatgagcgtaatgctcactaagggaatttttgagctgagaacatcgtgggtccgcactatttccacgatcagctccattatgtgccagttgtcgtttgtgcagctgaacagcaacggacgaatcagcttcatgcaattttccagcagaattaccaaggcgctcaccaccttcacttgcttggggcgtgacggaggatcgaacctgtccgcgtagctcagagtgtttcggcgcaacaagatgcgctgctgcagcagccgcaggcaggcaattagtgcccggttcacatgtatcaggctaccgtcagtcatcgtttgcaactgaaccagatgcaagaatacgaacggtggctgcagaaagtactcagttgggtagtcgcccatacggatgatcagttcggtgagctgcaactgcaactcaacgctatttcgtggcaaatcaatcatgctcttcatggtggccacatcgtccaagcacggatgcgaccaggagggctcgtaatcttccggtttcagattgtcgtaaatctgattcgaactgctgtctgcggattcagttgcctgactgggaatgtcatttgaactaaggctggagacgctcggcgtcacccggtctatgttgtacttctcgagaagcagcaaattcatatcatccagcaattcgctgacccgcttggactcctgcttgtgtagcacacggcgaaccttctgcagctcggccttgaagcgttcgtaaggaatcttgcgaatcaccgcctcggcgtactcggatcgaaggagttccataatcatggccagcacacggtcgggcaccagcggcggtgtgtacccgaaccagcggatgagctgcttcagcagcaggaccggcttgaactgtatcggctcgcccagttgcaggcacctgatgaatctcgtctcaatctggtcgagcgcgcgcatacggatctcttccgattcgctagtcagcttggttagctgcccctccgccagctggagggccgggctctgtttggtactcatttccttagactaataatacccgacttttagttcgttttcacttctcttccaggcagcaaacgttttaggatgtcatttttgaaagcgtcaaactcgaattttggctggcgttgccactctgcttgagtgtgcgttccctgcataagggtctaaaaatactaaacctattaaaatagtatttctccacctgacacctcgcatcagcaacaacgaacaatattccgcatcaatcttttattgctccctaagaattaggtgcttttcacacataataaacaattacttgaacctaatcccttttttgttgaagaacttttattcatctaattgttttatttttatattatttatatggttttacttaataatcttataaattatgcctctgatatttgccttatttcaccaaaactaaactacgcgtattaaattgccatatttgtctatcgataatttggtcgcaaccgagtttgttatttcccagcatggcaagcacggtcacgctagcgctgtaggtttaaaaaaaagtcgcccatctgattggacttgagtttgtgcttagcgggtaaataatagagtttgtttgccgctgcggtggagaactagacttttctctctgtgtgtgtgtgtgtataaatgcttatcttgggtttcatatcgttttgtttacgtgccgctctaaagtgtagctgtgcgattgtgaatacagccaaacgctttgtaaccgctaatcattgttcgccaaccggttatttgcaatttaaacttcaacaaagtgctatttctgatcattcttatccttgtgacccattcattgttccattttgaacaataaaaaggctccctcgtgacgtcatcggttggattgtgttgttttaagtttatgtttttgtttgctttatttttgaggcaaacaaactttactcacacatacatgtgcacagtgtacgcacatagtgccaaatgacacttgatgaattcgtagtgcaaacaaagcata

SEQ ID NO: 30329 - DNA, 5790 bp, DROSOPHILA
atgagtaccaaacagagcccggccctccagctggcggaggggcagctaaccaagctgactagcgaatcggaagagatccgtatgcgcgcgctcgaccagattgagacgagattcatcaggtgcctgcaactgggcgagccgatacagttcaagccggtcctgctgctgaagcagctcatccgctggttcgggtacacaccgccgctggtgcccgaccgtgtgctggccatgattatggaactccttcgatccgagtacgccgaggcggtgattcgcaagattccttacgaacgcttcaaggccgagctgcagaaggttcgccgtgtgctacacaagcaggagtccaagcgggtcagcgaattgctggatgatatgaatttgctgcttctcgagaagtacaacatagaccgggtgacgccgagcgtctccagccttagttcaaatgacattcccagtcaggcaactgaatccgcagacagcagttcgaatcagatttacgacaatctgaaaccggaagattacgagccctcctggtcgcatccgtgcttggacgatgtggccaccatgaagagcatgattgatttgccacgaaatagcgttgagttgcagttgcagctcaccgaactgatcatccgtatgggcgactacccaactgagtactttctgcagccaccgttcgtattcttgcatctggttcagttgcaaacgatgactgacggtagcctgatacatgtgaaccgggcactaattgcctgcctgcggctgctgcagcagcgcatcttgttgcgccgaaacactctgagctacgcggacaggttcgatcctccgtcacgccccaagcaagtgaaggtggtgagcgccttggtaattctgctggaaaattgcatgaagctgattcgtccgttgctgttcagctgcacaaacgacaactggcacataatggagctgatcgtggaaatagtgcggacccacgatgttctcagctcaaaaattcccttagtgagcattacgctcatcgcggacgcggtcaaaagtctgctggcgtattgtaacagtgtagaaggcagttgcatgacccagctgatggactcgctcaggattccccgcctgcaatcgctgatccttaacggcgtgctgcacgatatggtggccttaaatataaactatgacaaacgcatggaccgacgccaagccaaagcactcatccaacctatagttttggacagcgcttacctgtctggcatgcccgagcgcatgaagtcgctaaacactctaatatcgtctttggattctggaccatcaccggacgaggagttgatcaagctgaagcgggcctacagcgtggccctaaatcaattacatccgaatacggaactgactgggtcgctgctaatccagaagtacagacaagtgtgccttgtgctcgtccaactgggcagtgagacattggtaaagcagctcttcggagctgttgtaaaatgcattccattctacgcgggcaatttaaagctaagaaaggatgcggatgagctgctttacacccttgttgatttgcctgctctcaaacttcgttcacttatatatcgtttaatgatcaaatccaccgtggcccactttcattcctttatgaacaagacagtctatatgaccggctgcagcaatgtggatctgattcctccgcaggatttcagcgttgttttcccgttgctactccccgtgctgcctctgctgatcagcaggtcggttacacacaagatattgcacaacgtcatatggaacgttttagagccggactccagccgtttggatccgcaattgatgctgcgcgggtacgtttacttcatgttccatccggatggcgaggttaggagcgaggccaccactacaattgcttacgtgctgcaatgtcaggagcaaacgaatagatatttgcccaccgcaagcaacgtaccggttgagcacatcgccaacgatctctgcataattcaaccaccattctgttatagaagcattttcatcaaatgctctgatgagcggtttcaaggtcagcgcagcttggacgccctgttccgattactccaggccaaggacataaagtcgaatatccgaaagtcaacaatgactcaattaaatgtcttgctacgaaactggagagcttgtgaggaattctccacaaaggaggatggatatcgactgattatggagtctctgcacaacgctctgaaaaaggggaacgacactgatattctgctgcccactgtgagtatcctgatgaagcttctgttcaatgacgatgagtttcgattagaagtcgcgaacacattcggggtgtacactttactgctgagggctttattcttgttcccccacttggaacagttgcgccaggatgtcagtatatgcctgttccaaatgctgttccagaattgtatcacctccactgaagacaaactggtactgaatgcgaatatggaacccctgattttgcctgtaacctatgaaattgaacataaagttatacccactgccgttacggaaggattggagctgcaacaaaatgtggaggcgacccatttcgggcgagatagggcaaaagctgcacagcattggcgactgtatatggcctatcgcgtttgccaggttccatccagcattactttggagtctgtgagcgctttggatataagggagtctcttaagatcaaaatggccgatttggcgttagtaagatcctccgacttaaatgagcagctaagttgtcagtttatcgcagcggagaattgcagcaaacacgaggatctgcaaaaaactgtgtcggccattcagctatttctcgtggttctgcgaaactcattaagtgatacggtggctgagaacttgtggaaattaatccataagtacatccgcttagcgccggggaacgaagcggatgacaaggtgtacaagtccatgctggatctgtgcgtaacatgcattcgcttcagccagccacatgctatcaacggactgagctacgctctggaaacggatcatcatcacagcttccaattactcctgcacgatagccaaatttctctggataagctattcctgatttgccagtgcatgatgcagcttttgtccaacgagctcagtgatgattcgatgaactggtatggcaagttctttatgcaattgagtgccgtggccaagacgcactttgaattgcgccagctgcagcacgttcgctgcatactttgcatgctgcgctttgtaagcgagcgaaatctgaaatttagtaatgctcagttgatgagctactctcagcattttatccaattgtccagcaatttacgtacctcaactcaaaccggatccgagtggcagcgggactgcttgtacataatctgtcagctccagatccatctaatatatcaggagccaaaggcgtccagcaaggccagtatcccaaacgatgtcggagcttcatataaggtcttgcgctatttcttaacactttgcgggcacggtgacagtgaagtgcgtgcattgtcctgggtatcgttggccaattggataaccatctgtggctcgcaggtagcagaaattctgcctcgcctggattttctacccggcggactgccggcttgctgtttaaccactctgacggatgcccacgaaatgatgctgatcagggagttggccggacgagtatttatccttctgatgccgctcattggtgccgaaagtagcttggaattgttgcggaaacatgacttactaaagaccgcctacaattcgctgaaagcaattcacgacactccctggatgttcaagaagatagttggtgagcggcattcgtgtgaagtaattagctgctatgttgccatatgcaccaaaatggtggccatgaagccagagtggtgtgccgcgctctgcggccacagtttgatgagtggtctcagcgatgtgatgaaaaaactcaagtcgcaggcgtcctgttcgattccgcttgtggaactgtgtgcatcccaaatttgtgaattgtactcgatgtgctacactaataactttgagttccttaagatgacgatttgtcgagattctgtattcttgcagaattatttaacgctgatcaacgatgttttgagtttggaatgtcccgagtacatggtgattcccctattaaagatgtttctcatattctgcacggactcgaattcgaactcatttctcatcgaacagataaagaataagccatctctattcatggatttcttcctgtttggattgcatgtgaagcttattaattcgccatttcagcgctttactctgtcagcattatcacttgtgttcaccaaagctcaacttgctgcgtatgatataagcatgctaagtgagttggagaagttcgaattagcattcagtgatcctgatattgctaaagatggcaaacaagaattcgagtcaaaaaagaagcaatctgtatcgcaatgcatctacgatgaatcctcggataattcggatgacaataagcaaaggccaaaccatgcgatccaggccactaatgcggctattataattttccatcgcttggatcagctctttgaccgttactatctatcgaaggccttaaactttttggaacttcctgcagtgggccaggtgcaggtttgtgaagcactcggcgaactgcttaaggcatcaacctgggccgtgaaagcagccggagaatcgaagctgcttggcaaggtagttcacattctggacgattttctcaatgacgaaaaaatcggaaacgccgccgtctatgtgaagcgagtgggacctcacaaggcgcaaagtatcataagcaatctcttggtactgattaacatgctatcccaatggcatagttctcccaattctgagatcatccagaccagtatggctgcgaatatcgccaaaatcctcatccgcatttggccttggttatcgcactcgtatcacttaaaaaaggttactgtccagctgattatgttccttacggagcattcattcgaaatgtgtaaacagatatccctgcttcagtcgggacatgcccaatccctgctacacctaatggctcgcgtcgctgacttcgagaccaccaagaaggagattccaaacaaagagccatctctgaatatggtgcccgcactaagggttatggtaaactgctgttgctgcaccgagggtcggctgagtttgtccaaaatgaatttgctggatatgtttgacacaatccttcctgctaatccgtgctcaacacatcttaaagtgcgaccacctgtactgattgcatggctcggattctgggaggtattttcccggtacgacgtaggaggaaaggcttgccatcttcaatctcttataaacacgattcggcgtagtcctccattgagtcacaagcggatcctgtgccttcgaatactccgcaacatgtgcttcttcaatggtaatcgcccccggctcgtggagctggctgactttattaacctgctgcgtgatattttggagcagagggtccaaaaagcacccacatccgagaaaaacgggctgaactccttcgaggagcaccgcctggctgtcctcatgttgtggaaactcttcggtttcggtgccaaatataagggcatgctgcggggcaccaagctctttaaactgctgattggccttcgggtggagatgtcggtggtcttctcggaggaagagaataagtacgcaggcgttccgtacgcaaatgatctcgccaagttgctggagaaactgatggagtcgatgcgacaataa

SEQ ID NO: 30330 - protein, 1929 aa, DROSOPHILA
MSTKQSPALQLAEGQLTKLTSESEEIRMRALDQIETRFIRCLQLGEPIQFKPVLLLKQLIRWFGYTPPLVPDRVLAMIMELLRSEYAEAVIRKIPYERFKAELQKVRRVLHKQESKRVSELLDDMNLLLLEKYNIDRVTPSVSSLSSNDIPSQATESADSSSNQIYDNLKPEDYEPSWSHPCLDDVATMKSMIDLPRNSVELQLQLTELIIRMGDYPTEYFLQPPFVFLHLVQLQTMTDGSLIHVNRALIACLRLLQQRILLRRNTLSYADRFDPPSRPKQVKVVSALVILLENCMKLIRPLLFSCTNDNWHIMELIVEIVRTHDVLSSKIPLVSITLIADAVKSLLAYCNSVEGSCMTQLMDSLRIPRLQSLILNGVLHDMVALNINYDKRMDRRQAKALIQPIVLDSAYLSGMPERMKSLNTLISSLDSGPSPDEELIKLKRAYSVALNQLHPNTELTGSLLIQKYRQVCLVLVQLGSETLVKQLFGAVVKCIPFYAGNLKLRKDADELLYTLVDLPALKLRSLIYRLMIKSTVAHFHSFMNKTVYMTGCSNVDLIPPQDFSVVFPLLLPVLPLLISRSVTHKILHNVIWNVLEPDSSRLDPQLMLRGYVYFMFHPDGEVRSEATTTIAYVLQCQEQTNRYLPTASNVPVEHIANDLCIIQPPFCYRSIFIKCSDERFQGQRSLDALFRLLQAKDIKSNIRKSTMTQLNVLLRNWRACEEFSTKEDGYRLIMESLHNALKKGNDTDILLPTVSILMKLLFNDDEFRLEVANTFGVYTLLLRALFLFPHLEQLRQDVSICLFQMLFQNCITSTEDKLVLNANMEPLILPVTYEIEHKVIPTAVTEGLELQQNVEATHFGRDRAKAAQHWRLYMAYRVCQVPSSITLESVSALDIRESLKIKMADLALVRSSDLNEQLSCQFIAAENCSKHEDLQKTVSAIQLFLVVLRNSLSDTVAENLWKLIHKYIRLAPGNEADDKVYKSMLDLCVTCIRFSQPHAINGLSYALETDHHHSFQLLLHDSQISLDKLFLICQCMMQLLSNELSDDSMNWYGKFFMQLSAVAKTHFELRQLQHVRCILCMLRFVSERNLKFSNAQLMSYSQHFIQLSSNLRTSTQTGSEWQRDCLYIICQLQIHLIYQEPKASSKASIPNDVGASYKVLRYFLTLCGHGDSEVRALSWVSLANWITICGSQVAEILPRLDFLPGGLPACCLTTLTDAHEMMLIRELAGRVFILLMPLIGAESSLELLRKHDLLKTAYNSLKAIHDTPWMFKKIVGERHSCEVISCYVAICTKMVAMKPEWCAALCGHSLMSGLSDVMKKLKSQASCSIPLVELCASQICELYSMCYTNNFEFLKMTICRDSVFLQNYLTLINDVLSLECPEYMVIPLLKMFLIFCTDSNSNSFLIEQIKNKPSLFMDFFLFGLHVKLINSPFQRFTLSALSLVFTKAQLAAYDISMLSELEKFELAFSDPDIAKDGKQEFESKKKQSVSQCIYDESSDNSDDNKQRPNHAIQATNAAIIIFHRLDQLFDRYYLSKALNFLELPAVGQVQVCEALGELLKASTWAVKAAGESKLLGKVVHILDDFLNDEKIGNAAVYVKRVGPHKAQSIISNLLVLINMLSQWHSSPNSEIIQTSMAANIAKILIRIWPWLSHSYHLKKVTVQLIMFLTEHSFEMCKQISLLQSGHAQSLLHLMARVADFETTKKEIPNKEPSLNMVPALRVMVNCCCCTEGRLSLSKMNLLDMFDTILPANPCSTHLKVRPPVLIAWLGFWEVFSRYDVGGKACHLQSLINTIRRSPPLSHKRILCLRILRNMCFFNGNRPRLVELADFINLLRDILEQRVQKAPTSEKNGLNSFEEHRLAVLMLWKLFGFGAKYKGMLRGTKLFKLLIGLRVEMSVVFSEEENKYAGVPYANDLAKLLEKLMESMRQ

SEQ ID NO: 30331 - DNA, 2742 bp, DROSOPHILA
atttgttatcggcttttagcattgatatttaattgctttcctaatttgttttgaagagtgttctaaaaaacagtataagcacaaagtgtttttattttagttaatgactaaattattaaacaactcatgtttttgtaatctgtgacagaaaatgttccttgtgccgtatattttattgcatggttttatttattttatattttaataatttaaaaatttcctgtttttacttatgtatgtatttaaggtgcaaataccaagaataaattactttcactcagccactctacaaacgattcgctttatccaaacaaatttgtaactgcacctattgacaccataaaaagctttacgttctcttgtaatgattaggaaactttagttgagtccaatgaactgctttgtaaacttaattaaatatagacattaatgatagaattgagaaagtgtattaatttactgtctacgtgtgcttataaactatatacacaaactaaacttatgacacctatacaagtcagtttatataaatcatttacgaaatatagagcagaacccaagataagtaataaataataaataaatttcataaaacgaattgaatcttgtattttaatttataagaatggccaaatatagagccaaatgacagttactaaaaagcagtttcatatcaatcgattttacattcttgtaggttgcgttcacggtggagagaaaggacttcatcctttcttttacgcttcttcagtcgttctgcttgctctcgatcctccaatagtttgaccaaatgctgatgccagtagaagtatttgaagaaaaacaatagaagcagcaccgaagtggtgacaatggatgcggttgtgatctctacgggcttttcgccttcctcttccacccgctccgagaaatggcgggtggatattctaaggccgaagttttgtttgcttgccgcaacattgggccgatccatgagcaccgaaggcagcagcggtagttgtcacgactggattgtattggaagtggcagtggatgcgggcactggtggcggagctactggaataatcgagaatttgataaacgcgctcttgctgcgcctttgcactattctgccaattagttgtggttccttaatggtctgttcgatggcctttactatgcgctcggcgctgctctcgtccgatccactggcattgccctggataaggatgcgaacctcgtgtcgcttgcccagccacttcacaatgttcttgagtctggaggagagatcgtgctctgtgatgcgcgcaccaatggtaagggatttctccgttttcttatccttaactttttcgctcgctgatctcgactgctccgcatcatccgacagcatttcagcagctgtgactagtctgcaaagtatagcaacttcataacaatgaccaggccccgatgataaccatatatacccacttgaacatggctcttcctgttttagcatctgtttgctccaatcgcaacaggtgcagatcccgtcgcttggccagcttttgggcctcctccaaagtggttatgctaattgactggttctgttggatcagggtgatcttctggacacttgcctttagactccgtgtatccctcgttctactgtctcctgggcttccacccaccggcttttggtgctgcgccaaactccagtaaacggtcaagggacgcaggtgttgctgctgaatcgctgctgcggcagcatgattaaacattaatcttatgcgttgcatgcttctctttcaaatatatttttgtatatctcttggttattttcgattttcttttgcttgtgcaatttttttgtctcagagttgtcaggttatgtgaagcagtctgttttaacagctgttccggcaggtaagtaccagctgacggctggagttatcgataattcaagccgccaataacacccaagttaaaaagaattaagtgtagtatgtttattcttcagaatgaaaaatcagtcgggtaatatgatacaacaaccaggatcagcaggctcataaaaatttcttcaaaatatgaaatgtttttcctcagaaaaccgatagagacatagaaaaccgattgctcgcatgaattctaaaattttgtttttgtattttgttttttggttttcgttcttgggtattttagaagccgagctttgaaatcgacttcagttcctaagagagacatcacgatgaaactacaagtaagtaaagtgttctgctaaaaaatattcaactataaagtgttttttatcctttagttcctcctgtttgccttgttggtttgctgtttggtcagcaatgctgcaagtatatgttgttgtacgaaatatgttgtgcgtaatgggaagtgtaaaaaaatatatatatgcagccgtcacagacatcattgcagaagccatcgagaatcgtggtgtggagatattttccaatatggttaggaggcgaaaattagaaaatgttaatcgaaaaactaattttataaaaatacaaataaagtttgtaataaatgttttaaatgtggttaaaagcgaaatatgaaatatgtaaacaggaaaatatattttcttattaaaatacaattaaagcttgttaattaatgtttgaaataaagctcatacaatgattaaattacaaaaatagtgtaataataatatacaaagttttaagttccttagtaactgagaaagtcgagtcattcgagttacgcagactttctctg

SEQ ID NO: 30332 - DNA, 681 bp, DROSOPHILA
atgtttaatcatgctgccgcagcagcgattcagcagcaacacctgcgtcccttgaccgtttactggagtttggcgcagcaccaaaagccggtgggtggaagcccaggagacagtagaacgagggatacacggagtctaaaggcaagtgtccagaagatcaccctgatccaacagaaccagtcaattagcataaccactttggaggaggcccaaaagctggccaagcgacgggatctgcacctgttgcgattggagcaaacagatgctaaaacaggaagagccatgttcaaactagtcacagctgctgaaatgctgtcggatgatgcggagcagtcgagatcagcgagcgaaaaagttaaggataagaaaacggagaaatcccttaccattggtgcgcgcatcacagagcacgatctctcctccagactcaagaacattgtgaagtggctgggcaagcgacacgaggttcgcatccttatccagggcaatgccagtggatcggacgagagcagcgccgagcgcatagtaaaggccatcgaacagaccattaaggaaccacaactaattggcagaatagtgcaaaggcgcagcaagagcgcgtttatcaaattctcgattattccagtagctccgccaccagtgcccgcatccactgccacttccaatacaatccagtcgtga

SEQ ID NO: 30333 - protein, 226 aa, DROSOPHILA
MFNHAAAAAIQQQHLRPLTVYWSLAQHQKPVGGSPGDSRTRDTRSLKASVQKITLIQQNQSISITTLEEAQKLAKRRDLHLLRLEQTDAKTGRAMFKLVTAAEMLSDDAEQSRSASEKVKDKKTEKSLTIGARITEHDLSSRLKNIVKWLGKRHEVRILIQGNASGSDESSAERIVKAIEQTIKEPQLIGRIVQRRSKSAFIKFSIIPVAPPPVPASTATSNTIQS

SEQ ID NO: 30334 - DNA, 5375 bp, DROSOPHILA
gttgtgggggaaaaaactatttctggccagcacttaattgtcttaattatccgcattggtatcgaatgtcaatggcaaccaatggagcctacttccagtttcaaactgaacttgaattcgtagaaatagccttcaattgaatgactttgcgtgatgtcacacatagtgcatattgctattttcgcagacactttccatttcctttgagatccaaattatgccagctcaattgccatgcggaacttgaactaggcgggttgttggttgtttaccccttgaaaatcggatcgcattgcgtatatacaatatatagtctgtactatatagaccgtctacgtcactgattaaattcaattgaaaaacgcgccgactgtctacagcgaattcgaatacaagggggtgacaaacgtccatttcccatggatctaaatcattaaagtcacttttagggcttcttcacctcagtactgcacttatattgtagcacccactttcactagcacatcatgtatgttaatccagttgattaagttattttgagaaaataaactaatagcaaggtggtacagattgttttttcatactcttgttactcagtattgatggatcgtaaatgaaacaatctcgaaatatatgcttttagagggaaatccgaactaagaacttactcggtggacgcacgaacagcaactgaatgcaaatttcgccgagtcgattattggatggacgatgtgcatcattcgggaccgacgaatggattacatggagaacctcagagagggaaaaactgctctctacttttccctcccatttagcttagtttccgcttcttttgcagattcgcatttgttgatagaaaccattagttttcatacgctcattctaaacaaacagaccccaaaaacaccgggtacattggaactgaacaagtgtgctctgagtttgaattcatgttacttccacgaaccacctcgtttggattggtcagaaagcatttttgtaccatttacactagacgtagttcaactggaaatatttagaaacaaattttctatactattttttcctcattttgaacacaaaaatcgtttacaaaaaagcgttgatttccgaaactttagatatgaattcttccagcgtgacgccgcgttcagttcgtagtaagtacatgtaccttgaacgctatacgaatgtgtgcttcaaatgctcgttatccttgttaggtaacaaagcattcttgctgaggacagctggaaaggcggaaaagcaagcctcagacaaagctacatgggtgagtgagatagaagaaaagggtttagttttttcaaatgctttacatccccgtcccagtctcgcacttcttcttgtggtggcgtcttctctactcctcccacccagaatggcgacggaagcccaaacaaaggtaggctcagtcacattccaaataggcgtggagcgagtcggtcgtctatccattcgcgaaaaacttctctggaacgggttacttcttcgacgaaagcgcgcccgtgtgtcagtacgtattcgttgcccaatcgacgggtcgagcccgagcataaagtagttgagcccgatcggaaaactgatatcgatgagttgaatccccccaagcggaacgtggttcccataaagacgcatgcccagtcagcacaattggttaagtcaacgacatgcggtgggtatcgcgaatatttgaaacgtggtccaattctctgattattgccgtccacagaaccttatcaaaatgtaaagaagcctgaaaagatgtcgcatcgccgtgtcctggagatgaaccggatgcgggtctttgatacgcagaaaaaaaaactggagaacctgcagtccgagtttatgcacaagatccggttaatgggttcggagctccggaatcaaggggtcttcaagtttgtgggtctgactgtaaacgatgaatgcaagcttgtggtccaccatgatgatctacttcgattgcccaagagtattcgtaagttcgttttgattttacgtcttcgattgaatgaattgttatccttgaattatccttctttcgcttacaattgcatacttttattttctagccgccgaaagtatgaatgacttgaaaaccaggtgtcgtgcgattgtagatcagggggttttgttaatctacgaccatataccaagaattcagagggctaaaaatgatctcgaggctagtgaaaagcgtgaggaaactcaaaaaaagttgtctaacctagtggtatgtttttgtgcaaccgctatgatgcactagcaatgtgaaactattttattgtgtctccaggaagaaaaaatgaatttaatcgtcgaggagatcgaacagttgtgcggtgcatgctccaaacaagagtcacccaacaaaagtctctatcgcgagatgtccgagttgcgttcccagaaacaggccatggaggttcgttattttgacgcccagaaggagcacactgaacagatgaaccagttgcggatcgagctcgatgccaagctgaaacaggagctggccagtcgagatcagatcattgtagagctgagaaagagcctgcggcgaagcgaggatatgctcagtgagcagtccattcgattggccgagaacaattccaagctattgaccgaggattccaccatcgaggtactgcgctccgaggtagccaagctcaagactgtgtaagttaactggtcatctcggcagatgatggttcttacagatctttccttatatcgtatctagaaaagagcaaatggttaagcgtctggaagaggcggacaaaggtctggagcgggctcgaaattccgtcgataagaacttgaaacacatcgattacctggagggcgaactgaaggaggcccgtgagctcattgtccatctggaacagcgtccagatgccatggacgcgggagttaaagaaaaggatttgatcattgccgatttgaaactgcagctgcaaagtctcgagcagcataagaaggtcatgaacaaacaggtggccaatacaataaagcagcatgccgactttgaagagctgggtggaaactataaggaagctctacagcagataaggtaaactgcttggttaacagtatcatagattatgtatattgattaacatatctcttgcttggataaccagcgatctaagggagaccctaagtgttaccaatgccaaattggagatgcaatccaagctcgaagtgcagctgcgcaaggaagtgtccaagatgcgcgagcaaatggttatcgatcagaagttgctgaacgctcgcagcgaattgatcgcaacactgcagaagaatgaggaggatagccgcaccaaactagaccaaatgtactatcaagttagcgagaaagaaacgcttatcaatcaggtccgccgaaaaaggatgtggctagcctcgcttatgcttatccttcttcctcccgcaggtaaacaacaagctgagttcgaaggaggaggagttctataatctctacgggaccctcacgcacaaacaaagggaagtgaggaggcaggagcatatcatcaagttgttaaaggagcagaattcgcgggtatcattgttgcgagccaatcaggacgagcggaatgccacgatggaggaggaaatcaaacatctcaaaaacgccctgtaagttcaatacgagtttgagtaaaagttcgccagcttgctataatttacacaaatcccgtggtagatattcaataacattagggccatgtaccgttgaatgaggtaaatgtcaattgaagtcctaatatcaactggaccagtttccaaaatatttgagtaagtgatagcaaagcggcgagctttatgcttggaaagacaaataaaagtattaaatggttctagccgtaattatgccaaactaatagttggcaatatgggtgaacatttttttgaagttctgccggctggcgaaatggagagcattagaagcggtggccaccctgtgcgtgtggactcttcctgcaagtttctgcaagagcccaatctgcaagagcccaatctgcaggaacccaatctgcaggagcccaatctgcaagacgacactctgcaggaacccaatctgcaagaacccaatctgcaagagcccaatctgcaggaacccaatctgcaagacgccattctgcaggagcccaatctgcaggaacctaatctgcaagacgccactctgcaggagcccaatctgcaagacgccactctgcaggagctcaatctgcaagacgccactctgcaggagcccaatctgcaagagcaggagatgtcccaaccacgtggtcgcatctttgagccactgcagcatcaactgctcgacggcttaattcgccccgccatttagtgcgcttgcgctatcaactacaacatccaaatattcgtcctacagatcctgcgcgtccacaaaaagtcgcaaattccctgccaccctcctctgcgattgcgaagacaccagcgatcccaagaccagcgttaaacatccaatttgaactacaagaacccaacccaaatatcaacccaacccaacacatcccaaaggagaacgcttagcatggaaattcttaagatgaacaaaccaaatttgttgtaaccgttggccaaatggcattgttttttgtacccatacatatgtaaaaagtaatggcagaaatctggttaagtctcgtttagggcggcggtttgatcaatcgactagcttcgattggtttaagaatctgaaactggcacaattaattgagatgatttggatttttagggcagggtcgaagttgcagatacatttatgcgttcttttgcatttaaatatttaaaaatactggttattcaggaagtatgcatgctttttcgttataaaaatcgtgaaagcacgcatactctcagattttcaaactcagtttttgccgctgcgtggattccgtaggtttcctagtagattatctggtacatgtcgtttagtcgcatcaagaagctcgttaagaacggttggggtttttagtagtccagattgtgtgtgttccataaaaggtacccataagtttaatgaatgtgtggtgctggttgcagatcaaatagtgcgtttttgagtgagataaaaagaataaaataatgaaattggtcccacaaactttggctttatgtatgtaccttgatcccggccaattatgataagacggcagaccacaagtgaagcatccaaatcttctcaagagcttgtgtcaacatttttcgtctggctgttagatttgaatcgagttgacgaaccgtgtgtacatttggctcctaacactttgcagtcgacaggcatgcgttcagataagagattcttctggcgattcttcggattc

SEQ ID NO: 30335 - DNA, 2622 bp, DROSOPHILA
taccatttacactagacgtagttcaactggaaatatttagaaacaaattttctatactattttttcctcattttgaacacaaaaatcgtttacaaaaaagcgttgatttccgaaactttagatatgaattcttccagcgtgacgccgcgttcagttcgtagtaacaaagcattcttgctgaggacagctggaaaggcggaaaagcaagcctcagacaaagctacatggtctcgcacttcttcttgtggtggcgtcttctctactcctcccacccagaatggcgacggaagcccaaacaaaggtaggctcagtcacattccaaataggcgtggagcgagtcggtcgtctatccattcgcgaaaaacttctctggaacgggttacttcttcgacgaaagcgcgcccgtgtgtcagtacgtattcgttgcccaatcgacgggtcgagcccgagcataaagtagttgagcccgatcggaaaactgatatcgatgagttgaatccccccaagcggaacgtggttcccataaagacgcatgcccagtcagcacaattggttaagtcaacgacatgcgaaccttatcaaaatgtaaagaagcctgaaaagatgtcgcatcgccgtgtcctggagatgaaccggatgcgggtctttgatacgcagaaaaaaaaactggagaacctgcagtccgagtttatgcacaagatccggttaatgggttcggagctccggaatcaaggggtcttcaagtttgtgggtctgactgtaaacgatgaatgcaagcttgtggtccaccatgatgatctacttcgattgcccaagagtattcccgccgaaagtatgaatgacttgaaaaccaggtgtcgtgcgattgtagatcagggggttttgttaatctacgaccatataccaagaattcagagggctaaaaatgatctcgaggctagtgaaaagcgtgaggaaactcaaaaaaagttgtctaacctagtggaagaaaaaatgaatttaatcgtcgaggagatcgaacagttgtgcggtgcatgctccaaacaagagtcacccaacaaaagtctctatcgcgagatgtccgagttgcgttcccagaaacaggccatggaggttcgttattttgacgcccagaaggagcacactgaacagatgaaccagttgcggatcgagctcgatgccaagctgaaacaggagctggccagtcgagatcagatcattgtagagctgagaaagagcctgcggcgaagcgaggatatgctcagtgagcagtccattcgattggccgagaacaattccaagctattgaccgaggattccaccatcgaggtactgcgctccgaggtagccaagctcaagactgtaaaagagcaaatggttaagcgtctggaagaggcggacaaaggtctggagcgggctcgaaattccgtcgataagaacttgaaacacatcgattacctggagggcgaactgaaggaggcccgtgagctcattgtccatctggaacagcgtccagatgccatggacgcgggagttaaagaaaaggatttgatcattgccgatttgaaactgcagctgcaaagtctcgagcagcataagaaggtcatgaacaaacaggtggccaatacaataaagcagcatgccgactttgaagagctgggtggaaactataaggaagctctacagcagataagcgatctaagggagaccctaagtgttaccaatgccaaattggagatgcaatccaagctcgaagtgcagctgcgcaaggaagtgtccaagatgcgcgagcaaatggttatcgatcagaagttgctgaacgctcgcagcgaattgatcgcaacactgcagaagaatgaggaggatagccgcaccaaactagaccaaatgtactatcaagttagcgagaaagaaacgcttatcaatcaggtaaacaacaagctgagttcgaaggaggaggagttctataatctctacgggaccctcacgcacaaacaaagggaagtgaggaggcaggagcatatcatcaagttgttaaaggagcagaattcgcgggtatcattgttgcgagccaatcaggacgagcggaatgccacgatggaggaggaaatcaaacatctcaaaaacgccctccgtaattatgccaaactaatagttggcaatatgggtgaacatttttttgaagttctgccggctggcgaaatggagagcattagaagcggtggccaccctgtgcgtgtggactcttcctgcaagtttctgcaagagcccaatctgcaagagcccaatctgcaggaacccaatctgcaggagcccaatctgcaagacgacactctgcaggaacccaatctgcaagaacccaatctgcaagagcccaatctgcaggaacccaatctgcaagacgccattctgcaggagcccaatctgcaggaacctaatctgcaagacgccactctgcaggagcccaatctgcaagacgccactctgcaggagctcaatctgcaagacgccactctgcaggagcccaatctgcaagagcaggagatgtcccaaccacgtggtcgcatctttgagccactgcagcatcaactgctcgacggcttaattcgccccgccatttag

SEQ ID NO: 30336 - protein, 832 aa, DROSOPHILA
MNSSSVTPRSVRSNKAFLLRTAGKAEKQASDKATWSRTSSCGGVFSTPPTQNGDGSPNKGRLSHIPNRRGASRSSIHSRKTSLERVTSSTKARPCVSTYSLPNRRVEPEHKVVEPDRKTDIDELNPPKRNVVPIKTHAQSAQLVKSTTCEPYQNVKKPEKMSHRRVLEMNRMRVFDTQKKKLENLQSEFMHKIRLMGSELRNQGVFKFVGLTVNDECKLVVHHDDLLRLPKSIPAESMNDLKTRCRAIVDQGVLLIYDHIPRIQRAKNDLEASEKREETQKKLSNLVEEKMNLIVEEIEQLCGACSKQESPNKSLYREMSELRSQKQAMEVRYFDAQKEHTEQMNQLRIELDAKLKQELASRDQIIVELRKSLRRSEDMLSEQSIRLAENNSKLLTEDSTIEVLRSEVAKLKTVKEQMVKRLEEADKGLERARNSVDKNLKHIDYLEGELKEARELIVHLEQRPDAMDAGVKEKDLIIADLKLQLQSLEQHKKVMNKQVANTIKQHADFEELGGNYKEALQQISDLRETLSVTNAKLEMQSKLEVQLRKEVSKMREQMVIDQKLLNARSELIATLQKNEEDSRTKLDQMYYQVSEKETLINQVNNKLSSKEEEFYNLYGTLTHKQREVRRQEHIIKLLKEQNSRVSLLRANQDERNATMEEEIKHLKNALRNYAKLIVGNMGEHFFEVLPAGEMESIRSGGHPVRVDSSCKFLQEPNLQEPNLQEPNLQEPNLQDDTLQEPNLQEPNLQEPNLQEPNLQDAILQEPNLQEPNLQDATLQEPNLQDATLQELNLQDATLQEPNLQEQEMSQPRGRIFEPLQHQLLDGLIRPAI

SEQ ID NO: 30337 - DNA, 6297 bp, DROSOPHILA
gtatgttctatggctgggattatccctattcattggttttcattacttttattttctttgcattggcggctctgctctgctttagtttaattatcacagcactttttgattctgttgttattgtgcaaaattatatagttctcaaatatgtataggccaggaatctggcgttttttgtgtattcggagcaagtgccttaaaaattcatcaaactatttacaattgttataaatgtaagtggcaagctgtagccaagcaataattagtcaatgttttgattgaaaatcgtatttggcttaatcatttgcttagatatataaaatatgcaattttaaacaattgtttgattcaaattgagtttagatttgcttatatctttggcagatttctgttagatttgggcaaagttagctatatcccccatccctctgatgaaaccctttcaattaaattcattccccagcttgacaatcatttaggtttttaatgctaagaattgacttttggtttgcagatttcatagcctacatttcagcgcaaaattcagcgttcaaatatgtgaattactactatgatatatcggtatacatatatagttcccactgtggctaaaatggaagttctttgctaccaactcacactagatatggtcctattaattgggctggcctctatatgatttatagaaaaatctagcacacgatatgaagttaccttgagtatattgtctactacttaagttagatgcctaatcgagggttaaccagcacattaaccccctgcactttcgcagcgctgatattgccgacttttactagagagatttgaaaaatttgtataggcctagttaatatcgaattagaatcacgtaacaggtgcagtttccttcacattcaagtgtttgtttcgcattagtttatccatagactactactccatactccagatccactatatatacagatacaaatagaaaaatacgcgactccagcgctctggactagaaggcctgtattggtcgatagagtccggtgtatccgcacagccgagctcgcagcgccggaatcaggaaggcggccagcgagatgtccttcagcagctcggcgcactcgcaaaccagcagatacatcttgtcgcccttctgcgaggtgctcttgtgcagggcgatgcgcctcaggcccgcggcacgtggcaggtacctggaatgagtggagcagcagttagacttcggatgaaagccacatgcactggtgtaaagaacatttatagttgggagatatacagggagaaatcattgctgtacagcatttgcagtagttacaggcaaagactctctaaatgtatctcataggcacacaatttcgtcaggtgtacctgtacaacatccgtgctccggtccagtagagccagttcttttcgaatcgttcgccatcgtcgccctcgaaaacctgcggaattaaaattgaatttttcatgatggaacccaatcccgcttggactaccactacaatcgcaccttgaacacgctaataatgtagccggtggccgcggtctgcgacttcttgaagctgcccacctcgttggagggcaaaaccaacggcggccggcaaatggcagccacctcgctatacagatccagtgtgtgggcggcagtgtatctggcaatgaatcgagaaacgagattggcgaataaatgggcgaatgggcaggcctgattggagcactcacttgagggcctttggctcaaacttggacagcgaggagacgcgcaggccagcatagaagctggaaggatccgtttgcagcgtattgatcaggtagtacgagatgaaggggaactcagctgggaaagttataatcaatatgagatgtatctagatgctgtgttgcctctacgttccactcacagctcttctccatgttggccagcagcattccgcccactgccgtgttggcctgctgcacttcggtcaccaattcggcggcaatggagcgctgcttgagcagcggatgcgctagtggcgactccattaccggatcgatggcctccaggggactcatcaaatgcaccagaatgcacagcttcggatcggagacttccaagacacttagagggcttgtggccttaccatcggcacttaaggcgggcagctgaaagaggaatattattaaatatttagtatctttcaaatacgttattcagtttacaatgggggttggaatcttagaagtagccataaaaactcacaggaatgccagctggcaggaagcggtccacactgtgcacgggaatgatgaagcagtcgcgatccagggtggccaatgagattggttccgctcgtgtgactcccgagttggcgccgccaccaaagttcactgtaacgtatagtgagacaccattagaatggccttcgaaaatgcagtggcacaacagttagccatttagttatagaaatatttaagaaacgtatcagcttttggcaagcctatgatgatcgattcaaagctttgccttaatatccttgttcaggctgcgattaataggcgattagctggagttagaggaggtcgataccaaagctccttttgtggtgcatgtgattccccagaagcgttcagtattttcactagttaatcaccaacaatcagatgtagagaacaggaaacacaaaaaagaaatgaaaccggaaacgaaaacatatagaagacagaacttgcaacacgacgaattgaagtatttgtagagcatccggtttggaaatcggaactctgtgaggttagctacgtacaacgtgcaacaaacgttaattggggaaactttggttggtattatggtgttgttttttgtttttttgataggaagtgcaacttataggatttgtttgagtgtgtcagtgtgttttatctttatggtttacggggtgagctggctggcaaatgacattagtgttgatcgagttttgggcagcaacaacaacaactatagttgagatcacatcagatcagatctcaaatatatttcgatttcatggggggactcaaaccttgccgcgtggctgcagctgcggccgctagcaatgttgttgttgccgtggccaccgttgcatcagcgtaccccagtgttgttgctgttgctgttgccaatagatgttgctgctgctgctgctgcatttgctgctgcagctgctgctgcagttgctgctgtagttgctgctgcatttgctgctgcgtctgctgctgcaggcggatcaaactgttactggcgctgttgccgttgctgttgctgttgcactccgtacccggtccgctgctgctccagcgcatcagggagacggacggccgtcggtcgaccagcggctgcggcatatccagctcgtacggcaggttgccgggcagggccagcgagggggcggtgctcgagagcggtgtgctcggtatgcctgacagggcgctacatcgttctgaaaattggaggctctcgatactatatgttatatgcacacaaagaacacaaaacacacacacagcaaacaacactgaacaacagaacagttggaaatctgaaaaaccgggcgagggaaatgagggtgtgtttggttaaatcataatctgtgcttcggttgctggccgttttacatttgtggattcgataagggacaaaagcggcttaaaggatactctaggaatatattaagtttgtccgttatccccatttaaaatgcaggtactactgacaataagatcggatatgagattgaacgattgctgacttagtagactctgctgccaaaaaactccttatttttggcctaaattcaaggtcattgccaatgggtgtgcaggctttgttaaggggccgaaatgggcaaatggtaacttacatacgcttgcttttgctttctgtgcgagctctgtgccccaaagccaagccaactggaaagtgaaagattagctgatgctggcactaacacactcacctctccaaacacacactaccacgcacaatgttgcacgaatcacgaatgcaactaagttccatcaacaaatgaactcctgcccacggttagtaatgcatggaatatttagcaacaaatagcattcaaaaggtgtttcatttaattccttttttcgcaatcaaatcgaagtttgttatttataacccatttatcaatctaacaatctatacaatctaatctaatgatcgaagagaactctgaattttattggaaatattgggatcttaaaacgctttatatattacacaaaataaaaagttattatctaatcacttgtaaagcacaaatatgttttattgattatttaatagactgttaatgaacacgttgaaattttaccgtactatcaaactgaaactcaataaggcactttttcccaccattcaattaggcttacaactcagtctcacgttttataaataaataaacgaagaaccctgctaaactgaccaccaattaggtggccataataaatggtcccacctgtcaggtggccgtttgtaaaattgatgaaaacatttcaattgaatgccctgcaatggctggaatgcaaatgtctggttaatggagcacaagtaactgagggccaggctcaagcgactacaaaggaccaaagtaatcgggtgcgacagagacggagcgagtggtttgccaagggaagggagtgagacggaaggtgagccatgtttgtgaatgattgaaatgggtacgctaggtttaaatgcagacaccaagcaatcgaaagagtgaacaaggacgtctaaattaaatatcatgaacaaaactggttaagcctttttagtgtattttataacaagattttactagacagataataaactttttcttgtaatatcaaatatatatatagcttaaccagcaaatagttttttcttacaaatatcggttataaatatcagttttaaaattattaaaccattatatgagcttgtgcccaatttatttctttatctttacatattttgtaatagaccaaatacgatgttcactctttcgatggtctactgtacttcgcaatggcgttgttgttgctgctgctgctgtgcttgcgttttgcaaggcaaacgacaatttaccttcgcccacatcgtagccaggtcggttgggcgagaagaagagatgggtcctatagtggatctcctccggctgctggacgagtcccatgtcccgggatcgcttcgtcctgttggccttcgactgcagctttccgccgccgccgcccgatttgctggccccctcgcggaaattcttgcgaaacattaaattcatcgtaagttcggtggctcaaatgcgtctggtggggtgaacttgttgatgatgtcggtgggtggtttagttggtggttttggttgggtggctgttggtggttggtggtgctgctgttggtggtttgctgtgtgttctcctaattgctgaccactcgggatgggttgtgtttgtctgtgtgcgtttgccggcgcgctttgttatctgatttgtcgttactggattttcatttgaataactttcgccgagcgacgtttttgtttgtcctcttatttggggcagtattaaatttaatttctgttttagagaaccagcaatttgtttgcatttgccaaggtcgcacagccagaatgaagagacagttagttaattatttgttatggctttccgcgctcgtcattgaagtgtatttgtgtactgactagattctttattattatatattatttattattttcttcgctatcataattaggttgtgagttgcgatgatatccatctttaaacaatttatttccccttattttagccacctcgccatagtgttggctttctaactcggcccgcacacgcgaattcgcacttagcctcttgagttcgttgacttgtacatttggccaacaaaaaggcagcaagtccttttcggagctaagtgaacgtacacaagtgcccttacatgagagtgtgtgtgtttgtaagtggcaacgtcaagcggaaattgccagtttccggctcaaaattacttagcccaaccgaactgaaccgaactcacttgcaggatacgcgaacttgggctcaagttagccaacaacacgtaagaagcgcaaaaaaatacaacaaaaaaaggcgaaataaatgcgaaatgctcggcaattactactgtgtgcttgtgcgagtttaattagttcaagacacggcgcaattagttttatggtcgcttattgatcgccttagtgcgataaatttagacagctgttcgctggaacagcgaagg

SEQ ID NO: 30338 - DNA, 1503 bp, DROSOPHILA
atgtttcgcaagaatttccgcgagggggccagcaaatcgggcggcggcggcggaaagctgcagtcgaaggccaacaggacgaagcgatcccgggacatgggactcgtccagcagccggaggagatccactataggacccatctcttcttctcgcccaaccgacctggctacgatgtgggcgaagaacgatgtagcgccctgtcaggcataccgagcacaccgctctcgagcaccgccccctcgctggccctgcccggcaacctgccgtacgagctggatatgccgcagccgctggtcgaccgacggccgtccgtctccctgatgcgctggagcagcagcggaccgggtacggagtgcaacagcaacagcaacggcaacagcgccagtaacagtttgatccgcctgcagcagcagacgcagcagcaaatgcagcagcaactacagcagcaactgcagcagcagctgcagcagcaaatgcagcagcagcagcagcaacatctattggcaacagcaacagcaacaacactggggtacgctgatgcaacggtggccacggcaacaacaacattgctagcggccgcagctgcagccacgcggcaagtgaactttggtggcggcgccaactcgggagtcacacgagcggaaccaatctcattggccaccctggatcgcgactgcttcatcattcccgtgcacagtgtggaccgcttcctgccagctggcattcctctgcccgccttaagtgccgatggtaaggccacaagccctctaagtgtcttggaagtctccgatccgaagctgtgcattctggtgcatttgatgagtcccctggaggccatcgatccggtaatggagtcgccactagcgcatccgctgctcaagcagcgctccattgccgccgaattggtgaccgaagtgcagcaggccaacacggcagtgggcggaatgctgctggccaacatggagaagagctctgagttccccttcatctcgtactacctgatcaatacgctgcaaacggatccttccagcttctatgctggcctgcgcgtctcctcgctgtccaagtttgagccaaaggccctcaaatacactgccgcccacacactggatctgtatagcgaggtggctgccatttgccggccgccgttggttttgccctccaacgaggtgggcagcttcaagaagtcgcagaccgcggccaccggctacattattagcgtgttcaaggttttcgagggcgacgatggcgaacgattcgaaaagaactggctctactggaccggagcacggatgttgtacaggtacctgccacgtgccgcgggcctgaggcgcatcgccctgcacaagagcacctcgcagaagggcgacaagatgtatctgctggtttgcgagtgcgccgagctgctgaaggacatctcgctggccgccttcctgattccggcgctgcgagctcggctgtgcggatacaccggactctatcgaccaatacaggccttctag

SEQ ID NO: 30339 - protein, 500 aa, DROSOPHILA
MFRKNFREGASKSGGGGGKLQSKANRTKRSRDMGLVQQPEEIHYRTHLFFSPNRPGYDVGEERCSALSGIPSTPLSSTAPSLALPGNLPYELDMPQPLVDRRPSVSLMRWSSSGPGTECNSNSNGNSASNSLIRLQQQTQQQMQQQLQQQLQQQLQQQMQQQQQQHLLATATATTLGYADATVATATTTLLAAAAAATRQVNFGGGANSGVTRAEPISLATLDRDCFIIPVHSVDRFLPAGIPLPALSADGKATSPLSVLEVSDPKLCILVHLMSPLEAIDPVMESPLAHPLLKQRSIAAELVTEVQQANTAVGGMLLANMEKSSEFPFISYYLINTLQTDPSSFYAGLRVSSLSKFEPKALKYTAAHTLDLYSEVAAICRPPLVLPSNEVGSFKKSQTAATGYIISVFKVFEGDDGERFEKNWLYWTGARMLYRYLPRAAGLRRIALHKSTSQKGDKMYLLVCECAELLKDISLAAFLIPALRARLCGYTGLYRPIQAF

SEQ ID NO: 30340 - DNA, 2347 bp, DROSOPHILA
aactatttggaagtttaaatgattgtatgagcatagtataagctacgatgactcaatacaaaaggtatagtatatatgtatatatcaacatttaagaattaaaggttagttatgtgatacagttttagaagtaagcgtgtactttttcttttacgtgaaagcatttgttgcttacaatcagaattatatatatttttgcaaagtaaattgtgttcctgtttcgattacaggtcccttaacttcgatgcattctaatatttcgcttgcatgcaaatctaattctgcgatcttcaatagaaattccctagtttgctggcaactttcctcagtatcgcgttgtttgcaatcaacgctgacaaattgccaatcgatttgatgcgccagacatcggcgtcggcctctgtcatccatttcccgcgctccgctgccgccagtttttccccagcgtttctttaaaatcaaaaaaatttctgtttgcgttttgatgattgccgaagacaatgaaatgacaatcaaagtcacgtgccgcccaacgccagctgcaaaaagaaaaaaaacttgcatgcaaatttgtgcgaagaaggaaaatgaatcgaagggtatgggtatgggaatgggacgatcgttgcgaagggtgaaccattcaaggtgaaaataagtatcattcgagtatgattcgttttgattgccagggacaaatgcttcgattgccagtcctcttgttgaattcggaattcagaacccaactacaacaattacatgcgaacattgtgtctccacacgctcattagcccactaatgtcatgtgcttgaataaggcattttcccagacctctgcacttgttcttagccaatataggtttaaccctctaagaaccaaccttaaaaaccttctttaatctcaatgaaattcgtattatattatataaaattggtaaaaatacaaatacacatctccttgaattgaagccagaaacatttcgctggcgtcacgaaaacttcatgggttgtgcaactctttaaagtttcataacatagaaatctgaacaatggctgaatagaaatgcatccgaccttggtggcttggagggttaagcagattgcccctatcgtttgacccaaggacctagactcaccttttgtgccgggtccattggccgtttgcagtgaggacatcgggatggccaggcaattgcgcggcggcggcggaacggcaagcgccagatcctgcggcggttcggagcgcggacacggcgtatacgcaatcttgctgccacgtcctggcgttggactaacgcgagcatgccgaccccccgtcaccgctcccccgctgccccgttcgctcatctctgctgctgcgtttcactttactggaaaactaaatgcattttctttttgtcgtctggcaggcgcacttccgctgctactggcgctggtgcacctgcagccttggttgctggtttgttggcttgctgcttttccggggcttatggcatttctcgttatccggcgattgtgcgtcaatatatcaggcaggcactttatgctaatgctaatgcacggattgcaaatgtctcggggttatgctggcttctattcccttctaacatccacagcacaccacggcaactgcattcaattggctctcgggcgggcgaccgtgagcaaggctaaggatgcggcaaggacacgcaggcgacgacgaatcgaaactttaggcagtccacacagaacttcacgtgccactgcagcagcagcagcagcagcagtcagagtcagagtcacacgagcaacaaccacaggcgagttatcggaaaagcgcgaccacgcgacttgcactgctcgatgtcctgctggcgactgagcggaaaagtggaaaatgtggcgagtggcaggaggaaagcgacagcttctcgtgcgggcaagcataaaaataacacgatgctaaagtgccgacgacacagcagcagcagtagcagtggcagctacaacgacaatggccgaagcgcagcgaaatcaaaacaaacaaaatcgttggattcaacgcggcatatgccagacctcgtgctctgggccacaagagccctctcggcaaaataagcaacccaaaaaaaacaaaaaacccatacgccacccatctcgtaccacagacttatactttctctctgcgggagcatcttcaatgtcgctggttgcattgagcgagcttttcacttcctgatggagtaaagctcactggctctagcttttttcattcacaaaaatatgtgcgacgtgtgttgccagatcgttgaaagattataccagggcctaacaggcgtatgagcgatatttttcggggagagtt

SEQ ID NO: 30341 - DNA, 228 bp, DROSOPHILA
atgagcgaacggggcagcgggggagcggtgacggggggtcggcatgctcgcgttagtccaacgccaggacgtggcagcaagattgcgtatacgccgtgtccgcgctccgaaccgccgcaggatctggcgcttgccgttccgccgccgccgcgcaattgcctggccatcccgatgtcctcactgcaaacggccaatggacccggcacaaaagagttgcacaacccatga

SEQ ID NO: 30342 - protein, 75 aa, DROSOPHILA
MSERGSGGAVTGGRHARVSPTPGRGSKIAYTPCPRSEPPQDLALAVPPPPRNCLAIPMSSLQTANGPGTKELHNP

SEQ ID NO: 30343 - DNA, 3409 bp, DROSOPHILA
cgatgtttgctgcattgttacttcattttcattctcgttttcgttacctagccatcgctattgccacaccatcacccaccacccaccgcccaacgcccagctcacaccgcaccaccaacccttgtggcatgtctaattttccagaggttaacatacttaacttgttggcatgcgttgcaaatgcgccaaggctgcgttgcaccaagcggcgccacattgcgacaattcgctgcggcaaaggaaatcgtacggcagctggaaaatgggcaaaatcgccgtccaatggtgtccagtggccaactgtccaatgggcaatgtgaaatcccagtggaatggtcaaacgttccgcattgtaattgcacacacacacgcattcgctggtttgccgatttgtggacattatctttagcacaaataacaaatgtattatatgtgaatgattccattttctagggattaagctaatgtaaattaaaacatcattttcgagagctaaataaaaatgctgttttaaatatcaggcatagataaggcaacgttgcgtatgcgtaattttccataggcaactatgcgtatgagtaatttaaaatgattttggcggatcaggaatttgtttggtattttttttttcaattatagggttaacaattcatttaactgattgataaatagtttaattagtataattacagcctaaaataactattcatttctaattcttattttggcaagcactaaaatttcttattcatacaaaatatttataatatacaccactgcattcactatacaaattgaaagttttgataagctcgaaaagaattcaagggagtaaatttgttgactttttgccgattgagtcataaaatcccagctaattcatagcactcttccacaattttcatatttattccataagcatttgaaaacctcttataagcgtggttttaaaaatatacatatgtttttatactcacatcagtaattcgtttgtaacaaagtctacaattcggccaaattcaaactctacgtgatcagagtccaattccaaagtcaccgccatggccaaacgcgatatcctgcccatctttccatcccgcgccaattcggtgatcatgaagcagcgcgttttggcggctagaaggggcgtgggtctcctcaagcggaagcgggacgccatcgatatgaagctacgcgaattgcgtcgcatccgcttcgaccaggacatgcacggcgatgaggcgatgcgcaatgccatattctcgatggcaaaggccaatcttctgggcgccgatttcaagccgcagatggtaagccgcagccacgtggcaaccgtatcgctacgccgcacggagatcaaaattgtgggcgtcaagctgaacaccctggagctggagacgaagggcgtgggcgcttttccgctggctggtctcagctgtggcggtatgcaagtgagccgaatcagggactcctatacgaaggcactcaaggcactggtggagttcgcctctctggaataccaagtgcgaatgctggaggcagcctcgttgcagaccaacatgagggtcaatgctctggagcatgtggtaattataattaattcatatgatccatatgttatcatggataatcttcaataaatatcactttgtatccgcaaggtaatacccatcctgcaaaatacctataactatatatgcggcgagttggaggagttcgagcgcgaggatttctatcgcctgaaacgctcccaggcgaagcagctggaggccaagatggccttcaccgagctgatcaagaccaagaacatgaccgacgaggagctggagacctacataaagcgaaacataaatcagacgcgtcctccagcggccgacacacccttcgatcaggagcagttcgaggagcgtgaggtgaagcggcgcatgcgggaggcccgtctgtccctaaagcagcgccgcgagcaggagagaaaggaggccatcaagcggggcgagcccccaccgcccacatccttcatcaccacccacggagcctcgttgagtttcgctggtcgccagcgggatccgcgagccagcagtggtgatctgtacagcaccaagcggatgctcctctcctccggaccggaaaggaagtccgccagtaatgtgaccgaaaggaagtccgatactcctccgcgtaatagccaggaaactcagcgcagatccagccagatgtcgaaagatgtcgtaaatgaagatccacccgaagaaagttagttaatcggactcacaaatccaaaatctaaagttgtccaaaaattcttaattatttttaatatggtgtgcaaatagaagatttattttaggtgatcacttcgaaaaagtatagcaatttcagtcgaaaatcgaaaaatatatggaaaaatttaccgtcattgttattaataacgtatacgtatgtaatttctgtctgctgtataatatacatgtgtatgtgtgtatgttaattccccatcatatgcaatggcaaatgctatatgtttgcaacagctgactttacagttcgtttttttttaacatcgaatgttagtttaacatttacgttaacatttatccgttaagaataaaatttgcaacattttgaagtatatttttgtcaattaaaatttgaacttaaaaatcgaagaactgtttacataaacataaatcacaaccggtaattagaataaacggacaataaaaaagacatttgtttatatagatgtacatatgtgagtacatacatagttgattcatttttttctattactgcaagggcaaacctatgcataagtttatttttgcagaagctagcttcctattatttataactttagttacctgtagtatgttgatacaatttttgtacacacctattttcgcgaaaagcgccggcgcgaccgttacaacggcgaaatcaaacttattttcgctttacgaaggtgagtggataagcaacagaaacaaacacatgcagacgctgccgctgcaaaagcgaacttacccggttcgttctcgcgagagcgagagcggttattgctattgctgctggcaaaataaaaccgtatatatggcgacgcagcgctattttgaacacaaagttttgagtcgtcgaccgttgcggacggaaattcagattaggatcgtgagttgtcagaacaaacagaccagacattgcatatagagagcagtattgggccaacaaaaaaaaaaaaaaaatacaaaaaaagcgaaaagagcccacacccaagcaccaggagctgcgaacgtttcgcggaaaagccaatttctcagcgccagccaaaaatcaagaaaaccaacgagcaaaaaattaaacaaatatctttataaaaaccgaattcgagcaactcttatatgtattagctctc

SEQ ID NO: 30344 - DNA, 1334 bp, DROSOPHILA
gtctacaattcggccaaattcaaactctacgtgatcagagtccaattccaaagtcaccgccatggccaaacgcgatatcctgcccatctttccatcccgcgccaattcggtgatcatgaagcagcgcgttttggcggctagaaggggcgtgggtctcctcaagcggaagcgggacgccatcgatatgaagctacgcgaattgcgtcgcatccgcttcgaccaggacatgcacggcgatgaggcgatgcgcaatgccatattctcgatggcaaaggccaatcttctgggcgccgatttcaagccgcagatggtaagccgcagccacgtggcaaccgtatcgctacgccgcacggagatcaaaattgtgggcgtcaagctgaacaccctggagctggagacgaagggcgtgggcgcttttccgctggctggtctcagctgtggcggtatgcaagtgagccgaatcagggactcctatacgaaggcactcaaggcactggtggagttcgcctctctggaataccaagtgcgaatgctggaggcagcctcgttgcagaccaacatgagggtcaatgctctggagcatgtggtaatacccatcctgcaaaatacctataactatatatgcggcgagttggaggagttcgagcgcgaggatttctatcgcctgaaacgctcccaggcgaagcagctggaggccaagatggccttcaccgagctgatcaagaccaagaacatgaccgacgaggagctggagacctacataaagcgaaacataaatcagacgcgtcctccagcggccgacacacccttcgatcaggagcagttcgaggagcgtgaggtgaagcggcgcatgcgggaggcccgtctgtccctaaagcagcgccgcgagcaggagagaaaggaggccatcaagcggggcgagcccccaccgcccacatccttcatcaccacccacggagcctcgttgagtttcgctggtcgccagcgggatccgcgagccagcagtggtgatctgtacagcaccaagcggatgctcctctcctccggaccggaaaggaagtccgccagtaatgtgaccgaaaggaagtccgatactcctccgcgtaatagccaggaaactcagcgcagatccagccagatgtcgaaagatgtcgtaaatgaagatccacccgaagaaagttagttaatcggactcacaaatccaaaatctaaagttgtccaaaaattcttaattatttttaatatggtgtgcaaatagaagatttattttaggtgatcacttcgaaaaagtatagcaatttcagtcgaaaatcgaaaaatatatggaaaaattt

SEQ ID NO: 30345 - protein, 373 aa, DROSOPHILA
MAKRDILPIFPSRANSVIMKQRVLAARRGVGLLKRKRDAIDMKLRELRRIRFDQDMHGDEAMRNAIFSMAKANLLGADFKPQMVSRSHVATVSLRRTEIKIVGVKLNTLELETKGVGAFPLAGLSCGGMQVSRIRDSYTKALKALVEFASLEYQVRMLEAASLQTNMRVNALEHVVIPILQNTYNYICGELEEFEREDFYRLKRSQAKQLEAKMAFTELIKTKNMTDEELETYIKRNINQTRPPAADTPFDQEQFEEREVKRRMREARLSLKQRREQERKEAIKRGEPPPPTSFITTHGASLSFAGRQRDPRASSGDLYSTKRMLLSSGPERKSASNVTERKSDTPPRNSQETQRRSSQMSKDVVNEDPPEES

SEQ ID NO: 30346 - DNA, 4922 bp, DROSOPHILA
gcgcttcctttggtcctcgctcaggtgacaaaaccaggtgcccggccaaatggatcctgcgcggcaactgaatgccttccgagcacaatcgagttgtgggaaaaggaaactataactgtactgtactccgaggcataataatcctgtccgtggctataatttacccggaaaagcgccttcatacgaatgctttaattcgttaagtcgctcttaatgagaagccaatagtgaaagtataactttgaaaaaatattataagatgttctcgttaagtttcaaggtttctaagaactaaaaatctaaatctgtttataaacactgctcttataatcccatctcaaactaccacaacctaacacgaatctagatctattttctttaaagcgaaactaccgcaaactaaattcgtattttatcgtgaaaataccaagccatcctgctcaaaggaagaccagacccaggggcatatctttagcttccgctggtacgagacccaacaacctgaccttcccgatggcagcccgagcattataataacactttctcaaaaaggttctttatggggtttccaccccattccattccattccccatccccaccattccctagccacgaaccaccacccaccattaagcacagttagttagtcgtttcttgtttctcgtttccctttccttgagtccattgttccgcggtatctccgctgttctcgcctctccctctctgtcgcccacttctgcgcgacgactatggccaaaagtaatcttccaaggcaaatgtgaaccacaaacaaatttatagctgcaatgcggccaggccgagcataacgggcccacatttctgtgaaatctatgtgagagcagatgtgcagaggggatggaaatggagaaatagaactcaaaaggaaactgtcgagtgaggacgactataaaaatatacaacaatactgccaaggcaacgggacataatgagccagggccagacggcccgaaacggtaaatggtaagcggtaagtctctaatcggttaacggtaaagccgagctcagctgagcgaatgtgggccaccagcaggagagcgaaccattttggctttggatttttgcttttgccctgcacctcctttgcagtaccgttagcgtttttctgcgttcgtgctttgcatggccatttgttacgtatacgtgtgcgcaagactctcgttctctctgcagacttgccttatttggctgcatactgtagggcgctctcccgttactcctgaatttcaaatttcgatgcataacttgaggcgctcgctctctctttctgaatctctctctctctcttgttatgtccctttttactttacacgttttgctgcacactttgaaagcacattctctcttcttgctctctctgcttgtttatgcgtcatttcttttggctttttctcacacatctctctttttgcaaaggcaacaacaaatattatgtcttgctcaattttatttttcttccctttcatcttgcccttcctttttttagttggttcgcattgcagcattttatttgctagctcatttatgcaattactactgcctttagttataacatattatatatttattcattttaagaaaaagtactgacccttattatattattacttcgtctaagtaactaaaatttatttaaaattaaattaggtaggatgtgctgagactccactgtactagtgaatccgatttttggcagattgcagcgaagggctcccagattacattcactctgtggctccccctttcatgccagtttcattaggtagattttccacctgagtgaggaacatttcaccaccaccaccaaccccacccaccaacattgttctgcattcacaagttcgtttcatgctcttatggttttcttttttcccagcaagcccctctgcagcgcattttccctcgtttgctttgctgcagcagctttcattcatgccacgtcagttgacataatgcgacatggccacacacaagcaacaagccacccaccgaaggcgagcgcccaccgccccctagaaaaccgccccacactcttcattgtcgactactgcacttggcaaaagtttctaccagtcattgccatgaaagtgccattcaaatttaccgcccctcgccacgcccccttcttcagttgctccttgatcgaaagggtttctatttggtatatattctttggctttgcaaccaggcaacacggtcaacatagcaagccatgtttgtttatccccaaaaacaataacaaactcggctcagaattcaaaaagacctcgacacaagcatagccagaaaatcggaaaaacataaattatagaaaaaacaaaagaagcatagaagttaagaatattcaaacaagtgaaatacgctcaagaacatttaatggaaaaaaaagcttcactttccaggttgcggcagattaattgcacctatctgctttaacttcgtgatttcgttaataataaatagaaaattcctgttgtatccgagagtcgtttaaattaatacattttaaaagaacccggcacacaattatatcgcaaaaaggaaattttgtaaagttattaatgtctgtgtaaacgaaaatctttcaatgaggattttatatatgcgccaggatccgtaaagctgctaagtaaaaatgggttagtataaaatgaatgttttaagacaaaaccagtcatatcctttttccttccagataccaccgccgaacgtcaggtgagactggaaggagtggaacgtgtgctcaagatgtcccaggagcgcatcaagatagcgatgatcataccgaagctgctggagaatcccgagaagttgaagagcgtcctgaaggacacctgctatgaggaggttctcgagcccatcgatgacatgatccgccaccttggcaagcagagtggacgttccaagctgccacatgaccacaccaccatgcgaatcgtggacttcttcctggtcaaccatagcattcatcgattctttccgcacttgaagaagaacctaaacgaaagggatcgccaattgctggccgcctttcactttctcctggagagcgcccacgtccatctgcaccgatcctcgcgtagcgagattaccaaggagcgaaagctccatgccatctttcatcagaatgtggacatcaagaagaaaatcaaggaactgaaggcgagcctggccttccagaaggtgattggcaaatggaagacggccgccaagggcatctatctgatgaaggtcgaggaggatctggccaataagaagtggcagaacaacgtggccattcagaacgaaatgtaactcggatttctagttctagaaattcttatttgaatatatttacaaattacagtgaaaagtgccatcgcacgatgcgaagctaccacaagagcagcatggacaggcagaaggaattggaggaggagctgcagaatgcccgggagagctacgagaagatgaccaagaagcatctggccgaagagcacgagctgcgaagcgaaaagtaagctacaaatcgagtaatttattatttaagtgctctcaatcctttatagaaacaaattgctcctgcaactgcagagtatgcttaagaagtacgataccagcctgggcgaaaagatgcgtgagaatttggtggcggaggatcagtatctggctgccaagaaggtcctcgacgattttatggtccagtacaggcaggaggagcgcatctacaagaacatcgtggtcaagcgagaggaggaggaacgtcgcgtgcagcaggagaagctggtcatcttcatgatgaaccgggcggcgggcaagattcaaaaatactggcgcaagtggaagaaggatcagcgcaagaggaagcgccagggaaagggcaagggcaagaagggaaagtagtgtcccaaaccggatctctgtatatttctacattgtacaatttatatgtagaaatacgaatatattccaaccttctactactactaacgtgtatatatgtatcctgttttctcattattttttaaaactgtcacatgctaaaaagttatgtttgcttgagctcatttgttgtttgcaagcttttgtggcatgaaaatcactaagcatgcataagtacccatgtatgcaaattaatatttccataagagaaaaggcaaatgtttactcgcaattaaatcgtgtttacttggcacttgacaacacacagaaattttctggaatttcttatatattctagagtaaagaaatgattatttcctttattcagcaaggctaaccaattttattaaatatttttctattgaactgcgataaatttcgcctaagacattgtcaacgcggttttttctatggggtcagagggcgaaatgtgtggcttccctgcgattgcgaaaatccaagagagaatgaaaacgcctggcagaatgtttacccaacacgcacacacacacacacacacacacatacagcgatggagggaaaagccaaattttcatgtcttgcggggcgaacgaaaaatggcgcattgctgtcgtcgccaagcgacaacgactacgacaacgacaactacaaacgctcttttggcccgatgtttgctgcattgttacttcattttcattctcgttttcgttacctagccatcgctattgccacaccatcacccaccacccaccgcccaacgcccagctcacaccgcaccaccaacccttgtggcatgtctaattttccagaggttaacatacttaacttgttggcatgcgttgcaaatgcgccaaggctgcgttgcaccaagcggcgccacattgcgacaattcgctgcggcaaaggaaatcgtacggcagctggaaaatgggcaaaatcgccgtccaatggtgtccagtggccaactgtccaatgggca

SEQ ID NO: 30347 - DNA, 1089 bp, DROSOPHILA
atggtaagcgataccaccgccgaacgtcaggtgagactggaaggagtggaacgtgtgctcaagatgtcccaggagcgcatcaagatagcgatgatcataccgaagctgctggagaatcccgagaagttgaagagcgtcctgaaggacacctgctatgaggaggttctcgagcccatcgatgacatgatccgccaccttggcaagcagagtggacgttccaagctgccacatgaccacaccaccatgcgaatcgtggacttcttcctggtcaaccatagcattcatcgattctttccgcacttgaagaagaacctaaacgaaagggatcgccaattgctggccgcctttcactttctcctggagagcgcccacgtccatctgcaccgatcctcgcgtagcgagattaccaaggagcgaaagctccatgccatctttcatcagaatgtggacatcaagaagaaaatcaaggaactgaaggcgagcctggccttccagaaggtgattggcaaatggaagacggccgccaagggcatctatctgatgaaggtcgaggaggatctggccaataagaagtggcagaacaacgtggccattcagaacgaaattgaaaagtgccatcgcacgatgcgaagctaccacaagagcagcatggacaggcagaaggaattggaggaggagctgcagaatgcccgggagagctacgagaagatgaccaagaagcatctggccgaagagcacgagctgcgaagcgaaaaaaacaaattgctcctgcaactgcagagtatgcttaagaagtacgataccagcctgggcgaaaagatgcgtgagaatttggtggcggaggatcagtatctggctgccaagaaggtcctcgacgattttatggtccagtacaggcaggaggagcgcatctacaagaacatcgtggtcaagcgagaggaggaggaacgtcgcgtgcagcaggagaagctggtcatcttcatgatgaaccgggcggcgggcaagattcaaaaatactggcgcaagtggaagaaggatcagcgcaagaggaagcgccagggaaagggcaagggcaagaagggaaagtag

SEQ ID NO: 30348 - protein, 362 aa, DROSOPHILA
MVSDTTAERQVRLEGVERVLKMSQERIKIAMIIPKLLENPEKLKSVLKDTCYEEVLEPIDDMIRHLGKQSGRSKLPHDHTTMRIVDFFLVNHSIHRFFPHLKKNLNERDRQLLAAFHFLLESAHVHLHRSSRSEITKERKLHAIFHQNVDIKKKIKELKASLAFQKVIGKWKTAAKGIYLMKVEEDLANKKWQNNVAIQNEIEKCHRTMRSYHKSSMDRQKELEEELQNARESYEKMTKKHLAEEHELRSEKNKLLLQLQSMLKKYDTSLGEKMRENLVAEDQYLAAKKVLDDFMVQYRQEERIYKNIVVKREEEERRVQQEKLVIFMMNRAAGKIQKYWRKWKKDQRKRKRQGKGKGKKGK

SEQ ID NO: 30349 - DNA, 4032 bp, DROSOPHILA
tctgccaatgccaaatgccaaactctcaccatccatttgaatgtttgcacaggtgctgtggtcttggccaagctctctgggccaagaactggaaagtcgagtcactataaatagttcccgctgtggagtgaaatgtcagttaggttcgatattaaaccccaagcaaaatgaagagccttctgagtctgtcgacagtcctgtttgtcctgtcattcgcgtgtgtggtcctggccaacagcagtagcagcagttccacacccaagttatgtgtcctgcggaactgcaactggaactccaccacgaatgcctgtggccgctttggtcgctccaatctgtgcaatcgctttaagaacagctgcaccctgcgatatgaatcctgcgtgggatccaccacatacacggcggtcagtctgtcccagtgttccgggatcagcgtgggttcccgtggaacctgcggaggatcgtcgtcgtcctcctcctcgtcatcgaatgttgtacccataatcatacgcaggggatgattttttgttgctgttaatggaaataaagtatctttaatcaatgttaactttaaaaaaaaatataattattagaagattttagaaatatcagttcacaaatatcgagtcacagctaacagtttagtaaagtattaaattgtttaaattttagttttccctatcaatctggggggctaaattcttaattgttatttaaatttgttagaaagtcaatacaccattgttttgccttatttaatattggttttagcctttcaaaattatagatgaacaatataatacggtagctatagactcaaggttagagacccaaaaatccaatgcaaattataaatctttgttagctcagctgccaatttgcattataatgtatgaaagtagaacgaattgttttcctttttttttggcgatacaaacaacataggtgttggtataaaagccccaatgtctagagcgtatttaaattagttgaaaacaagatgagagcatcattgttagtttgtgtcatcctggcgacggtgttcttcctcaacgtttccgccagcaacagcagctcctccgaggaagggttcgactctccagttggttacgtcctgacccgctctaaaactaaatctcgcagatcccaggcctgtcggcgaaatgtccaaaggaattgctcatccaccacaaagacctgcgctcgcctgggaagagcgaacatctgccaggctttcaagaacgactgtcagcgtcaactgagcaactgtggctccaaaaaatgtgagtgtatctcctcacaaaaagggggtcaatatataaatattattaaacatttccattgcagtctatcgcaaggttgacgtggccctctgtcgtggattgcccatcgatgtcgtgcgtccctgcggaagtggtaacaactgatcccaagcctggaagctttaaaataaccttaacaacactgttaactatttcttaaaacattacacaaaaccaataatttaatgcttaaactaaaacgttactaaatgtaaaacctaagtagacaatgtcaattgttatcaatttcaaaattaaaatgtttatgcgaaaagaagtattaaataaataatttaactttaacaggttatataaagatatatttatcttcttgccactgatatttcatgatgattatgagttgaaatttattggctatttgttaagttaacattttaaataaattgacagatagctcgaagtaagcttaattttggacaaatttgacagtaattgcttaaatgaaagtggacatttcatttcatttttaaaatgggtggctatttatagttagatacattttatatctgtctgtattttttaataatttgttcatgaaaacataaatctagaacataatacagaaatacaaaaaaatacagcgcctaaaatttgcattgcaaagtatttgaaatccactcctattcaattagccatttacaatttatgaaaagcctaaaagtatatgctttaatcttttcagaaactcgaagctaccattttatttgaacagcaaacttatataaattgcgagcagctcacgtgttgttttactcactgtttaatatgatatatttacacaattgtgagctaactaataagcgaaatgaacaaagattaggtaattaaaagaagtttctttgcacattagaaaaaaaggaagaactgcgatggtaaacatcttccaaggtcgccaagaaagaagaaagattgatgcgtataaaagtggcaatacactatcagtattcaattagatattgaaatgcgtttgactttggcgcttctggtgctggtcgcactcatcgccgtggccaccgatgctcaaagcagtcagaaaaggacgaacgccaggactttggctaccgtcacgtctcggcaaacgcgcaacaggatcaatgcacgagctggaatcgcgagaggacgtgccacgaccagtcgcagatcggtgatcatcattggcaacggaagtagtagctcttcatccagcagcagctccaccccatcctcccgatgccggaccactaccacgagctgctcggccaactccaatgtctgcggtcgttggagttccacacgcaggtgtcgtcggttcaggaacagatgcctcatggagcgggccaactgccggacaaccgtttcaagtgagtattagctgaatgcaaaaagatacaaaagtatcttagaaatacaagaccatttatatgatttctgtgaaaatcctgcgatgcaggagaaaataattcctataacttatatatatttttcaaaccttttcgcttgtttttttttacaggctggaatgttgttagtctgggcaactgttcgagcataactgtgaataatactggcacctgtacgagcaccttttcatcgtcttcttcttcatcgacctcgacttccaactcacaattgtccaacatactctccaccattctgatatcatcatcgagatcctcgagagtcacgcccatacttatacgaagaggttgagcgtatctattacatattacaatactttacacattctttgtacttaattttttgcgaaatttaagagtgaaaacattctacagaatgtagtaacaagtttatttctgcatatatatgtatacttccctaaagcctttttcactctcttctacaaaaaacaaaagcattgttatatcacacacaaagttagacaaacaagatttattcttaaattatgctaataagctgaactttcactgccgaaacgtttcgtaatgacctaaatttcggccatgccatacaattatttatgtgcgtgcgccgagtgttcactgtgccattctaattgcatccgcaggcgtttgccattcacatccgcactacgccaaaaaaggaaaatggcgaaaaattgcaaactaaaaagcgatgctacataaatttacattgcgcttgtatgtgtgcgtccgcttgttcgcttgtctgcgtggccataaccataatttcccccagttttccaacatttccctaaccctggcaagtagtgcgatttatgcgattgcaattaaaaaaaaaagagcgaaaaaagcaaaaatgttaaagcatcatgcatcatgcggatataaaagccattcaaactaaacgatagttaccaaagcacacaaaaacgttttagttaatcactttgtgactagattaaattccaaaaaataaaaaagaagaagccttgcatcaataagacacaaattcgaattatctaatagaacatcttttaattaataactcatgtataaaattacaataaatattgtacaactaacttatgtgcagtctcctgttcctccaattgcgatattatttccaatgcaataagtaagaacattcaccggtgtgccaagttggccataagctgcaaatataaacgtgaatagcatatttaataatatgatttttgtgttaatatataacctaataaatcttatatgattatatgatatcatatcttgcacttttgcgtttgaaa

SEQ ID NO: 30350 - DNA, 936 bp, DROSOPHILA
atgagagcatcattgttagtttgtgtcatcctggcgacggtgttcttcctcaacgtttccgccagcaacagcagctcctccgaggaagggttcgactctccagttggttacgtcctgacccgctctaaaactaaatctcgcagatcccaggcctgtcggcgaaatgtccaaaggaattgctcatccaccacaaagacctgcgctcgcctgggaagagcgaacatctgccaggctttcaagaacgactgtcagcgtcaactgagcaactgtggctccaaaaaattctatcgcaaggttgacgtggccctctgtcgtggattgcccatcgatgtcgtgcgtccctgcggaagtgatattgaaatgcgtttgactttggcgcttctggtgctggtcgcactcatcgccgtggccaccgatgctcaaagcagtcagaaaaggacgaacgccaggactttggctaccgtcacgtctcggcaaacgcgcaacaggatcaatgcacgagctggaatcgcgagaggacgtgccacgaccagtcgcagatcggtgatcatcattggcaacggaagtagtagctcttcatccagcagcagctccaccccatcctcccgatgccggaccactaccacgagctgctcggccaactccaatgtctgcggtcgttggagttccacacgcaggtgtcgtcggttcaggaacagatgcctcatggagcgggccaactgccggacaaccgtttcaagctggaatgttgttagtctgggcaactgttcgagcataactgtgaataatactggcacctgtacgagcaccttttcatcgtcttcttcttcatcgacctcgacttccaactcacaattgtccaacatactctccaccattctgatatcatcatcgagatcctcgagagtcacgcccatacttatacgaagaggttga

SEQ ID NO: 30351 - protein, 311 aa, DROSOPHILA
MRASLLVCVILATVFFLNVSASNSSSSEEGFDSPVGYVLTRSKTKSRRSQACRRNVQRNCSSTTKTCARLGRANICQAFKNDCQRQLSNCGSKKFYRKVDVALCRGLPIDVVRPCGSDIEMRLTLALLVLVALIAVATDAQSSQKRTNARTLATVTSRQTRNRINARAGIARGRATTSRRSVIIIGNGSSSSSSSSSSTPSSRCRTTTTSCSANSNVCGRWSSTRRCRRFRNRCLMERANCRTTVSSWNVVSLGNCSSITVNNTGTCTSTFSSSSSSSTSTSNSQLSNILSTILISSSRSSRVTPILIRRG

SEQ ID NO: 30352 - DNA, 2354 bp, DROSOPHILA
taacgaaacagatttttggccttgaccaaaaatctcttaacaatgccgtccaccgggcgtttaataaaaatgcgtttatggaataagtaaataaacaaaaagcgatcaaaaatacaacaaaacactcagctgccaagagcaaaaaaaatacaaagtgcacatgaaccgaatgttttcaattgttttttttttgctttacgcacttctgagtgcaatgaaaaagaaaaacaaacatagctctataaaaacattaattgtgcttaattattagattcattgagcacgatcgtgttcttttttttttctaaaatgaaaacaaatgcaattaaatggttaaaacatttttttttctttttaataatcttttttttcttctgcttaataataataatatcttaataatataatcttaaaaattttaactaattcctctgagcatagactaaagtatgaatattattaaacatttaaaactgctctaaaatcttaacttaaaaaaaatgattgcaacgtaaagaaaatgtaataaaattgttagtaatatgtataaaacgcatttgatatatttttaagttgcataattttgggagggttgtgaaaaattatgccgtggatttaagatgaaatttaaataaattgtatttaagcacagaaaattattaagtaaaattatgtaaaaatctaactttttgtgccacaagtaccaactttactattactactactaaatttaacacctgacggcagattcagatacacctttcaactttaaaccattggcaacgtgcgtaaaccaatggcaatggaccactagcctcaaggcgttctgttcatctgccaatgccaaatgccaaactctcaccatccatttgaatgtttgcacaggtgctgtggtcttggccaagctctctgggccaagaactggaaagtcgagtcactataaatagttcccgctgtggagtgaaatgtcagttaggttcgatattaaaccccaagcaaaatgaagagccttctgagtctgtcgacagtcctgtttgtcctgtcattcgcgtgtgtggtcctggccaacagcagtagcagcagttccacacccaagttatgtgtcctgcggaactgcaactggaactccaccacgaatgcctgtggccgctttggtcgctccaatctgtgcaatcgctttaagaacagctgcaccctgcgatatgaatcctgcgtgggatccaccacatacacggcggtcagtctgtcccagtgttccgggatcagcgtgggttcccgtggaacctgcggaggatcgtcgtcgtcctcctcctcgtcatcgaatgttgtacccataatcatacgcaggggatgattttttgttgctgttaatggaaataaagtatctttaatcaatgttaactttaaaaaaaaatataattattagaagattttagaaatatcagttcacaaatatcgagtcacagctaacagtttagtaaagtattaaattgtttaaattttagttttccctatcaatctggggggctaaattcttaattgttatttaaatttgttagaaagtcaatacaccattgttttgccttatttaatattggttttagcctttcaaaattatagatgaacaatataatacggtagctatagactcaaggttagagacccaaaaatccaatgcaaattataaatctttgttagctcagctgccaatttgcattataatgtatgaaagtagaacgaattgttttcctttttttttggcgatacaaacaacataggtgttggtataaaagccccaatgtctagagcgtatttaaattagttgaaaacaagatgagagcatcattgttagtttgtgtcatcctggcgacggtgttcttcctcaacgtttccgccagcaacagcagctcctccgaggaagggttcgactctccagttggttacgtcctgacccgctctaaaactaaatctcgcagatcccaggcctgtcggcgaaatgtccaaaggaattgctcatccaccacaaagacctgcgctcgcctgggaagagcgaacatctgccaggctttcaagaacgactgtcagcgtcaactgagcaactgtggctccaaaaaatgtgagtgtatctcctcacaaaaagggggtcaatatataaatattattaaacatttccattgcagtctatcgcaaggttgacgtggccctctgtcgtggattgcccatcgatgtcgtgcgtccctgcggaagtggtaacaactgatcccaagcctggaagctttaaaataaccttaacaacactgttaactatttcttaaaacattacacaaaaccaataatttaatgcttaaactaaa

SEQ ID NO: 30353 - DNA, 354 bp, DROSOPHILA
atgaagagccttctgagtctgtcgacagtcctgtttgtcctgtcattcgcgtgtgtggtcctggccaacagcagtagcagcagttccacacccaagttatgtgtcctgcggaactgcaactggaactccaccacgaatgcctgtggccgctttggtcgctccaatctgtgcaatcgctttaagaacagctgcaccctgcgatatgaatcctgcgtgggatccaccacatacacggcggtcagtctgtcccagtgttccgggatcagcgtgggttcccgtggaacctgcggaggatcgtcgtcgtcctcctcctcgtcatcgaatgttgtacccataatcatacgcaggggatga

SEQ ID NO: 30354 - protein, 117 aa, DROSOPHILA
MKSLLSLSTVLFVLSFACVVLANSSSSSSTPKLCVLRNCNWNSTTNACGRFGRSNLCNRFKNSCTLRYESCVGSTTYTAVSLSQCSGISVGSRGTCGGSSSSSSSSSNVVPIIIRRG

SEQ ID NO: 30355 - DNA, 2321 bp, DROSOPHILA
aagatcaatttgtattattgcttttgtatgttattgtatattgtatactccattaatttgaactgctgtaattaaaagcattctaaaaggaaacccatcaaatcaaatgaaagcagctgaaatttattgattgaattcgcataacacattttggcactcagggagcatacatttttaattggccccgttgctgtggctccagttagaaatgagaatccgtaatttgcttttggatacggatttggctgtacgcccaagacaaatgctcgcaattatccgagcataaagtaggtgcgtgtgccttctgtgcacccacaccaccgcattccggtttccggcgaaacaaggacactctcacacacacacacctaccaaatctgaagcacgtgcgcaaattatcttcaaggcgagagagcctgaataaaataacagctgcaaacagacgcataaacaaatgaaacgatgatggcaacacttctctccgggcacacaaccccatcccaggactcggcctaaactcattaattatctaggaagggaaggggggggggatgcaggttgcaggacatgctgccgtgaccagccatgaatacaccacattgtgtttgtaatcaactttgccgccgagcatcaaatatgcttaatgcgctcttcgattgttcgtccttaatgatgggtcgacttggctcaaatagtggccatcaatagttcagtttcagcttgtgaattcatgtcgttttggaaactgttttcgcatacatacccacaaggttctttcattgctaagtggtcaaatttggctatatcatctataaagtggcttagatataaaaggaaatgtatgcttttcacataaagaacaccataaatataacataatagctccttacttttttagtctagaatttatgaaattatttaatggaacaactaatatatatcagtaagtcagttcacattctctatcacccaaggaacctagtatgtgtacgtatttcaaatgtctgcctttaaaattgcttatgcctgtcgttattgtggcaatatcgtcagctacaagtcagccaaagtgaatgagacgccctacgacttgctcctgagccgtaccttcaacctaatccaagaggacaggatcagggagacaaatggggagcgattccagaatctgcactgctccaagtgccgcatggaactgggtctgctgtgcttgcagagcgaaaggaatgtccaactgaagggactttcgctgttggagaaggttcatctggtggtgtacgactcgtacgaggtgccattcgagatggcctcacttcgtgactgatgaagcgtgtggaaataaagtttgagggaaaacaattaacaatttaaggtgacacacggttgctatgtctgcacttgacgctttggtccgttgatgcgcacacttatgtacatacatatgtatgtgtgcaatatatatacacttgactttgcacgagcttgtcactttggaatgttttggcaagcgtgaaaatgatttgctcgacttgcgactgccggagcattaatcaaaatcaatccaaggaatcgtgccagacgaggacatgcggcagccatcagagtttcaaacaaaagtctgtgccaggcacgctggaaaaaaatccaaaataatttgcactcaacgctgtgacagttggaaaggcacatcctttccctttcgccggaaattaggtcgctcctcccagctgtcttctaggcatcctcacactcacacacaccacctacacctctgagtggctcaatggcaaaaggcaaaggcattttaatgattttaattaactgcatgtttgcctgtaattacaacggcaacaatgcaattacgccgcatgtacagcactgggtggccataaacaacaaggctccgggtcagagggcaaggccagttggccgcctgtcttttgtcatcactccatacctccatccattcctccaggccagtccccttcaaagtaactcctcgggctactgctcctcgtgctcctcctgtgctccatccgggtgacacacctcggatgacagaataattacatgcagagccaccaggccccctagttcatttgcttttagtgccccagctggaagctattcctggagagcgtcgacagagcagtgcatcataccgagagggacatgggtgcgtaccagaggggttccttgccagaaatattgggaaagttttcacatatattagtttgctaaaatgtaaaaggatttaggtgcctatgagtaggccaagtttatagacgtcataaaatggtccggaccaattatatcataaagta

SEQ ID NO: 30356 - DNA, 321 bp, DROSOPHILA
atgtctgcctttaaaattgcttatgcctgtcgttattgtggcaatatcgtcagctacaagtcagccaaagtgaatgagacgccctacgacttgctcctgagccgtaccttcaacctaatccaagaggacaggatcagggagacaaatggggagcgattccagaatctgcactgctccaagtgccgcatggaactgggtctgctgtgcttgcagagcgaaaggaatgtccaactgaagggactttcgctgttggagaaggttcatctggtggtgtacgactcgtacgaggtgccattcgagatggcctcacttcgtgactga

SEQ ID NO: 30357 - protein, 106 aa, DROSOPHILA
MSAFKIAYACRYCGNIVSYKSAKVNETPYDLLLSRTFNLIQEDRIRETNGERFQNLHCSKCRMELGLLCLQSERNVQLKGLSLLEKVHLVVYDSYEVPFEMASLRD

SEQ ID NO: 30358 - DNA, 2306 bp, DROSOPHILA
ttggctggcttaaagcactagcaacctaggttctctagcttaaagcatacaaatttctaaaacgaattccaaattctgtgcccaagcgagcatgccaaattaggtcaaagtcaaccagttgaataaaactacatattagcagaaatgtgtgtaatttcttattgagaacattggctaactttaattgataaaattacaggacaatgaaacattttgtgatgctaaatgaaataaaacaattctttatactgactaaaataaactcgatattaaattataataaaacactaaattctagttttagataacagctattttcctatttgaaataaacgaatttccctgttaaatccttaacagcgctgttgtgttgctctctgccagtgctgtaaaatgccgcagtggaatcacatttcgggtaaaaacaaattgaaatatccaccgaatttaaatattaaagttagagaagctgccaaatatctggagttacaatcagggacaaggacaaggactactacactagaggagagcttttacaagcaatccggtgaaaccacatataatgacaagtccgtcgcgggatataaacgatctttttgacgatattgtcctgaccgaggagaaggaggcacgtttgggctacgaggagggactgaaggacggccaggagcagggcaacgaagagggctataaattgggctacgcccagggagtatccctaggcgaggagctcggcaagattctgggccaggtggtggcccagcagcagctgaaacacacggacaaggtgcgtcgcagcttggaacagttgcgttcgctcatcgaggagtttccccgcaccaacgatccgcaggcggacatagtgggtgctgtgcaggacattcgctcctcccatcgtcgccttcgcgcccagctgggatccaaaaaaacgcctggtgcagcgcctgcagagaccaattctgtcgagcacaaggactacagcttctagccttatagcaccatgtccaaggtgggagttgtgcagttgcagaggcgtctggatggcttactggccttcctcaatccgcactgggattttgtcaattgccacatggtgaactacttgacggaccagcactgggacggctttttatccgaaacgctgaaaagtgagatcgccggcaaggaagatgtggctctggccatagaagacctattttggaaaactgatgaatcagaaaggtttccggcatggcgagaattcctaggcaagagcaaacaagaacgcctgtcgcttcagagggtcaggggaactccacgcagctaagcattcgggagtttatgagcgccaaaaagtgccatgaggtaagtaaaccaaccattttaaatgagagtattttaggaattgattaatctctccgattaggtggatctaacagccgttctcgtggaccagcttgtgaagaactccggtcaagattgcttcattgtagacgcgggcgatggcaaagggtatttatcctcgcgcttggcgctccagtatggtcaccgcgtgctcggcatcgatgcgaacgcggcaaacaccgagaacgcattgaataggaatcgcaaattgcaggtaggccgggcttacaaaataaagttagctttatttcattacgtttgtagacttagaagtaaggtgtgggtgtatgtaggtgaatccattggctagtcgcgcatttcgccctcctcgtcgtcgtcctccatgcccttgatatacagcacgttgttgcagcggatgagcacctcgccaagattaccagtcacggagccctcgatcacttcctccgtgttcgccagctgcatgttcatgtagccgtcgacggagaccaggaagcccttgtactcctggccccacttcagcttcaccagcaccggttttcccgtcaggccgttcaggaagggcttggggttaatgggcataccagccgacattctgtttatttgatttttcctgccttttttataaaatattacaacaagcgtgccgaaaatcgccggcttttcgcgttttttttgtgtagtgtgaccacagctgcgctgtgtaaacataccagaacaagaagaagaatagcatagaagaagagtattgaaaaaccattcaaaagcgccaaaattaaaattttatttaatttcagcgcgcttggaatggccttacggaacgagcggagctgcaagtccagggaatcacgcccaagagacgtggtaaaaagtcgccagccagggagagcaccaagagtgcgcctgccttggaaaactacaagacaacggcaaagtttataacc

SEQ ID NO: 30359 - DNA, 306 bp, DROSOPHILA
atgtccaaggtgggagttgtgcagttgcagaggcgtctggatggcttactggccttcctcaatccgcactgggattttgtcaattgccacatggtgaactacttgacggaccagcactgggacggctttttatccgaaacgctgaaaagtgagatcgccggcaaggaagatgtggctctggccatagaagacctattttggaaaactgatgaatcagaaaggtttccggcatggcgagaattcctaggcaagagcaaacaagaacgcctgtcgcttcagagggtcaggggaactccacgcagctaa

SEQ ID NO: 30360 - protein, 101 aa, DROSOPHILA
MSKVGVVQLQRRLDGLLAFLNPHWDFVNCHMVNYLTDQHWDGFLSETLKSEIAGKEDVALAIEDLFWKTDESERFPAWREFLGKSKQERLSLQRVRGTPRS

SEQ ID NO: 30361 - DNA, 2426 bp, DROSOPHILA
ggagctgtgaaaccgctctccccgtcgttagcaacacctcttaacatgccgcagccgcctccagctactgaagatccgcgatctgagcttatggccgccataagaaacgccggtggagtgcatggcggtcgtctgcggtcgcctgcggctgcgccgctcgacgtggtggacaacagtcgctccaaggcgggaggcgctgtcacgggggatttgatggcagacctgcataacaagctaatgctgcgacgcaagggaatttctgggagccagaatcccgtggaggccactgctggcaatcccctgatgcagcagctctcccgcgtcataccgccgccggtgcagccccgcaagggatctaagtcgagtgacgaacactccgaggacgacgaggatgggtggaactagtgaatatttagctttagtaccggtttaagtgccttggctggcttaaagcactagcaacctaggttctctagcttaaagcatacaaatttctaaaacgaattccaaattctgtgcccaagcgagcatgccaaattaggtcaaagtcaaccagttgaataaaactacatattagcagaaatgtgtgtaatttcttattgagaacattggctaactttaattgataaaattacaggacaatgaaacattttgtgatgctaaatgaaataaaacaattctttatactgactaaaataaactcgatattaaattataataaaacactaaattctagttttagataacagctattttcctatttgaaataaacgaatttccctgttaaatccttaacagcgctgttgtgttgctctctgccagtgctgtaaaatgccgcagtggaatcacatttcgggtaaaaacaaattgaaatatccaccgaatttaaatattaaagttagagaagctgccaaatatctggagttacaatcagggacaaggacaaggactactacactagaggagagcttttacaagcaatccggtgaaaccacatataatgacaagtccgtcgcgggatataaacgatctttttgacgatattgtcctgaccgaggagaaggaggcacgtttgggctacgaggagggactgaaggacggccaggagcagggcaacgaagagggctataaattgggctacgcccagggagtatccctaggcgaggagctcggcaagattctgggccaggtggtggcccagcagcagctgaaacacacggacaaggtgcgtcgcagcttggaacagttgcgttcgctcatcgaggagtttccccgcaccaacgatccgcaggcggacatagtgggtgctgtgcaggacattcgctcctcccatcgtcgccttcgcgcccagctgggatccaaaaaaacgcctggtgcagcgcctgcagagaccaattctgtcgagcacaaggactacagcttctagccttatagcaccatgtccaaggtgggagttgtgcagttgcagaggcgtctggatggcttactggccttcctcaatccgcactgggattttgtcaattgccacatggtgaactacttgacggaccagcactgggacggctttttatccgaaacgctgaaaagtgagatcgccggcaaggaagatgtggctctggccatagaagacctattttggaaaactgatgaatcagaaaggtttccggcatggcgagaattcctaggcaagagcaaacaagaacgcctgtcgcttcagagggtcaggggaactccacgcagctaagcattcgggagtttatgagcgccaaaaagtgccatgaggtaagtaaaccaaccattttaaatgagagtattttaggaattgattaatctctccgattaggtggatctaacagccgttctcgtggaccagcttgtgaagaactccggtcaagattgcttcattgtagacgcgggcgatggcaaagggtatttatcctcgcgcttggcgctccagtatggtcaccgcgtgctcggcatcgatgcgaacgcggcaaacaccgagaacgcattgaataggaatcgcaaattgcaggtaggccgggcttacaaaataaagttagctttatttcattacgtttgtagacttagaagtaaggtgtgggtgtatgtaggtgaatccattggctagtcgcgcatttcgccctcctcgtcgtcgtcctccatgcccttgatatacagcacgttgttgcagcggatgagcacctcgccaagattaccagtcacggagccctcgatcacttcctccgtgttcgccagctgcatgttcatgtagccgtcgacggagaccaggaagcccttgtactcctggccccacttcagcttcaccagcaccggttttcccgtcaggccgttcaggaagggcttggggttaatgggcataccagccgacattctgtttatttgatttttcctgccttttttat

SEQ ID NO: 30362 - DNA, 426 bp, DROSOPHILA
atgacaagtccgtcgcgggatataaacgatctttttgacgatattgtcctgaccgaggagaaggaggcacgtttgggctacgaggagggactgaaggacggccaggagcagggcaacgaagagggctataaattgggctacgcccagggagtatccctaggcgaggagctcggcaagattctgggccaggtggtggcccagcagcagctgaaacacacggacaaggtgcgtcgcagcttggaacagttgcgttcgctcatcgaggagtttccccgcaccaacgatccgcaggcggacatagtgggtgctgtgcaggacattcgctcctcccatcgtcgccttcgcgcccagctgggatccaaaaaaacgcctggtgcagcgcctgcagagaccaattctgtcgagcacaaggactacagcttctag

SEQ ID NO: 30363 - protein, 141 aa, DROSOPHILA
MTSPSRDINDLFDDIVLTEEKEARLGYEEGLKDGQEQGNEEGYKLGYAQGVSLGEELGKILGQVVAQQQLKHTDKVRRSLEQLRSLIEEFPRTNDPQADIVGAVQDIRSSHRRLRAQLGSKKTPGAAPAETNSVEHKDYSF

SEQ ID NO: 30364 - DNA, 3534 bp, DROSOPHILA
ccacggcggtggcgatggcgattttctggaactccttgcggtcgggttttgtgcagcgcttcaccaggcggattgagtccttggcgaaggcgcgtccgggttcggcgaatttgacaaccttgtccatttttgatttgtgagtatttaactaagaattaccaatgaactgaattgatatttattttgctgccgtgtcgcttcttgcagtgttaccaagttcctcagctcaaaacatactaaaaattaacgcctttcctttagttgttaataaattttttttttggttgaaatataagtgtatttgaattattttaatttattttgagtttttctttaaattgaacccattcaattattactttgaagcaaatcatttaatgaacagtttttaacaattgatttgggcacactaccctaccctagcgtcgatggaggaacggtggatttttgaacatatggacgttttctatttatttattttttcgtcatttggaagtgaattccaaattccgtgctccggaatggcgtgcttataggcttacatttgcctaatttagtaatgatcctgaataaatgatcccctgattaaaaaagttctcctaacagtgggatgagtttgaaaggtatttaaaaatgccgccttctctagtagaagtactacagccgatccgtgtccttaactgctttattaacagtaatagttttgggagacaccgcagtttatctgagggttagtttatctgaaggttagtttgtttcctggtggtttgtttatctggttagcttatctggggtctagtttacctgaatgataatttacgtgggagttagtgtaactgagggttcagttgactggtgtttcgtttagctaggggttagttaatctgaggtttcgtaattttaaaagaaatccatttaattattactttgaaccaaatcatttttaacatcttgtaaagcttttagagttggtcacactaccatgaacagcagtaaaattgcaaataaatatgtaattatttggcgatagaaaaatggaggagtcaccttacctgcacagcccctaccaggtggccattatagccaccgacctgcaccacgaggataccataatccaagcagcccagtccctggactgtctacacaaaaccataaactcgattttcgagcgaatcgatgcccgcttggcgagaaatggttcaaaggttgaggacataaacaatcgtgtgaagcgcgctcaggcaaaaatcgatgcgctcgttggctccaagcgggccatccagatctttgcacccgcccgctttccggccagcgacgtcctggcaccgctgccagccacctttccacaggtggcagccaatcccctaatggagcagcaagtggaccagctcccgcaagggacgtacagcagtcacagtgccgcggaccagaagccggatgatgcggacatctttttccatgtacgtggcgatcgggagcaggaatcgccactggtcgccgaacggaagataaccaatcggaccgctggcctgggcatcctgcctgcgggtggagtgcgctccgtaccctcgctcatgcgattcaataccaatgagttcgcctacggcgaggatctgaatgcctggaagcgatccctaccgccgcaaaatgctcgacgcgttgccagtcagtccactcaactcacgggagaaaagcagctcgctccggcacctcattcgctggcccacggcaccaccaaactggccactccagctggggacctgcgctacaatcctgctgctttggctgcacccgccattgatgttccgctggacctgcccgacctaccgggcatagcgaatgatctgcaatatgagccagtggaggagcaaacaccaatagcgccttcccagcagttcggtgatttaccagagctgccggatttgggcctcgaggagcaggatataatagtgcaagccatcgcggcacagacgcacattccgggaccggtgcgtaggaagagtgtgggacaatgtccttcgccagttacggcggcaccaccgcctcctcctccgccaccaccgccgcctccacctcctccaccagcgcagacgagcgcaattccatcaccgccaccctttcccaccaaaggagctgtgaaaccgctctccccgtcgttagcaacacctcttaacatgccgcagccgcctccagctactgaagatccgcgatctgagcttatggccgccataagaaacgccggtggagtgcatggcggtcgtctgcggtcgcctgcggctgcgccgctcgacgtggtggacaacagtcgctccaaggcgggaggcgctgtcacgggggatttgatggcagacctgcataacaagctaatgctgcgacgcaagggaatttctgggagccagaatcccgtggaggccactgctggcaatcccctgatgcagcagctctcccgcgtcataccgccgccggtgcagccccgcaagggatctaagtcgagtgacgaacactccgaggacgacgaggatgggtggaactagtgaatatttagctttagtaccggtttaagtgccttggctggcttaaagcactagcaacctaggttctctagcttaaagcatacaaatttctaaaacgaattccaaattctgtgcccaagcgagcatgccaaattaggtcaaagtcaaccagttgaataaaactacatattagcagaaatgtgtgtaatttcttattgagaacattggctaactttaattgataaaattacaggacaatgaaacattttgtgatgctaaatgaaataaaacaattctttatactgactaaaataaactcgatattaaattataataaaacactaaattctagttttagataacagctattttcctatttgaaataaacgaatttccctgttaaatccttaacagcgctgttgtgttgctctctgccagtgctgtaaaatgccgcagtggaatcacatttcgggtaaaaacaaattgaaatatccaccgaatttaaatattaaagttagagaagctgccaaatatctggagttacaatcagggacaaggacaaggactactacactagaggagagcttttacaagcaatccggtgaaaccacatataatgacaagtccgtcgcgggatataaacgatctttttgacgatattgtcctgaccgaggagaaggaggcacgtttgggctacgaggagggactgaaggacggccaggagcagggcaacgaagagggctataaattgggctacgcccagggagtatccctaggcgaggagctcggcaagattctgggccaggtggtggcccagcagcagctgaaacacacggacaaggtgcgtcgcagcttggaacagttgcgttcgctcatcgaggagtttccccgcaccaacgatccgcaggcggacatagtgggtgctgtgcaggacattcgctcctcccatcgtcgccttcgcgcccagctgggatccaaaaaaacgcctggtgcagcgcctgcagagaccaattctgtcgag

SEQ ID NO: 30365 - DNA, 1534 bp, DROSOPHILA
gcaaataaatatgtaattatttggcgatagaaaaatggaggagtcaccttacctgcacagcccctaccaggtggccattatagccaccgacctgcaccacgaggataccataatccaagcagcccagtccctggactgtctacacaaaaccataaactcgattttcgagcgaatcgatgcccgcttggcgagaaatggttcaaaggttgaggacataaacaatcgtgtgaagcgcgctcaggcaaaaatcgatgcgctcgttggctccaagcgggccatccagatctttgcacccgcccgctttccggccagcgacgtcctggcaccgctgccagccacctttccacaggtggcagccaatcccctaatggagcagcaagtggaccagctcccgcaagggacgtacagcagtcacagtgccgcggaccagaagccggatgatgcggacatctttttccatgtacgtggcgatcgggagcaggaatcgccactggtcgccgaacggaagataaccaatcggaccgctggcctgggcatcctgcctgcgggtggagtgcgctccgtaccctcgctcatgcgattcaataccaatgagttcgcctacggcgaggatctgaatgcctggaagcgatccctaccgccgcaaaatgctcgacgcgttgccagtcagtccactcaactcacgggagaaaagcagctcgctccggcacctcattcgctggcccacggcaccaccaaactggccactccagctggggacctgcgctacaatcctgctgctttggctgcacccgccattgatgttccgctggacctgcccgacctaccgggcatagcgaatgatctgcaatatgagccagtggaggagcaaacaccaatagcgccttcccagcagttcggtgatttaccagagctgccggatttgggcctcgaggagcaggatataatagtgcaagccatcgcggcacagacgcacattccgggaccggtgcgtaggaagagtgtgggacaatgtccttcgccagttacggcggcaccaccgcctcctcctccgccaccaccgccgcctccacctcctccaccagcgcagacgagcgcaattccatcaccgccaccctttcccaccaaaggagctgtgaaaccgctctccccgtcgttagcaacacctcttaacatgccgcagccgcctccagctactgaagatccgcgatctgagcttatggccgccataagaaacgccggtggagtgcatggcggtcgtctgcggtcgcctgcggctgcgccgctcgacgtggtggacaacagtcgctccaaggcgggaggcgctgtcacgggggatttgatggcagacctgcataacaagctaatgctgcgacgcaagggaatttctgggagccagaatcccgtggaggccactgctggcaatcccctgatgcagcagctctcccgcgtcataccgccgccggtgcagccccgcaagggatctaagtcgagtgacgaacactccgaggacgacgaggatgggtggaactag

SEQ ID NO: 30366 - protein, 499 aa, DROSOPHILA
MEESPYLHSPYQVAIIATDLHHEDTIIQAAQSLDCLHKTINSIFERIDARLARNGSKVEDINNRVKRAQAKIDALVGSKRAIQIFAPARFPASDVLAPLPATFPQVAANPLMEQQVDQLPQGTYSSHSAADQKPDDADIFFHVRGDREQESPLVAERKITNRTAGLGILPAGGVRSVPSLMRFNTNEFAYGEDLNAWKRSLPPQNARRVASQSTQLTGEKQLAPAPHSLAHGTTKLATPAGDLRYNPAALAAPAIDVPLDLPDLPGIANDLQYEPVEEQTPIAPSQQFGDLPELPDLGLEEQDIIVQAIAAQTHIPGPVRRKSVGQCPSPVTAAPPPPPPPPPPPPPPPPAQTSAIPSPPPFPTKGAVKPLSPSLATPLNMPQPPPATEDPRSELMAAIRNAGGVHGGRLRSPAAAPLDVVDNSRSKAGGAVTGDLMADLHNKLMLRRKGISGSQNPVEATAGNPLMQQLSRVIPPPVQPRKGSKSSDEHSEDDEDGWN

SEQ ID NO: 30367 - DNA, 2396 bp, DROSOPHILA; identical to SEQ ID NO: 27472

SEQ ID NO: 30368 - DNA, 213 bp, DROSOPHILA; identical to SEQ ID NO: 27473

SEQ ID NO: 30369 - protein, 70 aa, DROSOPHILA; identical to SEQ ID NO: 27474

SEQ ID NO: 30370 - DNA, 3085 bp, DROSOPHILA
cctgcggcctattaaggcgggaaatgtgctctacgacaattacgggtaagtagtaaccaaagcattctgaccacaccactttagttcaagctaataggggtccaagtcactgcagctctcttcaaatactaaaactaatagatatccaactttttagtgctcacttcgccatctgcagcaaggagcagcgtttgaaaaggctgtccctgcagtaccgcttcgactgcaaatgcgagggctgcgagctgaactatcctatgttcggaatgatgccgcacaaggcgacggtgccatcggttaccgatgacacggaattggcactgagctcctacaactatgatttcgcggtgagcaactatcgaaagtactgcgacttcctcacgcaatacggtgacgactatccgtgcgagcagattagctccgcggaggagtgcctaaagatggccctgcatatcatggcggacgcagtgccgctcaaggcgaagatgtaatcggatcctgccgctgaaccaacccacacaaccaacacggacgaacttttcctttgctaactttaactggagacagcgtattacaagcgagacacaaatcaaggagagtaattgattatacatacatgttgttgccataagtctgtagcgcaggcagcagcgcgatggggagggagcatgcccttaacttttatatttgtaattgtacattttcgacctttgattatgttttaccccgcaccaagcccgcacaccacacccacacaacgcccagcacacccacacaacgcccagcacacccacacaacgcccagcacacccaccacacatttcacaacaattcgaaagttcaaaattctaaagtttatttattttttgatcacaacaatgtcttcgatgaaaacaaacaaacaaaggattattatgcaacctacgtcgtttttataattattttacaaaaaccaactgaagcagaaataaaatattttcaaaacgaagtgactttggcctcaaggcattttgctgtacaggtccagcaggttctggttcagcaaggatcctccccgggacatggacgtcgccaccttttccgaggacgatgccgatgtcgtgggctgcagctgtacaaactcgcagccagaggagctggccgctgtgtcattgaaaagcacattgccgaaggcctgctcgaactgctgctggaactggcgggcgttgatgggctgcagatcctcactttgcgccggatttatgttcagctgagcggccagctgatccatgctgttgggctcccgttgttggcgctcccgctggtcggcactcttcgcatagatattatcgccggctgactcaacgtattccgcgtagtaatcttgatccacgtccctgatgaaactaccgtccatggcctgaaagcccatgcgaatcaaaagcgatatctttgtgttaaagcactgcagccaggcccgattcgtctggtagatggacagctgcgcatcctcaccgctggcattccaaaagtccagcagcgtgtttttcgtgaagtcaatcagcatatgccgtttggcatccggatacaacctgttgatcgcctccaagtgccgaaatgtaatctccagcagatggtgctgatggcgggaaacgaaaagctgccacttgtagaccatagtcatcagattccacagcttggacatcgactgctcgtcgagtcgcatcaaggagcaggtggcaatgtcgttcagcataaacttgcaatgctcggcggtcaaaagctgcgcactattgtgtttcgatccgtttaggagcgagtctataaactttggttcgagcagcacagaagtcacatcgtggataactggtggaagatatatatatagtgtcttttaaatttgaatttgaatttgaattgaagcatatagctatgcagaagactccaaggctctaactttaacctttaccaaagcttgcaaggacgactctagcatctcaaatgtaatatccatgttcaaatttcttggcgggatttcttaccctggaccgatttgtcctgagcaatctgctgcgccttcagccgctgatcgatcacgtagagcatctcgcaaccgagattgaccaggatgaagacattggcccggggattctacagctggcgtggactaaagttggccatcgtttgacgggctactcgatggcacgggcggcgattgcgaactaaactggaaaaccgatgacttcgtcgagcacgcaaggctcggaacccaaaaccgttattggattttcggtttccgtgcggactgccggcccccatttacacggaaaacaaatacgtaatcgtttcgtataacatcggttataaaaagctaaagatccaaacttgattgttcggtataatcagaaaacattcttcaatatgttttcttacttaattttttgaataaccaataagaaaacgaatgtatatgtgtatattttgtaggctaaaagggttttggtctcattaactcatcataaatatacaatataagttgacctttaccatatatccactgggcgttttttccagtgtcctttcgcatttgatggctttatgagagcctcggcaacgtctttcagtgcaaacaataacgaaagtctgtccgtggcgacaggacaggccgtgtataattatggcagccatggtgggaaggacgaacctccaccagcgccgggcaataaattttattgatttgtaaatttccatttcaagcgcagggcaatggtaattagcctggaaattatggcagcaggttaaaaagttaaagcgcttaccctattatacatatgtgtatgtccatcacaacaggatggaaagctcccacgaccagtagaccagcagacctgtctgctaattcgttggtcgggcggagtggttggtggttggtgaggtctaccaccaagttccagtccaaatgggaggcaagcacctgcagcgaaggtcgtccggaaaggatgccggaaattgcgtgattcccctaccacaaaagctacactggtttgaatttactacctagcatttgaaaaaaagatcgccaattcaaatagcaagatatttacat

SEQ ID NO: 30371 - DNA, 909 bp, DROSOPHILA
atgctctacgtgatcgatcagcggctgaaggcgcagcagattgctcaggacaaatcggtccaggttatccacgatgtgacttctgtgctgctcgaaccaaagtttatagactcgctcctaaacggatcgaaacacaatagtgcgcagcttttgaccgccgagcattgcaagtttatgctgaacgacattgccacctgctccttgatgcgactcgacgagcagtcgatgtccaagctgtggaatctgatgactatggtctacaagtggcagcttttcgtttcccgccatcagcaccatctgctggagattacatttcggcacttggaggcgatcaacaggttgtatccggatgccaaacggcatatgctgattgacttcacgaaaaacacgctgctggacttttggaatgccagcggtgaggatgcgcagctgtccatctaccagacgaatcgggcctggctgcagtgctttaacacaaagatatcgcttttgattcgcatgggctttcaggccatggacggtagtttcatcagggacgtggatcaagattactacgcggaatacgttgagtcagccggcgataatatctatgcgaagagtgccgaccagcgggagcgccaacaacgggagcccaacagcatggatcagctggccgctcagctgaacataaatccggcgcaaagtgaggatctgcagcccatcaacgcccgccagttccagcagcagttcgagcaggccttcggcaatgtgcttttcaatgacacagcggccagctcctctggctgcgagtttgtacagctgcagcccacgacatcggcatcgtcctcggaaaaggtggcgacgtccatgtcccggggaggatccttgctgaaccagaacctgctggacctgtacagcaaaatgccttga

SEQ ID NO: 30372 - protein, 302 aa, DROSOPHILA
MLYVIDQRLKAQQIAQDKSVQVIHDVTSVLLEPKFIDSLLNGSKHNSAQLLTAEHCKFMLNDIATCSLMRLDEQSMSKLWNLMTMVYKWQLFVSRHQHHLLEITFRHLEAINRLYPDAKRHMLIDFTKNTLLDFWNASGEDAQLSIYQTNRAWLQCFNTKISLLIRMGFQAMDGSFIRDVDQDYYAEYVESAGDNIYAKSADQRERQQREPNSMDQLAAQLNINPAQSEDLQPINARQFQQQFEQAFGNVLFNDTAASSSGCEFVQLQPTTSASSSEKVATSMSRGGSLLNQNLLDLYSKMP

SEQ ID NO: 30373 - DNA, 3479 bp, DROSOPHILA
gctaaatgcaatggccaaaaataacgggctgcaaagttggccaaactaacgaaaatagctgcaaaaaaaacttttccgctccggccattgttgttgacaaatgatttagtgacaatctattaaacgccggctgattgatgattgatgacccgggtcgcccaccgccagaccggctaaaaggattaaattgctggccaaactgcagcaccttggatcatgaaatatgtatgtatgtatatgtatgcacgagtttgccaggaggaataacaagggtcgccataatgtaaacgctccataaaatcgcacacacaaagttttacgcgttaataactggcgcaaaagaaatggtgacggaaatagagcgattatgacatgtccttcgggacctgccccacttcctttggccctttgaacccaaaaaaagaaagcacacacactcgcgcaatggctatgtttaagagtgtgtgtgtgtgtgtgtaagtatgtatatatggggggtcaagagcgcgtttcactcgactcaattcgacacgaaacagcgcagcgatattggaaagatattgactatgcgactattgtgggtaaatgttgtctttctgggcatgtaacacgcatttgtaaattaaccatgccgcagtaattacaatacactgcgctttaatacagaactactttgcgagatattcgatctgatttaatagtcatattaatattaaatcaaaattcttaatttctaacctgatttgatgacctaaagaacttggctgcaaaccaactatttcctgcttttaattttgactaactattttagaatttcgaaagttcactctaattagatttcattgaggttttatttcttgcgctgggtgcatgttcgattggatcgaattaatgccagacagtcggctaaaggtcagcgttgaagtcggctaggttccaacgattcctcccccatagtccaccattgaaaccccagctcaagcctctatataatgggaatttataggtataactcaccgatttgtggcacatcgtattgccgttgaccgcgggcggtgcgcagcatcagctggctggctatgctgtgtgaaatcggtggctgcgctgagtaaccgcctcctggcgatcccatggatcccgccgatccggaaccggatcgcttatggctgggatcctttttgtcctgctgcgactgttgctccacctgctgctgtttaggtagtccatcgccggcggcttgtttgccggaggaagaagtggcggaggagacggccgaggatgcactgctacctagctcgctatgtggcttctcgttatccttggagccggagcgagtggatggtttcaggtgcttgctggccgtggcctccgagttggcggacagcgatagtttgccattgcgctgtggcttgaagtgctgggcgaagatctggcgctgcagctgcttttccgcctcaggattatgggcaatgccctggccatttcgtttcctcgcccacttttgctgcacccttatgttgtagttgcccgggttgtggattttgccggtgtgcatcgccttgaagggggcatctcgctgctcctgttcctgctcgaagagctgctgcagggagtcgggtgcacccagctccaattgctccagcgtgcgatagggattctccggaagggtttcgtcctccaggccgtgatattgataggcatccagttcacgcagcaactcatcctcgcccaagtgcggctcctgcggttcctgctccagttccgagaagtcatcaaagtcgccgaacgagtgcagcggttcgtagagagcctccacctgctcctccctctccgctggctgcaccactcttccgtagtatttaacgggtctattctccagatccctcagctgctcataatcctgttccagggtaaccggcgtcggtggttgcttctgcacattaccgaagatgtagccccgtgcggcctgctgcaacagcgccggatagtcgcccacttccagctcctcgctgggctgcatctgtatccggccggcaatgaagggatgaccgcgatgattactgcccgccggcggctgttccgccgtctgcttggcgcgggccaggagcattagtcgctctcgctccagctgggccatatccgctatctccttgttcagccgcacggtggtggcatcgaaggcggccgctgcggcggaccgatggccatgcggcgaggatccaccgccgggcggagatcctccgggatgctgttggtgctgctgctgctgcgagggtgcggtctgccaggcggcggctactcccgtcgagggtccaacgggatgactgggcacctgcactgccttggcttcgcccagcgacttctcgccgttcccattcccgttcccgttgccatttccgtttccgctcagatggagggcatagaggccgccctgtatgagcaggacgcagaagagcgtctgggccagcgagcagaacattttccgtttgttggtctggcgcagcttctcgattagacggcttatcttggcggtttcgggtttaccagggggtttaccaaggggaaaatacagttagtttgctagtccggggggatggtgtttgggggtgggggcgggagttatagagactggtggcaggtggtttttcggggctggtggcggtgaatggtggtgagggaaagtcccgatatcaatgtttctctctggactttcgatgctttgcacacacggcttttgtgggtcttcaggccccacaccgctgaccaacactgtgccggcctaagcctggcattgcactacactggcctgcaccgaacgaagttttttcgaaaatttcgaacttttccaaatttgtgtgtgtgtgttttttttttctttttcaaactttttggctatcgcgtttttgtggatgccttgcaacgaccgttgtttatggtttcgttatttttcgatattatctgtatattttttcgggcacttaacttggcgttcttcttttcactggccagtccactcgatttcgatttagaccttaggcttattagttagtttttgttcgcggcactttggtttcttgggtatataattttcttgtgttgttattcagctttcgtttgtggtgtgaaaactttcccttgttctgggtgagtgatgttttagtggactagctttgctactagtgtgtatatttttttttttttttgttatattcttttttatcgcctggctccaagagtgttccgcacgtttgaaccgacgagcaaggactcgtcgtgtcgtctcagcaggatttgcctgtttgtctgccttttgcttggccgcctgacgcgtgtccctctgccactgcctctgcctcggtcggcgtcgcggtcgctgtcgctgcccgcgtcgacgtcgctgccgctcctcaaggcgtttcggatttccactttatgtggcagtcgttgtcgtagtcgcactcgtacacccactccctgca

SEQ ID NO: 30374 - DNA, 1479 bp, DROSOPHILA
atgttctgctcgctggcccagacgctcttctgcgtcctgctcatacagggcggcctctatgccctccatctgagcggaaacggaaatggcaacgggaacgggaatgggaacggcgagaagtcgctgggcgaagccaaggcagtgcaggtgcccagtcatcccgttggaccctcgacgggagtagccgccgcctggcagaccgcaccctcgcagcagcagcagcaccaacagcatcccggaggatctccgcccggcggtggatcctcgccgcatggccatcggtccgccgcagcggccgccttcgatgccaccaccgtgcggctgaacaaggagatagcggatatggcccagctggagcgagagcgactaatgctcctggcccgcgccaagcagacggcggaacagccgccggcgggcagtaatcatcgcggtcatcccttcattgccggccggatacagatgcagcccagcgaggagctggaagtgggcgactatccggcgctgttgcagcaggccgcacggggctacatcttcggtaatgtgcagaagcaaccaccgacgccggttaccctggaacaggattatgagcagctgagggatctggagaatagacccgttaaatactacggaagagtggtgcagccagcggagagggaggagcaggtggaggctctctacgaaccgctgcactcgttcggcgactttgatgacttctcggaactggagcaggaaccgcaggagccgcacttgggcgaggatgagttgctgcgtgaactggatgcctatcaatatcacggcctggaggacgaaacccttccggagaatccctatcgcacgctggagcaattggagctgggtgcacccgactccctgcagcagctcttcgagcaggaacaggagcagcgagatgcccccttcaaggcgatgcacaccggcaaaatccacaacccgggcaactacaacataagggtgcagcaaaagtgggcgaggaaacgaaatggccagggcattgcccataatcctgaggcggaaaagcagctgcagcgccagatcttcgcccagcacttcaagccacagcgcaatggcaaactatcgctgtccgccaactcggaggccacggccagcaagcacctgaaaccatccactcgctccggctccaaggataacgagaagccacatagcgagctaggtagcagtgcatcctcggccgtctcctccgccacttcttcctccggcaaacaagccgccggcgatggactacctaaacagcagcaggtggagcaacagtcgcagcaggacaaaaaggatcccagccataagcgatccggttccggatcggcgggatccatgggatcgccaggaggcggttactcagcgcagccaccgatttcacacagcatagccagccagctgatgctgcgcaccgcccgcggtcaacggcaatacgatgtgccacaaatcggtgagttatacctataa

SEQ ID NO: 30375 - protein, 492 aa, DROSOPHILA
MFCSLAQTLFCVLLIQGGLYALHLSGNGNGNGNGNGNGEKSLGEAKAVQVPSHPVGPSTGVAAAWQTAPSQQQQHQQHPGGSPPGGGSSPHGHRSAAAAAFDATTVRLNKEIADMAQLERERLMLLARAKQTAEQPPAGSNHRGHPFIAGRIQMQPSEELEVGDYPALLQQAARGYIFGNVQKQPPTPVTLEQDYEQLRDLENRPVKYYGRVVQPAEREEQVEALYEPLHSFGDFDDFSELEQEPQEPHLGEDELLRELDAYQYHGLEDETLPENPYRTLEQLELGAPDSLQQLFEQEQEQRDAPFKAMHTGKIHNPGNYNIRVQQKWARKRNGQGIAHNPEAEKQLQRQIFAQHFKPQRNGKLSLSANSEATASKHLKPSTRSGSKDNEKPHSELGSSASSAVSSATSSSGKQAAGDGLPKQQQVEQQSQQDKKDPSHKRSGSGSAGSMGSPGGGYSAQPPISHSIASQLMLRTARGQRQYDVPQIGELYL

SEQ ID NO: 30376 - DNA, 2153 bp, DROSOPHILA
aggagcaggcggcaggcaaaggacgatgggcggctgcaagtcctgggacattaaagtcgcgtccttacgcccacacacaaaggcaaagggatcatcttccgccagctaccgcctccttgcgcctgtaaccgtccattccgccagcagattacggccgtaaatagcaaaaggcattgcataaaacaaaaggctgagcaaatttataaatggcaactacaaaattgatgggcatttccttttttggcgacaacctctccattgattctatgccatcccgagatccagccaatttgtcgtgttacacaaatttcactttttgggcccagcttaggcacagcagcatagctcatctctgacacattttccattctgtttgtcctgtttgttgttgccggcattgtccttcatcaaaaatgtattcaccgtttgtcaagtttcaacacgaaaaaccggacagcatcagcaaattgaggtgttccccgccgaatagaataagatgctcctgtcataatttgtttgcctttttccattttgcacaaccgtaataaggttttgattaaatttgctgctcaaatgtatctgccaggcgaaaatcttccgtttggttgtctattattttaggacttctgtaaccgggttgctcgccttggttttagctttcttggccgtttctttttgggtagcagcatctagtcctccgttcgcctggcttcaattaatttaacatattttttttttgtttttccaccagcacacccacgtacgtgcatagtacatacatacgtacaacaaatggccgcaggttagcttttctccattttgttttccttttttgccgctttgttttgctttgtagggcgtaaagaaaaaggcggcacaaaaagcaggaacgtaaacagacgccaggtggcgcgttggtggtggtggtgctttgtgtgtgtgtgtgtgtgtgtgtggcccctcgaggtacattttgttttcggatcacatttattgtaatttaataagcccgtttcaacgttcccacatccatttccacatccacatcctcatcctcagccacattcaccttcagatccagcgagatgtgatggaaatacgctgcctgcaagctagttgtcggttccgccttgtgcatgtaggcgaaaagcatttccccgtcacttcatattcatagctgataaatcatacacccgaccaacgccaaagcacgcccactggcaggcccggctgacgacatgggaaaccttttaggacgcattcgtcccgaaaacgctttccactgaagtggtttgcaatgctctcgttggcaacattggatccgattcgtgggtttcggatgcgccaccgcaggccctagtatcgtgtatcaaagggtggcgaaggccaggcatctaattatcaggcactttgcgctttaattttagtgataaattcccagggatatgccgcaacaattctctcctcataactagttgatgatgcattggaggccgccgcataaacacttggggccgagcagtttacaggacctgcccctcgtttcgggtttatatgcaaatgttatgtccttccagccgcacagcttcatgcctcaactggcgcaacattttgcatattgtagcagaacatttaaaatttcccataacttacgctcactctactgtcggcattgaaggcctcggggcagtttttctcgcaatttctcatagttttatggcccgttcatggtgtaacttttttctatttcccaggcaagtcagcacttttgtgctacgatatgcggcatacatatgcctgatgatggcaacagatttaacacaaattaggtttaatcattgtgagctagggcagtctagcagtctttcgccaaaaaagagaaacttaatatcacgtatacgccacatggacccaaagtgaggaaaattattacaagattgttaatatgttgatacactttaaatggaaacgagaaatccaacctttagcatttaatgataaccctattttattgtcttgctgtaatgccataaaacactttgttaaatacttgttaaatatctaacttctgtcagcaatgtattacggtggtatctataagataaatgctatctgaaatcaccacgttctcaccgacatataggggaaattaa

SEQ ID NO: 30377 - DNA, 153 bp, DROSOPHILA
atgcttttcgcctacatgcacaaggcggaaccgacaactagcttgcaggcagcgtatttccatcacatctcgctggatctgaaggtgaatgtggctgaggatgaggatgtggatgtggaaatggatgtgggaacgttgaaacgggcttattaa

SEQ ID NO: 30378 - protein, 50 aa, DROSOPHILA
MLFAYMHKAEPTTSLQAAYFHHISLDLKVNVAEDEDVDVEMDVGTLKRAY

SEQ ID NO: 30379 - DNA, 2562 bp, DROSOPHILA
atgtttgcttcattctcataagttgtaaatgtttgtttttgtcgctaatcttgctgttattgcattgtatataagtatattatattgcactcgttagcttgttcagttatcagcaataaaacctaatgcaatattttcttcaattgtatatttgtttgttattggtatatgtatactattaatatatatttaatgtcggtttttttctgtgtatatgtatatataattcattcgtcttctgcttgctgcctcatcgttatttttatcgctttttttctttttgcttgcttcgttttgatttcatttcatttcatttgtttatttaacattaacattatttaactttaatacacgtataattaaataatgtacacgaaatatatttcatatagtaagatatatttataatatatttatttaatatatactaaaaatagttaggcccaattttgtttttcctcattatgttttctgttcctgcgaaacaagtttgaaaatgaaaaaaacatcgttttttttttgtccttttgctgaattgtaatttagctttagtatgtataactgcttcttctgcttgggcttttcattaagttaattttttttaataataatagtgtaataataatcatacctttcgtcaagcacattttctgcctcactttgtttttaatcatagctttcgcttttcatacttggcaattgtccatttagcccattgcgagctgaatttttgtgtggctggggatttttttacggtatttgctcgggaaaatctttctcatgaaggacatcaaaggataggcgggtggtttgtggcttgtctgtgtgtctggttccaggataatgtttaacttaacagggttcttgtttgcttggggcgacatgttaaaactaattgtttgtcaatgtgagttcgctaggtgtattttctctgtgtgtgctgtgtattagacggtgtgtgtgtgtgtatgtgtgtgtgtggttggtgggtgggtggagcttaacgccctcgcgcccagcgtagtaacgcatccgctaacacatccagatgggccttcgtctgcaaagataggaagaccagaaaaatggcatttaaacaatgacatcaagtatacgccgtgttgtgcgccgaactcaccgtcttgtagaacatgcaggatcttcggtcctcgtcctcgccatcgggacagtcgatgaagccatcgcacagcacatgatcgtctatgcagcggtatctgccctgccggtcgggaatcggacaggcgaatcgctccatgccatccatggcggtaggacactctgcaagaggaacgcaaacaaaaacgggtgacagtcagtcaaaatggttttctcttggccagcgggagaagtggatggttgcggaggtagaagcagttaagaaccaggtaagaagcgccgaacttttcccataaatcgttcagtgaaaaacttctgcacacgctaatgtctgccatgatttgcgtctaaacgttgcaactgccagccggcgcatagaagtatgctatggatatttcaccacccctcgccacctcatactgcattcgtttgcttgtgtttgtgtgtgtgtgtggcggccgcttagcaggtttttgttgttataaatagtttcacgttcgctactttactactttctgcggctaaaaggagggaaaacggggcaaatggctggggaaaatccaggcttggctggcttcgcctgcaccgacgccgccgccaccgacgtctaacagaaaacaaaaaaaaaaaaaaaaacaaactgaaatacaaactttactttttgtggcatttcactttgtgcttgcctttcctccatatcttttttcctttgcactgccttccaccaacaaatacataaaaataaatcacttgtaggacatgttggcgcctccggtttagttttccctgccacatgtgcgctggtatgcgtatgtgtgtgtgtgtgccggttgcatgtgtattggaatccgctgtccgtataggttttcccaccacccacttttccaactccagctccccgctcattcccaattgccatttccgccgttcaacttgctcttgcaaaactttcctctgctatttttggctgcatccaaaataattctgctctacgccgttctggttttttgccacgcgaccagctttgccacttaataattctgtattttatttgtcttattgcggaaatgaaaatcacttggcaagccccgggctatttaatcaaaaggtgtttcgagctttgcgcaactgcatcataactttcgccactagttatgtttttatgtagcccaataaagttttcttttgaagaacatactttatatttttcaatagtttttccatgattttgtattatttattttatgttcgtaatcgagattatatgtagtttggaatgtaagaaacttttactctgaatcgctttatatttccaacgtgttgtattcaagtgctgccgttttttgcattacttcactgagctattaccaactgctgtgaactgacattaaattaaattttatttcttttgctcacgcgccagtc

SEQ ID NO: 30380 - DNA, 246 bp, DROSOPHILA
atgcagtatgaggtggcgaggggtgagtgtcctaccgccatggatggcatggagcgattcgcctgtccgattcccgaccggcagggcagataccgctgcatagacgatcatgtgctgtgcgatggcttcatcgactgtcccgatggcgaggacgaggaccgaagatcctgcatgttctacaagacgacgaaggcccatctggatgtgttagcggatgcgttactacgctgggcgcgagggcgttaa

SEQ ID NO: 30381 - protein, 81 aa, DROSOPHILA
MQYEVARGECPTAMDGMERFACPIPDRQGRYRCIDDHVLCDGFIDCPDGEDEDRRSCMFYKTTKAHLDVLADALLRWARGR

SEQ ID NO: 30382 - DNA, 3730 bp, DROSOPHILA
taaccaaaacggatcttcgagcaaaaagtttttggagacagcgaagtgcgtgacacttatcaggttttatggccattctgttcgttaattaaagaaccaacgccaacgcttgcccaaatagaaagcccaagtcggcggcttcaatggatcgaaatccatgtttgtgaatgctcgatgggaaactcgctcgttggctattaaagcgcacagactgcagttctgggtaatttgaaaaacatttaaattggggcacgaaagggattgggttgtcgtggaaaatgcagggcatgtagtgcccttaattcgatcacgcttagaaatgtcacatatttttggattgggaatgggaagctatgttccacaagaccaagacagactcactttcattgccactggccgcgggaatatgtgacactcatttattggtaaatcgcatttggcccgcaattaatgccaatcacgtggctgaccgccaatccacctgacagtatgtgccactactggattttgtcacaaaacgctgacggcagtgcgatgcataagcaaatcacactgactttgaaggaaaaccccaaatggccaattgaaatgccaggccagttggcctgacccgaacacaacaaaccaaaaaaaaagcaatatcaacaacaacaacaatataaatgcaaaaatgcgagtagtgttcgacaaagtgtttaacaccaaacaattgtcaaggcatcgccgtcgttcaattagaggcggtgacattggtgattcgatggatcgacccaaggagcgagctatctaacaaaaaaaatccaagcccaaaaacacccattgttgccatccgtgcgcagagttcattggcttgcagattgattggactgattgcctaataatcttttcagtgcgtgtcccattcgacggggatttaatttcgactgctagccagatccaatcaaagtcattcgcacccgcaggttaattgtctcataattatttataataatttcggaaaatgttctaccgttgcagaggaaacgaatcaagcgatcagaccgacaagatgatttctcgccgcaagatcatatcgcgctccctagacaatttggatgccatcgggcaggaagagcaggaggaagacgtctggcacgatcgcgaaaagctcttcagggtgcgtttcctgtccattataactcatttgatctctagctcatccattatccatacctattgacaccacgcaggatcacatcaacgaggttctgtccaagtgggagcaaatcgacgacgagatctgggccaagataattgtcttcgagaaaaatcggcgagtggccaaggcctacgcccgctcctctgtgataaccataaatggatctaagaatggattcgatggagtgcggtgagtttgaacttaatatttgactattaagaacaacttatttaatatggctaaatccacagtattgggctgaatggcttcgataatccgatgcgcgatgcggagacgaaggtgatcaaaaagtccatcggcgatggattcaagatcaaaatggacgacaccggcaacatattcatcaagcggtatggcaagagcagcatctacgtgaacagcacatcgcagggcaacgaggagacggtgatcggtggcgacataatccaaatgccgcagatgtccctcaccgcggccacctccgctcgactctttgatatgaagaagttccagacgaacataaaccgcgagtttgcccgcacttatccggagcgcggaagactggaacggcagtgcctgtccgccgtatcgcttgtcaagtcgaacaacaatcttatcaactctccggtctggatactcgtggtcaacgtggtggccatggacatgctgaggagccgcctccaaacgattcccaagtcactggatgcgatgggcatgcgagtgccgctgacgaacagcagcgaggatccatactccaccatcgaaagccaagtgggattgatctatcctacgcccgccgcgtcggatgattcccagaactcccagcactcgagcaactccagcaagggacggcgcagcatctttagtgccgccttcctcaacgagggtccatatgtgcccaaggtgggttctaacctagattacattctacctgaaaaatttgggacttcaaaccttttaacctgtttgggaaaaaaaacttagcctaataattcttatttgctttttacactttgcagcccgactacgaatctggcggatctttgacgcccatatatgcggacaagaagcgacagaagagcagcgggtcgcagcagcggaagaagcaggatgatccgtactactgcggactcttggcgcgtattcccaacttcatcaagtcctcgaagcagccgtgccctggaggagccagcaagcccaagaaggagccaaagatctcgcggaagatctcggcacagcaccagcaacagcagttcctgcagccggcgcaacccattcccattgccacattccaccactcgtacttcccctacaaactgtatccaccgcagcaccgtctctcccagtcgcaaatgtccctctgggatgcacgtagtctgatcagcgcacatggtaagtgaccacttaatttgttaagtgtatctcagttaatcagaacatttcgccatttcagaatgatcactttggctggccctaatttattcatcgtctagcgttaattctaaaattatttagtcaaagcctacgattaagtttggtcagtgaaggatcatcgattcactggatcactgtggagtgcatttcgctcagttttgtgataaatgcagcgaaatgcagccatttagcgtacgtcacttaatacgcactaactctaattaaccgcagttaactttaagtcaagcagagagatttaatgattatgcaatttgtaatgagtaattaaaattttgccatagtttcttaaatcgtttaagactgagagaatgtcctagagcccacgataagcgcacggagagtttggctgagattcaggatgggggcagataatgtcatatgcaaattaattgctactttaggcaagttcaatttattattttcttattatttttctgtacatacacttcatatgtaaataagatcaaattaaaaacatgtaatcgatattagtacgcattaaaaaagagttatgaaagtcaatataagtgttttactttaaacgggttacaatctacgctgctgaaactgaataataaaggtattttgtataattgtgtgtagtttgattttcatttacgagaacatttaaacatatctatatctatatatattttccgacatttttgcatttactaattgtgtttaaatatcggaacttaaaatttattaaactgctttgcctctttctaagataaacattggtggtgaaaagtaaacctgcgctatcacaagattttttgtctcctaaattaaatacataataaaatgccgccaaattcgtcatcgaactaaaatcttaatgtactaaacggagaccatataaaaacaatcgattttcggtgagaacgataaccgattgccagtgagtgatcttgtagcattgaggttacccggtcacactatcacattgtgttgcactttttgtgaggtttggattagaaaattattggcgcctcttttgcagagttttgcgaccgacttcattgcaataaggagcgccagagtgcggagaacatagcccgtgaccatggacaa

SEQ ID NO: 30383 - DNA, 1356 bp, DROSOPHILA
atgttctaccgttgcagaggaaacgaatcaagcgatcagaccgacaagatgatttctcgccgcaagatcatatcgcgctccctagacaatttggatgccatcgggcaggaagagcaggaggaagacgtctggcacgatcgcgaaaagctcttcagggatcacatcaacgaggttctgtccaagtgggagcaaatcgacgacgagatctgggccaagataattgtcttcgagaaaaatcggcgagtggccaaggcctacgcccgctcctctgtgataaccataaatggatctaagaatggattcgatggagtgcgtattgggctgaatggcttcgataatccgatgcgcgatgcggagacgaaggtgatcaaaaagtccatcggcgatggattcaagatcaaaatggacgacaccggcaacatattcatcaagcggtatggcaagagcagcatctacgtgaacagcacatcgcagggcaacgaggagacggtgatcggtggcgacataatccaaatgccgcagatgtccctcaccgcggccacctccgctcgactctttgatatgaagaagttccagacgaacataaaccgcgagtttgcccgcacttatccggagcgcggaagactggaacggcagtgcctgtccgccgtatcgcttgtcaagtcgaacaacaatcttatcaactctccggtctggatactcgtggtcaacgtggtggccatggacatgctgaggagccgcctccaaacgattcccaagtcactggatgcgatgggcatgcgagtgccgctgacgaacagcagcgaggatccatactccaccatcgaaagccaagtgggattgatctatcctacgcccgccgcgtcggatgattcccagaactcccagcactcgagcaactccagcaagggacggcgcagcatctttagtgccgccttcctcaacgagggtccatatgtgcccaagcccgactacgaatctggcggatctttgacgcccatatatgcggacaagaagcgacagaagagcagcgggtcgcagcagcggaagaagcaggatgatccgtactactgcggactcttggcgcgtattcccaacttcatcaagtcctcgaagcagccgtgccctggaggagccagcaagcccaagaaggagccaaagatctcgcggaagatctcggcacagcaccagcaacagcagttcctgcagccggcgcaacccattcccattgccacattccaccactcgtacttcccctacaaactgtatccaccgcagcaccgtctctcccagtcgcaaatgtccctctgggatgcacgtagtctgatcagcgcacatgtcaaagcctacgattaa

SEQ ID NO: 30384 - protein, 451 aa, DROSOPHILA
MFYRCRGNESSDQTDKMISRRKIISRSLDNLDAIGQEEQEEDVWHDREKLFRDHINEVLSKWEQIDDEIWAKIIVFEKNRRVAKAYARSSVITINGSKNGFDGVRIGLNGFDNPMRDAETKVIKKSIGDGFKIKMDDTGNIFIKRYGKSSIYVNSTSQGNEETVIGGDIIQMPQMSLTAATSARLFDMKKFQTNINREFARTYPERGRLERQCLSAVSLVKSNNNLINSPVWILVVNVVAMDMLRSRLQTIPKSLDAMGMRVPLTNSSEDPYSTIESQVGLIYPTPAASDDSQNSQHSSNSSKGRRSIFSAAFLNEGPYVPKPDYESGGSLTPIYADKKRQKSSGSQQRKKQDDPYYCGLLARIPNFIKSSKQPCPGGASKPKKEPKISRKISAQHQQQQFLQPAQPIPIATFHHSYFPYKLYPPQHRLSQSQMSLWDARSLISAHVKAYD

SEQ ID NO: 30385 - DNA, 4926 bp, DROSOPHILA
atcactagggcggcgccagcggcggtcagtccccaggtaagcagggtgcccagcagagcctgcgtgacgggtccatagcctggaatcatcttgcacagttagagctgcttttccgtgcccgtcaccggctggtatggaattgtactcccgagatttattcgcgtgtacacagacagggcgaacaagttttcttaattgttgcgcagcaattgtttacccgcccacagttggaaatgtgccacgttcttgggcactgattgctgggtaaacaaaacaactgagaaccaatttcaatggagttttagattctgtgtatgtttcaagggaatctctggaacacttgttgctgcttatcgtattgtttttgcggaatgctattgcgtttcgggcggcggggcaatttcggggggacgcgtaatactgacgggttgataaaaaggtctactagctctactagagcgcgtcggaaagtgatgaatgagccgctgactgagctgacagccccacaaaaagcaatttttatagggccgctggctgtgtgccacggcaatcgatagtagtgttatcgctggcgtctatcgatagacggcggccgctagggatggcactcgcaaggcgcatttattcaaaattcgttaccgaactctgctactaaatcattattgctcacctcggatttgacttgtaattttattaaatatcatttgatattcatttaacgcataagcgagcactatcgattgcgacttgatggaaccatcctcttgggcagcgagatggtctcattgtagataagaaagttttctatttaaacaacgggccagatatcacgtagttatgaacaaataaaacagtgttttctagtcaacatgactgaaaaaagtcggcagcatccgcagcatcaacaataacaccaaagggcatgagcttgctcaccgtagttgcagctacgcagcgttaactaattttaaaatcccttaattcgcagcgcgttaagttcatgcagccggactccgagttgaatcagcgaccccgcaaacgccaaggaacacccacatcctccaaggacaacgagccaggatcgactaacaaacgagcccagaccggaactccaacaaccaccacaccaaaggtaattgggctcagtattaaatattacaaatatttattatgaaattgagatatttgaactttgtaggcataatgagcatagttctatacaattaaattaaaataatcgtatactaatttaaatagatatgtgtatatgtgtctggtaaatatttcattaacatcaatttgtattgcatagataaattttaggccccttaaatgagcaattctcagtagtcattatcactacagtagaatgtttcttttgattcaagtattaaaatgttttctcttttcagaatgacatcagccgctttttcagagccattaaccacaataagccatcggatgatgaggcaatagagtcgccagccaccaaactactcaacaggtgtgttttctcaataatatgcctgtacaaaaatcttgtctgctaaataaataaaatctttaaccataggataagcagtggatgctacactcctttgccggccggtggcactccccagctgatgggaaccaatggtagtggagatgcggtggcccaaaaggtgcaggcccaaaagagtttgcaatttggagagcagacggacagcaataccccccaggcaaaaccatcgagcacttcacgcccacggcggagcacagtggatccaccgccggtaatgacgccaccagtgcgcaccactcgccgtcgtagctgcgtagctgaaatcagcagtcctgctgcaacggatacgagaatgacccgccgcagaagttcgctactcacttccacggttattcacgaggccgatccaactcaaaccgcagttgcggaacccagaatgactcgtcgcaggagctcattgctagggattgccaaacaagcagaagaaaccgcccaaaggcaaaccattcaacccataacggaggagctggctcccgttgaagagaacaggaattctataattatggccgagaccaatataatcaacaacaccaattgtcttgagcaatcaattgagataactgccgtggaggcagaagcttcttttaaagcggacagacgtggcacgctctatgcctcagaattgatggacataagttctcctcgtcggcgcagcgtggccaagtcgagcttagagttgaggcaggaaaacttagctccgagggccaggcagtcgctcagcaacgtgactactcagacgtcctttttagacgttgagcagcaagtgacgccgctgttcagctccacacgactgcccacaggccagactacaggaaatcgcaggcgaactatttttaacatggacatggacgtgatcaacgagagcatcgaaagaatgaaccagtcacatcgaatgtccctagccttggccaataaggcggagctgggcgagtcttgccaagtccatgaacaagagccaccgcaagcagagccagtcccatcacaagagcccaaaaggcggcgccttttcaatccaaacgacgaggtggtcatttcgccagcgatgagcaacagaaagagtcgtttgagcataaccggatccggatcatcgagctcggtgcagaagcgtcgacgctcgctagccactcccgcaaagtcttcatcatcagagttgtgtgccacgactcctctttccaaagccgtcacaaacaaggaggcagaaaagtccaagagcaatacagaaatatctgaggcttcgttggatgccgttccggaagtgaagaaatctacatcaaacgccggggaagagaatgagaaaccaaagggcaaatcacgtacacggattcgcacgctagtccacaccaacatgcaccaggagcagatcaacgtcatccgcaaggttggtaatacgacggagtgaccaatataccatccacatctccctctgattgtaaccgttgtatagccagttttgcaactccactaatggattagttagtagtaaaccgtactagtttgtaaattagcatattcacaactcgttaatggtcccatattaattattgattaagcataaacaacactcggtagattggtagcgcagtaactcatttgtaaagcctcccgcacagttgaataaacaatatccgtggcggttataaatcctaatcgaaaaaaccgccttcaatcccaggccctgcgcaagttacgcggcatgcggctggatccaaccgtgacccagcacaccacccacctggttagcctggagccgcgacgtaccctgaatctcctgcgcggattgatgcgcggagtctggatagttagctaccagtgggtgttggcctccattcgggctggcaagtggatcaatgaagagccctatgagctgaccaggttttcgcgtgcaatcgaggtaagctctatgctttctcaccagtagctacttactaactcatttccgtttctaatccttcagatttgtcgtacagaaaggcaggcctttggcgtccactaccagtgtgagttgtttcgctttatggagcccttctatgtgtcctccctctgccgaccggtgcagttcaacaatatgaaggagctgctcctgctgggcggtgccaccctgaccgagaaccgcttcaaggccaagtacatcatcggggacaagcggcgcgccgaggacgatcgcgtctatctcgatccttactgggtgctggacagcatcacgaatatgcaaattcagcgctttggcaaatatcttatgaagagcgccattatctcggccgatgggatccggtacgaggatcctagggatcgcgatgaggacaaaacacaaagaaggcaccttcacgacttcgtcgatccaccgtttgtgctggacaaatagagatcagtgggtgcatccacttcactttactaaatatttaagctaggacacacagagtaccattttcccacactgtttcacctttttgtgcaaattactccaatgtaaatatagttatatttaaatccatatatgtattttacgatcttagtttattttctagtacattttttaatttgtttttatacagattttacgaaggaaataatatatcccataactttaaacagaaattataaaaaaacacttgttccaacttcgttcgttattatttaaataaataaatcaatgcatttttctctatttgcgatgagaaataaaagcccccccccccccctcaaatacaataaaaaatattcattattcttcagatgcaattgcttgctttatttaaacgattgaggtatttgttgtcagattcaattgttgtactcttcgactagctcttgtttgtactttgtggcatcgacgataagtgaacttggagttagggacgatcgatcatggcgctgaaaatcgggaggcaacaagcaaagagagtgctcttttacgggctgggtggtaaaaacaaaagaaatacaaaaatagggtttttattttttttgtaaatatagttatcgcttctattctggttcttttcttgtgtacaaagtagtgtgtgcaaaagtagggtaagataaatgatacatatcaaagtataaaggttaatttaaacgatatcataaatgctacagaggattcctatatatgatatgataaaacgaagtcaactccgtgcatcataccatatttagtaaactaaagatcgacggggaagtggatgaggagtggatgcataaatgcaagtgttttcccagtgtgcactcttatccttgggatccaccgtttcccaatttaggcggcctcgtctgcatttagcattcgtatccgtcgaaactcctttcgatggaagaaattaaacttatgcttctgctgaaacatcatcttatcggtcatcttg

SEQ ID NO: 30386 - DNA, 2220 bp, DROSOPHILA
atgcagccggactccgagttgaatcagcgaccccgcaaacgccaaggaacacccacatcctccaaggacaacgagccaggatcgactaacaaacgagcccagaccggaactccaacaaccaccacaccaaagaatgacatcagccgctttttcagagccattaaccacaataagccatcggatgatgaggcaatagagtcgccagccaccaaactactcaacaggataagcagtggatgctacactcctttgccggccggtggcactccccagctgatgggaaccaatggtagtggagatgcggtggcccaaaaggtgcaggcccaaaagagtttgcaatttggagagcagacggacagcaataccccccaggcaaaaccatcgagcacttcacgcccacggcggagcacagtggatccaccgccggtaatgacgccaccagtgcgcaccactcgccgtcgtagctgcgtagctgaaatcagcagtcctgctgcaacggatacgagaatgacccgccgcagaagttcgctactcacttccacggttattcacgaggccgatccaactcaaaccgcagttgcggaacccagaatgactcgtcgcaggagctcattgctagggattgccaaacaagcagaagaaaccgcccaaaggcaaaccattcaacccataacggaggagctggctcccgttgaagagaacaggaattctataattatggccgagaccaatataatcaacaacaccaattgtcttgagcaatcaattgagataactgccgtggaggcagaagcttcttttaaagcggacagacgtggcacgctctatgcctcagaattgatggacataagttctcctcgtcggcgcagcgtggccaagtcgagcttagagttgaggcaggaaaacttagctccgagggccaggcagtcgctcagcaacgtgactactcagacgtcctttttagacgttgagcagcaagtgacgccgctgttcagctccacacgactgcccacaggccagactacaggaaatcgcaggcgaactatttttaacatggacatggacgtgatcaacgagagcatcgaaagaatgaaccagtcacatcgaatgtccctagccttggccaataaggcggagctgggcgagtcttgccaagtccatgaacaagagccaccgcaagcagagccagtcccatcacaagagcccaaaaggcggcgccttttcaatccaaacgacgaggtggtcatttcgccagcgatgagcaacagaaagagtcgtttgagcataaccggatccggatcatcgagctcggtgcagaagcgtcgacgctcgctagccactcccgcaaagtcttcatcatcagagttgtgtgccacgactcctctttccaaagccgtcacaaacaaggaggcagaaaagtccaagagcaatacagaaatatctgaggcttcgttggatgccgttccggaagtgaagaaatctacatcaaacgccggggaagagaatgagaaaccaaagggcaaatcacgtacacggattcgcacgctagtccacaccaacatgcaccaggagcagatcaacgtcatccgcaaggccctgcgcaagttacgcggcatgcggctggatccaaccgtgacccagcacaccacccacctggttagcctggagccgcgacgtaccctgaatctcctgcgcggattgatgcgcggagtctggatagttagctaccagtgggtgttggcctccattcgggctggcaagtggatcaatgaagagccctatgagctgaccaggttttcgcgtgcaatcgagatttgtcgtacagaaaggcaggcctttggcgtccactaccagtgtgagttgtttcgctttatggagcccttctatgtgtcctccctctgccgaccggtgcagttcaacaatatgaaggagctgctcctgctgggcggtgccaccctgaccgagaaccgcttcaaggccaagtacatcatcggggacaagcggcgcgccgaggacgatcgcgtctatctcgatccttactgggtgctggacagcatcacgaatatgcaaattcagcgctttggcaaatatcttatgaagagcgccattatctcggccgatgggatccggtacgaggatcctagggatcgcgatgaggacaaaacacaaagaaggcaccttcacgacttcgtcgatccaccgtttgtgctggacaaatag

SEQ ID NO: 30387 - protein, 739 aa, DROSOPHILA
MQPDSELNQRPRKRQGTPTSSKDNEPGSTNKRAQTGTPTTTTPKNDISRFFRAINHNKPSDDEAIESPATKLLNRISSGCYTPLPAGGTPQLMGTNGSGDAVAQKVQAQKSLQFGEQTDSNTPQAKPSSTSRPRRSTVDPPPVMTPPVRTTRRRSCVAEISSPAATDTRMTRRRSSLLTSTVIHEADPTQTAVAEPRMTRRRSSLLGIAKQAEETAQRQTIQPITEELAPVEENRNSIIMAETNIINNTNCLEQSIEITAVEAEASFKADRRGTLYASELMDISSPRRRSVAKSSLELRQENLAPRARQSLSNVTTQTSFLDVEQQVTPLFSSTRLPTGQTTGNRRRTIFNMDMDVINESIERMNQSHRMSLALANKAELGESCQVHEQEPPQAEPVPSQEPKRRRLFNPNDEVVISPAMSNRKSRLSITGSGSSSSVQKRRRSLATPAKSSSSELCATTPLSKAVTNKEAEKSKSNTEISEASLDAVPEVKKSTSNAGEENEKPKGKSRTRIRTLVHTNMHQEQINVIRKALRKLRGMRLDPTVTQHTTHLVSLEPRRTLNLLRGLMRGVWIVSYQWVLASIRAGKWINEEPYELTRFSRAIEICRTERQAFGVHYQCELFRFMEPFYVSSLCRPVQFNNMKELLLLGGATLTENRFKAKYIIGDKRRAEDDRVYLDPYWVLDSITNMQIQRFGKYLMKSAIISADGIRYEDPRDRDEDKTQRRHLHDFVDPPFVLDK

SEQ ID NO: 30388 - DNA, 19303 bp, DROSOPHILA
cactatattggcatttagctgtgcctgctggttgtttcttaccataacgtacatgtacgacgaagattctatatactggagcatgttgtccagaaaaatgttgggcttcttttccagcttcggcggtgaatctttgtaccgaagagaaatgggaaatttgatgcttggcggcaccacgacgtagggcactttttgagaatttggttcgaattgcccgattggcgaccaggcgaaccagccattcgaaacgggcttggtaatagttggaaataccaaattgtccttctcggcccaggagtgagcccggatgtttaatattgtgtaattagaattcatcttaaaaacgactttggtaagattttgtggtgaagacggaagactttgactcgcgctcggaaaacggttgccttggacatatggcaacgccaaacgagtttcaattttttgaatgaactatcaaaaggatttaagatgattagatggtacaataaatcaaggttcgactatttttaaagaaataaaattggttcctaactataaatacaatatatatattaatccaaaataaataaaaataaatatacatatgtataagataataatagataaaaataaataaaaagttggacttgatatttgtaaaattattgataataatattctattaactccgtatacttctgttctatcgagtgaacactgtcggtcaaatgtaaacaccaggcacaacaacaaacaccaagcaaaacacgcatttagcgctgccagactaccgtggcgtgccggcaaaaaggtaaacaaacagcgagccctgccactacgttccgatcatatggtggacaacgaacagggtggtaccactggttgtgtttgttgcacgtgttttaaattcgcgtgtgttttgccattcattccgggataaagtactgcaatttaagctgaaaaaggttgaatattataaaaatatcacttaaaaatcagttgagtggatcctgttgagatggaggtgaacgtcagcaagctgcggcttggcgcccagcggttgctggagcttactgcgaacgaatctgaagacaacgtgttttcgcaaagtttacagaagtttatcaagaagcaggtgagttagctttgttggattgcagagtaaaaggcttaatcttgttcatgctttagaaatacgtgcctcaggatgtggagcgactattccggtcgctcagtgagcaactgcctctgcccgcttacacggtgccgattgccgcgagttttgaggagcagcttctactgttgctctccatggcgctccgatgggactccgctagccaaaggtttcatacgtatcagctagagtgcgtggcgctgtccaagctcatgaatttctcgctcgatgcgcaaaggttggttttttatgagtaaacatattttaccataaacatttaaacacttatttttcagatttgccaaaagctactttcacgacaagccagctccttttgagaaacaacagagtaatggcagtctgcctagtaaaaagtctaaaaatggcaatcacgccgctgataatctagacgatttggagctcatcaaatgctgctttcaattgctgaaaagtgatacgccctattttcgcgagctgtgggactggtccagctttatagcaacctatacacacaattcatccagcccaaagacacagctttattgcaactacatcgtggctatgctgaccaacatgagtgctcctcagctaaattctttgaacgagaaaatatcgactaaaacacgtctggagttcgatcaggaaagggagcaggcatggaacacagccaggaacacactctgcagctatacaccagatgcttccgaccaactactgaacctgcatttgcatggaatcaataaatccgtgacaaacatcgagggtgttttactgcccacatttaatgaggagaatctagagttctatgccagcaccgatggatgctacgatcgcattgtaaaggtggattcaacagtggttaatctgcggagcattgccctaggagtagcagctgcgaagcccatatgtctttctggacccgtgggttgtggcaaaaccacgcttattgagtacctggcccgtaaaactggacgcatttgtcccaagccaaatgagattgaaagtagggagaaggctttaaagaaagccgaggaggaggaacaattattgacaccgaaaaagaaggcaaagacaacaggaagcaagcgcaagctggaggaggtgcctctggaagaattactagacctgggcgagactaccaaaaagagtggattcttacgtattcagcttggagatcagaccgatagcaagatgctactaggccaatatcgctgcactgatgtgcctggagagtttgtttggttgccaggtgttttgacacaggttggttaatgaatccgtttttataagtattttttttttttattttttttaccacatatttataattgtaggccgtgatgcacggttattggttgttgctggaggacttggatgctgcaacgcaagacacctacaccattcttagtagccttttagagcgtcaatgccttagtgttcccggatttcgtgattccgtgaaaatagagcccgggtttcagttgtttgtcacagtgcggtaagaaaattaaaaacgtttatatgaatgtgtttaatgactacttgtatctcttagtacaaacaaatcagccagcaattcaagccaaaaatcgctttattcacttttggacaaatatctatacaccatcaatatacttcctctgtcccggaatgagctttgcaaaatggtcagtatcaactatcccaaactgtcgacagtggccaataggattgtggatgtattcctcaccttctccagtggaaatcacacatccgcggataacttgaggcagcaggaatcgggcgacaaggcagacaacacagaacaatatgtggcccttcccttcgagcaagtgcctcttacctcgagccccaattctggcagattggtgtcgacccgtgatttggtaaagctgtgccaccgctccaacccacagttttcagtgactagctcggaatgtgcctatttcgtctttcaaaacgcagtagacgtattttgttcatatctaccgcagagcaaagaaaaggttaccttaatcacaagcataggagccaaactgggaatcatccgttctcgttgtgaacattttgcaaacgaatacaagccagatgtggaatttggactggagcatataaaaattggaagagcgagccttttggccaaatcggatttaaataatagtgagaatgaagatatttcggagcaggacctaaagcgtcaaaaattatcacaacaaacaagaagagcaattggtaaagttagcaacaagagaaccaccttttcgttcactcggctcgccagctgcatcttggaacgaattgctgtgtgcgtcacccattctgagccagttcttttggtgggcgaaaccggagtgggcaagacatcttcagtgcaataccttgccgagcggacggaacataaattggtggtggtcaatatgaacaaccaatcagatgtgtcggatttggtaggcggttttaagcccgtggaactcaactacgtactggcaccactgcgaaatgaatttgagtatcttctgtgcgaaaccttcaatcaagagaagaacttgcagtttctacgcttgttcgccacacactacaacagtggtcgtcatgctgtgatcattcgtaccatgatcaatatttgcctacaggtggccaagaatccggaactgaaggcgaataagttgcttccccgctggcagacactgagagaaaagttacagaagcttcaaatgcaactggataagagcatcaacatctcctttgcatttatacccggctctctggtcaactgcatcagcaacggagactgggttttgttggatgaaattaatttggcctcagcggagacgcttgaatgtctctcaaccatcctagagccggagggttcagtggttctcttagaacgtggtgatttcactcctgtaaaacggcatccagatttccgcatctttgcctgtatgaatcccaatacggacattggcaagaaggatttgcctgtgggaatacgtaatcgtttcacggaattctttgtggatgaacttacaacggatgcagatttgagtttgttggtgagcgattatttggcaaacacaggcatccagaggaagtccgtacacaacatagttcagctatacaagtctctgcggaaactttccgagctgcagctaaacgatggtcttgggaatcgaccggtgtattccctgcgcacactgtgtcgtagtttgcgtatctgcgccagaaacctgtgcggctctatcgagcgaaacttgtacgagagtttctgtttgagttttctcacccaattggatccgaactcgcaccacgtggtgcttctccttatccagaatgcgctcctttcgaatgttaaagctatattgagtaagcagttgccacagttgggagagaattatctggacttcgagggatactggatccagccggggaatctggagccccagccgtgtacccattatattcttacggagagtgtaaagaagaatctgaaggatctggctcggatcatctcgattggaaaactaccaattctgcttcagggacccaccagtgcgggtaaaaccagtttgattgactacgtggcaagaagaagcggaaatcgctgtctgcgcattaacaaccacgagcacacggatcttcaagagtatattggaacctacgcagcggatttggatggaaagctgacatttagggagggagtactagtgcaagccatgcgccatggcttctggattatactggatgaactcaatcttgcgtctacagatattttggaggccctaaatcgagtgttggatgacaacagggagctgtatattgcagagacgcagactttggtgaaagctcatcccaactttatgttgtttgccacacagaatcctccaggtctttatggaggaaggaaaacgctgtctcgtgccttcaaaaatcgttttatagagcttcatttcgctgacataccacgcgaagagttggaaaccattctcgaaaagcgatgctttattccaccgacatatgcccgcaagatggtgcaatgcatgacccaattgcagcaacatcgcaaaaatacctccaagcaggttttcaccctgcgcgatcttttccggtggggcaatcgatacacgcacgcggataagtctctgcatgatgacaacaggtacgactggaaccagcatctcgttgaggaaggctacctggtactatcctcaaaagtccgttcacaggaggaacacgagctgattgagaagactcttttcgccaacttccgcaaaaaacttgatctccagacgctgtttgacattcaaaccgatagggaaagctcctctatggtaagtagaaaaattcttgacgccataagaaactttaaactgcgcgacgacatcgtttggactcggaatatgacacgcatggccgtggtcactgccaaggccttggagttcgacgagcctgttttattggttggcccaacggggtgtggaaagactaccgtgtgccaacttcttgctagcatcgctgatgtccagctgcgcattctcaactgccacatgcatacagaaggagcagattttctgggaggattgcgtccttgtcgaggaaaggaatcaacacaactctttgagtgggcagatggcccattgatttacgctatgcaagaggggtcgtattttatggccgatgagatatcacttgctgaggattctgtgttggagcgactgaactgcatactagaaccagaacgtactgtattgctcgctgagaagggtggcatctccgagttggatgcaagtcccgactttgtagtgcaggccaagtccggctttcagttccttgccaccatgaatcccggcggggacttcggtaaaaaggagttgtcacctgccttaagaaatcgattcactgaggtctggtgcttgccctccgacaacaaggaggatctcattgagattgcctacaactgcatgcgacggcaaaaagagcacgaaaaccaggccatcaacacccataaagtggctgagtacctggtggatgtcgtgctccatatccgcgataccaacgacaagttcaagttttcagtacgtgacatcttggcctgggctaattacatggttagcaatgcaaagcttagttttgcagagcaggcaatattcggcttggaaacaattttccttgatgccttggaaatgcttccccatgaatcccaggaacaggtggagctgcttaaatccaatatagtcaaacaggccatcaaacaagcgagtcttattctgcaagaaaagtttacgctggaggaactgagcgagaagcgaggaaccgaagtcgagctaaatgaatgtcggtttggcattcgaccatttttcatagacgttaatcaggagcgcttgacgtcggccaaagaggatttcctattcgatgcacccactaccaagcagaacttattccgtctgttatccgcgctttcccttcaaaagccagtgctcttggagggaccacctggtgtgggcaaaacatccattgtggagagcataggatctgccattgggtaccaaattgtgcgcattaatctttgcgagcacacagacttggctgatttgtttggaaccgacctacctgctgaggataacttgctagaatcaaatacagccgctacggagcgtcaaatacgcagctttgtgtggcgcgatggaccgcttttggctgctcttaaggcaaagaacacttggattttgcttgacgaactgaatttagctcctcagtctgtgctggagggtcttaatgcggtgctggatcatcgcggagaagtctacattccggagctaaacaagagtttccatttagctggctcgactcgcatttttgcgtgccagaatcctttaaagcaaggcggcggccgtaagggattaccccaatccttccttaatcgttttacaaaagtttatctgcgcaagctctccactgaggatctgctacatgtggtaactgagaagtacggcaagtactttgatcagttgaatgcatattttttggaactgttagatcagaaagctgaaggcaatctttttgagatatactcaggaaaggaaagttcatgcaaatcggattcatttgatttgggtgcccgtttggtgcgcttttccgaacaactcgatcggggtgtggcttccatggagtttggctataagggcgggccttacgagttcaatttgcgtgatattctccgctggtgtgatctgctccacaacccgcaaactgggtacattttgggagcttcaccgtcatcattccaagccgctttcaaggatttcctgctcaccctctacgaaaggatgcagctggtctattaccaaaggatgcgttgcgatcaagataaatcatacattcgaaatgtcttttcaaccgttttcctatgcgatgctgaatacctaaatcaggtttcaaacgatgtcgctctctattggacagcagataaagtatatcttaacgatgtggttttgagtcgcaagcaagcggatgttctggacttggtaaatcgacaggagcagtcaccattgctgctggacagtcagaggcagcagcttaagcaaatcatcgagactgttcacatggagaagcctctactcctgtgcggatcgacggacagtggcaagaccaagttgatagacgcgctctgcgtgctgtcaaatcgcctatgtaatacggatatcattgacgactccgtaactggtagcttccagcaggtaagtttttaccataagtgtgtaacatttccatggagcttagcctatttttcccatactagatcgacttaaatagacatctagaaataatttacaagaaagtggagacactagttttttcttgcgttcaacgagcatttgtcctccacacacagtcggagtttgtggaacagttgtggaacaattggagcatgtacaataagcttgccaaagtaactacaggtaaatgtaaactttaaaatattaaaaacaatcttctacagcatatgttttcagaggcacaacaacacagtgtgttagacgagctaaaactgtttagtgaacgtctgggatctctaggtaagatcatcgaggttttggaggccacgccacagaactgccaagtgagagcacttcagcagttggcagaaatcaagtcccagcttttgctgcttcaaacgtacataaaaacggccgattccctaaacacgggagggtcattcgaatgggtggactctcagattgttacctcattgaaatgcggccaatacatcttgctagagcatgttaatctctgctcctcggccgttctggatcgcctaaatcctgtattcgaaccaaatggtagcttactaatcgctgagaaaggaataagtgcacaggacagtgccgaggtggtttacaaatcaaccaatttccgtgctttcctaaccgtggatccaaagaatggcgaactatcgcgagccatgcgaaaccgatgtgtggagctatctttatctagggacacctattctgtagatgatttgcgagcctttgttcatgagcagggtgtgcgtgaaatggaggccatagattgtatactgagagtgcataagggattaagtcagctgactgagttcaataactactccatatcgcacctgacacagtttgcctttttaagcgctgcctataggagaattggctatgagcttaaacgtgctatttatgtggccgccatggaggtttatgtatactcagccaacacggacctaatgggatatggattgtcttattaccagaataaactgcgtgaggtggtgctggcccaaacggaagtatttgaggaagttgctgttatccaggaggatttccttagcgatgtaatacttaattctggaaacctcaattcgttgacattaattaaacgccaggctgtcgcgttaaaagtgttgctggatggatatacagaaggaaaaattccccaaaagctgttggcttctctcttccatgaaatggagaaacttaaattggatcagcgaaatccccagaagctcattcgtcatttcctttatatgctctacgagtcgtcggccattggagacttggaattaagacatctctaccttcaaccttggctatcgaaagacactgctttccaagaactttcgcagaatctttacaattgcttgcagaaaaggagtaacaccgatacaggaactttggccaatctaccttggaatcgaaaactcattccgagacttcgtgattactcaacagctgaatcgaattctgaactaaatcctttaaatctgagtgcattgcttttggcgcgccttgtggtcgatatcatacccgttagctcagttactacagtgcagcaaatgaatgcactgcagtattcgcaggccctctgtaagaaacaagtgactgaaaaatacgccaatcatttactagctaatttttcgagcttcctcgaagttcttcatactagtttgctggaggatttagagacggctgatttggatcttcctcagtatgcacacttagttacacgattccattggttcaatcgaattttggccactgcacagcagaagcttctgtacaacaatgagctacatgtgccgctgatgcataaattggttctccatttccagtggcttgaaaagcacctccttgttcctttaattgaattgacagcaaaaagcggctgtgcacggatgcttaccattcaagaccgtactctaaaaatcaaaaaatacatcgaggagacgagacgacctctaaacgtaacttgcaagatttattccaagcaattcacccagtttcagccgtattaccaggatcaacaggtaagtttaattttacagacaatttacatatttttcctatgatttaatatttctcttaaacatagattcaacgccatatagaattagatgacttggaaaaattattgtcagtggtgcccagctatggcaacttggagttatcctcctggctcaaaagatggcttcttcttcaaacagatgacgcgaacaagtggcgatcttttctgcgtaagcacaccaatggttttcaacccaaggcttttgaaataagtggttctctgcggaatgagacattacagtcgcacctgcaaaaactgcaaacaacgttgaaggaagctcaagaaaacagtgcagagattgaaatggacttggaattagacttaaacagcatcaagaccctcttggaagcggaaactgaagaaagtgaatcttatattcatccagatggcataccaactaatacgccaaaactattaattgctgcattgagagaactattcatggaacgcctcttgactggaactcttcgtgacgacttcgatgagcaagtgaaccccctgtatgcagatcagttgcttaccttaaacagcaatctttggcattgcctgaagacgcttgagagtgctaaccgtaccgaaatcactaatgcttggattgaactcaagaacgaagtaaatgagctgcagaattacgacgagttcgcagtgctgctggaaaagattggcggtggctacaaaggactgcgttcttatcaaaggcagtatcgaaattccgttcaatgctaccaattggaaaatctgtccacccgtctggattgtgttcaaggtccttcagaagaaggtagcacggatatatcaagccaattctgttatcgaggccctgctttatcaggcgtcattttatcgctgatatgtcaacccaacggccagctgcgatcggttcccctaagcgagttgctagaatggcgatccgctttgcagcaaacacgacacctgatctgggagaattctcagctattaacttccagatatagtggagaagtcaataatctcttgcaggccaaggaaaatgcaaggcaactactaaaagagctggaatatgtgaggaaactaagtgagaaggaacagaaagctaaccaaggctttgaaaactgtgctaaagaactcgagaaaatgattgaaaaattggagaaagaagaaaacaataatgcctctatgacaaaagattttgaagtttcgctaactaatgccctggtgggagccattgagttgtgtttgctcacgaacaccccgttgatcgatcccgtggaaaagaatcgccttaaaaacgaatatatagcggaggatatcgattgccttagcactttgacaaccgcctatgatttcatgaaaattgcgatgaaatatcgtcactttggagaggaaatttacagtgaactggagcttagattaaggacggctctccagcggcaacaacagctttcgcaaaagttggctttgcgttcggaaaagtgcctatatgcgtctctggtccaggatattactcacttcctgcactcgaatggcgattgtgagtcgctttataagctgtttcagcttattcactcggagtgggaaaactttcaaggacttcatgtcgccacaagtgcccagctgaagagcagcattgaggtgctgggaaaactggacctgtggctagcgaatgctcagagattcgttcatcacaccctttccaggtactctgcatactaccaagactttgtggagcccattaagtgctctgtgaaccaattgcgttttggattggagtcccttaaagtgatcttcaccagagtgcaacaggctggcagcgtttcgcaggcagagcagatgcagcaaacaatcggtgatattgttcaattcccatcccagcatccgctggttattaggaatagcaggctttacggcttattggccgaacttcctcatagtgaatatgagtacttccgtttgctgaaagccaagttgagcgagctgagcaattacatcgcgctgggaagagtaatagacgaaactacctttgcggcctacgatgatgcgttaagtatctgcaaccagacctggcagcaggaggaacaccgtcgctgtcaactgaaagcggaagcagaaagtttgtatgtgacgaagaccaagggaggagtggatagtgaagagctaattgagatgcaagaaatcgagcacaacttccctacgaacctggacgaggactttgccgagttcgtgtctcaaccaactttggagcaggtcctaaaactagacaaaaaggccagtgcgaaggacaaacaatctcagattgtagttgaggaggattatgccttcctggcacgcaattttatagacgtgatgactcgccatactcaggtttactataaagagcaacccaagtcatcgaaggaattagagctccatttgctcgcgccttatcaagcacgcttccaggtgtttgcaaacctacatggtcactataagacagccctaggatcgagtctagaggaaagggcatgcaatggattggcttttggactggctctgcagcagaaacagctgagggatatcgaactggaggaaggagtatccagttcgccttacgacttttacaaagactcaaatattagtgaaattcaaagttgcctggatgtcatggagcggatagagaagcgtgtgctggaacaactggaacagtatcctgagcacgcaggtcttgcggacatcaagctggtcatctctcgcatccgtcgactgccggctcatgcgcctgtggttcgtttcaatacgggcttccagctgcttagacagaagttggcactctggaatgaagtggcccacaggaataacaatctggtgtcggaggaaatcgaggtggccgaatttgtccaacgctggacaagattggagctgcaacactggcgcaattgcctagggcaaacggccgctcaagttgagttacaggcctatcggtactggttcttcatctacaacctgctgcaacaattcatacaccagaagcaactagatcattcgtataccgacattaaacttgccgagcaacgctttgcacaggatcatttgttggatgctcaggatttgggagagtcccaacgtttggaacttgcccaggtggtgcgcattttaagacagtttgtggaggcctcctgctacggtgatttccatattcggctgcagcttcttcaaggatttgaattgtacttgcacaatgtcgagagagccggaaaaattaatggactgcctcccctaattgcagcattacataatcttcagctttatttctcccagtttgctggcgagatagcagactctgcgaaattacgtcgttcacccatcgaaaagaagctaaaggagtttgtgaaaatacagagctatagcaaggacttaagctactttagcatgcgcaacagtgtggctagtgtacaccgcaacctgaacaagttcctaaaggaataccgactctcgattcaggagaagattagtgaggtatttcaacccaaggattccactgccaaagactacacctttggtaccgacaagggcaagggcttgagaaattacaataaaataaagtatctgcacaccgagcgtcaacaattcgtggccagtgagaagctactggagaagtttgccatccaggaggagtttctgtcggataacacactgctccaacgcttggacaagcacttccgaactgcacgacatgttgtcaaggaaacgttgggacaggttccctacggcgagctgatcacggagctggatgacttgctggccagtcagttagagcgatgtgagcatttacgttccctgaacgttgatcgttcgaaggagagacctcaacagaagcaggaggccaagcagatccttcagcaaaaacgcaaggctctcacggacctcttcaagatgctacatcgactgggtgccaactataagactggccttctggagctctctttgcgcaacgagtttgaggacttccaacttccaccctattccattcgatccatgttgccgagactccaccccactgcccagcagctggatgagcacctggacttgtactatatgaagagtgtgttcaagttaaagctcctgcaaaacattatgctgactccgttgtcggaactcggacctcccaatatcgaacgcatcaagggctttgctgtggacttgttcctattggtgcaacagcagcgggaacacttgtctggatccaccaaagagcttcatgagctgagaaattcactggacagcttgcgtaagttggcagaaattattccacaggccgatataaatccgtcgactctcaacttcgtgaagagtgcagatatagctatggaaataaagcaacatcttcgccagattcactacgttctgaaacagtggaaactgctgttaagttgcgctccaagctcattcattgaagaatccgaaaaccgcttgctggtacggaaaatttccttagcccaaagtgaactccatagtctatgtatacagatcctaaacagcagtcaagaattgctaaatgagctgaacaacgcaaatctggagtatctatctagcgaaaagtgtgtgacttaccagaagagctatgcggaaattcaagagaatataaagaagaccttagaactactcaggacaggacaaaacgattatttgccattagcgcaaccaattgttgagcttttggatagcgtgcaattgaagaaccatactgaaatagctccagaggccatcgacttggccaacgcggacacagagttggccaacatagcccacagtgtacttatgtccatgcaaaagatttataagcatcacgttaagactgatgaagttaatcaaaatggagaggcaaaagaacaggatgaagagtccaaggaggcgctgcaggaacaacatctcaagaagtgcctcactggggaactgacctcggattggcaacagttaagcctgccacgtgtgctcggtaagctttccaacgtactcctggtactaaagcactcccatttcgaaggcaaggataagctactatgcgtaagacgagcgataggtcttctgcctgttttggagcagtaccaattactcgcggattatttgcttctccaacagctcgccacgcataaagtttccgccaagatgttatccatagtgctgaccgttttcgtggagatcggtagtaagggcttctgtgtgcctccggatctcatgcaagatgaggagggacagtcaaagcaggaatccaagaacggtgagggcttcggcctagaggatggaaccggtgagaacgacgcctctgataagattgaatcagaggatcaacttgatgatgcaaagcgcccagaagatcggaaagacgagggtgataaacaggagccagactgcaaggaagagaaaggcattgagatgagcgacgattttgatgccaagatgcaggatgtggagaaacccgaggaggatgacagcggtgagtccgaagaagaggaggatctaaacaaggagatgggcgaaacggaggaaggtgccgaaaagttggatgaccaaatttggggcgatgacgaggaagaaaagccggaggaggaacaagaacctgatatgaacgaggaggatcagggcaaaggcagcaaggatgaaaaagatgcgcacaacgatttggatacaaagaacgatgcggcgaaagaagatggcaaagatgagcacgaaaaggacggcttggatgcaaccaatgaacccagcggagaggacaaacgcaaggagcaggccaaggacattgacgatatgaaggatccggaaatggatgaggagcaaacaaatgcaatgcacaatgagctggaggagccaccggaaccagaggaaatggatttgggggatatgaataatgttgacgagggacacgatgaccaggatgagcagcccacagatgaaaatccctttgacattgatgccatgaaagaaaacatgcaacctgctgaggaacccgaggcagacggagatgacgagcatgatgcaaacgaggaaggcgatccccaaagcgacggcagcgactctgaagaggacgaggcgggtacagaagcaaaaccagctgaagaagatcacggcgagggcgaagaggcaacaccagaagatgaaaaagatgaggccgaaacacagaaacgcggtgagctagaggacgaagatgattcaaagcccgaagatagtcctgaggattccaaggaagagaaggaggagaagcgcgaggagaaaccggaggagcactcacagtccaaagacaaagccagcaaggaggaaaacgttcagtccatgccggagactgatcagagcagctcggccgatcaggtgcagcagccacaggacccggacattaagcaagaccagaagcttgatgaacaagagactggtgaagagaaggatggagtcggccaggccgagaacgacgttagttttagttttcattgtacattatatatttatatcatattaatttatccaatatcgcaggccgacgatggcggccatcaaggcgtagcggaaactcaggaaactgtgtcacaggaggatcgtaaaaacgaaaggcaaactcaggagaagcgcaagcagggaagaaccaatgaggagcgatccctaggtaaaatagacctttcaaatattaaagcctattctataaatttctcaataaacatttgcaggtgaggcggagcagaacaaattgaaacagctaaagacaattgatcaactgaaggactcaaaggaatccgacgatgccgagcaggagaaaccggaacccatggaccagacggaggctgaggagtaccagcatgtaaaagagccgaaaaacagcgacaaaaccacgttggacaatgctaccgaagaacaatcaaagaagatccagcatcaggaggatgagccaccaaacgaagaggaaatagaggcggaaaatgttgacgagttaatggaggccgaagagccagccgttgatccggaagatgatgctgaactcgagcaactgggggctgagaagacggagcaaaagtccgacaaaccctctaaaacagaaaagtctaaggagcagttggagacccctgaaggaatggagatagaaggggaggtggtgctgactatgacggttcctcgtagctcggagactactgcgcatagcaagtgagtaatatatccattgtttaccgcttttttattttaatagttttttttttattcaacagttccgaaatccttctggataagagctcacacgcggaggatctgagctcagccgaacaaattgagcttaggcaacagtaccaaaagcagttgaccacattcagagtagtaagttgcacctttcataataaattagccgtacctgttacttatttgttacttacaggcacagccggagcacgaggattacgaaacatggcagggcatctccaatagaatgacccagaatgcccgtgagctttgcgaacagttgcgtcttattctggagcccacgaagtgcacacggttaaagggcgactaccgcactggaagacgtattaatatgaaaaaaattattccatacatcgcctcgcagttccgcaaggacaagatctggttgcgacgaaccaagcctgcgcagcgtgactataagatcaccattgccattgatgactccaagtcgatgcaccacaacaactccaagacgctgactctggaggcaatctcgcttgtgtcgcaggcgctaacccttctagagagtggtcgtcttagcattgtatcttttggggaggcgccgcagatcatactaaatcacacggagcagtttgacggtccccgcttggtaaatgctctgaacttcgctcaggacaagacaaagatcgccgggctgctgaactttatacgcacggcaaatgcagaagagagtggcacggggggcgataatggtctgtttgaaaaccttttgctcattctcagcgatggacgtaatatattcagcgaaggtgcacagaacgtaaagaacgccattaagttggcgcgtctgcagcgcatcttcctggtatacatcattatcgataatccagacaataaggtaatgggttttcaagaacattcaatgagtttaactaatccttggctacctttagaactcaattctggacatacaacatgtggcggtgaacgcagatggatcagtgaacattaattcctacctggacagttttccttttccgtactatgtgatagtccgggaccttaaccagctgccgctggtgctcagcgaagccatgagacaatggttcgagttggttaacagcgagtaatcattgcatttactcttgagataaaaagaagtgacttttacttattaatattaatacaggcttgaatatttagcccacttagttatatttcacatgtaaatattaacttgtacaaactgaaaatgtgaccgagtgtacgattgttcactaatgcttttataatttacttgaaattgttactttttttattttttacaattaaacttttgtaaacagtataaagttagattatataaacattaaacgattctaaggtgcttatatcgttatcgcactgggccttgatcttcaatcattgttgtgaaaagctgtaaaaaaagtttcggatagcaaactacgagtatataacatgaaggtaagtattacacctgaagtatgttgggtaaatgataggtagaattaataaattgaacttagccaagtactactagtcaactataaggtaaacaataaattccagtttgaccaatatatctatatctatctatctatagatcatatagctgtatgcagttgaatcggtcgttttacattacacagaccagaaagtaacttggttttattttaaagaaataggtttataactcattaagcgtttttaacataatttccaaaataaaagggcttatcgaagttgtgcaactcctcagaacaaacttgtttcgaactgaaaaacagagaaaagctggtagtacaccatatagttacatcctgctgccacactgcttatcctagtaaaacttatcctgtcttagttgaccttcgtacgacctcagactcaacatgcttaaagatcgaccgaaagtccctggtaaggccatattggtccattgcctcgcacaaagttcgtatgaaaaacgaaccatgattttcattgcgatagctcaaatagggttcgttgttgctcaagattaggaggataaatccagcctcctgggtgaattgtttttcagacccttaaagaaattcgttactaagaataaaaccgtttgctcatatt

SEQ ID NO: 30389 - DNA, 15912 bp, DROSOPHILA
atggaggtgaacgtcagcaagctgcggcttggcgcccagcggttgctggagcttactgcgaacgaatctgaagacaacgtgttttcgcaaagtttacagaagtttatcaagaagcagaaatacgtgcctcaggatgtggagcgactattccggtcgctcagtgagcaactgcctctgcccgcttacacggtgccgattgccgcgagttttgaggagcagcttctactgttgctctccatggcgctccgatgggactccgctagccaaaggtttcatacgtatcagctagagtgcgtggcgctgtccaagctcatgaatttctcgctcgatgcgcaaagatttgccaaaagctactttcacgacaagccagctccttttgagaaacaacagagtaatggcagtctgcctagtaaaaagtctaaaaatggcaatcacgccgctgataatctagacgatttggagctcatcaaatgctgctttcaattgctgaaaagtgatacgccctattttcgcgagctgtgggactggtccagctttatagcaacctatacacacaattcatccagcccaaagacacagctttattgcaactacatcgtggctatgctgaccaacatgagtgctcctcagctaaattctttgaacgagaaaatatcgactaaaacacgtctggagttcgatcaggaaagggagcaggcatggaacacagccaggaacacactctgcagctatacaccagatgcttccgaccaactactgaacctgcatttgcatggaatcaataaatccgtgacaaacatcgagggtgttttactgcccacatttaatgaggagaatctagagttctatgccagcaccgatggatgctacgatcgcattgtaaaggtggattcaacagtggttaatctgcggagcattgccctaggagtagcagctgcgaagcccatatgtctttctggacccgtgggttgtggcaaaaccacgcttattgagtacctggcccgtaaaactggacgcatttgtcccaagccaaatgagattgaaagtagggagaaggctttaaagaaagccgaggaggaggaacaattattgacaccgaaaaagaaggcaaagacaacaggaagcaagcgcaagctggaggaggtgcctctggaagaattactagacctgggcgagactaccaaaaagagtggattcttacgtattcagcttggagatcagaccgatagcaagatgctactaggccaatatcgctgcactgatgtgcctggagagtttgtttggttgccaggtgttttgacacaggccgtgatgcacggttattggttgttgctggaggacttggatgctgcaacgcaagacacctacaccattcttagtagccttttagagcgtcaatgccttagtgttcccggatttcgtgattccgtgaaaatagagcccgggtttcagttgtttgtcacagtgcgtacaaacaaatcagccagcaattcaagccaaaaatcgctttattcacttttggacaaatatctatacaccatcaatatacttcctctgtcccggaatgagctttgcaaaatggtcagtatcaactatcccaaactgtcgacagtggccaataggattgtggatgtattcctcaccttctccagtggaaatcacacatccgcggataacttgaggcagcaggaatcgggcgacaaggcagacaacacagaacaatatgtggcccttcccttcgagcaagtgcctcttacctcgagccccaattctggcagattggtgtcgacccgtgatttgagcaaagaaaaggttaccttaatcacaagcataggagccaaactgggaatcatccgttctcgttgtgaacattttgcaaacgaatacaagccagatgtggaatttggactggagcatataaaaattggaagagcgagccttttggccaaatcggatttaaataatagtgagaatgaagatatttcggagcaggacctaaagcgtcaaaaattatcacaacaaacaagaagagcaattggtaaagttagcaacaagagaaccaccttttcgttcactcggctcgccagctgcatcttggaacgaattgctgtgtgcgtcacccattctgagccagttcttttggtgggcgaaaccggagtgggcaagacatcttcagtgcaataccttgccgagcggacggaacataaattggtggtggtcaatatgaacaaccaatcagatgtgtcggatttggtaggcggttttaagcccgtggaactcaactacgtactggcaccactgcgaaatgaatttgagtatcttctgtgcgaaaccttcaatcaagagaagaacttgcagtttctacgcttgttcgccacacactacaacagtggtcgtcatgctgtgatcattcgtaccatgatcaatatttgcctacaggtggccaagaatccggaactgaaggcgaataagttgcttccccgctggcagacactgagagaaaagttacagaagcttcaaatgcaactggataagagcatcaacatctcctttgcatttatacccggctctctggtcaactgcatcagcaacggagactgggttttgttggatgaaattaatttggcctcagcggagacgcttgaatgtctctcaaccatcctagagccggagggttcagtggttctcttagaacgtggtgatttcactcctgtaaaacggcatccagatttccgcatctttgcctgtatgaatcccaatacggacattggcaagaaggatttgcctgtgggaatacgtaatcgtttcacggaattctttgtggatgaacttacaacggatgcagatttgagtttgttggtgagcgattatttggcaaacacaggcatccagaggaagtccgtacacaacatagttcagctatacaagtctctgcggaaactttccgagctgcagctaaacgatggtcttgggaatcgaccggtgtattccctgcgcacactgtgtcgtagtttgcgtatctgcgccagaaacctgtgcggctctatcgagcgaaacttgtacgagagtttctgtttgagttttctcacccaattggatccgaactcgcaccacgtggtgcttctccttatccagaatgcgctcctttcgaatgttaaagctatattgagtaagcagttgccacagttgggagagaattatctggacttcgagggatactggatccagccggggaatctggagccccagccgtgtacccattatattcttacggagagtgtaaagaagaatctgaaggatctggctcggatcatctcgattggaaaactaccaattctgcttcagggacccaccagtgcgggtaaaaccagtttgattgactacgtggcaagaagaagcggaaatcgctgtctgcgcattaacaaccacgagcacacggatcttcaagagtatattggaacctacgcagcggatttggatggaaagctgacatttagggagggagtactagtgcaagccatgcgccatggcttctggattatactggatgaactcaatcttgcgtctacagatattttggaggccctaaatcgagtgttggatgacaacagggagctgtatattgcagagacgcagactttggtgaaagctcatcccaactttatgttgtttgccacacagaatcctccaggtctttatggaggaaggaaaacgctgtctcgtgccttcaaaaatcgttttatagagcttcatttcgctgacataccacgcgaagagttggaaaccattctcgaaaagcgatgctttattccaccgacatatgcccgcaagatggtgcaatgcatgacccaattgcagcaacatcgcaaaaatacctccaagcaggttttcaccctgcgcgatcttttccggtggggcaatcgatacacgcacgcggataagtctctgcatgatgacaacaggtacgactggaaccagcatctcgttgaggaaggctacctggtactatcctcaaaagtccgttcacaggaggaacacgagctgattgagaagactcttttcgccaacttccgcaaaaaacttgatctccagacgctgtttgacattcaaaccgatagggaaagctcctctatggtaagtagaaaaattcttgacgccataagaaactttaaactgcgcgacgacatcgtttggactcggaatatgacacgcatggccgtggtcactgccaaggccttggagttcgacgagcctgttttattggttggcccaacggggtgtggaaagactaccgtgtgccaacttcttgctagcatcgctgatgtccagctgcgcattctcaactgccacatgcatacagaaggagcagattttctgggaggattgcgtccttgtcgaggaaaggaatcaacacaactctttgagtgggcagatggcccattgatttacgctatgcaagaggggtcgtattttatggccgatgagatatcacttgctgaggattctgtgttggagcgactgaactgcatactagaaccagaacgtactgtattgctcgctgagaagggtggcatctccgagttggatgcaagtcccgactttgtagtgcaggccaagtccggctttcagttccttgccaccatgaatcccggcggggacttcggtaaaaaggagttgtcacctgccttaagaaatcgattcactgaggtctggtgcttgccctccgacaacaaggaggatctcattgagattgcctacaactgcatgcgacggcaaaaagagcacgaaaaccaggccatcaacacccataaagtggctgagtacctggtggatgtcgtgctccatatccgcgataccaacgacaagttcaagttttcagtacgtgacatcttggcctgggctaattacatggttagcaatgcaaagcttagttttgcagagcaggcaatattcggcttggaaacaattttccttgatgccttggaaatgcttccccatgaatcccaggaacaggtggagctgcttaaatccaatatagtcaaacaggccatcaaacaagcgagtcttattctgcaagaaaagtttacgctggaggaactgagcgagaagcgaggaaccgaagtcgagctaaatgaatgtcggtttggcattcgaccatttttcatagacgttaatcaggagcgcttgacgtcggccaaagaggatttcctattcgatgcacccactaccaagcagaacttattccgtctgttatccgcgctttcccttcaaaagccagtgctcttggagggaccacctggtgtgggcaaaacatccattgtggagagcataggatctgccattgggtaccaaattgtgcgcattaatctttgcgagcacacagacttggctgatttgtttggaaccgacctacctgctgaggataacttgctagaatcaaatacagccgctacggagcgtcaaatacgcagctttgtgtggcgcgatggaccgcttttggctgctcttaaggcaaagaacacttggattttgcttgacgaactgaatttagctcctcagtctgtgctggagggtcttaatgcggtgctggatcatcgcggagaagtctacattccggagctaaacaagagtttccatttagctggctcgactcgcatttttgcgtgccagaatcctttaaagcaaggcggcggccgtaagggattaccccaatccttccttaatcgttttacaaaagtttatctgcgcaagctctccactgaggatctgctacatgtggtaactgagaagtacggcaagtactttgatcagttgaatgcatattttttggaactgttagatcagaaagctgaaggcaatctttttgagatatactcaggaaaggaaagttcatgcaaatcggattcatttgatttgggtgcccgtttggtgcgcttttccgaacaactcgatcggggtgtggcttccatggagtttggctataagggcgggccttacgagttcaatttgcgtgatattctccgctggtgtgatctgctccacaacccgcaaactgggtacattttgggagcttcaccgtcatcattccaagccgctttcaaggatttcctgctcaccctctacgaaaggatgcagctggtctattaccaaaggatgcgttgcgatcaagataaatcatacattcgaaatgtcttttcaaccgttttcctatgcgatgctgaatacctaaatcaggtttcaaacgatgtcgctctctattggacagcagataaagtatatcttaacgatgtggttttgagtcgcaagcaagcggatgttctggacttggtaaatcgacaggagcagtcaccattgctgctggacagtcagaggcagcagcttaagcaaatcatcgagactgttcacatggagaagcctctactcctgtgcggatcgacggacagtggcaagaccaagttgatagacgcgctctgcgtgctgtcaaatcgcctatgtaatacggatatcattgacgactccgtaactggtagcttccagcagcatatgttttcagaggcacaacaacacagtgtgttagacgagctaaaactgtttagtgaacgtctgggatctctaggtaagatcatcgaggttttggaggccacgccacagaactgccaagtgagagcacttcagcagttggcagaaatcaagtcccagcttttgctgcttcaaacgtacataaaaacggccgattccctaaacacgggagggtcattcgaatgggtggactctcagattgttacctcattgaaatgcggccaatacatcttgctagagcatgttaatctctgctcctcggccgttctggatcgcctaaatcctgtattcgaaccaaatggtagcttactaatcgctgagaaaggaataagtgcacaggacagtgccgaggtggtttacaaatcaaccaatttccgtgctttcctaaccgtggatccaaagaatggcgaactatcgcgagccatgcgaaaccgatgtgtggagctatctttatctagggacacctattctgtagatgatttgcgagcctttgttcatgagcagggtgtgcgtgaaatggaggccatagattgtatactgagagtgcataagggattaagtcagctgactgagttcaataactactccatatcgcacctgacacagtttgcctttttaagcgctgcctataggagaattggctatgagcttaaacgtgctatttatgtggccgccatggaggtttatgtatactcagccaacacggacctaatgggatatggattgtcttattaccagaataaactgcgtgaggtggtgctggcccaaacggaagtatttgaggaagttgctgttatccaggaggatttccttagcgatgtaatacttaattctggaaacctcaattcgttgacattaattaaacgccaggctgtcgcgttaaaagtgttgctggatggatatacagaaggaaaaattccccaaaagctgttggcttctctcttccatgaaatggagaaacttaaattggatcagcgaaatccccagaagctcattcgtcatttcctttatatgctctacgagtcgtcggccattggagacttggaattaagacatctctaccttcaaccttggctatcgaaagacactgctttccaagaactttcgcagaatctttacaattgcttgcagaaaaggagtaacaccgatacaggaactttggccaatctaccttggaatcgaaaactcattccgagacttcgtgattactcaacagctgaatcgaattctgaactaaatcctttaaatctgagtgcattgcttttggcgcgccttgtggtcgatatcatacccgttagctcagttactacagtgcagcaaatgaatgcactgcagtattcgcaggccctctcaaaaagcggctgtgcacggatgcttaccattcaagaccgtactctaaaaatcaaaaaatacatcgaggagacgagacgacctctaaacgtaacttgcaagatttattccaagcaattcacccagtttcagccgtattaccaggatcaacagattcaacgccatatagaattagatgacttggaaaaattattgtcagtggtgcccagctatggcaacttggagttatcctcctggctcaaaagatggcttcttcttcaaacagatgacgcgaacaagtggcgatcttttctgcgtaagcacaccaatggttttcaacccaaggcttttgaaataagtggttctctgcggaatgagacattacagtcgcacctgcaaaaactgcaaacaacgttgaaggaagctcaagaaaacagtgcagagattgaaatggacttggaattagacttaaacagcatcaagaccctcttggaagcggaaactgaagaaagtgaatcttatattcatccagatggcataccaactaatacgccaaaactattaattgctgcattgagagaactattcatggaacgcctcttgactggaactcttcgtgacgacttcgatgagcaagtgaaccccctgtatgcagatcagttgcttaccttaaacagcaatctttggcattgcctgaagacgcttgagagtgctaaccgtaccgaaatcactaatgcttggattgaactcaagaacgaagtaaatgagctgcagaattacgacgagttcgcagtgctgctggaaaagattggcggtggctacaaaggactgcgttcttatcaaaggcagtatcgaaattccgttcaatgctaccaattggaaaatctgtccacccgtctggattgtgttcaaggtccttcagaagaaggtagcacggatatatcaagccaattctgttatcgaggccctgctttatcaggcgtcattttatcgctgatatgtcaacccaacggccagctgcgatcggttcccctaagcgagttgctagaatggcgatccgctttgcagcaaacacgacacctgatctgggagaattctcagctattaacttccagatatagtggagaagtcaataatctcttgcaggccaaggaaaatgcaaggcaactactaaaagagctggaatatgtgaggaaactaagtgagaaggaacagaaagctaaccaaggctttgaaaactgtgctaaagaactcgagaaaatgattgaaaaattggagaaagaagaaaacaataatgcctctatgacaaaagattttgaagtttcgctaactaatgccctggtgggagccattgagttgtgtttgctcacgaacaccccgttgatcgatcccgtggaaaagaatcgccttaaaaacgaatatatagcggaggatatcgattgccttagcactttgacaaccgcctatgatttcatgaaaattgcgatgaaatatcgtcactttggagaggaaatttacagtgaactggagcttagattaaggacggctctccagcggcaacaacagctttcgcaaaagttggctttgcgttcggaaaagtgcctatatgcgtctctggtccaggatattactcacttcctgcactcgaatggcgattgtgagtcgctttataagctgtttcagcttattcactcggagtgggaaaactttcaaggacttcatgtcgccacaagtgcccagctgaagagcagcattgaggtgctgggaaaactggacctgtggctagcgaatgctcagagattcgttcatcacaccctttccaggtactctgcatactaccaagactttgtggagcccattaagtgctctgtgaaccaattgcgttttggattggagtcccttaaagtgatcttcaccagagtgcaacaggctggcagcgtttcgcaggcagagcagatgcagcaaacaatcggtgatattgttcaattcccatcccagcatccgctggttattaggaatagcaggctttacggcttattggccgaacttcctcatagtgaatatgagtacttccgtttgctgaaagccaagttgagcgagctgagcaattacatcgcgctgggaagagtaatagacgaaactacctttgcggcctacgatgatgcgttaagtatctgcaaccagacctggcagcaggaggaacaccgtcgctgtcaactgaaagcggaagcagaaagtttgtatgtgacgaagaccaagggaggagtggatagtgaagagctaattgagatgcaagaaatcgagcacaacttccctacgaacctggacgaggactttgccgagttcgtgtctcaaccaactttggagcaggtcctaaaactagacaaaaaggccagtgcgaaggacaaacaatctcagattgtagttgaggaggattatgccttcctggcacgcaattttatagacgtgatgactcgccatactcaggtttactataaagagcaacccaagtcatcgaaggaattagagctccatttgctcgcgccttatcaagcacgcttccaggtgtttgcaaacctacatggtcactataagacagccctaggatcgagtctagaggaaagggcatgcaatggattggcttttggactggctctgcagcagaaacagctgagggatatcgaactggaggaaggagtatccagttcgccttacgacttttacaaagactcaaatattagtgaaattcaaagttgcctggatgtcatggagcggatagagaagcgtgtgctggaacaactggaacagtatcctgagcacgcaggtcttgcggacatcaagctggtcatctctcgcatccgtcgactgccggctcatgcgcctgtggttcgtttcaatacgggcttccagctgcttagacagaagttggcactctggaatgaagtggcccacaggaataacaatctggtgtcggaggaaatcgaggtggccgaatttgtccaacgctggacaagattggagctgcaacactggcgcaattgcctagggcaaacggccgctcaagttgagttacaggcctatcggtactggttcttcatctacaacctgctgcaacaattcatacaccagaagcaactagatcattcgtataccgacattaaacttgccgagcaacgctttgcacaggatcatttgttggatgctcaggatttgggagagtcccaacgtttggaacttgcccaggtggtgcgcattttaagacagtttgtggaggcctcctgctacggtgatttccatattcggctgcagcttcttcaaggatttgaattgtacttgcacaatgtcgagagagccggaaaaattaatggactgcctcccctaattgcagcattacataatcttcagctttatttctcccagtttgctggcgagatagcagactctgcgaaattacgtcgttcacccatcgaaaagaagctaaaggagtttgtgaaaatacagagctatagcaaggacttaagctactttagcatgcgcaacagtgtggctagtgtacaccgcaacctgaacaagttcctaaaggaataccgactctcgattcaggagaagattagtgaggtatttcaacccaaggattccactgccaaagactacacctttggtaccgacaagggcaagggcttgagaaattacaataaaataaagtatctgcacaccgagcgtcaacaattcgtggccagtgagaagctactggagaagtttgccatccaggaggagtttctgtcggataacacactgctccaacgcttggacaagcacttccgaactgcacgacatgttgtcaaggaaacgttgggacaggttccctacggcgagctgatcacggagctggatgacttgctggccagtcagttagagcgatgtgagcatttacgttccctgaacgttgatcgttcgaaggagagacctcaacagaagcaggaggccaagcagatccttcagcaaaaacgcaaggctctcacggacctcttcaagatgctacatcgactgggtgccaactataagactggccttctggagctctctttgcgcaacgagtttgaggacttccaacttccaccctattccattcgatccatgttgccgagactccaccccactgcccagcagctggatgagcacctggacttgtactatatgaagagtgtgttcaagttaaagctcctgcaaaacattatgctgactccgttgtcggaactcggacctcccaatatcgaacgcatcaagggctttgctgtggacttgttcctattggtgcaacagcagcgggaacacttgtctggatccaccaaagagcttcatgagctgagaaattcactggacagcttgcgtaagttggcagaaattattccacaggccgatataaatccgtcgactctcaacttcgtgaagagtgcagatatagctatggaaataaagcaacatcttcgccagattcactacgttctgaaacagtggaaactgctgttaagttgcgctccaagctcattcattgaagaatccgaaaaccgcttgctgatcctaaacagcagtcaagaattgctaaatgagctgaacaacgcaaatctggagtatctatctagcgaaaagtgtgtgacttaccagaagagctatgcggaaattcaagagaatataaagaagaccttagaactactcaggacaggacaaaacgattatttgccattagcgcaaccaattgttgagcttttggatagcgtgcaattgaagaaccatactgaaatagctccagaggccatcgacttggccaacgcggacacagagttggccaacatagcccacagtgtacttatgtccatgcaaaagatttataagcatcacgttaagactgatgaagttaatcaaaatggagaggcaaaagaacaggatgaagagtccaaggaggcgctgcaggaacaacatctcaagaagtgcctcactggggaactgacctcggattggcaacagttaagcctgccacgtgtgctcggtaagctttccaacgtactcctggtactaaagcactcccatttcgaaggcaaggataagctactatgcctcgccacgcataaagtttccgccaagatgttatccatagtgctgaccgttttcgtggagatcggtagtaagggcttctgtgtgcctccggatctcatgcaagatgaggagggacagtcaaagcaggaatccaagaacggtgagggcttcggcctagaggatggaaccggtgagaacgacgcctctgataagattgaatcagaggatcaacttgatgatgcaaagcgcccagaagatcggaaagacgagggtgataaacaggagccagactgcaaggaagagaaaggcattgagatgagcgacgattttgatgccaagatgcaggatgtggagaaacccgaggaggatgacagcggtgagtccgaagaagaggaggatctaaacaaggagatgggcgaaacggaggaaggtgccgaaaagttggatgaccaaatttggggcgatgacgaggaagaaaagccggaggaggaacaagaacctgatatgaacgaggaggatcagggcaaaggcagcaaggatgaaaaagatgcgcacaacgatttggatacaaagaacgatgcggcgaaagaagatggcaaagatgagcacgaaaaggacggcttggatgcaaccaatgaacccagcggagaggacaaacgcaaggagcaggccaaggacattgacgatatgaaggatccggaaatggatgaggagcaaacaaatgcaatgcacaatgagctggaggagccaccggaaccagaggaaatggatttgggggatatgaataatgttgacgagggacacgatgaccaggatgagcagcccacagatgaaaatccctttgacattgatgccatgaaagaaaacatgcaacctgctgaggaacccgaggcagacggagatgacgagcatgatgcaaacgaggaaggcgatccccaaagcgacggcagcgactctgaagaggacgaggcgggtacagaagcaaaaccagctgaagaagatcacggcgagggcgaagaggcaacaccagaagatgaaaaagatgaggccgaaacacagaaacgcggtgagctagaggacgaagatgattcaaagcccgaagatagtcctgaggattccaaggaagagaaggaggagaagcgcgaggagaaaccggaggagcactcacagtccaaagacaaagccagcaaggaggaaaacgttcagtccatgccggagactgatcagagcagctcggccgatcaggtgcagcagccacaggacccggacattaagcaagaccagaagcttgatgaacaagagactggtgaagagaaggatggagtcggccaggccgagaacgacgccgacgatggcggccatcaaggcgtagcggaaactcaggaaactgtgtcacaggaggatcgtaaaaacgaaaggcaaactcaggagaagcgcaagcagggaagaaccaatgaggagcgatccctaggtgaggcggagcagaacaaattgaaacagctaaagacaattgatcaactgaaggactcaaaggaatccgacgatgccgagcaggagaaaccggaacccatggaccagacggaggctgaggagtaccagcatgtaaaagagccgaaaaacagcgacaaaaccacgttggacaatgctaccgaagaacaatcaaagaagatccagcatcaggaggatgagccaccaaacgaagaggaaatagaggcggaaaatgttgacgagttaatggaggccgaagagccagccgttgatccggaagatgatgctgaactcgagcaactgggggctgagaagacggagcaaaagtccgacaaaccctctaaaacagaaaagtctaaggagcagttggagacccctgaaggaatggagatagaaggggaggtggtgctgactatgacggttcctcgtagctcggagactactgcgcatagcaattccgaaatccttctggataagagctcacacgcggaggatctgagctcagccgaacaaattgagcttaggcaacagtaccaaaagcagttgaccacattcagagtagcacagccggagcacgaggattacgaaacatggcagggcatctccaatagaatgacccagaatgcccgtgagctttgcgaacagttgcgtcttattctggagcccacgaagtgcacacggttaaagggcgactaccgcactggaagacgtattaatatgaaaaaaattattccatacatcgcctcgcagttccgcaaggacaagatctggttgcgacgaaccaagcctgcgcagcgtgactataagatcaccattgccattgatgactccaagtcgatgcaccacaacaactccaagacgctgactctggaggcaatctcgcttgtgtcgcaggcgctaacccttctagagagtggtcgtcttagcattgtatcttttggggaggcgccgcagatcatactaaatcacacggagcagtttgacggtccccgcttggtaaatgctctgaacttcgctcaggacaagacaaagatcgccgggctgctgaactttatacgcacggcaaatgcagaagagagtggcacggggggcgataatggtctgtttgaaaaccttttgctcattctcagcgatggacgtaatatattcagcgaaggtgcacagaacgtaaagaacgccattaagttggcgcgtctgcagcgcatcttcctggtatacatcattatcgataatccagacaataagaactcaattctggacatacaacatgtggcggtgaacgcagatggatcagtgaacattaattcctacctggacagttttccttttccgtactatgtgatagtccgggaccttaaccagctgccgctggtgctcagcgaagccatgagacaatggttcgagttggttaacagcgagtaa

SEQ ID NO: 30390 - protein, 5303 aa, DROSOPHILA
MEVNVSKLRLGAQRLLELTANESEDNVFSQSLQKFIKKQKYVPQDVERLFRSLSEQLPLPAYTVPIAASFEEQLLLLLSMALRWDSASQRFHTYQLECVALSKLMNFSLDAQRFAKSYFHDKPAPFEKQQSNGSLPSKKSKNGNHAADNLDDLELIKCCFQLLKSDTPYFRELWDWSSFIATYTHNSSSPKTQLYCNYIVAMLTNMSAPQLNSLNEKISTKTRLEFDQEREQAWNTARNTLCSYTPDASDQLLNLHLHGINKSVTNIEGVLLPTFNEENLEFYASTDGCYDRIVKVDSTVVNLRSIALGVAAAKPICLSGPVGCGKTTLIEYLARKTGRICPKPNEIESREKALKKAEEEEQLLTPKKKAKTTGSKRKLEEVPLEELLDLGETTKKSGFLRIQLGDQTDSKMLLGQYRCTDVPGEFVWLPGVLTQAVMHGYWLLLEDLDAATQDTYTILSSLLERQCLSVPGFRDSVKIEPGFQLFVTVRTNKSASNSSQKSLYSLLDKYLYTINILPLSRNELCKMVSINYPKLSTVANRIVDVFLTFSSGNHTSADNLRQQESGDKADNTEQYVALPFEQVPLTSSPNSGRLVSTRDLSKEKVTLITSIGAKLGIIRSRCEHFANEYKPDVEFGLEHIKIGRASLLAKSDLNNSENEDISEQDLKRQKLSQQTRRAIGKVSNKRTTFSFTRLASCILERIAVCVTHSEPVLLVGETGVGKTSSVQYLAERTEHKLVVVNMNNQSDVSDLVGGFKPVELNYVLAPLRNEFEYLLCETFNQEKNLQFLRLFATHYNSGRHAVIIRTMINICLQVAKNPELKANKLLPRWQTLREKLQKLQMQLDKSINISFAFIPGSLVNCISNGDWVLLDEINLASAETLECLSTILEPEGSVVLLERGDFTPVKRHPDFRIFACMNPNTDIGKKDLPVGIRNRFTEFFVDELTTDADLSLLVSDYLANTGIQRKSVHNIVQLYKSLRKLSELQLNDGLGNRPVYSLRTLCRSLRICARNLCGSIERNLYESFCLSFLTQLDPNSHHVVLLLIQNALLSNVKAILSKQLPQLGENYLDFEGYWIQPGNLEPQPCTHYILTESVKKNLKDLARIISIGKLPILLQGPTSAGKTSLIDYVARRSGNRCLRINNHEHTDLQEYIGTYAADLDGKLTFREGVLVQAMRHGFWIILDELNLASTDILEALNRVLDDNRELYIAETQTLVKAHPNFMLFATQNPPGLYGGRKTLSRAFKNRFIELHFADIPREELETILEKRCFIPPTYARKMVQCMTQLQQHRKNTSKQVFTLRDLFRWGNRYTHADKSLHDDNRYDWNQHLVEEGYLVLSSKVRSQEEHELIEKTLFANFRKKLDLQTLFDIQTDRESSSMVSRKILDAIRNFKLRDDIVWTRNMTRMAVVTAKALEFDEPVLLVGPTGCGKTTVCQLLASIADVQLRILNCHMHTEGADFLGGLRPCRGKESTQLFEWADGPLIYAMQEGSYFMADEISLAEDSVLERLNCILEPERTVLLAEKGGISELDASPDFVVQAKSGFQFLATMNPGGDFGKKELSPALRNRFTEVWCLPSDNKEDLIEIAYNCMRRQKEHENQAINTHKVAEYLVDVVLHIRDTNDKFKFSVRDILAWANYMVSNAKLSFAEQAIFGLETIFLDALEMLPHESQEQVELLKSNIVKQAIKQASLILQEKFTLEELSEKRGTEVELNECRFGIRPFFIDVNQERLTSAKEDFLFDAPTTKQNLFRLLSALSLQKPVLLEGPPGVGKTSIVESIGSAIGYQIVRINLCEHTDLADLFGTDLPAEDNLLESNTAATERQIRSFVWRDGPLLAALKAKNTWILLDELNLAPQSVLEGLNAVLDHRGEVYIPELNKSFHLAGSTRIFACQNPLKQGGGRKGLPQSFLNRFTKVYLRKLSTEDLLHVVTEKYGKYFDQLNAYFLELLDQKAEGNLFEIYSGKESSCKSDSFDLGARLVRFSEQLDRGVASMEFGYKGGPYEFNLRDILRWCDLLHNPQTGYILGASPSSFQAAFKDFLLTLYERMQLVYYQRMRCDQDKSYIRNVFSTVFLCDAEYLNQVSNDVALYWTADKVYLNDVVLSRKQADVLDLVNRQEQSPLLLDSQRQQLKQIIETVHMEKPLLLCGSTDSGKTKLIDALCVLSNRLCNTDIIDDSVTGSFQQHMFSEAQQHSVLDELKLFSERLGSLGKIIEVLEATPQNCQVRALQQLAEIKSQLLLLQTYIKTADSLNTGGSFEWVDSQIVTSLKCGQYILLEHVNLCSSAVLDRLNPVFEPNGSLLIAEKGISAQDSAEVVYKSTNFRAFLTVDPKNGELSRAMRNRCVELSLSRDTYSVDDLRAFVHEQGVREMEAIDCILRVHKGLSQLTEFNNYSISHLTQFAFLSAAYRRIGYELKRAIYVAAMEVYVYSANTDLMGYGLSYYQNKLREVVLAQTEVFEEVAVIQEDFLSDVILNSGNLNSLTLIKRQAVALKVLLDGYTEGKIPQKLLASLFHEMEKLKLDQRNPQKLIRHFLYMLYESSAIGDLELRHLYLQPWLSKDTAFQELSQNLYNCLQKRSNTDTGTLANLPWNRKLIPRLRDYSTAESNSELNPLNLSALLLARLVVDIIPVSSVTTVQQMNALQYSQALSKSGCARMLTIQDRTLKIKKYIEETRRPLNVTCKIYSKQFTQFQPYYQDQQIQRHIELDDLEKLLSVVPSYGNLELSSWLKRWLLLQTDDANKWRSFLRKHTNGFQPKAFEISGSLRNETLQSHLQKLQTTLKEAQENSAEIEMDLELDLNSIKTLLEAETEESESYIHPDGIPTNTPKLLIAALRELFMERLLTGTLRDDFDEQVNPLYADQLLTLNSNLWHCLKTLESANRTEITNAWIELKNEVNELQNYDEFAVLLEKIGGGYKGLRSYQRQYRNSVQCYQLENLSTRLDCVQGPSEEGSTDISSQFCYRGPALSGVILSLICQPNGQLRSVPLSELLEWRSALQQTRHLIWENSQLLTSRYSGEVNNLLQAKENARQLLKELEYVRKLSEKEQKANQGFENCAKELEKMIEKLEKEENNNASMTKDFEVSLTNALVGAIELCLLTNTPLIDPVEKNRLKNEYIAEDIDCLSTLTTAYDFMKIAMKYRHFGEEIYSELELRLRTALQRQQQLSQKLALRSEKCLYASLVQDITHFLHSNGDCESLYKLFQLIHSEWENFQGLHVATSAQLKSSIEVLGKLDLWLANAQRFVHHTLSRYSAYYQDFVEPIKCSVNQLRFGLESLKVIFTRVQQAGSVSQAEQMQQTIGDIVQFPSQHPLVIRNSRLYGLLAELPHSEYEYFRLLKAKLSELSNYIALGRVIDETTFAAYDDALSICNQTWQQEEHRRCQLKAEAESLYVTKTKGGVDSEELIEMQEIEHNFPTNLDEDFAEFVSQPTLEQVLKLDKKASAKDKQSQIVVEEDYAFLARNFIDVMTRHTQVYYKEQPKSSKELELHLLAPYQARFQVFANLHGHYKTALGSSLEERACNGLAFGLALQQKQLRDIELEEGVSSSPYDFYKDSNISEIQSCLDVMERIEKRVLEQLEQYPEHAGLADIKLVISRIRRLPAHAPVVRFNTGFQLLRQKLALWNEVAHRNNNLVSEEIEVAEFVQRWTRLELQHWRNCLGQTAAQVELQAYRYWFFIYNLLQQFIHQKQLDHSYTDIKLAEQRFAQDHLLDAQDLGESQRLELAQVVRILRQFVEASCYGDFHIRLQLLQGFELYLHNVERAGKINGLPPLIAALHNLQLYFSQFAGEIADSAKLRRSPIEKKLKEFVKIQSYSKDLSYFSMRNSVASVHRNLNKFLKEYRLSIQEKISEVFQPKDSTAKDYTFGTDKGKGLRNYNKIKYLHTERQQFVASEKLLEKFAIQEEFLSDNTLLQRLDKHFRTARHVVKETLGQVPYGELITELDDLLASQLERCEHLRSLNVDRSKERPQQKQEAKQILQQKRKALTDLFKMLHRLGANYKTGLLELSLRNEFEDFQLPPYSIRSMLPRLHPTAQQLDEHLDLYYMKSVFKLKLLQNIMLTPLSELGPPNIERIKGFAVDLFLLVQQQREHLSGSTKELHELRNSLDSLRKLAEIIPQADINPSTLNFVKSADIAMEIKQHLRQIHYVLKQWKLLLSCAPSSFIEESENRLLILNSSQELLNELNNANLEYLSSEKCVTYQKSYAEIQENIKKTLELLRTGQNDYLPLAQPIVELLDSVQLKNHTEIAPEAIDLANADTELANIAHSVLMSMQKIYKHHVKTDEVNQNGEAKEQDEESKEALQEQHLKKCLTGELTSDWQQLSLPRVLGKLSNVLLVLKHSHFEGKDKLLCLATHKVSAKMLSIVLTVFVEIGSKGFCVPPDLMQDEEGQSKQESKNGEGFGLEDGTGENDASDKIESEDQLDDAKRPEDRKDEGDKQEPDCKEEKGIEMSDDFDAKMQDVEKPEEDDSGESEEEEDLNKEMGETEEGAEKLDDQIWGDDEEEKPEEEQEPDMNEEDQGKGSKDEKDAHNDLDTKNDAAKEDGKDEHEKDGLDATNEPSGEDKRKEQAKDIDDMKDPEMDEEQTNAMHNELEEPPEPEEMDLGDMNNVDEGHDDQDEQPTDENPFDIDAMKENMQPAEEPEADGDDEHDANEEGDPQSDGSDSEEDEAGTEAKPAEEDHGEGEEATPEDEKDEAETQKRGELEDEDDSKPEDSPEDSKEEKEEKREEKPEEHSQSKDKASKEENVQSMPETDQSSSADQVQQPQDPDIKQDQKLDEQETGEEKDGVGQAENDADDGGHQGVAETQETVSQEDRKNERQTQEKRKQGRTNEERSLGEAEQNKLKQLKTIDQLKDSKESDDAEQEKPEPMDQTEAEEYQHVKEPKNSDKTTLDNATEEQSKKIQHQEDEPPNEEEIEAENVDELMEAEEPAVDPEDDAELEQLGAEKTEQKSDKPSKTEKSKEQLETPEGMEIEGEVVLTMTVPRSSETTAHSNSEILLDKSSHAEDLSSAEQIELRQQYQKQLTTFRVAQPEHEDYETWQGISNRMTQNARELCEQLRLILEPTKCTRLKGDYRTGRRINMKKIIPYIASQFRKDKIWLRRTKPAQRDYKITIAIDDSKSMHHNNSKTLTLEAISLVSQALTLLESGRLSIVSFGEAPQIILNHTEQFDGPRLVNALNFAQDKTKIAGLLNFIRTANAEESGTGGDNGLFENLLLILSDGRNIFSEGAQNVKNAIKLARLQRIFLVYIIIDNPDNKNSILDIQHVAVNADGSVNINSYLDSFPFPYYVIVRDLNQLPLVLSEAMRQWFELVNSE

SEQ ID NO: 30391 - DNA, 2432 bp, DROSOPHILA
cttgttggcttcttccccctagccagtttgcagtggcaaattttctgttgccctcggtcgatggtttttcggtttaccaatttatttatttccagccactttcctagctagctagctgcccattgtgttgctggcacattgcaattttcaaatacatccgcaatggatttggatgtggatgtgttttctgctgctctttttggaaatgttactctaggactagggtttggattaaaatccaaaggcgaacagcaaatgaaaataccatttcttgcactttatttatgtaaagcaactagggcgtcatgctgatttgaaggcaacatatagattgcacatttattgtatgcaaatgcaagctaaaagcttataggaaattgatttgctcgtatagttttcactttatagttttaagagcatttaaaagccggctagcatgtgagtgccctttgtctattgtttcaaattcagctttcaatttaaattgtttggattactcgtcctctattgtgtacattgaaaatgtatttcggggtatttgttgtgtcaacaccaagtgaacgagatagtagcacccactaccaactacacaccacatgtcccgatttagttgccctgatttctcagccagacaataggacgcgtcgctaatgtccccgtgcagtaataataatatatatatacacatatatatcgtgtggctgctaatgtggcagcattgtattgggttaattattctggtcgatttaagcatttaacttttgaaaggagctgtcaaagtgtgatgtcagtacgtcagtcaacaataccagcaatattacacacacaaaagccaaagaagaatcgcactaatcgccgagcattttgtccgcgtgggtggatgacgtcttaaagttgctccaacaggtctctggctgattgtttacttttcacgccatgtattagccattgttatggtaaagactttataataattcagacaacaaagtgcggcaaatgtttacatgtcctctttctcctcatccccgtcgtcagcgtccacgcccaccgccttgtcgggatagaatttcttgagtatcctgttcacatcgggcaccagtgcctcgtagtccagtgggaacttatcccgacgcggcggtcccttctccaagccggaccacagcagatgctccgaggtgcgtgcattttgcgagaaccctatctcgaaggctccttcccgcggaacctggcgtccgtttcgattcttcaccagctggaacttgcgctccggtatccgttgcgtgaagaatgttccgcactcgtcggccttggtctggaaaatgggacactcgtacgtgtgctcgatgtagatcatggaacgatccttggagaaatgctcatcggaggaccagtccacgtcctttttcttttttgccggcttctttggtggcattgtggttttttttttagattactttcacaatttcgaagtgattttgttaataaccaaaacccatttttatttcgaatgttgacaatcctagaattcataattgctttgattgattgctttttggttcacttatgattctctggtacaaaagtactgtgaaccataaatcttctttcgtacatttcaaagtgcgcaacgatgtccagaatatttttgctgcgcctatttttaaaatgcatgacaatccgaaagagtcaacaacttttggtggcacgcatacgaaaagaatcgctgttcgtttgttaatttggctacattgactgacaacgcagccgcctttgaaaaaattacaaaaaacgatattgtatagatgcaggggaaaatgcttccattggctgggtagccacaattttgttcattatatatagatttttgttttgtatatatgcaaagctccaatatagacgtcaatttatggcactgtctatattcatgcagaaaagctactcaacaaattctatgcataacaataatatattgttggacacaaaaacatgcataaacaatgggagaaaacataaaaatcgagtatttaaagcaagtaaattatacgatgagagcatttcgacgactatcagatattctttacggattccattgaatgtaggtttatcacaaaatacgctgatatttatcataagctggaagaagataccaataccaaatcaatggattgttttcataaaaaaatgaagaatgaaatcgcaaaccctattattttcaagtctcttaatagtgtttgaaggacatctaattgaactgattttaagagcaaacatagtcttcttatataatttgtgcatttttaattggaatcatttaaattcttattttggagcgtaaacatgattgcaacactcttttatttgcttgattttattggttgcgggattgcgagattgcaaatggtcatttattgcattttatttctccatttctc

SEQ ID NO: 30392 - DNA, 432 bp, DROSOPHILA
atgccaccaaagaagccggcaaaaaagaaaaaggacgtggactggtcctccgatgagcatttctccaaggatcgttccatgatctacatcgagcacacgtacgagtgtcccattttccagaccaaggccgacgagtgcggaacattcttcacgcaacggataccggagcgcaagttccagctggtgaagaatcgaaacggacgccaggttccgcgggaaggagccttcgagatagggttctcgcaaaatgcacgcacctcggagcatctgctgtggtccggcttggagaagggaccgccgcgtcgggataagttcccactggactacgaggcactggtgcccgatgtgaacaggatactcaagaaattctatcccgacaaggcggtgggcgtggacgctgacgacggggatgaggagaaagaggacatgtaa

SEQ ID NO: 30393 - protein, 143 aa, DROSOPHILA
MPPKKPAKKKKDVDWSSDEHFSKDRSMIYIEHTYECPIFQTKADECGTFFTQRIPERKFQLVKNRNGRQVPREGAFEIGFSQNARTSEHLLWSGLEKGPPRRDKFPLDYEALVPDVNRILKKFYPDKAVGVDADDGDEEKEDM

SEQ ID NO: 30394 - DNA, 2343 bp, DROSOPHILA
agcaaacaaagccacttagctgcatttatcacagcactgggcttaaatggctgaaatattgcgcatacgccgcgtgagccaaggttaatttgattgcgcccgcttacggaagttcggcattgaacatggactgagcacgtgattccaactgcagtcacgtgatggataacaatatatctgtgggcctgttatctcgtttacgcattttgagcctggtccttgtcccaactacctgaagtgcatactttaggcccaagcggattcggattgctgggcgaattttgcacgctcatctgtttattcgccctgctgggcattcatttccgtccgccattttccatttcccattttcccccgccggcgggtcaaataatttatgggccatggtccgctaattgcgcattgaagcgcggcgcgaacaactattcgcatttcgcatatgcagcatgctggtcctgctgcaggacctccatcgccatcaatttaaatgcataggtgcaaattgaaatttatgcgtctggtcgcgaaggtaaattcccttcatcatcagctgccatgtttaattgcgatgcacgaccttggccgtctggccagttagattaattaactcacatgtcgtcggaaaggtcatgccgccgcatgtggcgatgataaatggcctctgatcctggtccttggatatgtggcacttttcgccaaaaactcgtcaggcgaaaaacacataaggcagtggtacgggtaaatgccaaatatttgcgcctgctgtcagcagtctaaatgaaattaaatggaaaaaaatagcatttcgatgcggggcaaaccaaaaatgtataaaagaaaatggcaaacattttaattaaattaaaataaatgtgaaatggaaaataatgagagaaaaaaagcactggcatcgaccttgccgccatgtaacaagcaattacatttcccccccttaatggcatacttcattattttgtgtatttcctgtgtaaggatacctacgtgcaacggtcctggccataattggtttaatggccagcaagcctgtgcgtatttgcactatatcggttaatggcttaatagcgcggctctacatcaaacatgcagtacagtgtacagtcgaactgctgctcgacctgctgacattcacccagttgatccggcactaggttgcccttctcggcgaggcaatcgctgatgcactggctgcccaatggatgcgccatctccccttgcagctcctttaagctggctgccacatctgcaccctgctgctgctgctgctgctgcggcggcggcgaaaggtcaatcgcctgtgcagccagcagcaccagcaactgcatcacgataaacaaaacggataatttcatatttgtatttgccaaacctgtctgaattttcattactgacagcttgttcactgtcccagggcttgctgcactcaagaaaaaaatgtagtaagtacttaatatccatttagctgaaaaactaaagttaatgtgagtagaaacaatatttaccaggtacgaaaataataattctatcattaagttatgttgtatgctacaacctatgtataacatagtaatgataataataataataatttaataattttcttttcgattttataaaatccactaatttcgcttgaataatgattctcgtggtgtaggtgagcatacccatatccgcagccataatgacttccggatggcgaaagcaaacatccaaatgaggcaatctaagcaccagtttgcggctgccagcggctctaactgcacaattatggaccgcccttgccgcccacaaagcacgttgatttcaccacccccctgccccctgcaccatgcccgtctggcgcaaatatgggcaaaagtgccacggggcgcattagtaatgcccattgcggcatctattacacagcgtcttgtttatgtgcaacacacacacacacacgcacactcttgaataaaaatcaacagcccggggcgagtggttgccactgcaatcccttcccttcccttcaccgtttcgctaaggacatcctggccacccgctaccctatccttgacttttattttgggggaaatgtgtgtaaagtatatgtatatgtgaaaataaaaaggcgagcagcaaaaattgttgagaattatgtcctcgtttgggggaaaagcgactcgttagtaagtcgagccaagcaggacttcactcgatatgttgtttaccctgccacgcccactttccgccgccaccgccgcctctttcttgtgagacgtttgacatttgtgcttggaggacatatagtcctcgttcgtttgcgtgtgtgtgcatgcaacaagc

SEQ ID NO: 30395 - DNA, 343 bp, DROSOPHILA
atgcagttgctggtgctgctggctgcacaggcgattgacctttcgccgccgccgcagcagcagcagcagcagcagggtgcagatgtggcagccagcttaaaggagctgcaaggggagatggcgcatccattgggcagccagtgcatcagcgattgcctcgccgagaagggcaacctagtgccggatcaactgggtgaatgtcagcaggtcgagcagcagttcgactgtacactgtactgcatgtttgatgtagagccgcgctattaagccattaaccgatatagtgcaaatacgcacaggcttgctggccattaaaccaattatggccaggaccgttgcacgt

SEQ ID NO: 30396 - protein, 88 aa, DROSOPHILA
MQLLVLLAAQAIDLSPPPQQQQQQQGADVAASLKELQGEMAHPLGSQCISDCLAEKGNLVPDQLGECQQVEQQFDCTLYCMFDVEPRY

SEQ ID NO: 30397 - DNA, 6990 bp, DROSOPHILA
aaaaaacaacgcagaaaatgcaattggaactagtgatgggagagttgatgttgcaccgtgaactatcgacggcctcttatcgatagttcatttgttatcaatattcaaattagttttagccctcctaagagcgactttgaaattgaaaagaaaaaagttagaaacaaaaattatattttagccattttttaaacttactttatattaaaaaagtacaacattttaataatttaaactaaaagcccattttcgatatccattttaacatttaaataataatcatacgtttatttgtaatttaaaaaccataataattgtttaatgtacatgttttatagtttaatgtgtgtattcattttatttttatctttgtagttttctttccaattcttacgcttttaggttttctttttgaatgcattttgaatgcatacttgttgaatttaacgagacaattgtatgtattatgatgatgttacattaactaaaaattaactgcgatcatagaaaagttaattttaattacttaataaggctctgtttacgttttcattactttacttcgtactttaacttatgcgcgatatactttcctttttttattcgatatacaatagtctaagaataatggtaaaatcaatcaataaatcaaacactataaaagaacaggataaaacattttaaatgataaataattacttttacagagttgcggttaacagatttttcgacacttttttcgtttttctttttttgatgtttgtgtttttggtgtatctcacaaaattgatatagtacatactgaatgcgaaactgaacaatccgaattctgggtgcttagttgtgagttgcatggtgtggataaaggtagtgtcggtttaacaactatcgtggtctttcctacgtcttaaatatttagttaacttaggcgcctagactaaacataactaaactaacaagtatgcgctctctccacctccaatctgcgccatcccagcccctatgatttggctgaagcggctcctgcgcgcgttcgtttggccatgggctccgtagtgtcagccgctcgtatgttgtcgaacagattgttctcctgaaatcaaatttcacacactagttagattcattctcagtattttccaaggacctcactcacctgcggattttcatcatccatgattgactgttccgccggtctctttggagccactgctgctcgcgacgttgtcattgctgttgcggcagctttgctcgtggatttggctcccagcgtatacacgtccagcggtatatagacgtcattgttttggaaattcgcaacggcaggctctttataatacatttctggcaaagccagcggcatggaaaaggtgctcgtgttgccatcaaatggactgaacttggagtcgataatgtacatggcaagatcgcagagcgcccacattttctgataaccgaaaaatatatgtataaatataatttagaagggaaagcctgggaaaatgattgagtgacatacatagttgtcgcgcttgtccgaccccagactgaactcgcgatgctttatcagctgcagcagctgcttgtagaagctatggacaaacgtttctcgtttggccatcagcggctccagaatgaaacgcaggcacttctccatcttgcgcagctgtacgtagtcctcgtgattcgtgaagcgtggatcgtggaccagcacgggaatagcgaaagccagcatgtagtcaggtagtatgtgtaatgattgtgactccgttgagctgtcgggagctggaataatttgatttaatggttaaaatacacaatatgattccaaaagtaaaacacctacatgtcatagccacagtcttgagatattcccgccgtttgtttacatccgtttctgcatagtgacgcacaaggtcttgcaatctgttgaaaatatttatcaatacttctccgaacggatcggatggtttcttgaactactcacttcctctcagtctctagaccagccagcacatacaagcccatgaagtccagcggcaaacagttcctgggcaaacttctgcttaatcctttgtgcagcttgcgagcaaagatttcccgaacttctggcaccggatcagcctacgggaacaccgagatagacattgagactaagttctaagcacaagatgaatgtctctactcaccatcagctgggaaagctgcaaatactgctcagcgctgtactgatcacctacgcccttttgttcgcacactttgagcatggcgcaggctgccccgaggcgcagccaagatttctcggcaccgcaaagacggttctggccgagcaaatcgcctcgttggttaacaaacgccgccagcattcggaatgttttctgggcagcgtgctcatcggtacgcaatcccaaaagccacctggccatagccttgagcgcatccagcttacatagagtgtccggcggtagtttctcttgggcacaccaatcactgtcctctggcagttcgtagtctcgctgcgcaggaacttcttggataagcagctctttgacaattcgtcgcgcaatcatattcttaatgggcgttaggaaggcctgtggcatattgtaggcaatgtgacccaaggtcacaatctttgtgcgctgatgctcacagtttggtgtcagttttaggcgaagcgtctcgatgatctcgttgaaaataggatgcactgtttgtgtagttgtggacgcacttccagctccacttgttgctccatcagtggaagccgacgactggctgtttacgaaaatacatcgcaccgcgtgctttgcttgcttgggggttccaataagtgcgaagtccttgcacaccggagccagctcgtcgagaatagccggtgtagggtcgtcaatgagtggctgatagcgccccagatgagttagtgtctttagcaccagtggtgcaacataatcctgctcgtaactgagcagggaaattaaatgacgcagcgaagtatcggtgaagaaatgagccgaaaagacgtatgaaagcatctgcaagtataaagcaatcaaatggatttctgtatcataacttaaattatctctatactcacggccaacaacttgagtccgcgctcgcccgcttcctgagccgaaattccgatctcttcacacatggaccctttctcgatgcattgttcaattaggctgagcaaaaagattaccggattaagtctggcaaaagggcacttaaaagcaatttacctaataagtacgccaatagactccttgtccaccatcactgatgccacgcgctcaatcagcatcttaactgtgttgtaatacagattcgattggacgtgggcgccaagctttttcaggagaactcccatcgtgtcagcacactcccgacagcttacgtcgcgtttaaggacaatgttaatgcatcgtaggagctgagcatcttttcgcaggttgttgctaaactgggttaggtactctgccgcttttaggggatctggaagcagtctgaagaaaaaaaaacacatcactggttacaaactatcaaaagaaaacttattatagaacccacttggcaatgttggcctgcttggcgctgagctgactaagtacgcgcggcgtgaactccttagagtggtgtagcttgatccaatcactgaccgtattgcgtgtcttcatttggttcttctgcagctcgacgaaagccttggtggcattggcatcgagatcgcctagcaaatgatatagcttcttcatgcgctcttccggagctagtttatagggaaccaggcaggtgataagtaggcgttccacaagcaggcggtcctccaagcccactttgtagtatccatgtagtatcttgttcttaatccagtcaaccctgaccttaaggccagtgcttagatcgttgggttcgcaaattgcgcgcttgtagatgtaggccagaccattcatcgcatccctgcgaattttgtacttcttatctagcgtccgctcgcgcacaatttctagtagatcgggcgcttcgagaacgagggtgaagtcgcgcttggcagtttccacaatagccattaccacctcgtggcggaccacttcgtcaagatcgtgatttcgaagccgcaatttctcggtgatatcgtgctgaagacttgggtgattgagcaggaagtgcatggatgactgaacacacttgatgcgaactggttcggtgatgtcgcagaagcgcccaaagaagattttcaacaggttggggtactttttcgctagttgcgagtccttttcggagaacatacgagacaagagagtggttgcctctgtagtaacgaaaatatgtttattaatatgcaaatagaggtacatgctgataaattactcacttagcctctcagcatcgtccgtggacagcagtttgttctccagctgaggtagcactgaacacaacaagcctgcattgatgcggttaagctcgtaaatgatatcatagattttgtttgtaatggacagttttgtgtttggcttatccatgaccagagcacggttaaagaactgtagatcagggattaggttgaataacgtggtgcaccaaagatcaacgaaatattaccattttgatggtggactcgagagcatcgcccgttttagtgagaagttgttctgttaattggcaggcaaacttgttgttagatttgtacggctctacgatgttaatcagaatgagatccaacaattccaccgacagattgtcggcttctgtgatcaacgggcttagcacatctagaaaaaagttagtcaccttgacactgtgctggtcactagaaaattatataacatgtgattataaagagttcgcaggataaaggaagagctcgacttacttgacaatcttgaagatggtactaaacaggtcttggaagatttcttggcagtcctccagttcgaaacacatattaaaagacttgacaaaagcaaggttctccagcagatagaagtaacgcttgaaagagggatcgcgcggatccttcagaccgtgcagttgcttgataaaaaacttaaatatagttttgatttgatcttgctctttgtagggagcctctggcgcataaacccgcaggacatccgccacgcagcacgcgattaagagctggacatcacgggatggatgttgcataaagaagtcgtccagcagatggagggccaatggtatgtattgctggtagagattgtcgtcctggtccatggtctgcagaacattggcgagggtctgtaaaacagaatcattctaagtgagaagttttgctaagggaaccaggggcaggactcaccttgaggcgccttatcagctcgtctgtgcccaaatcctcgaccagcggccggcatccggtggggtacactatgtccgccatcctcaccgccaatgggagctacctgcaagccaggatttcaaggattcagtggcaggtgcaacaattccgtgcgacagcaacaacaacgaatgcgaccctcaaaataacattgaaaaagtggaggagggtggcatcacgaacacacaagcacgaagctccacacaagcacacacacacatgggcagcagcaccacaagcacacagagtggccaatattgtttggttatttctttttcgcaaacaacaaatagagagcgcccaaattgtagcgcccttgccactgcaatttacccaatgttttatattaaactgcggcgcagtttttggaactcggaatcttacttttcacaacgggcaggaagcggcacaatttttttgcaattttgcgaacccctgctttcgatgaccgcttagcgcgcgtctccttcgaatcactgcactatggatgggattgatcctgtccagctatttacacatgttcggttacaagagtcttttgcggtgcttatgttgttaaaaataagcaaaaaccaaggagcatttatgtggagtggcacgccattaatccacgcacgaagcgttgccagaggttttttggaagtgtggccagactcttcgcagattagtacatgattgcatttcagctgattagcattgacgtgttgttggtgctagcgaggagagcggaaggggtcgtgtcacgaaatcggatatataatcggaatgaaatcgggatataaataacttattaaactgtatttataaatttacttaagaacaacatttgagtatcatgtttgttttgctttgagcattcagttagtgctaatcacgcgctcacctctaattttgtttgttgtgcttggcaaacagctgtagcgttgccacatagccgtcgcggcgcaagaagtgcaaacataggataaagataattgcacaattattggcacctggagccggcaaacgctgtaacggaattgcccgcgttcaaaagccaatggcgcgcattggcgaaacatcggaggaatgtggtaatggacgcaacacaacgttccggccgttctagatgttttgctttctaatccaattaagcgtgtgcgccctgaaagcgatgatgcgggccggttgtggtcagatgtgcgccgtccgttgcagcagctctacattcccgaaaatatgagcattcttacgtaaatattgcatgggcagtgcgtatttaaatatagattgtacatatagagacgcaatgtaagccagttgcatttgccagaggacaaccgaaagtattaatcaagcaatccaaaccgatgcggcatagccgggattatggcttccttgcgcgtcgtcaataggtgggtcatagttgacgttacttttgttaaccgaaactatttaatccttccataatccccgaaagaaacagattagtgtgccgcggttttgtggctcttacgttgctgctggtcttcttcaacgagtttatagtttactacatggcccagtccagttggcagccaatcgattgcaaactaggtaagccgtaacacagtttttgagtcgcatcataacaagctatttttccc

SEQ ID NO: 30398 - DNA, 3920 bp, DROSOPHILA
caacgcttcgtgcgtggattaatggcgtgccactccacataaatgctccttggtttttgcttatttttaacaacataagcaccgcaaaagactcttgtaaccgaacatgtgtaaatagctggacaggatcaatcccatccatagtgcagtgattcgaaggagacgcgcgctaagcggtcatcgaaagcaggggttcgcaaaattgcaaaaaaattgtgccgcttcctgcccgttgtgaaaagtagctcccattggcggtgaggatggcggacatagtgtaccccaccggatgccggccgctggtcgaggatttgggcacagacgagctgataaggcgcctcaagaccctcgccaatgttctgcagaccatggaccaggacgacaatctctaccagcaatacataccattggccctccatctgctggacgacttctttatgcaacatccatcccgtgatgtccagctcttaatcgcgtgctgcgtggcggatgtcctgcgggtttatgcgccagaggctccctacaaagagcaagatcaaatcaaaactatatttaagttttttatcaagcaactgcacggtctgaaggatccgcgcgatccctctttcaagcgttacttctatctgctggagaaccttgcttttgtcaagtcttttaatatgtgtttcgaactggaggactgccaagaaatcttccaagacctgtttagtaccatcttcaagattgtcaatgaccagcacagtgtcaaggtgactaacttttttctagatgtgctaagcccgttgatcacagaagccgacaatctgtcggtggaattgttggatctcattctgattaacatcgtagagccgtacaaatctaacaacaagtttgcctgccaattaacagaacaacttctcactaaaacgggcgatgctctcgagtccaccatcaaaatgttctttaaccgtgctctggtcatggataagccaaacacaaaactgtccattacaaacaaaatctatgatatcatttacgagcttaaccgcatcaatgcaggcttgttgtgttcagtgctacctcagctggagaacaaactgctgtccacggacgatgctgagaggctaaaggcaaccactctcttgtctcgtatgttctccgaaaaggactcgcaactagcgaaaaagtaccccaacctgttgaaaatcttctttgggcgcttctgcgacatcaccgaaccagttcgcatcaagtgtgttcagtcatccatgcacttcctgctcaatcacccaagtcttcagcacgatatcaccgagaaattgcggcttcgaaatcacgatcttgacgaagtggtccgccacgaggtggtaatggctattgtggaaactgccaagcgcgacttcaccctcgttctcgaagcgcccgatctactagaaattgtgcgcgagcggacgctagataagaagtacaaaattcgcagggatgcgatgaatggtctggcctacatctacaagcgcgcaatttgcgaacccaacgatctaagcactggccttaaggtcagggttgactggattaagaacaagatactacatggatactacaaagtgggcttggaggaccgcctgcttgtggaacgcctacttatcacctgcctggttccctataaactagctccggaagagcgcatgaagaagctatatcatttgctaggcgatctcgatgccaatgccaccaaggctttcgtcgagctgcagaagaaccaaatgaagacacgcaatacggtcagtgattggatcaagctacaccactctaaggagttcacgccgcgcgtacttagtcagctcagcgccaagcaggccaacattgccaaactgcttccagatcccctaaaagcggcagagtacctaacccagtttagcaacaacctgcgaaaagatgctcagctcctacgatgcattaacattgtccttaaacgcgacgtaagctgtcgggagtgtgctgacacgatgggagttctcctgaaaaagcttggcgcccacgtccaatcgaatctgtattacaacacagttaagatgctgattgagcgcgtggcatcagtgatggtggacaaggagtctattggcgtacttattagcctaattgaacaatgcatcgagaaagggtccatgtgtgaagagatcggaatttcggctcaggaagcgggcgagcgcggactcaagttgttggccatgctttcatacgtcttttcggctcatttcttcaccgatacttcgctgcgtcatttaatttccctgctcagttacgagcaggattatgttgcaccactggtgctaaagacactaactcatctggggcgctatcagccactcattgacgaccctacaccggctattctcgacgagctggctccggtgtgcaaggacttcgcacttattggaacccccaagcaagcaaagcacgcggtgcgatgtattttcgtaaacagccagtcgtcggcttccactgatggagcaacaagtggagctggaagtgcgtccacaactacacaaacagtgcatcctattttcaacgagatcatcgagacgcttcgcctaaaactgacaccaaactgtgagcatcagcgcacaaagattgtgaccttgggtcacattgcctacaatatgccacaggccttcctaacgcccattaagaatatgattgcgcgacgaattgtcaaagagctgcttatccaagaagttcctgcgcagcgagactacgaactgccagaggacagtgattggtgtgcccaagagaaactaccgccggacactctatgtaagctggatgcgctcaaggctatggccaggtggcttttgggattgcgtaccgatgagcacgctgcccagaaaacattccgaatgctggcggcgtttgttaaccaacgaggcgatttgctcggccagaaccgtctttgcggtgccgagaaatcttggctgcgcctcggggcagcctgcgccatgctcaaagtgtgcgaacaaaagggcgtaggtgatcagtacagcgctgagcagtatttgcagctttcccagctgatggctgatccggtgccagaagttcgggaaatctttgctcgcaagctgcacaaaggattaagcagaagtttgcccaggaactgtttgccgctggacttcatgggcttgtatgtgctggctggtctagagactgagaggaaattgcaagaccttgtgcgtcactatgcagaaacggatgtaaacaaacggcgggaatatctcaagactgtggctatgacatctcccgacagctcaacggagtcacaatcattacacatactacctgactacatgctggctttcgctattcccgtgctggtccacgatccacgcttcacgaatcacgaggactacgtacagctgcgcaagatggagaagtgcctgcgtttcattctggagccgctgatggccaaacgagaaacgtttgtccatagcttctacaagcagctgctgcagctgataaagcatcgcgagttcagtctggggtcggacaagcgcgacaactataaaatgtgggcgctctgcgatcttgccatgtacattatcgactccaagttcagtccatttgatggcaacacgagcaccttttccatgccgctggctttgccagaaatgtattataaagagcctgccgttgcgaatttccaaaacaatgacgtctatataccgctggacgtgtatacgctgggagccaaatccacgagcaaagctgccgcaacagcaatgacaacgtcgcgagcagcagtggctccaaagagaccggcggaacagtcaatcatggatgatgaaaatccgcaggagaacaatctgttcgacaacatacgagcggctgacactacggagcccatggccaaacgaacgcgcgcaggagccgcttcagccaaatcatag

SEQ ID NO: 30399 - protein, 1218 aa, DROSOPHILA
MADIVYPTGCRPLVEDLGTDELIRRLKTLANVLQTMDQDDNLYQQYIPLALHLLDDFFMQHPSRDVQLLIACCVADVLRVYAPEAPYKEQDQIKTIFKFFIKQLHGLKDPRDPSFKRYFYLLENLAFVKSFNMCFELEDCQEIFQDLFSTIFKIVNDQHSVKVTNFFLDVLSPLITEADNLSVELLDLILINIVEPYKSNNKFACQLTEQLLTKTGDALESTIKMFFNRALVMDKPNTKLSITNKIYDIIYELNRINAGLLCSVLPQLENKLLSTDDAERLKATTLLSRMFSEKDSQLAKKYPNLLKIFFGRFCDITEPVRIKCVQSSMHFLLNHPSLQHDITEKLRLRNHDLDEVVRHEVVMAIVETAKRDFTLVLEAPDLLEIVRERTLDKKYKIRRDAMNGLAYIYKRAICEPNDLSTGLKVRVDWIKNKILHGYYKVGLEDRLLVERLLITCLVPYKLAPEERMKKLYHLLGDLDANATKAFVELQKNQMKTRNTVSDWIKLHHSKEFTPRVLSQLSAKQANIAKLLPDPLKAAEYLTQFSNNLRKDAQLLRCINIVLKRDVSCRECADTMGVLLKKLGAHVQSNLYYNTVKMLIERVASVMVDKESIGVLISLIEQCIEKGSMCEEIGISAQEAGERGLKLLAMLSYVFSAHFFTDTSLRHLISLLSYEQDYVAPLVLKTLTHLGRYQPLIDDPTPAILDELAPVCKDFALIGTPKQAKHAVRCIFVNSQSSASTDGATSGAGSASTTTQTVHPIFNEIIETLRLKLTPNCEHQRTKIVTLGHIAYNMPQAFLTPIKNMIARRIVKELLIQEVPAQRDYELPEDSDWCAQEKLPPDTLCKLDALKAMARWLLGLRTDEHAAQKTFRMLAAFVNQRGDLLGQNRLCGAEKSWLRLGAACAMLKVCEQKGVGDQYSAEQYLQLSQLMADPVPEVREIFARKLHKGLSRSLPRNCLPLDFMGLYVLAGLETERKLQDLVRHYAETDVNKRREYLKTVAMTSPDSSTESQSLHILPDYMLAFAIPVLVHDPRFTNHEDYVQLRKMEKCLRFILEPLMAKRETFVHSFYKQLLQLIKHREFSLGSDKRDNYKMWALCDLAMYIIDSKFSPFDGNTSTFSMPLALPEMYYKEPAVANFQNNDVYIPLDVYTLGAKSTSKAAATAMTTSRAAVAPKRPAEQSIMDDENPQENNLFDNIRAADTTEPMAKRTRAGAASAKS

SEQ ID NO: 30400 - DNA, 6491 bp, DROSOPHILA
tggctattcattcatttcgtacaacagggtaaacaaaattggctcaagtgcgtaatctcaaaattgctaggggaaaagcgcgaaaaatcacggcactaaatgttacaatggtttgcgattactcttgttttttttgttgctgcttatgcctagcctaatattattttaccataatattttgctaaattaatataatgtaaataatatttcaagctgtgtgcagccggttgacttaaattagctctgcacggtaggcgtcgttccctctcacgccgggatgtgcaagtgttgtggtgtgttttgtgccttggccgctcaaaatccggctaaaatcccgcccaggtgcggtgtgaactacgctcagtcccattccccgatgaacatgcgtggcgtgggcacgtagccgcgcgttggcagcggtaaatggcgtccgtagatgtgattgtagggtgattcaacaagctccgaatctacaagaagcacagaaatccgtggttaaaaatcgggtgcgtgtacaattgtcgggataattatgtgtgctggggtgggtggattctattggtagacccaagcgggtacttggttgtaatctggtgaaggtattatctgtttaattgcattatctcttttttgggatataatgtaatgtaagtgtattattccacagattacaacccactcgtttgaactttggactacctctaaaatcagtaacccactcccacttggtgtatgtacatttgcgtttcgtgactgtccaggctagaggagtccaaggtgctatgttagtaaaagtatcgtacagtttagtggttctgttcaccgggcaaggaggtaaccgagatgcgtttgtgggtataatatagcatatatgtatgtacagccacccatcatccgctccaaggggatagggcaacaaaaaacaataactaatatcgatgtctgggccatataacctcgtttcgatttagagcaagcccatagaaattcacgtgtccgtttagtagtcgagtatttggattttcttcaggctgaggctgcgcggcttgcggggctttaggtacccataaatggattccatgtcgctgatgtcaaggcggctggtactgcgtccggttctgctggccgtcggcggaggagcagaaggtgccttactaaccgcagttgcattgtttgcggctggagtggtggccagtggtggggccatcgttggcccaccgcctcctctggcctttcccccagccactcctgttgcgcccgctcccgctcccggctcagctccaccgcttccagatgttgttgcaatgctcgctgatgctgctgtcgctttcgctgctgctgttgttgctgctgatgcggctgctgctgctgctgcatttgcggctgccgctgctatacttttgtttttactattgaaataatttttgcttttcaacatgtcctcattgtcttgcttggcgttcgttagctgtcttttgtgctggttgttgctgctgttgttgccgttgccatggctgttgccattggtggcattgtcatatctttgtcttttgtcagcgttttgagcctgctcctgtcgcttgccgccccgccaactgggcactggcagctgtggcttcttgtggcactggcccccttttgctactgccgcactgcgtctcctgtccgagtagtcgatggtgccgcgcacgcggtcatagatgttggtcgccgacggcgccttcaccgcaatccgctttctgccgccgtacatgtacagtgagccctcctcgttgggctgttcgaagaagctctcggtggactgtgacttggtgcgcagcacggccggcgcctgcagctggcggagatgggagcgatccatgtacatgtcaacggtttcggtgcccttgcggcgcggtatgttctcggtcaagcccaggtcatcgtccaggtcgaatgccatgtcgaagtcgtcgtagtcgtagcagtcgtcgtagcgttcgtttgtgggttccgtaggttccagctccagcaccgagacatcgctctcgctgcaccacttgaccaccgccggccggacctcctgctccaccaggcttccacttagccgctggtgacgcctcagctgctgctgactcaggctcctttgcggacgtggcggaggaactgcaccacagagtggagccagcgcatagcagctcacgcaattgcaggcggagctctcctccggcgcagaacgacgggtggagtggcgccgtgtcacccggcgagccacagagtcctccaagttgtcgtagtacggttgttgctgctgttgcggctggtgctgcactgattgcagcggtgcagagtgttgctgctgcaagtgggcgtgccgctcgcagcggacgtggacatgccggtggagtctgtggtgcggatgtgcgtgcggattcgagtgcggatgcagatgcggatgtggctggtggctacgtgcttggttagctgtgctttgtgtcttggtggttgctgttgcagtggttgctgttaggtccgttggcagtgactgtggttgttgttgttgttgatgttgcatttgcatttgcagttgctgatgcatttgcatctgcagtgcgtgcgatttgtgtgattggtgggcggcgttgggcccaccctgtttataaatacctatgccgctctcatagctgcgagtctgccaaatctggtggtgctgctgctgctcccgctggtgacccgcatggtggtgctgtgccgcatgcgcagccgccgccgcggccatcagttgctgctgttgaatgtgatggggatgcatgccgcccaaatggttgtggatcatcgacgttttcttctggctgagcgtgctgatgccgccgttcccgatattgttcccattgccatcccgctgatccttggcaacctgagcgggtatcggcttgccggactttacaaagttcggaactcgggcccgcaggccgcagtagtagggatcatctgtagaaagataagtttagttataatggttgatatttttttttttaaattattatcctctttatactaaggaagtccttgctcgaaggaattttatctatatatgcatattagaaaagacagaaaggagggatctcgatcttaccatatttcttattatctttgcccttgtcagatttaccgcgagacagtttgatacgggtctccaaatcgatatcatcgtagtccggctgaaagaaaaatagaaagaaatgtgtgccgtgaaattagaaggaatgtgaccaggtgatgatatctccgatcataattttccattcacagttgcgcaaggtgtgcccaccaggttcggtacaacggaccactagtgctccactccaagaggcactgaatcggtcgttgggcccaattggcaatcgagctgcaaagcaatccggcggcattccgcgcatattaattacacgcgattcgtttgcagttatttgcggccagtcgctgctgctgaaattcgaatattattgagtgcaatgcaatgccaattgctcagtgaggcccaacggcgaaatcatcgccagcaatgcagccatgcagccatgcagccatgcagccatgcagccatggagttccatgagggagacccattttccattttgcaagtggccgcattgcgcatatgaccaagcatgggcacccaaactaaataactagccaccaaaagtaactcaacccagcgagtcgacaggttgccacacttcttctcctgcgccggcgtggcttttattactcgtgttttggcgcttccaaatttgttccaacactttgccagcaaatgaactgcacttgggcaatctcccacacttcggttgcttctaagtatgccataaaaagtgtatattacgtgctccacgatcgcaccaatgtacatgcatacatatatgttcattttgcattgaatactgttttcacaaagggagttacttttaaaacgagctgaaattattatcatctttaaaacgaactaccagacataaatatttagaaatcaggcacatttaagtgtctttaagttttactacgttgaacttttcttaatatcttggaatattgctatttttatattgaatcattatgacgttaaggcgccggtttctctatagttcgaactttaaagtatttaattattaatggtactaggaaaatataatttatccacacgtcgtatacttattttttggtacccgctgttctcttacctttggaatcagatcgtgcgagtagatattatccctgggcggtagtttcggaggtttctcgctgcgcttgtgggccagttgttgcgtctgcagcagcagctgctcccgcgtggcggccacatgtcctccaccgttgccattgagatgcttgcccagctgttgctgcggatgcagttgcgcctggtggccactgccgaagccagagctgccggagctaccgccacttccgttgccagcgacgctgtagggatcctcgtcgggaatcggaatgcgcgggcggttcttgatgtccacaatgggacgttgcactggataggaagagaatatcaagaggatatcattgtatattacgcttaagaatatagaagactcaaatctgcatgggacatggctttgatgaacccacctggtggcagtttgctcttcagcatatccatggccaccacattaacgatgagcacccagatggggcactccaagatgtcgttctccgacttgacaaacgccaccgcggagaggcactgcgtctccaagcggcggcgatccggataggcgcgacgcagttctcgattcacattcgactggaacttcttcatgtcgaagagctggggagaagaacaatgcaacgctcattagcatttggaatggatgtgaggtgggatcgcggatcgcgataaatggcaaccacgtacaaagtcccgtcccactcaccttgactattttttcggattcgagcgcctgatttggcagctttaagatctcggcaccgatggaggtctcctcgttgggactgctggcggtactcttcacgtagacattgcttttggcgtaccgccggatgaggatgttcccagcgtcatccattttgattttaacaccctataaacgggtaagttcgtgaatttgatgcggtaattaaatcgtttattttttttttaacgagcgatgattccattgattcgggaaattaacaaatctttcttttatgcattaaagacaaagtatcgaacgcaataaagaatactcgaaatgtctatttaaaacaatgtctcccataatcgtatgaaaatttaatttatttttcgcattagatacaagcttaaagtaatccgtaatcttcacgccatctgcccgctaatggaaatttctcgtcgatttattggggtttattgtccaagctaattaaaccgatgtcgctttgattgtgccataaattggaaacttacctgtccgatgacgcgcttcatctcgtcggtcttctgatccctcatcggattgtcgaagccgcacagtccaattctgcaaaaaaaaaataataaaaagaaaacaaaataatgtagacaatgttgtgcaatcgttaaagagccgtaatgagcgttttattaattgcaaatcaatcagctgccgcatttaaaatcgataagccagcatgcccaaaaatgtggccaaaatgatttgccacttggcgccgttcactttctggaatcgaatcgaggttgctgcctcgagtgactcacaacatactaggttacttggtttcttggtgtctgtcttggcccgtgtgcctgtctatgccacattttgttgcactaaacgtttgacaaaacatttaccatgggtctggctctttcgcttttgggccacggattttgcgtttttgcctgccgttcaggcccaagagaactgttcaatcgactggctcaaatgcagactgacagtgatttatgccacatgcggcagagtgcggcagctgcagcccaaaatttattaaataaacatgtcatatttcggcgccaaggccttaatttttatcctaattgtctaaggtctaaaagctgagtcattaacagttgaattttgcgaatttgtttagcaatgaatttttctatatttaccgactgattaattagctgatatatggtgatatataacattgtttacttaaccacaacataatcaatgcccttaaatcaaagttgcaaagtgaatggttattaggattgcgccgtgtaatttgtattttccaaaatagggtttattttcaaagctcacaataaatctggctttccgcagttgggcacaaacaatccagctaagccgcagttcggtcttaactaaatgatgaatgttcgtttttttgttttttttttttttaagttttcgatgattttttctttggtttttccttcggcgctaaggtcgccgaaaatgtcggcagaaatgctaacaagaagcggcaagaggaagccgcagagccaagacaatgaagcc

SEQ ID NO: 30401 - DNA, 2775 bp, DROSOPHILA
atgagggatcagaagaccgacgagatgaagcgcgtcatcggacagggtgttaaaatcaaaatggatgacgctgggaacatcctcatccggcggtacgccaaaagcaatgtctacgtgaagagtaccgccagcagtcccaacgaggagacctccatcggtgccgagatcttaaagctgccaaatcaggcgctcgaatccgaaaaaatagtcaagctcttcgacatgaagaagttccagtcgaatgtgaatcgagaactgcgtcgcgcctatccggatcgccgccgcttggagacgcagtgcctctccgcggtggcgtttgtcaagtcggagaacgacatcttggagtgccccatctgggtgctcatcgttaatgtggtggccatggatatgctgaagagcaaactgccaccagtgcaacgtcccattgtggacatcaagaaccgcccgcgcattccgattcccgacgaggatccctacagcgtcgctggcaacggaagtggcggtagctccggcagctctggcttcggcagtggccaccaggcgcaactgcatccgcagcaacagctgggcaagcatctcaatggcaacggtggaggacatgtggccgccacgcgggagcagctgctgctgcagacgcaacaactggcccacaagcgcagcgagaaacctccgaaactaccgcccagggataatatctactcgcacgatctgattccaaagccggactacgatgatatcgatttggagacccgtatcaaactgtctcgcggtaaatctgacaagggcaaagataataagaaatatgatgatccctactactgcggcctgcgggcccgagttccgaactttgtaaagtccggcaagccgatacccgctcaggttgccaaggatcagcgggatggcaatgggaacaatatcgggaacggcggcatcagcacgctcagccagaagaaaacgtcgatgatccacaaccatttgggcggcatgcatccccatcacattcaacagcagcaactgatggccgcggcggcggctgcgcatgcggcacagcaccaccatgcgggtcaccagcgggagcagcagcagcaccaccagatttggcagactcgcagctatgagagcggcataggtatttataaacagggtgggcccaacgccgcccaccaatcacacaaatcgcacgcactgcagatgcaaatgcatcagcaactgcaaatgcaaatgcaacatcaacaacaacaacaaccacagtcactgccaacggacctaacagcaaccactgcaacagcaaccaccaagacacaaagcacagctaaccaagcacgtagccaccagccacatccgcatctgcatccgcactcgaatccgcacgcacatccgcaccacagactccaccggcatgtccacgtccgctgcgagcggcacgcccacttgcagcagcaacactctgcaccgctgcaatcagtgcagcaccagccgcaacagcagcaacaaccgtactacgacaacttggaggactctgtggctcgccgggtgacacggcgccactccacccgtcgttctgcgccggaggagagctccgcctgcaattgcgtgagctgctatgcgctggctccactctgtggtgcagttcctccgccacgtccgcaaaggagcctgagtcagcagcagctgaggcgtcaccagcggctaagtggaagcctggtggagcaggaggtccggccggcggtggtcaagtggtgcagcgagagcgatgtctcggtgctggagctggaacctacggaacccacaaacgaacgctacgacgactgctacgactacgacgacttcgacatggcattcgacctggacgatgacctgggcttgaccgagaacataccgcgccgcaagggcaccgaaaccgttgacatgtacatggatcgctcccatctccgccagctgcaggcgccggccgtgctgcgcaccaagtcacagtccaccgagagcttcttcgaacagcccaacgaggagggctcactgtacatgtacggcggcagaaagcggattgcggtgaaggcgccgtcggcgaccaacatctatgaccgcgtgcgcggcaccatcgactactcggacaggagacgcagtgcggcagtagcaaaagggggccagtgccacaagaagccacagctgccagtgcccagttggcggggcggcaagcgacaggagcaggctcaaaacgctgacaaaagacaaagatatgacaatgccaccaatggcaacagccatggcaacggcaacaacagcagcaacaaccagcacaaaagacagctaacgaacgccaagcaagacaatgaggacatgttgaaaagcaaaaattatttcaatagtaaaaacaaaagtatagcagcggcagccgcaaatgcagcagcagcagcagccgcatcagcagcaacaacagcagcagcgaaagcgacagcagcatcagcgagcattgcaacaacatctggaagcggtggagctgagccgggagcgggagcgggcgcaacaggagtggctgggggaaaggccagaggaggcggtgggccaacgatggccccaccactggccaccactccagccgcaaacaatgcaactgcggttagtaaggcaccttctgctcctccgccgacggccagcagaaccggacgcagtaccagccgccttgacatcagcgacatggaatccatttatgggtacctaaagccccgcaagccgcgcagcctcagcctgaagaaaatccaaatactcgactactaa

SEQ ID NO: 30402 - protein, 924 aa, DROSOPHILA
MRDQKTDEMKRVIGQGVKIKMDDAGNILIRRYAKSNVYVKSTASSPNEETSIGAEILKLPNQALESEKIVKLFDMKKFQSNVNRELRRAYPDRRRLETQCLSAVAFVKSENDILECPIWVLIVNVVAMDMLKSKLPPVQRPIVDIKNRPRIPIPDEDPYSVAGNGSGGSSGSSGFGSGHQAQLHPQQQLGKHLNGNGGGHVAATREQLLLQTQQLAHKRSEKPPKLPPRDNIYSHDLIPKPDYDDIDLETRIKLSRGKSDKGKDNKKYDDPYYCGLRARVPNFVKSGKPIPAQVAKDQRDGNGNNIGNGGISTLSQKKTSMIHNHLGGMHPHHIQQQQLMAAAAAAHAAQHHHAGHQREQQQHHQIWQTRSYESGIGIYKQGGPNAAHQSHKSHALQMQMHQQLQMQMQHQQQQQPQSLPTDLTATTATATTKTQSTANQARSHQPHPHLHPHSNPHAHPHHRLHRHVHVRCERHAHLQQQHSAPLQSVQHQPQQQQQPYYDNLEDSVARRVTRRHSTRRSAPEESSACNCVSCYALAPLCGAVPPPRPQRSLSQQQLRRHQRLSGSLVEQEVRPAVVKWCSESDVSVLELEPTEPTNERYDDCYDYDDFDMAFDLDDDLGLTENIPRRKGTETVDMYMDRSHLRQLQAPAVLRTKSQSTESFFEQPNEEGSLYMYGGRKRIAVKAPSATNIYDRVRGTIDYSDRRRSAAVAKGGQCHKKPQLPVPSWRGGKRQEQAQNADKRQRYDNATNGNSHGNGNNSSNNQHKRQLTNAKQDNEDMLKSKNYFNSKNKSIAAAAANAAAAAAASAATTAAAKATAASASIATTSGSGGAEPGAGAGATGVAGGKARGGGGPTMAPPLATTPAANNATAVSKAPSAPPPTASRTGRSTSRLDISDMESIYGYLKPRKPRSLSLKKIQILDY

SEQ ID NO: 30403 - DNA, 2850 bp, DROSOPHILA
acagatagccggcaagaggtcttatcgaccacttttcctgatgaccacgatcacagtgggtggactgtggcccaaagcacttgtgcgagtacaaacatacatatctgaaatgattagttaatccagaaaatggcgaacagaaacgcaggaccgcgggccgtctgaaactgcacgtatctcaaacacggaatacgcgcaatattgggaactcttcgtgtcggacagattcttatcacttatcactggctgacagcgagtcaaccagctgttgttgttgttggcactccgggttatctaagtgaatttacttgcccttatcagctatcgtacggccaaagaaacggtcaggaagttgtccggacggagacagctacatttgtgagggaaaaaagcgagtgggtgcaactgagagatgttcatttgaattcgtttagtttattacttagacattagacggttaaaaaagacacaagctactggacgccggtgacaacttaaaacctaattcacatgcacgtttgtttacaaattttcctagaacagttcatttacataactcgctgggaatgctgtacagatacgtgtgcacagatacacaattgcacggatgtcgtcgcggcatcgctggttgtcaagcttctttctacaaaacttacactctacgctagattattagattctcgtttagggctggttctgagatttgtacacagcatgcttctatttacaagacagcagagttttgcgttaagtacagtggaatctttgagtttagcactagattatgaaatctgcgaggcgggcgaaggcgagccgttcgttcctcacgacagcgccacctccagacacatcatgatcaggaagccggatacagtgccccacgtggcgatcgttccatttccgctggcatgagcctccggcagaatgtcgtccgacacaatgtatatcatggctccggccgcaaaagacaaggcgtatggcaggatcaggttggcaaaggtcaccgccacggcgcccagaactccaaaaatgggctccaccattccggacagctgtccgtaccacagagcccgcttcacgctgaatcctgcggcatgcagtggcaagctgacagccaatccctcggggaagttttgaatgccaatgccaatggccaaattgcgggcgctctcaaatgtcgatgagttcgtggagccaatggcaccaaagcttacgcccacagccagcccttctggaatgttgtggaccgtgatggccacgaccaaaagcataatcctcttccactgggacagggcgtcctcggcgcgctgctgctcctcaggcgtggtgtaggtgcactgctccatctcgttgatgctagctcccttctttcggcgtctcgattcgccgctgtgctgcacgctaaggcagtcggagaagctgtccagactctttgaggccaacctatcgggggcaactccattgcgcttagagtcctcgatggctatgtccgccttggcttttgattgcgtcatctggatcatcatgttggtgctgttaaggcccaggtatgacatcaatttgtcgcatccgtagacgaagatcgatcccaagaggaagcctccagcgacgggcagaaaggcgtatactccgtacaaatgggaactctcggccatttcgatggccggcttgaggagtgaccaaaaggaggctgctatcattacgccagctgcgaatcccagggcggcgtccagagacctccgctggttaccccggacgaagatcactagggcggcgccagcggcggtcagtccccaggtaagcagggtgcccagcagagcctgcgtgacgggtccatagcctggaatcatcttgcacagttagagctgcttttccgtgcccgtcaccggctggtatggaattgtactcccgagatttattcgcgtgtacacagacagggcgaacaagttttcttaattgttgcgcagcaattgtttacccgcccacagttggaaatgtgccacgttcttgggcactgattgctgggtaaacaaaacaactgagaaccaatttcaatggagttttagattctgtgtatgtttcaagggaatctctggaacacttgttgctgcttatcgtattgtttttgcggaatgctattgcgtttcgggcggcggggcaatttcggggggacgcgtaatactgacgggttgataaaaaggtctactagctctactagagcgcgtcggaaagtgatgaatgagccgctgactgagctgacagccccacaaaaagcaatttttatagggccgctggctgtgtgccacggcaatcgatagtagtgttatcgctggcgtctatcgatagacggcggccgctagggatggcactcgcaaggcgcatttattcaaaattcgttaccgaactctgctactaaatcattattgctcacctcggatttgacttgtaattttattaaatatcatttgatattcatttaacgcataagcgagcactatcgattgcgacttgatggaaccatcctcttgggcagcgagatggtctcattgtagataagaaagttttctatttaaacaacgggccagatatcacgtagttatgaacaaataaaacagtgttttctagtcaacatgactgaaaaaagtcggcagcatccgcagcatcaacaataacaccaaagggcatgagcttgctcaccgtagttgcagctacgcagcgttaactaattttaaaatcccttaattcgcagcgcgttaagttcatgcagccggactccgagttgaatcagcgaccccgcaaacgccaaggaacacccacatcctccaaggacaacgagccaggatcgactaa

SEQ ID NO: 30404 - DNA, 850 bp, DROSOPHILA
atgattccaggctatggacccgtcacgcaggctctgctgggcaccctgcttacctggggactgaccgccgctggcgccgccctagtgatcttcgtccggggtaaccagcggaggtctctggacgccgccctgggattcgcagctggcgtaatgatagcagcctccttttggtcactcctcaagccggccatcgaaatggccgagagttcccatttgtacggagtatacgcctttctgcccgtcgctggaggcttcctcttgggatcgatcttcgtctacggatgcgacaaattgatgtcatacctgggccttaacagcaccaacatgatgatccagatgacgcaatcaaaagccaaggcggacatagccatcgaggactctaagcgcaatggagttgcccccgataggttggcctcaaagagtctggacagcttctccgactgccttagcgtgcagcacagcggcgaatcgagacgccgaaagaagggagctagcatcaacgagatggagcagtgcacctacaccacgcctgaggagcagcagcgcgccgaggacgccctgtcccagtggaagaggattatgcttttggtcgtggccatcacggtccacaacattccagaagggctggctgtgggcgtaagctttggtgccattggctccacgaactcatcgacatttgagagcgcccgcaatttggccattggcattggcattcaaaacttccccgagggattggctgtcagcttgccactgcatgccgcaggattcagcgtgaagcgggctctgtggtacggacagctgtccggaatggtggagcccatttttggagttctgggcgccgtggcggtga

SEQ ID NO: 30405 - protein, 283 aa, DROSOPHILA
MIPGYGPVTQALLGTLLTWGLTAAGAALVIFVRGNQRRSLDAALGFAAGVMIAASFWSLLKPAIEMAESSHLYGVYAFLPVAGGFLLGSIFVYGCDKLMSYLGLNSTNMMIQMTQSKAKADIAIEDSKRNGVAPDRLASKSLDSFSDCLSVQHSGESRRRKKGASINEMEQCTYTTPEEQQRAEDALSQWKRIMLLVVAITVHNIPEGLAVGVSFGAIGSTNSSTFESARNLAIGIGIQNFPEGLAVSLPLHAAGFSVKRALWYGQLSGMVEPIFGVLGAVAV

SEQ ID NO: 30406 - DNA, 3397 bp, DROSOPHILA
tggtcttgtgggacaccgcactcaggattcggtcaaggatttccagaatcctttgatcactgcctactacagcgtggactaccagaagaaccccaagggaacgaactactggcgcaaccgtgtgctcaaggtggccaaggagtttgtgggtcaaatcaactttgcgatcgcctccaaggatgacttccagcacgagttgaacgagtacggctacgatttcgttggcgacaagccagtggtattggctcgcgacgaaaagaatctcaaatacgccctgaaggacgagttctcagtggagaatctgcaggactttgtcgagaagctgctggcgaatgagctggagccgtacattaagagtgagcctattcccgagtcgaacgacgctcccgtcaaggtggccgtcgccaagaacttcgacgatctggttatcaacaatggcaaagacacgctgattgagttctacgccccatggtgcggccactgcaagaagctgagtcccatctacgaggagctggccgagaagctgcaagacgaagatgtggccatcgtcaagatggacgccaccgccaacgatgtgccgccggagttcaacgtgcgcggcttccccaccctcttctggctgcccaaggacgccaagaacaagccagtcagctacaacggaggtcgcgaggtagacgacttccttaagtacatcgccaaggaggcgaccacagaactgaagggcttcgaccgcagcggcaagcccaagaagaccgagctctaagctgcacgccgggtagaactggccgccaactagcatttccatatttttgtaaaatcgaatgcattctccacaatacttgagcaaaaaatgtattaaattatttgatagtgatgaaacgcgtacgaacacaatttgatgattatgtcgcaataaacttaaatcttcatttaattagttaaccacttttgttctgctatttcggtattcatatttctttgccagttctcattgttattgttaaactatagaagacatggtttgcaaattcggtgtcttacacatatcgttcgtgtgatcgtccagcatcatccggaaccagtccgaaacgaacgtgtactgattgcgccctcgcaagcccttgtatgatactgttccttggctcgcgtcgaactgaaaaaggtaaacggtgctggggcagtcgatcggcgccataacttgggaaatacaattgagtaggtaaatcatgaagttggcgcacactgtgggcgaccaatctttttcctgtaaatgaaaaatttagtttcttaagttagtagaacaagaaatgttcctcgaaagttgcaaaactgggcgataaacttgcataaaatgcttgatttaagtatactaacgcaagacttccataaatcccgcaccaaagtcttttcaatgttgtgcacatgggcgttttcatcgcggcgggctatatagaggctttcgattcccaacagaaaacacttgacccaccacttaagggcctctgtgcgattgtgctctggccaatccagtcgactcatgaacatagggcgtatctgcaggtctacccagcttagagcagacccattccttaaaattgaaaactaaatggtttagcaatgcagcttgtaagcctgggaagctttggcaaagacttacaatgttgtgcttggcatctcggctagtactggagaatcaaatagaactcgattaccattcaaatcaaaggaaaatacaccatgaaagcgtaaatgttcttcagaagattgattgtgctggtgcatcttaatgccgttttctaaaagaatacaaaatacgtgagcgatttgaagggccatggatgtttcatgagacttcataccaaaaacacaatgggttcgaagattcctaagccaaaattcttgcatggccctcttcagattgtcctgatcaatggggtcgggttgttcaacatcaatgcggcaaatgtacattgtgttgcgataccgggtgacacccaatgaccatccagtcttcttttcgtagggagcacacatcatcagctccaggacttcgctggtgcacactatattggcatttagctgtgcctgctggttgtttcttaccataacgtacatgtacgacgaagattctatatactggagcatgttgtccagaaaaatgttgggcttcttttccagcttcggcggtgaatctttgtaccgaagagaaatgggaaatttgatgcttggcggcaccacgacgtagggcactttttgagaatttggttcgaattgcccgattggcgaccaggcgaaccagccattcgaaacgggcttggtaatagttggaaataccaaattgtccttctcggcccaggagtgagcccggatgtttaatattgtgtaattagaattcatcttaaaaacgactttggtaagattttgtggtgaagacggaagactttgactcgcgctcggaaaacggttgccttggacatatggcaacgccaaacgagtttcaattttttgaatgaactatcaaaaggatttaagatgattagatggtacaataaatcaaggttcgactatttttaaagaaataaaattggttcctaactataaatacaatatatatattaatccaaaataaataaaaataaatatacatatgtataagataataatagataaaaataaataaaaagttggacttgatatttgtaaaattattgataataatattctattaactccgtatacttctgttctatcgagtgaacactgtcggtcaaatgtaaacaccaggcacaacaacaaacaccaagcaaaacacgcatttagcgctgccagactaccgtggcgtgccggcaaaaaggtaaacaaacagcgagccctgccactacgttccgatcatatggtggacaacgaacagggtggtaccactggttgtgtttgttgcacgtgttttaaattcgcgtgtgttttgccattcattccgggataaagtactgcaatttaagctgaaaaaggttgaatattataaaaatatcacttaaaaatcagttgagtggatcctgttgagatggaggtgaacgtcagcaagctgcggcttggcgcccagcggttgctggagcttactgcgaacgaatctgaagacaacgtgttttcgcaaagtttacagaagtttatcaagaagcaggtgagttagctttgttggattgcagagtaaaaggcttaatcttgttcatgctttagaaatacgtgcctcaggatgtggagcgactattccggtcgctcagtgagcaactgcctctgcccgcttacacggtgccgattgccgcgagttttgaggagcagcttctactgttgctctccatggcgctccgatgggactccgctagccaaaggtttcatacgt

SEQ ID NO: 30407 - DNA, 1155 bp, DROSOPHILA
atgaattctaattacacaatattaaacatccgggctcactcctgggccgagaaggacaatttggtatttccaactattaccaagcccgtttcgaatggctggttcgcctggtcgccaatcgggcaattcgaaccaaattctcaaaaagtgccctacgtcgtggtgccgccaagcatcaaatttcccatttctcttcggtacaaagattcaccgccgaagctggaaaagaagcccaacatttttctggacaacatgctccagtatatagaatcttcgtcgtacatgtacgttatggtaagaaacaaccagcaggcacagctaaatgccaatatagtgtgcaccagcgaagtcctggagctgatgatgtgtgctccctacgaaaagaagactggatggtcattgggtgtcacccggtatcgcaacacaatgtacatttgccgcattgatgttgaacaacccgaccccattgatcaggacaatctgaagagggccatgcaagaattttggcttaggaatcttcgaacccattgtgtttttgaaaacggcattaagatgcaccagcacaatcaatcttctgaagaacatttacgctttcatggtgtattttcctttgatttgaatggtaatcgagttctatttgattctccagtactagccgagatgccaagcacaacattgaatgggtctgctctaagctgggtagacctgcagatacgccctatgttcatgagtcgactggattggccagagcacaatcgcacagaggcccttaagtggtgggtcaagtgttttctgttgggaatcgaaagcctctatatagcccgccgcgatgaaaacgcccatgtgcacaacattgaaaagactttggtgcgggatttatggaagtcttgcgaaaaagattggtcgcccacagtgtgcgccaacttcatgatttacctactcaattgtatttcccaagttatggcgccgatcgactgccccagcaccgtttacctttttcagttcgacgcgagccaaggaacagtatcatacaagggcttgcgagggcgcaatcagtacacgttcgtttcggactggttccggatgatgctggacgatcacacgaacgatatgtgtaagacaccgaatttgcaaaccatgtcttctatagtttaa

SEQ ID NO: 30408 - protein, 384 aa, DROSOPHILA
MNSNYTILNIRAHSWAEKDNLVFPTITKPVSNGWFAWSPIGQFEPNSQKVPYVVVPPSIKFPISLRYKDSPPKLEKKPNIFLDNMLQYIESSSYMYVMVRNNQQAQLNANIVCTSEVLELMMCAPYEKKTGWSLGVTRYRNTMYICRIDVEQPDPIDQDNLKRAMQEFWLRNLRTHCVFENGIKMHQHNQSSEEHLRFHGVFSFDLNGNRVLFDSPVLAEMPSTTLNGSALSWVDLQIRPMFMSRLDWPEHNRTEALKWWVKCFLLGIESLYIARRDENAHVHNIEKTLVRDLWKSCEKDWSPTVCANFMIYLLNCISQVMAPIDCPSTVYLFQFDASQGTVSYKGLRGRNQYTFVSDWFRMMLDDHTNDMCKTPNLQTMSSIV

SEQ ID NO: 30409 - DNA, 2231 bp, DROSOPHILA
caagtggacaatcaaataacccaagtaaacggctgcccagtaaacagcgaggagagttgggtgacatgcctgcagaactctctgaagctcaagccgggctactgtgtgagtgcggacttcgtgcagcttaacgacgaaagcagcgccatctcacatcatagcattgatggtcagctacagtgctgtgatgaactaaatccgaacgtaagctgcttcgaggtggtggaggacgcaaatggagatgtgccggtggagctgccgcagcatgtatgtctcaatgtgcgccgcactttggaggaggtctccgagcactgctcgtccggagtttgcaacgagggattctgcctacgaccgcttatacgaaatatcactgccataatgacgttcaagcgacagaattttcgcggagagaagctgccgccggtgatctatgtgggccatccatgggatgtcactcgaactgtggaggtatccgcctttgtgccgagatatagcttattaaaggcagcctggccggatgcctggctgctgctcctcaagtataacgtggtcttcagcataggattggcgttgatcaatgccattccctgctttggtttcgatggcgcccacattaccagcaccgtgatacacagcttcttggtgggcagagtggatcagcatgccaagagagatatcatctcgttgataatcaccagcgtgggttcccttctctttgcactggccctgcttaaggtggcctggttgagttttctgcgacccctgctttaagaactgaaatggaaaactgaaatggatcctgggagttcaactccctgcaaagacgctagactgctatttcaccttcacgaaacacacaaaaacacagcgaattgtagcacctcaaagattcgatagctttttgtcatagtccttagtcttaactcgtatttattttcgtacggttgtcgagctcaaaaataaaatcaaattaagctaagatttatgttcaagactgatcctatttgccctcgctcaccccgctcagttggaggctggtccttagttctgtgaggctgcgtctgccgtgctgaaggagcatcttgatggccacctcgtcactttgatggcgattcgtctggaagtcatgccgtgcccaggattttagctccagctggctgtttttgtcgggaacctgacgaatcgttcgaaatatttcccggtagagcttcagtacttcctggcgcagcataaactacaatgtaatcaattcattcaattattgttagttttattaatatatttggaaaaccataaaaatgatttaaacctgcttacctgcttcaaactaagtgatgcttttggtaacttggacatttctgcttaattgtttttttttctttatattttctagttgaattattattattagttattcttttagttttcaagttattctgtcattttaaaaattatttgtaattagtcaagaaaaatcataacaaaaacagctgatgatagtcagatgttagaattatagagaaggaccgattattattaagcttatactgaacaatcgatatattgataggcttatacaaatgcgctaaaatttaaaattcgaaaatttaataaaaataaataataatttatatacgtataatcgaagacttttttatagtgtctgaacttaatttgtatattcttaaaaataactttacctttcattattatagtttactaactttcaattagtttaattggttttcctacatgaaattaatgttgtttgtagtacaattcacctgttattaaagtgatcaattattatagggcaaaggaaaacaatttgtagcgaaagccaacagcaatttatgttaaaatctcatttcatcaaccgccactaatgagtcagtcgcagaaataaactaaattgttgtaatgtcctaacaaacttatgtttttgcgcattgatgcggcgtgggaacgaacgaagtgacatccaacactaaatttatctggctcgtgttcaaatcaaattaaattctcggcattaaatgccacatttatctacatgagcacattgtttgattggcacgccagctgctctgcccctgtttcttctctgattgtgatgttctacttaaacgattcaattgtttcttcgaccattccgtttatttaccatcaggtaccagactcgccaagggattggtactatctcctgatagttggtacttggcgtcggctag

SEQ ID NO: 30410 - DNA, 231 bp, DROSOPHILA
atgctgcgccaggaagtactgaagctctaccgggaaatatttcgaacgattcgtcaggttcccgacaaaaacagccagctggagctaaaatcctgggcacggcatgacttccagacgaatcgccatcaaagtgacgaggtggccatcaagatgctccttcagcacggcagacgcagcctcacagaactaaggaccagcctccaactgagcggggtgagcgagggcaaatag

SEQ ID NO: 30411 - protein, 76 aa, DROSOPHILA
MLRQEVLKLYREIFRTIRQVPDKNSQLELKSWARHDFQTNRHQSDEVAIKMLLQHGRRSLTELRTSLQLSGVSEGK

SEQ ID NO: 30412 - DNA, 3382 bp, DROSOPHILA
aacgatcaggaagaggatgaaaaggaatccataccaaagacaaatccagatggggacaccaacgcggcttcgccatcaatttcacaggaatcatcgtcttcaccacaacagacgcactgcatcgtcagggattctacgcagtccgaacccgaggcggacaaccagaagctgcccaagctgaagatcacacggctgcagaccaagcgaacactgattcaaaccaaagaggcggcggccgagtgtagtcgaccgctgcgcaagcgcaaaaggatcatcgactgcgatttccaaaaaatgggtcttaaggaaccggaaatggccaacgatggcgaacagagcaacggcagtagcaacaaggaggcggatgcggatccggaagcagagtgcaatatgagcggcagccacagcaacagtggtagtgctaaagctaaaaagtagacatagaccttaggatttaccccttaaaagtagtagaatgtatttatctatgtatgtgtgagtgtgtcagtgtgtttgtgtaagcggaaacggaaatggagtccagaggaggagaggaatgcagcaaaaggcacaaagtgcatgcggtactcagttttgattcttaataaactaaaatataacttattggataaaatgtgtttaattatttagtggatgtagtcctgactaatgcacttaagcaatgaaaagtatcctagatgctaaatattctttatatatatttttttatatactttaataagatacacttcaaaaaatattctttttcaagggtggtcaaagttcatctaagtaacaaatagctgcattgccaagccctttaattggcttcaaaaatattctaaacaaattcacaaaaaataactgaaccgaagcaattatcaaaaggttattacaaaatacatataaagtaaagctatttcaagaggatcgctaagccgttgcagtcagggtaatcagtgtctgttcctcattgtaacacttaagactaagtcatagttcagttgtagaggtcccacaatgatatctggccatccatgcccgctgctgccatgatgggagcatgccacatggccacctgttggctggagaaggccaagtccattacgccgccattcttgtgctgcgtaagcacggccagcggtcgcaggcttttccacgagaagatccgaatacgaccatcccagccggcactggcgaacaccttctgatcgggccgaatgcgaacgccattcactccaggattcttgatgcacagctccgagccgagctgcatttgcatcgatgagcgctgataactgaaactaatcaacttgtcggctgtaagaaaagaatagaactattatatcacgataatttgtttggacttaagctccaacttacttggaccacccacaatgccacgattcgtaactggatcgtagtccacagacgtagcatcttgggccaattccatcacatccaaaataacgctcgagctgatgtcccaggtgaggaagtgtcccgattcgtagccagcgagcaggaacagttgcgaggcgcactcgaagggcttgaagcaggtgacgctacccagtttgggcagttggggatcatctgggaccagtatttgcgtgggggccgctgcatccgtaacgtgaagcactccgatggacgattcctcgcagggatagaagagcagctgctcgttggtcttgctggtgttcgtgtgcaaggcagatcggcaaaagcccaggtgattgcctggaatactgcgctctttaacgtagctactgccgccgatggagaacatggtgatagtgccgcccttctcctgggtcaccaggcgatcaggggtgtggtgcagactggttatggggtcggatcccacctcaaagtgcagagcggagcggttggtctaagaaacaagttgttggttaataggatattgttaatataattaattaagtacaaacagagagaatacattattcacctctggtgtttaaaacttggcacctaacagcgtgatattgctataaatattacaaaaaagttggatcaaagatcggactatggttgcggctacatatacatatgtatatttatatatggatttatgtgtgtatatgcaacgtgaaagaaaattttaaagaattacatactttcgcttaatatcttaacttgcaaaccgcttttatagcataatatctaatgccaggttggcttgtgaattaacatagataacgtgataaagattctcacttgcaaatcccagaggaaaacgctgcctttgatggttcccgccagcaatcggtcgctctcctggaaacacagagagttgacggctcccatgtcgggggagcgcaggctgaatacaggatctggtggtagcacagccatatttagaactgctaaaattaattaactaatttgcgtttgtttttgtttggtctcgtggtagtgtggccgctgtgggaatatttaaaaatatatcagcactgttatcgatttgttatcgagcgcgctgccttactccccactggttgcgtgaatagtgcgccagagggcgccctgggcgcgccaatcggcaaattcaaacgactttttcgccagcagcaacgcaaaacgcatgccgaatatctcactttttcattgagtagcagtagcctctgcggagaaaacaagcttaaaattttacagcgaaaaatcattaagtcgctaaatgcgcggactattaaaaaacataacgtgcaccgcaggcttacgcggctttaatggactttgtcagcggtctctcgcctctcatgtggcctagacgctaaggcccgaatcgtaaaagacttgtcagccagattgcgcgcatttggccagattgcgagcgaagaaaacgggcccaaaaatatctacacatgtgtatttggagtccgttctgttctgccggccggccgaccgtccgtctgtccgcaacaaagatcgcaaaataaacatgccataagctcgttaatcaatgctaagttgacagttttaagtggttttagcgagccaacaccagcgcaagcggtcaataattcggagactcctgttgtgccgcaggctcatggctcaccatgatttacggtcccaaaaaaatgcgctatattttaattgagtgcaagaatttatttgaaattttttcagttacgattgcggcccaaaatatgaatttgaaaaggatgtttcttaatacttaaagcttgcttagatattttgttaaataatcaattgcaaggattgtcagggattcattttaattgcttggcagtggaataaaattatgttacatgttgttacattgttctatttaaattgtattacatttaaacaaataggaataagtaaattttaggctatttttaagcca

SEQ ID NO: 30413 - DNA, 972 bp, DROSOPHILA
atggctgtgctaccaccagatcctgtattcagcctgcgctcccccgacatgggagccgtcaactctctgtgtttccaggagagcgaccgattgctggcgggaaccatcaaaggcagcgttttcctctgggatttgcaaaccaaccgctccgctctgcactttgaggtgggatccgaccccataaccagtctgcaccacacccctgatcgcctggtgacccaggagaagggcggcactatcaccatgttctccatcggcggcagtagctacgttaaagagcgcagtattccaggcaatcacctgggcttttgccgatctgccttgcacacgaacaccagcaagaccaacgagcagctgctcttctatccctgcgaggaatcgtccatcggagtgcttcacgttacggatgcagcggcccccacgcaaatactggtcccagatgatccccaactgcccaaactgggtagcgtcacctgcttcaagcccttcgagtgcgcctcgcaactgttcctgctcgctggctacgaatcgggacacttcctcacctgggacatcagctcgagcgttattttggatgtgatggaattggcccaagatgctacgtctgtggactacgatccagttacgaatcgtggcattgtgggtggtccaaccgacaagttgattagtttcagttatcagcgctcatcgatgcaaatgcagctcggctcggagctgtgcatcaagaatcctggagtgaatggcgttcgcattcggcccgatcagaaggtgttcgccagtgccggctgggatggtcgtattcggatcttctcgtggaaaagcctgcgaccgctggccgtgcttacgcagcacaagaatggcggcgtaatggacttggccttctccagccaacaggtggccatgtggcatgctcccatcatggcagcagcgggcatggatggccagatatcattgtgggacctctacaactga

SEQ ID NO: 30414 - protein, 323 aa, DROSOPHILA
MAVLPPDPVFSLRSPDMGAVNSLCFQESDRLLAGTIKGSVFLWDLQTNRSALHFEVGSDPITSLHHTPDRLVTQEKGGTITMFSIGGSSYVKERSIPGNHLGFCRSALHTNTSKTNEQLLFYPCEESSIGVLHVTDAAAPTQILVPDDPQLPKLGSVTCFKPFECASQLFLLAGYESGHFLTWDISSSVILDVMELAQDATSVDYDPVTNRGIVGGPTDKLISFSYQRSSMQMQLGSELCIKNPGVNGVRIRPDQKVFASAGWDGRIRIFSWKSLRPLAVLTQHKNGGVMDLAFSSQQVAMWHAPIMAAAGMDGQISLWDLYN

SEQ ID NO: 30415 - DNA, 4061 bp, DROSOPHILA
ttaaaaaacttcttcattcgtgtttcgttcaccgtgttaaatttgtttgctaattggtttttggttcgttataaaattttgaaaatatatgcatatatgtatataatatatatcgatttttgtttgcatttgtatttattaattctcattgctaatatatttaattgatttagtaaatcaaaagttcgctacgcttttttttcagtgcattcgaaacgtttatttgcttgcacttgaatgtcgcgctttcataatttccatttcaacaattttagcattttgtttttcgattatcgctatcgcttcggttcatgaatttgatagtttatatagcacatactcgtaaataaaaatcttattgtcttttcatttataactatgtagcagttctgcgagttcgttgcctgcggcctcccgagtgcagttggtggagtcttcactgtactcgctactggatgaagtgcggcctgagttatcgttatcggctccacgccggcttccgcttccggtttcgcttatgtagtgtgcttttaggcgtggtgcaagtgcaaagtcctgtctgagtcgaggtactgaacagtaagcaactcctttgtatatcgagttctatatatgtttatatatatatgtatcagttcattagtaatttgaaatatttatccatacaattgttgttcttgttttcttgtctcgtttttgcctaaattctcttgaaaactgagtgctgagtataggtatgtctctctaaaaagagtctgttctggatttcactttcacaggattacgagttttaaaatgcatctaaaagatttcaatttggaaattattattttatcccatagaaactgattgtatgcaattgattttcacttgagattattatgttccgatttatttattcaattttttcactattaaatgttgttgcctgtgaaagtggaaattcgagcagttctcctttttaaagatctaatagccaaaatgcgtcaatccctgactactacgcaaatctctgatgagtgaaccaatgcagtgtcttattcggccttatcctgttcatgccgatgcgaatcggttccgtcaggtgtgaggtggtcgaggtgggcaggaacccgctgaagccgccgtcggagctgttgccgccgccattcccctccagatcaccatcgtagagaacgggatacacactgatgttgtccaggttatcgatgtcgatatctccgcccgcattgcgcacataggtcagctggtggtagggcgtggccattagcttcttggtgaacttccgtatgggtctcttcatggttgttgcggacgtgatgctggatgttgatgttgccgtgggagaagcctccgttagtgtgttgttcaggttgctgttgatgttcttgtccacgctgaagagtgacggtgcaacatgttgctccggtgtcgtggccgcggttgctgtcgtgctggtgtgttgctgctctggtgttgccaccaatgttgctagtgtgctgccacgtgttgcgagcggtggttgcactgtccacagtaacttgcgtggctgttgtggcttcacttcgttctcgcccgctagcaacatgtcggaattgtccaggtgatcttccctgctgttactgcgatgcctgcttggttgttgcgtgctctgtgctgtttcagtctgactggttgccgttggtgttgctttcgtgctgctgctgctcttgttgctgatgttgctcctggccagcggcgtctgctctatcaccagctgggagcccgctgtcgaggtagttgtggccgccgttgccgctattgttgatgttactgatgttgctttggtttcaattgtcgccgtggactccgcctccggatcgtccaccaactcggcctcgtactgcatcaactcggtgtcgttgccgcccatctcgggcgtcatggccgatgcctcggcctccatttcggtgatgtaggtggcccaggcgtcgtagttgctgctgctgctgctgctaatactgtcgtcagatgttgctgttgtgctgctgccgctaaagctatcgatcgtggaccaagtggaccagggatccaagctggaactgctgccgctgctgctgctgctattgtagatgtccaaatcctcgaaacccgtgctgctgctgctactgctgctgccgtacagggtgtcgtcggtgtagggcgatgttgctgccgtggcaagtagctgcaactgttgttgctgttgcgcctttggcctgaccttggcctttcttcgccggcccttgcgcttgctgctcattgctgctgttgtcgatcgtgttgctgttgccggcgatgtggctgcaacggttggtgttgctgctggcgctgctgtgggtgttgcaggcatcggattcgttggactagctgatactcgttgttggtgttgctgctgcttctgttgcttgcgccgcttctgcttcttctcgtgttgctgtcgtcgcagcagcagcgatggatcattgtgatgatgtcgcacctgatgttgctgctgttgctgcctctgcctgtttatcgctaattgctttttgttagtgctacttaaactagtattactattattaagaataacgttattattattattattatggccatgatgctcctgttgctgttgcaacttttgattttggttattcgatttgtggcgattgtttttgttgttgcgcgggggcttgcgactgttgttgctgccattgccattgtcattgccactgccattgccattgttgttgccactgttgccattgttatggtgatggcggaaaaactgctcggcctcgatcttgttgaacatgtagcaggcatcgttgacgctcttcttgggccccacaggcttacctcggtgcgtgaacccgacacgtcgctgcagatcgacaacggaacggaacacgaaatatccgtgcacgatggtctcgttgaaatagcaggtatctcgcagctccctctgcaaacaaaaagcagatatatagatatattgataaagcgatatagcttccgtgcacttcacatgcaatttatgagcagcatttccgtgcatatacatttttaacgtgttatatgcggtggatattgtgatatgcgtatcgaccacgatgacagcgacatcatcgcacgaggagtgaacgtttagtttgccgtctgtttatttatttataaagtacttgaaatctcaaaaagacaacgaaatgaatcgcggcttatgacttggatgttggaataccctggcattcacaatggtggggatatcggtttggtatcgcttaatagcttagaaacaaatttttaatttcaatatttatttgggcttaccaaaaataataaagcgaaaatttaatgtttgcaatcttagcgtgataactccagggtagcaaataacccataccctaaagatgtggtcttcacatctaagtcgttgagcgcgtgttgctgccagttggccatttctgctatcagcggaccgatctattcagatccaacgacgcagatgaaacatttcccaagcaattaagacttgtgccatatttagcgacgaactacttgtggtctcttcgcatatttatagctcataattgctatttttaagaagcttctcaccagtggtcaagtggagcggtgtgtttggggtaaacacatttgttctatttcgagaagggatggagtgatcaagtaatcaatatgtgaatcatatccagacacatgcgacctcgtcccacacattaaccttcccgagaaaagccagctaaggtatcgaatggagtgtaaatcacagcaaatatttgcacaataattcaacatagattttgcggtcataatcgcaatcgaaagcaatagaatagaagtgtggccttaggggttctattgtttgtctagagctcgaatgcggtttagctaactaactgtattgtgagtggcgaaaaggacattgaaatgttttagccattaccacatgacagaggcaatcaagtgcagcgtcattcggctgattgattagacatatctatacaagttgtttgacgtttatgatggaaaatctcata

SEQ ID NO: 30416 - DNA, 1998 bp, DROSOPHILA
atgcacggaaatgctgctcataaattgcatagggagctgcgagatacctgctatttcaacgagaccatcgtgcacggatatttcgtgttccgttccgttgtcgatctgcagcgacgtgtcgggttcacgcaccgaggtaagcctgtggggcccaagaagagcgtcaacgatgcctgctacatgttcaacaagatcgaggccgagcagtttttccgccatcaccataacaatggcaacagtggcaacaacaatggcaatggcagtggcaatgacaatggcaatggcagcaacaacagtcgcaagcccccgcgcaacaacaaaaacaatcgccacaaatcgaataaccaaaatcaaaagttgcaacagcaacaggagcatcatggccataataataataataataacgttattcttaataatagtaatactagtttaagtagcactaacaaaaagcaattagcgataaacaggcagaggcagcaacagcagcaacatcaggtgcgacatcatcacaatgatccatcgctgctgctgcgacgacagcaacacgagaagaagcagaagcggcgcaagcaacagaagcagcagcaacaccaacaacgagtatcagctagtccaacgaatccgatgcctgcaacacccacagcagcgccagcagcaacaccaaccgttgcagccacatcgccggcaacagcaacacgatcgacaacagcagcaatgagcagcaagcgcaagggccggcgaagaaaggccaaggtcaggccaaaggcgcaacagcaacaacagttgcagctacttgccacggcagcaacatcgccctacaccgacgacaccctgtacggcagcagcagtagcagcagcagcacgggtttcgaggatttggacatctacaatagcagcagcagcagcggcagcagttccagcttggatccctggtccacttggtccacgatcgatagctttagcggcagcagcacaacagcaacatctgacgacagtattagcagcagcagcagcagcaactacgacgcctgggccacctacatcaccgaaatggaggccgaggcatcggccatgacgcccgagatgggcggcaacgacaccgagttgatgcagtacgaggccgagttggtggacgatccggaggcggagtccacggcgacaattgaaaccaaagcaacatcagtaacatcaacaatagcggcaacggcggccacaactacctcgacagcgggctcccagctggtgatagagcagacgccgctggccaggagcaacatcagcaacaagagcagcagcagcacgaaagcaacaccaacggcaaccagtcagactgaaacagcacagagcacgcaacaaccaagcaggcatcgcagtaacagcagggaagatcacctggacaattccgacatgttgctagcgggcgagaacgaagtgaagccacaacagccacgcaagttactgtggacagtgcaaccaccgctcgcaacacgtggcagcacactagcaacattggtggcaacaccagagcagcaacacaccagcacgacagcaaccgcggccacgacaccggagcaacatgttgcaccgtcactcttcagcgtggacaagaacatcaacagcaacctgaacaacacactaacggaggcttctcccacggcaacatcaacatccagcatcacgtccgcaacaaccatgaagagacccatacggaagttcaccaagaagctaatggccacgccctaccaccagctgacctatgtgcgcaatgcgggcggagatatcgacatcgataacctggacaacatcagtgtgtatcccgttctctacgatggtgatctggaggggaatggcggcggcaacagctccgacggcggcttcagcgggttcctgcccacctcgaccacctcacacctgacggaaccgattcgcatcggcatgaacaggataaggccgaataagacactgcattggttcactcatcagagatttgcgtag

SEQ ID NO: 30417 - protein, 665 aa, DROSOPHILA
MHGNAAHKLHRELRDTCYFNETIVHGYFVFRSVVDLQRRVGFTHRGKPVGPKKSVNDACYMFNKIEAEQFFRHHHNNGNSGNNNGNGSGNDNGNGSNNSRKPPRNNKNNRHKSNNQNQKLQQQQEHHGHNNNNNNVILNNSNTSLSSTNKKQLAINRQRQQQQQHQVRHHHNDPSLLLRRQQHEKKQKRRKQQKQQQHQQRVSASPTNPMPATPTAAPAATPTVAATSPATATRSTTAAMSSKRKGRRRKAKVRPKAQQQQQLQLLATAATSPYTDDTLYGSSSSSSSTGFEDLDIYNSSSSSGSSSSLDPWSTWSTIDSFSGSSTTATSDDSISSSSSSNYDAWATYITEMEAEASAMTPEMGGNDTELMQYEAELVDDPEAESTATIETKATSVTSTIAATAATTTSTAGSQLVIEQTPLARSNISNKSSSSTKATPTATSQTETAQSTQQPSRHRSNSREDHLDNSDMLLAGENEVKPQQPRKLLWTVQPPLATRGSTLATLVATPEQQHTSTTATAATTPEQHVAPSLFSVDKNINSNLNNTLTEASPTATSTSSITSATTMKRPIRKFTKKLMATPYHQLTYVRNAGGDIDIDNLDNISVYPVLYDGDLEGNGGGNSSDGGFSGFLPTSTTSHLTEPIRIGMNRIRPNKTLHWFTHQRFA

SEQ ID NO: 30418 - DNA, 3167 bp, DROSOPHILA
gcctgtcgcgctgttaaaaggctgtaacatacaactacaacaaacaacacatttaactgcttgaatttcggaaagagaataatgttgaaataatgaataatttttggagccagtgagttaatttacatatttttttttttaaattttcaaatattttatatatttatttattgtataaatttgaaagcattacaacaaagctatcgaaaaagcttttactttttaaaatataatattttaaaattaagttaggcatattacatttaactttgacaagcctttcttaaagttgtgacaacgggtccaattcaacacttaattaaaaaaaaaattacatatatttgaggcctttctaagtccctaattaattgctcataataagtttgtctaactaattatttcgcttaattgaattaaccaaccgagcttacttcgccgcctaattttcgaagaacttttattaacttacaaccctttcgagatgtcgctgcttagaattattctgataatcatatttttgaggatagtttcgtccatacctgacacaatcatatcacacttgagtgctgaacttcaaataaaaatccaaatttacttcggccttggaaacgacttatatgatttttcaagattagatggcaattaccagaaaattatcatttctcataacattagtgaagagtttaaaacctatcacgacgaacctgtgcttataataatacgactcgaaagggatttgaatttgaatttggccactttggatgtgttaagatcgtatctcacggataggcagtacaatgacattttgctgatagataatgatgaagaaaatctaaacagttatgtggatatacgtaaagcatactggaatgcaggcttttcacaagtgctaatttataactcgcagcaacgaacgtggtcaataaaaccctatccttacttgcagataaggcctacaagcttgaaagagtatattgaaaacaggaacacccgtaacttgatgggttatccactgcgtgttttagtgaccaacgacccacctcattgctttgtggacaaggatgaactgccaggttctccgaatcgttataaaggcagtatagtcaccatgttgaaaatatttgctgatcaactcaatgcaacttttcaagcgaatccttttcgtgaatttcgtcgctattccaccgcagactgtgtgcagatggtcagtgatgatgaaatcgatgcctgtggcagtatcttcataaggacctacacgtatgccaccagtcagccagttcgcttgaatcgtgtggtcataatggcgccatttggaaaccccatcgagaagttctactatttcttcaggccctttgacttgtacgtctggatcggaactggtattatagtggtgtatatagcggtaatgggttccttgctccatcgctggcatttcaaggaatggaatgtgggtcagtatctcctgctggccgtacaaactctgctgaaccgggaattatctttgccgcagtcttcgagtggctccaaatttatgttactacttctgctattcgctattggattcattttgtccaatttatatgtggcactgctgtccatgatgctgaccacaaaactgtaccagagacccattgaaaacttggccgacttgaaggcggcaaatgtgaacatactactccagacgcacaacatcagacccaattcagtttacggcagctcggaggagttgagggagagattccttctggtggaggaatcccaacacttggagaagagaaatggcttggatccaagttacgcctatgtagactcggaagacagaatggacttctatctataccaacagaaattcctgcgaaggcgcaggatgaagaagttatccaatcccgtgggttacacctgggccgttcaggtcatcaaacaaaactgggtcctggaaaaacactacaatgatcatgtgcaacgcttctttgagaccggcttgcaaaataagctggtggatgatgtccacgagttggccgtaaaggctggcttcctgcacttctttcctactcaaactcaaaccattgaaccactgcgactcgaggatatagtgatggctgccatggtcttgggcggcggacacgccctcgccgtgatctgtttcctggtcgagctgttcgcctaatgggcttactctcagtcccaatcacaatcacgggaatggcaatagttccggatggtcataaaaacagttaacacccacgcaataaagcggaactacccctaagtgtatcactatttaaagcgattagggtcacaataaagcaacagaatgaggacccgcatgcgacatccgttgccaggacactcgaaaaaaagtcaagaactttttgcaaaaagattttactaccctaactatattcagaagattacaattgttttataataaatattatattagccagaaataattaagaaaatattttcgaagattttaagtacatctcggacttctggtctctagcccgttcggcattttaaattgtcgtttttctaagtgcacaagaagtgtgtcaattggacagcattactctacttcacccagcggaagttgccaaaaatgcagcagttgattgaacattgattgacaatggctcccggccaggatgcgaaacacaagaagggggcgcggtccactggcaatcgattcatggacttggataaggacgcggacatgaatgtaagtgtgggtgtggatggggaagtgccactgcttcttgtgattccttttgttcgacgagacaatggcgatttgtgcaccgtgagcagaccgctcctcgctcttttgtgtcctccttgccatccttgtaatgcgccgatgataatgggccattgtcagtatcgatgttcgatgtggacgcctgatttctgattcctgacgccggccgatgacgaccaatgacagccacttggttccccggttgattgctgacgcattttggcacagatacggattggtttgaattggattcgattgccccactgggaggcactttaagctcattaaagtctggcgaaattagcagcatgacagtgagatgattggccattaagtaggtgggtgtgaaatagccgataattagacggcttaaaggggttcttttgggaaggttcaaataagttgg

SEQ ID NO: 30419 - DNA, 1167 bp, DROSOPHILA
atgggttatccactgcgtgttttagtgaccaacgacccacctcattgctttgtggacaaggatgaactgccaggttctccgaatcgttataaaggcagtatagtcaccatgttgaaaatatttgctgatcaactcaatgcaacttttcaagcgaatccttttcgtgaatttcgtcgctattccaccgcagactgtgtgcagatggtcagtgatgatgaaatcgatgcctgtggcagtatcttcataaggacctacacgtatgccaccagtcagccagttcgcttgaatcgtgtggtcataatggcgccatttggaaaccccatcgagaagttctactatttcttcaggccctttgacttgtacgtctggatcggaactggtattatagtggtgtatatagcggtaatgggttccttgctccatcgctggcatttcaaggaatggaatgtgggtcagtatctcctgctggccgtacaaactctgctgaaccgggaattatctttgccgcagtcttcgagtggctccaaatttatgttactacttctgctattcgctattggattcattttgtccaatttatatgtggcactgctgtccatgatgctgaccacaaaactgtaccagagacccattgaaaacttggccgacttgaaggcggcaaatgtgaacatactactccagacgcacaacatcagacccaattcagtttacggcagctcggaggagttgagggagagattccttctggtggaggaatcccaacacttggagaagagaaatggcttggatccaagttacgcctatgtagactcggaagacagaatggacttctatctataccaacagaaattcctgcgaaggcgcaggatgaagaagttatccaatcccgtgggttacacctgggccgttcaggtcatcaaacaaaactgggtcctggaaaaacactacaatgatcatgtgcaacgcttctttgagaccggcttgcaaaataagctggtggatgatgtccacgagttggccgtaaaggctggcttcctgcacttctttcctactcaaactcaaaccattgaaccactgcgactcgaggatatagtgatggctgccatggtcttgggcggcggacacgccctcgccgtgatctgtttcctggtcgagctgttcgcctaa

SEQ ID NO: 30420 - protein, 388 aa, DROSOPHILA
MGYPLRVLVTNDPPHCFVDKDELPGSPNRYKGSIVTMLKIFADQLNATFQANPFREFRRYSTADCVQMVSDDEIDACGSIFIRTYTYATSQPVRLNRVVIMAPFGNPIEKFYYFFRPFDLYVWIGTGIIVVYIAVMGSLLHRWHFKEWNVGQYLLLAVQTLLNRELSLPQSSSGSKFMLLLLLFAIGFILSNLYVALLSMMLTTKLYQRPIENLADLKAANVNILLQTHNIRPNSVYGSSEELRERFLLVEESQHLEKRNGLDPSYAYVDSEDRMDFYLYQQKFLRRRRMKKLSNPVGYTWAVQVIKQNWVLEKHYNDHVQRFFETGLQNKLVDDVHELAVKAGFLHFFPTQTQTIEPLRLEDIVMAAMVLGGGHALAVICFLVELFA

SEQ ID NO: 30421 - DNA, 3109 bp, DROSOPHILA
ggcatagaccgtaagctgtggtaacctgaaaagaattaaaggtgcttagaaacatttagaattaaagcttaagcttaaaagtcagactttgaataattcataattaaattaacttaaaatagcaatgtttattgtagagtttaataattgccttggaatatccagtattatttaggttcgtcaggggcaaattcccaagtcttaatatagcgtgtgaatcacatttgaagatttatgaacaacttaaactttctcaaacaattgtcgagaaattccacagctttaacttaaaaagatacctctccttaagatttatcttccacttaaactcgaacttgtctttctacggaaattggtagcaaaataaataaggagatttatacgtactgcataaagttgggaaagtagatctatcttatgatatatttacaacttctaaaggtaattaactttcgtcgactgatgtgtacttccccgaagtttttcatgctgtctctcgactaatgattgaaaccacaaactggaacacccacgcacaccacactaaactatgacaaaacaatattatgtagggcactgcgaacacgtgagcctgcagctaaatgtataaatgcataaatcatttggattgagcgactttttgacatcgcaaatgagcaaggacagatgcaggagcagcgccataaattcacttgaatttattatgcaattagttaaagacctgcattgtcagatggcaaatgtgcccggctgaaagtggagcaggcccgttggcagtcaggaatttacagtccaaagaaagaccttgagggcgatgcattcgcatgcatttcgctgggcaatccttgtcgttttctctgacttttatcggcatgaacttggctttccacagctcacaagaggccaaatgcagccttgaaaagttgaaactcgttagccccacccgtgacccacttgagcatcttgcattcgcattcgcattcgcattttccatttccatttaatagaactttatatccagtatgaaagtggccaccggacggcgttgcctgcccttgggctttccgtagtaatttgtgtcgtggaggcgatagaatcccgctggcaaataccccggaatgctgtggttctccaactgaaagttgcgcacatcgtagctggcctgcagaggagaaactttttgacccagaccttcgaacacagtagagatacagtacgcactggctggatgggacaccggtcggccagattcccgtacttgaacacattcctcagccagaccttcatcaagctggactgcagaagttcccgcagcgtcttgcaggtgtccatgtcgtagctgaagagtgtctggtaccgatccttgccatctatcagctgcaggagcgttattgttgtcctcaatccattcttcaaggtgcgattcagatggatgtccaggttcagctcacctttggcggtcagccatcccctgatgctggagcagtagtctttgctgcactctacgctgatgttggtgaacttacttcgaagagctttttatgagtgggtaaaagtaccatttacttgtaaaagtatataatattgcaatgcttactgaacgattcgcaaacgaacagtatcaggagggttaataacaacatttccaagtattgttttggatataactacaaaaagcagcagacagtttgtttcaatcatatcataaataattagcgcagtcgttagtcaggctagagtgaataactaatggttttatttcaccaaacaatttaggcattgaaaatattgttgaatattgttaaagcaatttacagtgggctcttattctaattggataccacattattaagagctttaaacagtcacggcctaacactgattatggcagcaatgctccagttcagcggaaaatctaactcaaccccccacgatggctcataaatcaatcggcagtccatcaatcaatcaatcagcgggccatcaattagtcagtctgtcagtccgtatcacacttggtccgaatcgcagagcactgatctggatctggatcagatcttggtgggcttgggggctcttggggctccaggccccaactgtctgccacataaagattcaagttcagtgcgaccagctcacgaactaaccgtaaagcaaactgaaagtagcgctgacgtttggctgatcgggttgtttcgggttgtttggttgtttggccgcgttgtttggctaagcggcgtttaattggaaacacagttgggtgttggttttgaccggtccgctgtcttcatcgcgggccatcaactttcagcagctgcggacagctgatggacatggacatttgcattcgttctcaggccaactcctgtggactaccagataaacccgttcaaaagccgaccaggctcgccgaatcagatgcacatattacgcatacgtcgtgtggtccgtgtgacgtttttggccacggggaaatgtttgactttgctcccactcccacgactaactacagtgaaaataatttaatattagaaattaataataccgaatgatacaattgtagtcacataacaatatcacaaaagagaatttaatgatatagaattttatgaattgttctagcatggaaacttgagactcctggaatggattcagaatctgatttttctcttagtgctacctcttctcctgcccctcgctcttgactccttgcttaattgctgagccgcgtggagcgtttaattgcaaattattcaaatgccgacgctgccgcagctgtcattgctgtcataaccagtcggcgcagctgccccctccgctccatcgccccactcatcctggcgagcttgcaattatgtctcaaattaacacagcaaccaccgcagagcacccctccgttttccccattgccacaaaaaacaaaaacaaaaataacagcaagaaaatgtgtaaaaatatgccccaacttttcgctgctgttgttgtcagatgaaattaggcgtaaaatgtagtttgaacctttgtggaaatattttttaacaacattcacaagtgttcgagcatttcttcattccatatgttgatgtagttttcgaccacgagggcgatt

SEQ ID NO: 30422 - DNA, 570 bp, DROSOPHILA
atgtggcagacagttggggcctggagccccaagagcccccaagcccaccaagatctgatccagatccagatcagtgctctgcgattcggaccaactcttcgaagtaagttcaccaacatcagcgtagagtgcagcaaagactactgctccagcatcaggggatggctgaccgccaaaggtgagctgaacctggacatccatctgaatcgcaccttgaagaatggattgaggacaacaataacgctcctgcagctgatagatggcaaggatcggtaccagacactcttcagctacgacatggacacctgcaagacgctgcgggaacttctgcagtccagcttgatgaaggtctggctgaggaatgtgttcaagtacgggaatctggccgaccggtgtcccatccagccagccagctacgatgtgcgcaactttcagttggagaaccacagcattccggggtatttgccagcgggattctatcgcctccacgacacaaattactacggaaagcccaagggcaggcaacgccgtccggtggccactttcatactggatataaagttctattaa

SEQ ID NO: 30423 - protein, 189 aa, DROSOPHILA
MWQTVGAWSPKSPQAHQDLIQIQISALRFGPTLRSKFTNISVECSKDYCSSIRGWLTAKGELNLDIHLNRTLKNGLRTTITLLQLIDGKDRYQTLFSYDMDTCKTLRELLQSSLMKVWLRNVFKYGNLADRCPIQPASYDVRNFQLENHSIPGYLPAGFYRLHDTNYYGKPKGRQRRPVATFILDIKFY

SEQ ID NO: 30424 - DNA, 4526 bp, DROSOPHILA
ctaaaatatgttccaaattctatttgctaatcatagctaaatcacaagtagaagattctcgattccaaccaccatccttggattgaaaacccatatagtcaatgtcaaattccccaacttgaaaaccaaagattctatcatcatcatctatctacagatgaaacccaagccgtgagagcatctcgatagccgcgtagacagatcacagagcgccttagaaaagtggcaagtgctttgcgtatttaaatttattgcttaacaaatttattttttgttaaacaaatttataaattattgctgcgagagtataataaaatttcattagcggcatttgccgactccgtatatgtgaatatcggtctaaggcgttggcgtggcgcgtttcgttgtgagcatttacgattttttatttatttttgtagattttttaagttttcgcttaggggcgcgatcacagacacgcggcgccagttggccaagagagatctttgttttggccagatctgtccgcctggacggagattggccagctaggtggacacctcaagcgcggcatgttgataaatccgatgcgaggcctgaaaagctagccgaatttgcatgtgtcgctgcgacacagaaatcgctggttaattaatttcagacacgccatacatctcgggtactttgcataaattaatatgaaatctgtatttatgatttatgcggtgtcaacatggcccgaacatctatcaaacagtttccatcgatcgctggagatcacagcacaaaagaagatgtgatggaaatattcgaaaatcgcccacgcgttttgcacgcgactttgtggcgactttggccgccgcattatttattgttatccgagcagattgaggtcaggcagtcaggagatttacacattgtcacattgttgtagattcttatcaattgttacacgattttcgaattatgttttgattttttccagtcgatttttttttacgatttgctggaatgcgcattatgaatagctaaattgggtgaccacgaaaatgttgccatagatgtttccggattgcgagatgatcttggggaaaccttttcacaatccaaagatgatgggaaaaacacgtacatcatgtcttaagtagaatatcttgtaaataaaactataaatctatataatacaagctaacaaaatacttaccacagtgacatgcaaattgccaagcaatgattataggattatcatatctcctagatacccccaatattttccaaataaataccgcatgtttgtattgtactatatgtgtttcatatttattattttgaattcgtatcgtttcatcgtcattcgcaaattgctcattgtaattactattatggttattgtttgtcagcagaccaccatcgttatgattctgattattgttaacaacattaatattttcgttagggttttcaatattaggttgttgctgctgctgttgcagttgctgctgttggtgttgctgttgcaacctgaggccacgaagaagtttctttagaatcagctcttcgtgctcctcgtcgttcggatagctatcgtcgattatattattagcatcaatatgattgcgattctgcattacagtttcggtagtaactgtctctgtctcaccttcggggttcgctgttgtctcaacttggctttcagctgaggcaagttcaattcgatcggttaattgcttaagattattgtcaatattctgattgaacgcgctgtggctatggctatggctatttggactatcgaacttagtgctatcgtctaaactactagaatcagtcgtgctacttttagtattcaaattataatgctcgttactgtacaagtagttgtagttttttggcaaggcaggtattgcatgattaacactaacgctactactatcaattagttgctttacgtttacgtttaggtctagatctaagtttaagttactattaacatagggttttgagtattcgttttgtgggtgctgctcatcctgctgctgcaatcgctgcgagggcagctcaaccagttgcatatcagcatcgggcggactgctgctgctgccgccgccccttgttgcccccgcacctgttgcgcccgcaccagcacctgttgctcccgccgagcgttttcgcctgtcccgcttgcgacgactggccgccatgatggccaccaaattgaaggcgctgggtgccaacgaggcggccgtggcggtcagagcggtcgaggtggccgtcgacgaggaggaggaggaggacgaggccgaggaggtggccttgggcagatgctccacccgctcgcgttcccgctccttgtcgcccgcctcgcgctgctcgcgctcccacaactcgcgctgcaacttgtgctgctgccgctccaagcggcgacgtctacgccgttccataatggtggcattgttgtgatgatgacgcaccaccaggtttttgggctgcggttgggccatcactcccattgtgccgtactgccgctggcgacggcgttgttgctgctgcagttgcagctgccgcttcttttgttgcaacctgtggcggcgatggagtttgcgatttctctgcaggatcacctgttgttgctgcagatccaactcattattgttactgctgttgttgttgttgttgttgttgttgttgttgctattggcttggttgtaggacttaaggctattactgttgtgtctgctgattttgtcagggatattgctgttgctactattgctattaatacttgttgggcgacgcgatttggaacgcgtccgttttgtgaccgccactgggctagctggtgtggttgttgtggttgttgttgttgtggtggtactgggtggtggtgttgtcgttgttgttgttgttgatgtagttgttgttgtagtcgtggtggtagtggtgctactgctcagcacttcagccaaatgtaaattgaatttctcctcattcaaaggaaagaaaaacaatatggccttcttcatcactttcggtttggaaaaatcattcaagccaatgggcttgaaatttcccttgaaacccacacgcagcactggattgtaggcgctactaaagttctgattgcccatgaaaattccctccttaaagtggcactcctttgtggcgtttctctataaaataaaaaaaaagacaaagggaaagagaacttagtaaggacatcaaaaaatccatctctttaagaggcaaataagtagtattactgagcttaaaaatggaaataatcaagtttttcagattcgataaacagcttaaaacacataataaaagtaagtaagcaagtttaaatatgtattttatcaattattatcatagaaacctctagaacttttaaagttttgctcttaacttttagtgacaatagcaattgggtaaaactcacctttccaaccagtctgccgtgatggaagcacaaatagtagtctacatccgccgaatagatggtgattttgaaatccaggctgaacacatcgttgacagcttccatattgaagtattctatatggaaagagataggacaaaatccaaaatttaattaattattggcaaacaaacatgcggtggctattgtgtaaatatttaatggaactggaactggaaccactcgaagcgcctacagataacccaattaattgaaaggttttttgataaagttatgaaggggcttttgattagaatgaaactatgtgccttttcagtggaagagttgattaaatcaatggatcgctccagtcaattaccggcactgagtcgttgaactctcactgggcgaaagggtttaaccctgaaattgagctaggtctgataattctgatcgaattggctggtgttaggctttggactcggatcttaaggaaagaccttcgaagaccaagcaaatcgatcaaattgccccagtagcgcctgctgcccgataagattaaataccgtgctgacaatttagtttccgtttcattggattggggatttcatttatgcctaacggctgtggatcgccggaaattccttggacttgcatatgtgtgacgtaaggcggcgcctgatcttgtcactttcgctcagtcatcaacccacaatgaatgctcctgaacttcagagctgcggaggcttggaaaccgcagcaaatgaattccgaataaattaagagcggccggacaaacaaaacaaatacgaaaccgcaatgggcgccgttcggcgcggttcataacatcaatcaaatattaaattaccaataatttaattaagcacacagcatgcacagccacagacgaagttccagacgcagacagagttcacaatactgtatggtacaggcggaattggctagctttgactaattcaaatgctactactatgcggaaatgtgtgcgtcaatagtgaactaagtttaaaaatgaatataatatatgtctataaaatcatttttttattttactttaaatattggttcactttaagggggccagactttatctgcaaacatacgc

SEQ ID NO: 30425 - DNA, 1686 bp, DROSOPHILA
atggaagctgtcaacgatgtgttcagcctggatttcaaaatcaccatctattcggcggatgtagactactatttgtgcttccatcacggcagactggttggaaagagaaacgccacaaaggagtgccactttaaggagggaattttcatgggcaatcagaactttagtagcgcctacaatccagtgctgcgtgtgggtttcaagggaaatttcaagcccattggcttgaatgatttttccaaaccgaaagtgatgaagaaggccatattgtttttctttcctttgaatgaggagaaattcaatttacatttggctgaagtgctgagcagtagcaccactaccaccacgactacaacaacaactacatcaacaacaacaacaacgacaacaccaccacccagtaccaccacaacaacaacaaccacaacaaccacaccagctagcccagtggcggtcacaaaacggacgcgttccaaatcgcgtcgcccaacaagtattaatagcaatagtagcaacagcaatatccctgacaaaatcagcagacacaacagtaatagccttaagtcctacaaccaagccaatagcaacaacaacaacaacaacaacaacaacaacagcagtaacaataatgagttggatctgcagcaacaacaggtgatcctgcagagaaatcgcaaactccatcgccgccacaggttgcaacaaaagaagcggcagctgcaactgcagcagcaacaacgccgtcgccagcggcagtacggcacaatgggagtgatggcccaaccgcagcccaaaaacctggtggtgcgtcatcatcacaacaatgccaccattatggaacggcgtagacgtcgccgcttggagcggcagcagcacaagttgcagcgcgagttgtgggagcgcgagcagcgcgaggcgggcgacaaggagcgggaacgcgagcgggtggagcatctgcccaaggccacctcctcggcctcgtcctcctcctcctcctcgtcgacggccacctcgaccgctctgaccgccacggccgcctcgttggcacccagcgccttcaatttggtggccatcatggcggccagtcgtcgcaagcgggacaggcgaaaacgctcggcgggagcaacaggtgctggtgcgggcgcaacaggtgcgggggcaacaaggggcggcggcagcagcagcagtccgcccgatgctgatatgcaactggttgagctgccctcgcagcgattgcagcagcaggatgagcagcacccacaaaacgaatactcaaaaccctatgttaatactgaaagccaagttgagacaacagcgaaccccgaaggtgagacagagacagttactaccgaaactgtaatgcagaatcgcaatcatattgatgctaataatataatcgacgatagctatccgaacgacgaggagcacgaagagctgattctaaagaaacttcttcgtggcctcaggttgcaacagcaacaccaacagcagcaactgcaacagcagcagcaacaacctaatattgaaaaccctaacgaaaatattaatgttgttaacaataatcagaatcataacgatggtggtctgctgacaaacaataaccataatagtttccccaagatcatctcgcaatccggaaacatctatggcaacattttcgtggtcacccaatttagctattcataa

SEQ ID NO: 30426 - protein, 561 aa, DROSOPHILA
MEAVNDVFSLDFKITIYSADVDYYLCFHHGRLVGKRNATKECHFKEGIFMGNQNFSSAYNPVLRVGFKGNFKPIGLNDFSKPKVMKKAILFFFPLNEEKFNLHLAEVLSSSTTTTTTTTTTTSTTTTTTTPPPSTTTTTTTTTTTPASPVAVTKRTRSKSRRPTSINSNSSNSNIPDKISRHNSNSLKSYNQANSNNNNNNNNNNSSNNNELDLQQQQVILQRNRKLHRRHRLQQKKRQLQLQQQQRRRQRQYGTMGVMAQPQPKNLVVRHHHNNATIMERRRRRRLERQQHKLQRELWEREQREAGDKERERERVEHLPKATSSASSSSSSSSTATSTALTATAASLAPSAFNLVAIMAASRRKRDRRKRSAGATGAGAGATGAGATRGGGSSSSPPDADMQLVELPSQRLQQQDEQHPQNEYSKPYVNTESQVETTANPEGETETVTTETVMQNRNHIDANNIIDDSYPNDEEHEELILKKLLRGLRLQQQHQQQQLQQQQQQPNIENPNENINVVNNNQNHNDGGLLTNNNHNSFPKIISQSGNIYGNIFVVTQFSYS

SEQ ID NO: 30427 - DNA, 4003 bp, DROSOPHILA
tagtatttatattgtacatatgtattttgaaatttatagagctcacgggattttttcatcgtgtatttatgctcagacaatttaaagtaagaaacaagaatatggaacagaacgtcagaacgcagaagtcaactgactgacagcttgttattctcgcagatccttcaccgtgttccgttataattagccattgctaattaccattttcgcgaagaccacccgtacattgacccactgaaccggcttattcaaattcgattcccaccagatgtccgtgggccattcagcacgcatctcaacgcgtcaatttgccaaccctactcaaaggccataaccacgtcggtcatgcggatcccgaagatacagtagttagccattgcaatggctgacaaccgttaatcaggcgccacaaatcagaagagggcaagatatgcgcacatgggggatttggggaattccccccaccagcgttctgattggctgggcgccagtatggatctgctatatttagatagagagaaaatggcgatgcagactgcgtgattttccgttcactcgctggatccgtgatggcagccgcttcccatgactgctcctttgtctctgcgcgaaaatattgacacgatccgcaccgattttgcacgcgcatgagaatggataagctaaatatactcgtaaataccagtaaatcattatgtactagcaaagtggcccaattgccgccgaggatgcgtgggtgggatcgtgttggggtgttaattgccccagactcaatcaggtggaatggaatggaatatttatgagattgggtaatcgattagacaaagtccatccatgtatgtatattcatatcaatcgtcggtgctaattgatttcgagactgcgaaaagaactggacaaaggcggaagtgatcgtgactgccgataaatggaatctcaacagatgtaagcatattatcggaggtgtaacttttttttgaaaaatacataacagaactgaatgaaatgggtaagcggtaaagaaacctacttcagtcggggtaaaaataaaagtgtgtatcaaaagatataaacatataattgcaccaaacaaatctatactcatctactgatcttcattctctatctttccgttcatccttaaccttgtctatcctaacctaagcttttaaatatctttacgctctatatatctttcagatgatccttcaacaatcttccaatcttctaaaacttctactacttcttgctatctcttctgtaaggactcaaggtcttaacgatatcataattgaactaaaccaacgccttcttatctccaataacttcttgtattgcaaccaatccgataaactaaatgagtacgagataaagtatctccagcacatgccaccaataagcttgatgatctttacctcaattgaatctatgaatttcacacaagttgaatataatttaggtgctgataacaaactctttttgattatgggcaacgaagaaccaccctatgatttccttcacgccttaaacttacattttcagtttgctgaatatataattgtgatagatgaacccgttgatttgaagaagagtaccaaatggctagattttgtgaaccacctatggcagcaaggatacgttcagttgttaatctatacctcgtatgatgaaaaattgtatcacaaaatcatatttcccgaaaccgtgatagaggagactttggtggaacagtacatatccattcggggatcattcaataatctttatggctatccggttcgcgttgcagcctataataatgctccgcgctccatgctatatgtgaatcgctggggcaagcacatatttgccgggttctacatgaggttccttcgagctttcattgacgctagaaatggaagttttgtgccagtgctcacgccaagtaattcgcccgggaattgtacattgaacttggtcaatgaaaccgttgacgtgtgtgcagatgccttggcagcaaatccagccgcttttagcttaacccatggtttcaggatagcctcggcgaatgttttggtgacacatgcgaaacccctacactcctaccgctatcttaccgctccttttcaatggagtgtatgggcctgtttggtcatctatgtgctattggtggtgaatttcctcagttttattgggtggctaagaagtggaaaatgggaatttagcaagtaccttctcgaggtattcagctcgcttttattcagtggattctatttaaaggaaatccgaggacgggaaaggtacatactctttggagtgttgttcatagctggctttgtctactccaccgagtatttgggattactcaaaagtatgttgatctcggaggttttcgagaagcagattgatacgtttgaggcactggtggagagtaatataaccctaatggttgatccatacgataagatactatttgccaagtacaacatgcccgagatactttcgcccattatggaactggtcagttttgaaacacttttgaagcacagaaatcgcttcgatcaggattacgcgtatatactgttctcggatcgaatggctctatacgactatgcccagcaattcttgaagcatccaaaactgctgagaattcccatcgacttctcattcctctacactggcattccgatgcgaaagagatggttcctcaagcaccatttgggacgcgcctggtactgggccttcgagagcggtcttacaaggaaactggccttggacgccgacttcgaggcagttcgcgtgggctatctaagcttcctcatcacggaacatgtggaggcccagccgctgaatgtggattatttcgtcatgccggcaattgctctggccatcggctacatcctggcccttttgagttttgtcatcgagatgacggcctggcgcataagggaattcctgggatgcaggaaggcgacgatgacgagtaccggttgttcagaaggcggtcatgttgatgttgattgagtgacggattgatgttgtgctgtctgcttcgcaagctccttttctacattcttgatgttgtaaagtctttacaaaaaatgttacctgtccttgtcctctataaataaggaaacgtagcaaaaggtacccaaatataaatggtaccacactatcacaaaagttccttaactttaatttttaaatgattgttggttattaataaataaattatttaaatgttattaaaatgagttttatgtatgtttttgaatgaaatattgcttaggagttacttaaaataacttttgtttctatttcagatgattttcttcccaacatttttagcactgatgcatcttctgattactgaaacatatatgataattggaaaaactttgcatgatattttaaatgagcttaacgagcgccttataatttcaactaatattatcttctgcaaacagtttgataacctaatacattttgaagcacaaacatcgagatttgtatacagctcgttggaagcctttaatatcaccagtttatggaaccatgtgggaaacgataataagctgtttgtaatagttggaaatgtgccaccatatgaacttttcgccaaacttgaattaagctcacctgaaaattgcactcaatttattctgaataatacagtggatatgtgcgccgatgctttggttaaaaactccaaagccttttctgtttccagggagctcaggattgctcctgccaatgtgattgtaccccatggaaaaccattgctaagctatagatacttggcagcaccgttcaacaccaaagtatggattgcattaggcacttatgtatttctgatttcgggatttctttgcctgatacactggctaagaagcggaaaatgggactttagtcaaaatctgctcgaagtgtacagttcacttttgtttactgtcttccacttaaaagcaactaatggtattgaacgctacattctatttggagtattattcatatcgggattcgt

SEQ ID NO: 30428 - DNA, 1470 bp, DROSOPHILA
atgaaatggtttgctgaatatataattgtgatagatgaacccgttgatttgaagaagagtaccaaatggctagattttgtgaaccacctatggcagcaaggatacgttcagttgttaatctatacctcgtatgatgaaaaattgtatcacaaaatcatatttcccgaaaccgtgatagaggagactttggtggaacagtacatatccattcggggatcattcaataatctttatggctatccggttcgcgttgcagcctataataatgctccgcgctccatgctatatgtgaatcgctggggcaagcacatatttgccgggttctacatgaggttccttcgagctttcattgacgctagaaatggaagttttgtgccagtgctcacgccaagtaattcgcccgggaattgtacattgaacttggtcaatgaaaccgttgacgtgtgtgcagatgccttggcagcaaatccagccgcttttagcttaacccatggtttcaggatagcctcggcgaatgttttggtgacacatgcgaaacccctacactcctaccgctatcttaccgctccttttcaatggagtgtatgggcctgtttggtcatctatgtgctattggtggtgaatttcctcagttttattgggtggctaagaagtggaaaatgggaatttagcaagtaccttctcgaggtattcagctcgcttttattcagtggattctatttaaaggaaatccgaggacgggaaaggtacatactctttggagtgttgttcatagctggctttgtctactccaccgagtatttgggattactcaaaagtatgttgatctcggaggttttcgagaagcagattgatacgtttgaggcactggtggagagtaatataaccctaatggttgatccatacgataagatactatttgccaagtacaacatgcccgagatactttcgcccattatggaactggtcagttttgaaacacttttgaagcacagaaatcgcttcgatcaggattacgcgtatatactgttctcggatcgaatggctctatacgactatgcccagcaattcttgaagcatccaaaactgctgagaattcccatcgacttctcattcctctacactggcattccgatgcgaaagagatggttcctcaagcaccatttgggacgcgcctggtactgggccttcgagagcggtcttacaaggaaactggccttggacgccgacttcgaggcagttcgcgtgggctatctaagcttcctcatcacggaacatgtggaggcccagccgctgaatgtggattatttcgtcatgccggcaattgctctggccatcggctacatcctggcccttttgagttttgtcatcgagatgacggcctggcgcataagggaattcctgggatgcaggaaggcgacgatgacgagtaccggttgttcagaaggcggtcatgttgatgttgattga

SEQ ID NO: 30429 - protein, 489 aa, DROSOPHILA
MKWFAEYIIVIDEPVDLKKSTKWLDFVNHLWQQGYVQLLIYTSYDEKLYHKIIFPETVIEETLVEQYISIRGSFNNLYGYPVRVAAYNNAPRSMLYVNRWGKHIFAGFYMRFLRAFIDARNGSFVPVLTPSNSPGNCTLNLVNETVDVCADALAANPAAFSLTHGFRIASANVLVTHAKPLHSYRYLTAPFQWSVWACLVIYVLLVVNFLSFIGWLRSGKWEFSKYLLEVFSSLLFSGFYLKEIRGRERYILFGVLFIAGFVYSTEYLGLLKSMLISEVFEKQIDTFEALVESNITLMVDPYDKILFAKYNMPEILSPIMELVSFETLLKHRNRFDQDYAYILFSDRMALYDYAQQFLKHPKLLRIPIDFSFLYTGIPMRKRWFLKHHLGRAWYWAFESGLTRKLALDADFEAVRVGYLSFLITEHVEAQPLNVDYFVMPAIALAIGYILALLSFVIEMTAWRIREFLGCRKATMTSTGCSEGGHVDVD

SEQ ID NO: 30430 - DNA, 3905 bp, DROSOPHILA
taagtatggcaagaggtggcgagacttaagtcatatatcaactggctgaggatccagtttaagtttctaacaatcccccccacgaagattggaaaatggagtgtgttgttaatttaataaattgcattcaatttggcaaatcttccgctgggaatcgtagccagctgaatggaaaaccagtcattcagtcgcacagttacatcaaaaataattggctcactatataaatgtcatgtttagctgattgaaagaccataaacgtggctcaaaaacatatataatatatcataaaagatatgcgttattattataacgaacatttagatggattctttataagccattatattttgatctgaataaacctgtttagttcttgtatattgatcgaacatttgatattaactaactatgatttcccaaaaatgtgcttaggaacaatgtttccccctgtttagtttccattatgacgctctgcgatgactgtttgtttgagcctgcccaaaatgggcacattaacggacagattgtcggctcgttaggtttgattggcttctggctaacagcgatcagaaatccgcaatatggccaaaatgctgctgtgtcgcagctgttgtcattagttgtccacaagcgagatgtcaaatggcaagtgatttgtgggacaatctgactggagctggtggtgcggcaagtgaatcgaagatgcaactttggaacttggctacttattccccggagagcacttcgcaattagctttacataacctgacccactcaagacccattcgtgaccatggaaagtctgttgagtacatcgaagtcgtgtggcattttttttttttttggggacccgaccattaaaagtgatagctgagaaagtgtgaggttccagaataatttggccttaaattaatccaggccataggagtcacgcccaaacgcctcagcttataaaaaccatatcacttgcggcccaatcagtcagttattggtcaatatgtcaaccaagcggatcatagccctatttggattgctaactatccaccagacccacgcggatgtgtcgcatttcttcgcttcgccattggaacactacggaaactatctgcatggccaagtgccattccaagtgggactatcgccttcgaacctgtatggacctccgcctgctgctcccataactcctgccccagtggctcctgtggccaccaccgagtttagtctgccggagatcattgaaaatcgcagtgtgaagattcagggatcgggacatggcaactttatacctctgagtcagcactatctaccgccagctgtggacgagcgtcccaactacgaaagccccaaaccaaggtgggttaccaatctcaaagatacatagttcagatcctaacgatcctatctataactatagcctttttaagatacattttttgccaaaccatttaaacccgcatcattttttaaagcgaggagtcttatccagcttactactatccccaacctggaggaagcatcataaccacctccacacccaccactaccactacttcgagacccataattgtacaagatcctggagacgatgttgagacgatacattcgccaggctacgactatcatgccccagtggctgttccagtattcccccaaaaaccatccactcctgctcccgtttacctgccacccagtgatggaaaccaggatcaaaatcaactgagactgcggctaaaggacatgcgttgcctttcggcgggttactttcgagctgttctcaagttggacagctttttgggtgcagcaccgactgtggaccaggacaatgatgatcagcaggataaacgctgtgaattgaggctgtctcgaagttttctgctcttggacatttctggcgagaattttgagcggtgtggtgtgagatcctgtggccaggatctttgtctgcgtttgcgattccccgccatcagagggttaagaaccagcggagattcgatcttaaccctacactgcaaggctcaagagcgagtggctgtcaaaacgcatgccctgaaaatgggcgtggccaatgatgtgtaggataggatttctattagagattggatgtttttgaaatctaaaatttcctctttcagacaagctcgcagtggaggtagctacgcccatggaggcgatcaaaatgctttccgcacccacgtggagttgctgagaaaaggaagcactggatacacgcgtcatttggaaaacaacggtgccgtccagttgggcgaagagctccttctaagagcccacgttctggccggagatggtatgtcaccttacgattaaatgcctaaaggcttaaaagatatggccttgtatctttccaggctggaactacaccaaactcagtgatgttcagctccagaggattgcaaccggtggagagatccttaacacggttcagttggtcagttcgaggggctgtctaaatcccgccatgcaggctatctgcgcccatccacccattctggaacctccgcttggccagagactgcacttcaaggcggtcatgttccctgggatgcgaagtggggaggttctggtcatatccatgcgcatcactggctgcttggaacgcgaggattgccaggtgacggcccaagattgtttgccatcggtgggccaacggaggcgacggaacgtttcgcacggcaatagcaccgaagtctcggaactctcgcatctcaccttccgcgtgctgatgcccggtgaagaggatgtgtctccaaaggatcgggatattgagattggagattccggtatcagggagacatccaaatctttagctctctttggaagtttgggatttgtggtgatgctaatgggtgttgctgttgtggcattgtataaatttggaaaatagttcaatttgaatcttaatttctttccattatttctaactacatgaatataccccttttaagacagaaatccttatctaatttgtgtataagtggtttccctgcttacccatccattaaaagcagtcacaaaacgccatcaatagcaatcgtatctgtatctgaggcgccaatcttgaagtgacttttatctatctggctgccaagtaaattgacttatcgccactgcgaaatcaacaacgagccaatgtttgcccatttcgagattaaaacagaaattagcacttaataaaatgtaatttatgttcatgtcgccagtgattgagcggacctgagaataaaatcttaaaaaaaaaaacaaaaaacaagtgtacgatagatagctcaaaaagccagtaggcaaaccgatttccaaactgcgcgcttagttcgcaaattgcaatctgtgatttagttatggccagatagttgtggcctaaaccgaaattttatcacgttttcacgcttcgagcgcggctaatgaaacctcgttcacagtcgatttcggtttttggctttgttatttggtgcaatttgttgacggttttcgtatatgataatccatccatctggctggctgacagttggcgcttaatgggcatgaaaatcgcagccaattagccgttgatttcagccgcttttgctcgatgggtggccaaaagtctagagttacaagttaattacccattggggcttcaggagatacatacatacataggtatttcggaatttgtttgctagctgggtggcattgtgataaaatggtcatcgtgagattcttctaacttaaatagttgaaaaaaaataaataaataaacaaagactttgttgtgtgattttttatatttaaatattctattactacttccgtaacttttaactagttcaaatacatttcatttgcagtttttcgtggctgccaaatgaaatttgttgcgcattatataagcgatcattaatata

SEQ ID NO: 30431 - DNA, 1668 bp, DROSOPHILA
atgtcaaccaagcggatcatagccctatttggattgctaactatccaccagacccacgcggatgtgtcgcatttcttcgcttcgccattggaacactacggaaactatctgcatggccaagtgccattccaagtgggactatcgccttcgaacctgtatggacctccgcctgctgctcccataactcctgccccagtggctcctgtggccaccaccgagtttagtctgccggagatcattgaaaatcgcagtgtgaagattcagggatcgggacatggcaactttatacctctgagtcagcactatctaccgccagctgtggacgagcgtcccaactacgaaagccccaaaccaagcgaggagtcttatccagcttactactatccccaacctggaggaagcatcataaccacctccacacccaccactaccactacttcgagacccataattgtacaagatcctggagacgatgttgagacgatacattcgccaggctacgactatcatgccccagtggctgttccagtattcccccaaaaaccatccactcctgctcccgtttacctgccacccagtgatggaaaccaggatcaaaatcaactgagactgcggctaaaggacatgcgttgcctttcggcgggttactttcgagctgttctcaagttggacagctttttgggtgcagcaccgactgtggaccaggacaatgatgatcagcaggataaacgctgtgaattgaggctgtctcgaagttttctgctcttggacatttctggcgagaattttgagcggtgtggtgtgagatcctgtggccaggatctttgtctgcgtttgcgattccccgccatcagagggttaagaaccagcggagattcgatcttaaccctacactgcaaggctcaagagcgagtggctgtcaaaacgcatgccctgaaaatgggcgtggccaatgatgtacaagctcgcagtggaggtagctacgcccatggaggcgatcaaaatgctttccgcacccacgtggagttgctgagaaaaggaagcactggatacacgcgtcatttggaaaacaacggtgccgtccagttgggcgaagagctccttctaagagcccacgttctggccggagatggctggaactacaccaaactcagtgatgttcagctccagaggattgcaaccggtggagagatccttaacacggttcagttggtcagttcgaggggctgtctaaatcccgccatgcaggctatctgcgcccatccacccattctggaacctccgcttggccagagactgcacttcaaggcggtcatgttccctgggatgcgaagtggggaggttctggtcatatccatgcgcatcactggctgcttggaacgcgaggattgccaggtgacggcccaagattgtttgccatcggtgggccaacggaggcgacggaacgtttcgcacggcaatagcaccgaagtctcggaactctcgcatctcaccttccgcgtgctgatgcccggtgaagaggatgtgtctccaaaggatcgggatattgagattggagattccggtatcagggagacatccaaatctttagctctctttggaagtttgggatttgtggtgatgctaatgggtgttgctgttgtggcattgtataaatttggaaaatag

SEQ ID NO: 30432 - protein, 555 aa, DROSOPHILA
MSTKRIIALFGLLTIHQTHADVSHFFASPLEHYGNYLHGQVPFQVGLSPSNLYGPPPAAPITPAPVAPVATTEFSLPEIIENRSVKIQGSGHGNFIPLSQHYLPPAVDERPNYESPKPSEESYPAYYYPQPGGSIITTSTPTTTTTSRPIIVQDPGDDVETIHSPGYDYHAPVAVPVFPQKPSTPAPVYLPPSDGNQDQNQLRLRLKDMRCLSAGYFRAVLKLDSFLGAAPTVDQDNDDQQDKRCELRLSRSFLLLDISGENFERCGVRSCGQDLCLRLRFPAIRGLRTSGDSILTLHCKAQERVAVKTHALKMGVANDVQARSGGSYAHGGDQNAFRTHVELLRKGSTGYTRHLENNGAVQLGEELLLRAHVLAGDGWNYTKLSDVQLQRIATGGEILNTVQLVSSRGCLNPAMQAICAHPPILEPPLGQRLHFKAVMFPGMRSGEVLVISMRITGCLEREDCQVTAQDCLPSVGQRRRRNVSHGNSTEVSELSHLTFRVLMPGEEDVSPKDRDIEIGDSGIRETSKSLALFGSLGFVVMLMGVAVVALYKFGK

SEQ ID NO: 30433 - DNA, 3167 bp, DROSOPHILA
accaacgaacagtgccttgttttctagcctcatcggtcgttgacaagttgcgaccacctcggatttgacttattttcttgatctgtttcgttgtaaatatgttggcagccttcgtgtatttatttattggttgctccacgcgactttccgcggcgccagatcgtgttttaattaagccctagacggcatcagaatctgctaaggcattctggccaacatttttgcatattgtaagccaaattggttcgcacatacattagcgcaagatgaaagtgcctgagaagcataggttttatacgcgcccactttatcgaaggaatgtgcagcacgcagacgattggataccctaggaactttagcataattaaaatggatattttcataatttcagagttttcttagatgaaccttgatactatgaactttaagatccagtttcttctctgcatttatgcattggaattttagacatataaatgaatagatgcttgccgatggcctcgcatacctttgtgcataattggaaatgccttttccccactcacggcatgactaagctccgtgctccgtaagtgatttgtttgcccggctcccgactggcagacagcctcaagctcgggctcaactcaaaggccaaaaaaactgactggctgactggctggctgactgattgagtgtgtgcgcgcccacatcggtgcgccaactggctgttaaagggttaaatagagtatttctcttttttgaggcacttggctgtgagcacatttcaccgctttggccatgtttgctgtgtgcttgccggctgataggaatctttggaggcagtgcagccagggattaggatacgtggtaattgcgggtgccccctttgatacgatttgtttgcatattttgcggacctaattgcgtggacagatatgcatctgaatctgcattgtcgacgggaaagcgtttcccacggcagcgtgcgcccaaagatcatgatgtgtgggatgaattgtcagcactcaccattatccgcgttcctttcaaggaagtcagtcacgaaagcacagaatctgcaatgacataggaaagagatggatcattacatgaattggtaatatcttggattgaataacaaattagaatttcttttcatttcattccaaaaacaaagcaaaattaaaataatgcatattgcaaaaccacatttatgcgagcattaaaacgatccaactaacgatattaataatattattaatattgtaattattaggaacattgcctacaatatagttcttataataagaagatgaagacttatccaaaccatgttccaaaattacaacattttcgaaccagagctaataaattttcctattaatagttgcttaaattcataattacctttgggctagcttatgcgagggtgtctgttttccggggatcatcagcttctggtggagcacatcgtggttggttatggcacttgggtggtagtatcgattcgtgttggtcaaatcgatgatgagacccatatcgggtacgatctgcagaagggattcgggcgccagccgaagattctccttcactttggcgttgacatgctgcaaaagataaaaaaaaagaagggagctgagcaaatatacgagggcattacaatgggcggccatagattgctcaatttatgcaaaatgcccggagggctggcaattaataaaggccgtggatccgtggcgttatttaattaagcaaaaacaatttaatttaatattcatgtggggtccatgttccagttgccacttttatgcataattacaatgcacaaatttcgtcgtcgttcgttgttatttatatttttagagggccgctcagtcggtggtccagatcctgggttttcaacatccatcaattggcggctctcctgtcaaccggtttcttggatctcggatggagtgtggtacgccactgggcgggcggaggatcatcgggaactcacctgattcagcggcaccttaaaggctatgaaacgagtgccaggaacacgatctccaatcggtttgtacttcagccatctgcaattggtacaaaaagtaacatgaaaaaatgaccagcataaacaacacgggtttctttgggatattctcctaaactgcactcacctgtctggtatgtccttgaccattttgtctgttcgccaaaccttttaccgaaatttaaaaataaaatttcgaagttcttcaaaattgttgacaatgttttgcaaagaaataattcttattccagtgttgccagattactttaagagattactcaacatatgctgctgagttgacactgttagctaaactgtgactggtcacgattatttttaaaactctcgctcattcgctctttaactgaagtaataacatttataatctatatttaatgtttctatttaataataaatgtaatttttttaatacttcattcttcattaagctcttttacaaatttatgactagtaatattaatcggcttgcatatttttttaaatggataataaaattaaattaaataagtccattaatcaataattccaagattatattttatatatgttcattttttcacttaagttcctgctgcttaaagttcacatagatctgttgctccatctgttaagtaacagctgttgtgtattggctaggaggtaccaaaaaacggcaaacgcttaaatcagcggaaacctttggactttctgtgattttacagcgaaggtaagagttttaattaaatattaatggacttaaattaatcaaacaacaattttccctcgcgtggatagctccaataaccatccaacatccaaaatgttcgccagcaacacgcgtaatcttatgcgcagcagcattgtgagtggaaatttcttaaaaagataaaaaaaaagcgcaggcggtgatcgctaaaaattaaataacaaaatatcaattttcccacttgcagttgcagcgatgcaagagcactttggtggtggctgagcacaacaatgaggtactcaatccgatcaccctgaacaccatctctgcggccaagaagatcggtggtgacgtcacagttctggtggcaggcacaaaatgcggacccgtaagtcccccaagaagtctcacattagggtggttccattcgcagggatttcgaat

SEQ ID NO: 30434 - DNA, 357 bp, DROSOPHILA
atggtcaaggacataccagacagatggctgaagtacaaaccgattggagatcgtgttcctggcactcgtttcatagcctttaaggtgccgctgaatcagcatgtcaacgccaaagtgaaggagaatcttcggctggcgcccgaatcccttctgcagatcgtacccgatatgggtctcatcatcgatttgaccaacacgaatcgatactaccacccaagtgccataaccaaccacgatgtgctccaccagaagctgatgatccccggaaaacagacaccctcgcataagctagcccaaagattctgtgctttcgtgactgacttccttgaaaggaacgcggataatggtgagtgctga

SEQ ID NO: 30435 - protein, 118 aa, DROSOPHILA
MVKDIPDRWLKYKPIGDRVPGTRFIAFKVPLNQHVNAKVKENLRLAPESLLQIVPDMGLIIDLTNTNRYYHPSAITNHDVLHQKLMIPGKQTPSHKLAQRFCAFVTDFLERNADNGEC

SEQ ID NO: 30436 - DNA, 2865 bp, DROSOPHILA
tttgtttatatttttcaaaatcaaaaacttctaatactatttttaaaacaaataaatccccgggtaagaacacttgccactgctatttgactttccgttgcaattctcagctggtgttacgttcctggccaaacattgttgagcgcccccaagatcacttgacttggtagccctcttgggtagccagacgtgcagcttccggctggttaagtcaggtgagcctggctgagatcggctgaggtgggcacgtcattgtcacgtttcgtttgtctacgattcgacgaccagcagtatacatattgtgcaattaagtcggggcgggctcaattgtcgcttagactaatgcatatgcaatgggcccataaaacgaagtcaaataccgatccgcgcgacttgatttctagatacacagatacccagacacgcccctccctttggcagccctgctaaacaaacgatcgcaattgaactcgtagagatacatagatacaaatacatatatgtagatacatagtttcagagaacttcgcagatttgcaatgacgcagtttgcgcttggtgcgcatattttttccactaactgtaccgtggttattccatattccgttgtgccccaactcaatcaaattgccatactgatatcgatatttaaatgataactgcctccgatccggtaaattgattgattatgtatgagcggctgtgaggaaataaggtatttcatttctccgcctggtgttgcactttattttttccactgtgcctaggccgagccctctaaaaaaaaattttccattgctggaaattgtttattgacttgattgactttaacttgccacacagacttttattacggcaaggaaatcaaatcgttggtgtatgcaaattaatcgtaccgctgccgttctattgactgtatttcgagctcctaacttacgcaatctaggccggctataaacaaagcgaagatcaagttttatgacgcccgccgtcactcgattcactcgattttctcgaaaaacacctgtgtcaatgtacgagcgatgccgtacgcgtaaaaggtgaaacccaagcggtaggttcccgcgggcaccggcatgctgatctttgtgaaatccagggcgaacttctccaccgtcatgtgattctggaacaatatggagtgataaagggcgcaagtcaaagggaagtcgattatgtcgagtaaattctattcatattcattacaatgcagttaaccgcagacactcgtgatttttaaaaatttctgttctgcaatgaagcgttaaaagccggatgaaactaaaacattaacctcttatcgaaataccattacaactttagactgatagaatctttagttcttcaaaaaaagatgtgccagattacaaagaattccttattcacttacctccttccaaggacacgtttgattaaagttactctgcttgcgaatagcatcaaagatgaatcgttcgaaggacaaatcgtaattcctgctggccattagtttgcagaaatcaaagagtatgtagtacataaagggtcgatagccatcccgccgttgaaagcactgcaatctggtggtcagattgcgaatgggtaactgaaacaggctgaccttcagcgaaagttccacctgattcctgcgaaccaccttcaaatgacagtattcatatttggtgagaccgcgagatgtgggcaaatccatgcacttgacattggtgaacttcaggagacgagtgccctacaggataattttaattaaattttaaaaaatattaataaaaaaaaagcgatcataccattgaatcctgcagcagaacagatagaaacagtaaatataatggcccattcgacggcatttggaatgagtgaaacaatggcttagacaagcaaaaatgtttgaatttacaacttcgtaaacgataatcgcaaaaattcgataaaattataattatttccaaatgttcaagcgattaaaaaatcgttaaccaaatacaacgccatttctggcaactggagttcaaatcgcactagttcaaagacccaggaaaagaacagtcaagcattttgctgtatatagaacgtatttaagcccccgcgattagagccatagttcgtaagcaatggctattgacttctacttcaattacacaaaatcattaaattcttggaagtatgttaacaatttcctgttcttgtgatcgtttttcgcttacacaaaagtgctaaatccaggggaaattgtgaggcgattttcacaccaaaaaaaaaaaaagaaaaacataactccttgactcacgcggggtgtacaattcgcttgttatttttttttcgctggttgtacatttgttttttcttttcaatttttctacgggtcagcgaaatgcggcgatgcaacgccagccaaagcggcgtatacgtgatgcctcacaagccattcggtgacgacgcatttaccttagctgcttgttctgttgattgtcgttttcgaaggtgtattgtaaatttctgccgatgcgatcgtatttcgaaatgtcaacaccaacacctgcagtaggtaattcaagcggctcaggtgatgccagccagctacacggcaagaaaataggtcatgtttggaagacatacctatgtatatacaaaatgctattatgctattatcatggaactttaggaatgctcataaaatctgagactaccccagtttcacatacttcaaatctagttttagaatttcgaaagaagctataattccagcatataacgattacattttcccgcagtacctatataatgagccaccgattgaaccatttttgcatggacttgtcgaatttcgacggtgattctgagaaaata

SEQ ID NO: 30437 - DNA, 543 bp, DROSOPHILA
atgccgtcgaatgggccattatatttactgtttctatctgttctgctgcaggattcaatgggcactcgtctcctgaagttcaccaatgtcaagtgcatggatttgcccacatctcgcggtctcaccaaatatgaatactgtcatttgaaggtggttcgcaggaatcaggtggaactttcgctgaaggtcagcctgtttcagttacccattcgcaatctgaccaccagattgcagtgctttcaacggcgggatggctatcgaccctttatgtactacatactctttgatttctgcaaactaatggccagcaggaattacgatttgtccttcgaacgattcatctttgatgctattcgcaagcagagtaactttaatcaaacgtgtccttggaaggagaatcacatgacggtggagaagttcgccctggatttcacaaagatcagcatgccggtgcccgcgggaacctaccgcttgggtttcaccttttacgcgtacggcatcgctcgtacattgacacaggtgtttttcgagaaaatcgagtga

SEQ ID NO: 30438 - protein, 180 aa, DROSOPHILA
MPSNGPLYLLFLSVLLQDSMGTRLLKFTNVKCMDLPTSRGLTKYEYCHLKVVRRNQVELSLKVSLFQLPIRNLTTRLQCFQRRDGYRPFMYYILFDFCKLMASRNYDLSFERFIFDAIRKQSNFNQTCPWKENHMTVEKFALDFTKISMPVPAGTYRLGFTFYAYGIARTLTQVFFEKIE

SEQ ID NO: 30439 - DNA, 2671 bp, DROSOPHILA
tataattaggacactgaacttactttgcagcgcaatatgcccattcaagccattgcctatctgattggacccgtgcaatcggataatacccaggtcaagggcaacgtgacctttacgcagaacgactgtggccagaatgtccatgtgcgcgtccagctggagggattgaaggagggcaagcacggcttccacattcacgagaagggagatctgaccaatggatgcatcagcatgggtgctcactataaccccgataaggtagatgcgggattctttataggattaggtgtctaaatcactaatataacttttatgtctcaggttgatcacggtggccccgatcacgaggtgcgtcatgttggcgatctgggcaacctggaggccaactccacgggcattatcgacgttacatacacggatcaggtgatcaccttaactggcaagctggggatcattggcaggggagttgttgtccacgaattggaggatgatctcggtctgggcaaccacacggattccaagaagaccggcaatgcaggcggccgcattggtaagtagtcagtgtaaaataataaaataataataataataaaatatttgttttaaaccttctttcagcctgtggtgttattggcatcaagtaaatatcccttccaacgtgtcagccaaatcaatatgctgctcgaatactttatgtgtagttgtgtaactccaggcgtagtaactaatgaaatgttttcccaattttcccaattcccccacccacaatcacactcacccttacatgtttggcttacacatttccctcaattaattgtctcagttcactgactcactcgatttgccgtgtgtgtgtttgtgtgtaataaaatcaacaaaaattaaccgaaatctaagctaaacattagcatactctgtaccacttgtgttctaccacctcatattcatggcctaaacaaactttcgcgctttgctggggttgcttttccgagtgggtaggtatgacagagagcctttttacctatcatttttactaacatcattagcattagtcggtcggtcggtcggtcggtcggtcggtcggcgaagagaaggggatattggaataacaactgccgctggaatcggaactttactgatccaaccagggttcaatcaaaaaactcacattgtatgttttccagtggcccatctgtacctgcacctgcaccaccaacaccacgccatcagccactgtactatgtgccccatggggagccacaagatcatgttgtctatccactccagcactatcctttgccatacccacacccatatccatatccgcacccatacccctatccgtatccgttgtcgcaccaattgtatctgtgagatcgcgagactacaccgttcgcctgttccaccttctaattgcagctcggatgtggacgagtggccatgtcgcgatggtggcgccggcgccctgcgctactccttctccatcctgaccgtcatcgtggccctcatcatggcccgcagccttgactaatccgaaacatgcacccggatcggatcgaatgcacgcatgtggcatgggattgttggccatcgtagtgatctgcatacctacttacacactaaccacacaaccatgagtcgcacaccactaccaacagtaattataatactccagcattatccacccaaatagagaaatcaaaggaactaactaagctacttgtaaagtgtttgaattgatcgataataaagtttgttatttgtatttcgggtgcttgcaatttgtacgtgcttagatagtaacaaaagttgctgaaaatgaacgacagataagggttagctctaattttataaaaaagattagacaaagtgtttccaatggactgttagaattgcacataaatcacagtagtagtaagttatcaagagaattaaatataacttcaattttgtatgttgatttctaaggacaaatagctgtttgttccctaaaataggttaccaaataaatgaacactcaaaaagttggtaggaaaactatatatagaacttcgacgtcaccaaagcttttcctacccatacacctttatgtggctgcgaatgggtcatataacatttagttgcctttgatttgctgaattccagcttagagccacaatttgctttaaattgcggaagccttcagaaaatatttgtgctccaatcattcagagaactccaattcccagggattttgattccaagccgccgcaactaatggtcaagcaacagtttttgcttttattttttctagatttcttcgaccagataggctcagccagagaatgggtcaaacagtgggattctagaaaacctagggccataattcccgacacgcaacactaacatcatccgaaagactgtggcatacttctgggcgtctttaattatttcgcacagtcctcagagaaagagaaagcatttacaactttctttgccgcgcacgaaagcacgcaattaatttcgccttgggcccggtcgagttccaagtgctaagtgccgaactttaaagggaaacacatagacgtgggcgcacagctaaatttttatggtaataagtgcaatgacccacccggaatccagctggagatggcgaatggagccgtgagtgaggcaagtgaggtaagccccg

SEQ ID NO: 30440 - DNA, 671 bp, DROSOPHILA
tatgacagagagcctttttacctatcatttttactaacatcattagcattagtcggtcggtcggtcggtcggtcggtcggtcggcgaagagaaggggatattggaataacaactgccgctggaatcggaactttactgatccaaccagggttcaatcaaaaaactcacattgtatgttttccagtggcccatctgtacctgcacctgcaccaccaacaccacgccatcagccactgtactatgtgccccatggggagccacaagatcatgttgtctatccactccagcactatcctttgccatacccacacccatatccatatccgcacccatacccctatccgtatccgttgtcgcaccaattgtatctgtgagatcgcgagactacaccgttcgcctgttccaccttctaattgcagctcggatgtggacgagtggccatgtcgcgatggtggcgccggcgccctgcgctactccttctccatcctgaccgtcatcgtggccctcatcatggcccgcagccttgactaatccgaaacatgcacccggatcggatcgaatgcacgcatgtggcatgggattgttggccatcgtagtgatctgcatacctacttacacactaaccacacaaccatgagtcgcacaccactaccaacagtaattataatact

SEQ ID NO: 30441 - protein, 66 aa, DROSOPHILA
MFSSGPSVPAPAPPTPRHQPLYYVPHGEPQDHVVYPLQHYPLPYPHPYPYPHPYPYPYPLSHQLYL

SEQ ID NO: 30442 - DNA, 2567 bp, DROSOPHILA
cagttcgccggcctccaggacgtccacgtaaaacttgtcattgtaggagaccgggaaaaccacggtgttgagcttctttagctgcttgatgttgtggggcgtcacgtcgcccagttcgatgctgctcctgcaagcgggaaagggtaggaacatgggttagcttttccgacccaagcggcacttttaggttatgattccggtgcatctcctgcagtcacaatcctccaatggtccggcaaagatagccactcacctagtcatgttgtctgtacgatttctgttgatttagcaacgcgctttgcgccgaaaattgtaataggaaaatgtgttttaagcgcctcagctgttcctgattgttcgggttgcaggtcgcaagttatcgttatcggttattgacgccggccagaatagctattttatagcaagataaatttgattttcatatctaagactactaactaaacttttttgctcacactattttaagcaataaacaaaaactaataattaattaaaacagaactaaaaacactcaatgctaaatgaaacattacacatcgttttttatttgggatacgcatacactaaatgagatgacagctctttccggtcggttgacattagctatcacttgtttgacagttagaatatgaacgaacactttcaataatggccaacttttaatttcaaaacatattgttacctctactttttcgtagtgagttatgctatagatacacttttatgtatgtaacaatatgaaatattgggtagtccttgtttctaaactagttttttttaaagaattttttaaatttacagtacaacttttgtattttttagcaactcttagttatatttatattatattcgatattcgccatgggtacgcgaacgcaaatgtgagaaatctcctaacgggtttttcttcacaaaaagaaaacaattcgcggctgttcaatatttttctcccccaatatccatcgatttcgagtgccaaatgaatcccaacatgaacatgatgcccatgtctgggccacaaatgatgcaggtaatgcaatcctcgccatcgggacccccaggaccagtgcagcatcaacagcagcagcctccacagccactgcagcagcagcagcaggccgaaaaattggacaacatttccagggtgaagagtttgctgggaccactgcgggagtccatgttcctcaccatccggtcgagcgccttcgcgctgcagcaaaacaatctcgcggacaacttaaagagggacacgggtgcccaccatgttccgcggttcgacaagcacttggaagacttttacgcctgttgcgaccagatcgagatccacttgaagacggcgatgcagtgcctccagcagcagaactcctccaatcactatctccccggtccggtgactcccatgcgcatggagacctttatgccggacaacgccggccccatttcgtatcccacttacttgaacacggtccgcgttcacatacagtccgccaaggatatacacgacactctgattagtgccgcgcagaacatttcgcaggctgattgatagttgtagtagcattaggttttattatttcacacgcatgcacttaagttaagtaaataaatattcttagatataagataacaatgatctttgtttgggaaagtcgaaatggtgttaccatactcaacgtttttacaggcggaagagtaaaagggaaaataataaaataaatatagcttgtgggcattagtttgcatacagaaaacatgttacacaaaaacatcgagcaataaaataaattctagttgtatttcgtgtaccactatttgtgaaaatgtttgcagtgagaacgcgttgcagcagtcgatgagtaactgcgcatccagtgagaaaaggctaaaaattcgatagacaacagtcggacgtgtcacaattagaacgcaaaagcaaaacacagcggtgccgcgcatttatttacaactagaaaagcggtaaggtctcattttgttgttaactgtgcacaagccgttaatttattcaacttctccgaccctcagcttactaaaccagaacaaatggcagatgaacaaccaaatcttgtggccggacacccacctgcatgtaagtgcacttgcattggtgtgtgtgtgtcgatgcagacgagttttcgatttttggcagcaattgaatcttataagaacaaactgccttgttggcaatcaataatgcacccaatcaaatcaattgccagaatatctgcgcccttatcagtatcttaacctgtttcggccaaagctgataagtaaacaaataagcgaacacaggcaagcaaacgcatagctttcaagaaatgtatgtttgtatttgtactttatgctgacgtcacgtgcaattcaaacaataacgttaactgaataggaaattattactttttaaagtagctttttacgccttatattttatccttaacgtttataaaatgccattgacttaatcatcttcgtacaatgtaaataataacatgtcaactttggacgactagtatggcttacttactttt

SEQ ID NO: 30443 - DNA, 567 bp, DROSOPHILA
atgaatcccaacatgaacatgatgcccatgtctgggccacaaatgatgcaggtaatgcaatcctcgccatcgggacccccaggaccagtgcagcatcaacagcagcagcctccacagccactgcagcagcagcagcaggccgaaaaattggacaacatttccagggtgaagagtttgctgggaccactgcgggagtccatgttcctcaccatccggtcgagcgccttcgcgctgcagcaaaacaatctcgcggacaacttaaagagggacacgggtgcccaccatgttccgcggttcgacaagcacttggaagacttttacgcctgttgcgaccagatcgagatccacttgaagacggcgatgcagtgcctccagcagcagaactcctccaatcactatctccccggtccggtgactcccatgcgcatggagacctttatgccggacaacgccggccccatttcgtatcccacttacttgaacacggtccgcgttcacatacagtccgccaaggatatacacgacactctgattagtgccgcgcagaacatttcgcaggctgattga

SEQ ID NO: 30444 - protein, 188 aa, DROSOPHILA
MNPNMNMMPMSGPQMMQVMQSSPSGPPGPVQHQQQQPPQPLQQQQQAEKLDNISRVKSLLGPLRESMFLTIRSSAFALQQNNLADNLKRDTGAHHVPRFDKHLEDFYACCDQIEIHLKTAMQCLQQQNSSNHYLPGPVTPMRMETFMPDNAGPISYPTYLNTVRVHIQSAKDIHDTLISAAQNISQAD

SEQ ID NO: 30445 - DNA, 1873 bp, DROSOPHILA
aaggtcgcagaatcgccacatcggcatagacaccggggtagttgtcgtccgcacaccggtaaccccaggatacaatgcccaccagctggctactggccaccaaaggacctccagagtctcccgtacaggcatctgcatcagtgctggcagcgcaaattgtttcctcgcccacaaaatccgcaccgtagccaaacttttgcgaggcacactctccgcgatcgatgatctgcaactgggccttctgcaagctatcggagagggctccattatcagtgtggccccaacccgtgacagtgactgttgttccacccgatggactcgtactggctaaattgatggctctcgttgagaggccaaaggtcagtggtgtggacagacgaagcacggcaatgtcgtagtgcaggaagcgggaatcaaactgctcgtggactttgtacgccgccacaggaaccaatgtgccgccgtagttgtgattctgtgcacccacacgcaccttcatcagcgtcacggatctctcatgtagacagtgtccggctgtgatgatgatctccttgctatagatgactccgccgcactcgtggcgcgcactgatctgaatagacacctgccagggggcgttacgaatcagctgatcgcttccgccaataattcgtccagtggcctcgacatctgacgcatcgccgagcagcaaaaggaccagcaccgtagccactattccgtaaacagccattccgaaagccaagtgcaaactgctcgtatttgtccacgaaaccccttcatggcgtgctttttactagggctgtaaaagttaatcttcggctaattgatggcttatcgttagtatatattactgatacccttgattggtcttggtcagcactgctccttacccggttctctagttcgatatgaaaacacgttgcccaggcaactattgccaaacaaatttatttagatgttgtgaatatcgaaaaaaggacttttgagagataataccgacatggataactggaagataaccgcggaggagcttatccgtctgcgggagagctgcttgcagtgcatccgtgatggagaactctatgaactgcgcaacgatgccaaacttagggctgtttatagcactcagaactacgaagaattcaagtaagcaatacaaataaacatgtctcaaattgaaaaatgcatgtaagccaattgccatcaggaacatagtggatgcggctcatcttcgtccagtgaccaagggcgacaaggcgaattttaagacgaagaatcgactatggaactcggcggcccgggattaatttgttaattgcgcaataaaaataaaagaccaagtttatagtcagaatatacgttttatttcgcacactttttaggcattgctaataacccaggagcggagggcagcaacatcggcatagacaccggggtagttggagtaagcgcatccgtatccccaggagacaacaccgacgaggactccgccggagaccagtgggccaccggagtcaccctggcaggcatccttgccgctggcagcagcgcagatcatggtgctgcggatctggctaccgtatccgtaggtggaggaagcacactggctctggctaacgatgttcacgttcacgtactgcagctgggaggggatggagctggatccgtaggagagagtgccccatccggagacggaggccgcagcgccgttggcggggttggagctagccagaccgatggccttgatggtggagctgaaggtcagggcgccgttgatcttgatgatggcaatgtcgttgaccatggtgttggcgttgtagccctcgtggttcttgaaggaggacacagagaaggtgacaccgccggagctcca

SEQ ID NO: 30446 - DNA, 246 bp, DROSOPHILA
atggataactggaagataaccgcggaggagcttatccgtctgcgggagagctgcttgcagtgcatccgtgatggagaactctatgaactgcgcaacgatgccaaacttagggctgtttatagcactcagaactacgaagaattcaagaacatagtggatgcggctcatcttcgtccagtgaccaagggcgacaaggcgaattttaagacgaagaatcgactatggaactcggcggcccgggattaa

SEQ ID NO: 30447 - protein, 81 aa, DROSOPHILA
MDNWKITAEELIRLRESCLQCIRDGELYELRNDAKLRAVYSTQNYEEFKNIVDAAHLRPVTKGDKANFKTKNRLWNSAARD

SEQ ID NO: 30448 - DNA, 4843 bp, DROSOPHILA
ggagtcgactctccggcggactggaggacactcagtgcgaacaaaacgctgccgggcagctgttgtcagccgcagtacatcgactcgaccgtgggtcactgcctggagtcaccggctctcggcaaggataagtacttccaggtcggctgtgttggcaagctgaaggatcgaatcgagaagaacgccatcatcctgatcggtgtgggcatcggcattgcttttatccagattttgggcatcgttctggcctgctatctggccaactccattcgacaggagcgggccaagtaatacccatcgaagcaaattacaccgagtgtatccctaaatataattgatagctgtctaatattatatagttgaaattcttttaccgttgaattctgctcaatttacattacccttatccattaaacttaccctcaacatcgaaggatgcacacatatattgatgaaaaacgcaacaacgcatatcagattaaaccattttcataaacttcgtttcccaaacttactttcaaaacccaatctatcttattgttttcaaagatctatcttttaaagtgcatttttgtaaaaacaaccatgtttcatttaaatttgtttaccgaatgcatggaaaattgttgctttgtaatatcgaataaatattatccatatttatcaataaatattacccaactaccgtcttagccaaaaagttcaacaatctctggctttgaggtgtcttctagtactctttattgttaaggatctacgttgggtctacaattattggccaggctcagcgtccacataagcttgccatacagtaaatacgggttcaatgggtctacggtaccatctagaactacgcgtggacgccggatatggtgtctcagcgaggtgcgattgcgttttaacgagtgctccactactgctactacatcctctgggggcaaatgcaattaaatggtcggattccatggaactggaacttggtttcccatccgtcagttccctacttgctctggagcagagcttccgagaggcgttcgatggccgtgactggaggcttgcgaccatccttttcgccgctctcaaggattgcggctgcagcagccgcttcggcggcctccgcctcctcgagaactcgggcctcctcctgctcccgctgcttttgaaagtgccggaactcggtgggcgtgagcatacccctcaacaccgtttcatagctcacactgacgcccttggctcccatcttctggtgcaacttccagcactcgcgttccttcagactgcgcacatacgccggatagttgtgatccggctgcggttgttggtcctcgcaattggccgcgttgttattgttctccttcttggcctcgtccggcgataaggtgacaacgggtgggtcagctccaccctccttcttcggctgctggtccattttggcctggacgtcggttaggaaaatagaaactggcggcgctgtgggcggtcgattggctcggattcgggctgccagaggtgctatcgaaccgcggcgtatcatgtgcgagtactccttggaggccagttggaaggtgggcggatagctgtcttgaaacgagactgccagaaagctttagttcggtttcaatggttttagagtgcaatggaaaatcgaatctatgattgaagttggttagtttataggctttgaaatgcaagtattgcaatttctatgattttaacttgaaacatgtgagccagaaatgttaagtaaaaatacaagcaaaatatagtatttattactatattaacggcggaaatggatttgcaaataagtatgctatgaaatattttgcagccggataatgtgttgagcgcagtttttaacccgataacccaaccggttggcaaagcagatcttggcacttacccgatttgcccgtcttcctcaacaaaggcgcccttcgctgcgaggcgcccgatgtttgtttatccgacccgccagttggcggcgatgataccgccactgaactgttatcctcccgctcggagtcgctgccctcggaactcaacagggacaccagggtaatcacatcgggtgcaacgacgctgcgtgcccgattcaaagccttcttggatgcgtttccggcgacggaggacgaggacgtagagttgtccccgatgacatcgagcggtacggaggacgagggcgttctcgtgaagatcttgcgtcgacgcaatttctgctggctgcgcttgctggcggctatgacgcccttgctgctctcgtccagtccgcggaccggagcggacatagcacgcaccaaaggcggacgccgctggacggtcagcgccggcgagatgctcaattggatgtccgggttctcaaccggatggctgccctcgatatcgctggctcgctccgcttccaggtccgcgtccgcgtccacttccggttcctgctctctctcgttggtggcccttatggtctgcgacagcactatattcagattaatgcgattcttgtccgccttggcgctgctgcaaacgtataatgaatattgtagctacagaatgtaacgtttgaggatatcgaaatcgaaatggaaatggaaatgcatgaggaaagtgggaaatgaaaatggaaagtttcgagtgacctactcccgccacccggctaaatttaaatcaaattatttggcattagttgcggggcaatttatgctgttctcgattccgaatcatgcaaggcacagaaatagaaattaacttgggtgttgggttccgccacacccaccgcgctcgggtgaaaggaaaccatgtcaattacgttgccaattggcgcccgaaatgccgaccgatgaaagtgagtcgacgaatctggcggccgttgaacccgccgcctctgctgctatcaggcaagttttccgcttttcagccagctatcttgtcagcgtttcgagccaatgatcgacttaagtgtgccgccgatgggcggtgggcgatgttttgcgtgggagttgccggctccttccattggctccctacttcgagcatgtctagcgtgtgttatgcactggaacataaaactttgacgtttgatttgggcgtgaagcatgcaaattgcacatacaacttgacgcgacgcccatatcgaaagtgtcactttcggcatatttatatagatgatatcaggacagcatttacggctggattcatagggcttattacgtatacgcatgcagtgagtggtacccaatacgcagcaaggtcaaacaatagaatacccgatgggtttccataggtgcgacaatacctttcgacacttcaggaaagcaataggcaaacccttacttaaacccttgcctttagaaatcatctattagaaaataactgatgtgatataactgatgtgatattgagcatatcatccagttgcagtactcacattttcgcctcgggctgttccacctgtgcagccctttccgactcctgatcctttagcaaagacgaagttgaagaccaggccaccagacttctgtccctcagccgtaagccctgcacctgtgacgccgtgatgcggggtgcagtacgcggcgcggtctcctcgacggccagagatgcctgcctgcccacgggatagagcttctggcggatgttctcgatggatcggcccacggagagacctctggagaggtagcctctctgctgggtcgaaaatctggacgtgggctcgatgaaggagtgctgcttccgcacggacagcggcaggtgatagcgcccgccggaagtggatgaggatgggttcaccacggacgatgatgcgtttgtcgtctggaggcgacgacggctggccacagacagcgacatagtgacagccagtttatccttgataaccttgattagcaacggtgacaatgagcggttaccgaaatggagtgagccctcgatggtgaagagcttttgggccggagttgcaagaagggtgccttacgtttcaattgccaatcaatgtggcacatcgaatgcaaatcaattacgaagtcattaagccggaggcaataactttgtcaacaaagctgacggtctgaaatggaaacccacaagcgaggcaccaacgagccgccaaccgtgaaccgtgatccgtcacgaaagcgaaagccactttgcaaatgcgatccccgtctggccgagatcgaggtggcttccacgtccacttggctcgaatgccctgcaccgactgcgttttgtgaatgaagaatttcggactccgaaccggaatcggaatcggaatcggtttttttttgggtgggggggggaggttcgtttatgttgccaacaaacaatcaacaaaatcgcaacgttggcaaggagtcgcctgttatgctggctcaggctctccttacagttcggttctttgttccatttcctgctcacacccacacgtcagacaaccatccaccgaagcacactgaaagaaattggagtgatctaggaaaaattaaaaaaggtaatgtcccttacaaatgagctattatactcgattagtaaatgtatcctgttaataattggttcgttttttatatgaaaaacttttaaaaacttaggtttattgtaatatttatttttgcgagttgttgaaaaactcccaaaattaaaatattgtagaatatagaacgccaaaatttggcttatacacaatcgcgcctgcttctatgtttgcaatctaagtaccaatttcgtttccggtcagagtgcactttattttgcccaatgcatccgtcgatccacctgccaaccccggatcaacccactcctcccccaaagacacgtgcaattccggtgggtctggcaagttttcgactgcgac

SEQ ID NO: 30449 - DNA, 1614 bp, DROSOPHILA
atgtcgctgtctgtggccagccgtcgtcgcctccagacgacaaacgcatcatcgtccgtggtgaacccatcctcatccacttccggcgggcgctatcacctgccgctgtccgtgcggaagcagcactccttcatcgagcccacgtccagattttcgacccagcagagaggctacctctccagaggtctctccgtgggccgatccatcgagaacatccgccagaagctctatcccgtgggcaggcaggcatctctggccgtcgaggagaccgcgccgcgtactgcaccccgcatcacggcgtcacaggtgcagggcttacggctgagggacagaagtctggtggcctggtcttcaacttcgtctttgctaaaggatcaggagtcggaaagggctgcacaggtggaacagcccgaggcgaaaatcagcgccaaggcggacaagaatcgcattaatctgaatatagtgctgtcgcagaccataagggccaccaacgagagagagcaggaaccggaagtggacgcggacgcggacctggaagcggagcgagccagcgatatcgagggcagccatccggttgagaacccggacatccaattgagcatctcgccggcgctgaccgtccagcggcgtccgcctttggtgcgtgctatgtccgctccggtccgcggactggacgagagcagcaagggcgtcatagccgccagcaagcgcagccagcagaaattgcgtcgacgcaagatcttcacgagaacgccctcgtcctccgtaccgctcgatgtcatcggggacaactctacgtcctcgtcctccgtcgccggaaacgcatccaagaaggctttgaatcgggcacgcagcgtcgttgcacccgatgtgattaccctggtgtccctgttgagttccgagggcagcgactccgagcgggaggataacagttcagtggcggtatcatcgccgccaactggcgggtcggataaacaaacatcgggcgcctcgcagcgaagggcgcctttgttgaggaagacgggcaaatcggacagctatccgcccaccttccaactggcctccaaggagtactcgcacatgatacgccgcggttcgatagcacctctggcagcccgaatccgagccaatcgaccgcccacagcgccgccagtttctattttcctaaccgacgtccaggccaaaatggaccagcagccgaagaaggagggtggagctgacccacccgttgtcaccttatcgccggacgaggccaagaaggagaacaataacaacgcggccaattgcgaggaccaacaaccgcagccggatcacaactatccggcgtatgtgcgcagtctgaaggaacgcgagtgctggaagttgcaccagaagatgggagccaagggcgtcagtgtgagctatgaaacggtgttgaggggtatgctcacgcccaccgagttccggcactttcaaaagcagcgggagcaggaggaggcccgagttctcgaggaggcggaggccgccgaagcggctgctgcagccgcaatccttgagagcggcgaaaaggatggtcgcaagcctccagtcacggccatcgaacgcctctcggaagctctgctccagagcaagtag

SEQ ID NO: 30450 - protein, 537 aa, DROSOPHILA
MSLSVASRRRLQTTNASSSVVNPSSSTSGGRYHLPLSVRKQHSFIEPTSRFSTQQRGYLSRGLSVGRSIENIRQKLYPVGRQASLAVEETAPRTAPRITASQVQGLRLRDRSLVAWSSTSSLLKDQESERAAQVEQPEAKISAKADKNRINLNIVLSQTIRATNEREQEPEVDADADLEAERASDIEGSHPVENPDIQLSISPALTVQRRPPLVRAMSAPVRGLDESSKGVIAASKRSQQKLRRRKIFTRTPSSSVPLDVIGDNSTSSSSVAGNASKKALNRARSVVAPDVITLVSLLSSEGSDSEREDNSSVAVSSPPTGGSDKQTSGASQRRAPLLRKTGKSDSYPPTFQLASKEYSHMIRRGSIAPLAARIRANRPPTAPPVSIFLTDVQAKMDQQPKKEGGADPPVVTLSPDEAKKENNNNAANCEDQQPQPDHNYPAYVRSLKERECWKLHQKMGAKGVSVSYETVLRGMLTPTEFRHFQKQREQEEARVLEEAEAAEAAAAAAILESGEKDGRKPPVTAIERLSEALLQSK

SEQ ID NO: 30451 - DNA, 5322 bp, DROSOPHILA
ttctcgactgagcgttgccatccctggtcacgaccagtgtgaccatcgaactggtacgacttcggcaattttcgtagctgtcaagtgacgtgacgtatgtatggtgctgtcgtggcgttcgcttccagagagaaagaaagtcgcaggtcgccgagttggatagccgtagagttccgcctattccattgattactaaataaaaaccacctcataacttgatcaagatgtcccgtcaactgttcgccatttgcctgattgccgccgtttgtgcgtccggcgtctacggtagctgcaaggccaccgtgagctctttcagcacccaggatgccacgattctgacccagctggcccatgtgggcgagttcacgctgcagtgcagcggagccgctcccgccagcctgttcgccgagttcccctgcggcaaggtggtgccggtggccaaggtgggcgacaacaagtaccaggtgagccagtagtagccccgtcaagttttgtgcaaaggctaatctctgttctgcactaggtgagctgggtggaggatatcaagcagggcagcagcggcaatgttcaggtgcgtctcttcgacgaggatggctatgccaatgtgcgcaaggcccagcgggatggcgacaaggtttcatcggtgaagtcgctgctcgacatttccgtgcccaccaagggtgcctacaagggtccctggatcaaggctgagcttttggccgccttcttggtcggcggattcgcatacttcgccttcaccaccaagggcaaggtgcagtcctaagtagaggatgccttcgtcatcgagattttgaatgaaattcattcgcactaaagtcatgtaccatcaaattgccgggtcccggagatttttccacattttgtacacctaagcatcggatcacccgccgctccaaaataaactgattgaaagaccaaccgaaggaacctagttgagattaatttaattttaatttagagataacttgtacgaatacgcttaaacctggcccgtggagggcgctccattcatggtcgcctcctcgtcggaggagatgtctatcatgctctccacacgcgacggcgacatcacatacacaaagtgctccgtggagccctcggggccgactggcggcgggggtatgaccacggagccgtcctgcggcggcggtggcggagtatctatgctgcagtacttgagattcccagctcctcctccgcctgaatcatccggcggtggcgctccaccgttgcaatcaaagttctccagctctagctccaaatcactgacgattcgcatgcaacgcatcttggcgagcgactggaatttcatgggcatagctcgcacctgccgcgccagactcaagaagaaaagagtgtttgcgtcaagttctctgttggcctgtagcacggcagagacgtcccaatcgctcggaaaacgcggatcgcaaatcttacgcgttttggcgggcgacggctgttgttgctgttgaatttgtggcatttgcattgactgctgctgctgcgtttgtacggaattccctccggagcaacttaggttgatggccgtggtttgcggcgaaggttgtacccttcgcaccttggaggctggtggcgctggcggcggcggcggaggagtgggattacccatgggtaagctcgggcagctgccgttcaaacgattggcgttctgcacttggttggccaggttctggaacaatcccaaaggtgctccagctgccgcagccgctgtcagttccttcttgaagttgtccgccgccgcaaagagatgcggctcgatgatcagacaaccgacattgctgttggttgcgctgccggtgctgcaaccaggcggcgtgatcgtaggtggcaggggaagaccagcagccactgccgccgccttgagcgtggctagcgggaacatctgctgggccagtccgctcacgcccaagcccatgggcagatggttagccagagaggccagggcatttgcattggccttgctgacagcagcagctgcggcagcgactgaggatgcgggtgagatgggcaggggcaagactacggcggaattactgccactggtggcaggtggagtcatcgaactgagcggtgccactgcagcacagtttagacttccggttgcactgccgttgctattgctgttgtggatttgcggtcccacggacccagaacctcctcctgttccgcccaaattgctgcctggagagatcatattcgggggcgtggtcgcgcccaaacttgatgttatgccggacgccgaagtactgcttaaagcggtagtataggtattaaccgtgtgcgtccccatggatgagcaaccagccgatgcagtggcaatggttatcttcagctcatcctcgcctccattgctggccgccttggccaaaacttggtagccaaaatcacactctgtgtcgtcctcgtcgttggattttccattgccattcgcggagttcctaaaacagatgatcagttcggcgattgtacaaatgagctgcaatgtggagtactcacctgcccggtccctggaagggctttaggaaatccatgtgatctgcatgggcccagtactggtacttcttggatgtctttgtgcctacgcgaaacgagcgaagatactttgtataactgtcccttagatttttccatttccgtttcgaggcctctaaaaatcaaatgcaataagaaaaaattagatgttgataattgtggtatgcaacattgaaaaatcggaagtgttttgttgaatattactctcagtcgttatttaatgattaaggataaaataagttttaagcttagaccatctcacaaacttatcgctgattctattatcaggactgctaatttttaaggatgcggctcaatacgttgtcagctaccaaaagcatatttcaacacagatttaaatattcttttaattttttccattagcccatgtacaaatgtatagtggggtcaagtttaaaatttaaatttcggacagtgtgaccgccgttcatgaccaacgaaatacttaatcagcgaatgcagtttggagtttttaataatataattcattagaatttgcaataagcgatctgctcgccaatatggtgaatataaagccgcaatcaaaagaaatttaatcgtgatattctgaaattcaattcaaaaaggtattcctatcatctgaattgctcgtaagatattataatagattaaaaaaagcatttacacacgtttcatttctaaaaattatgagacttttgtatattgtacacacatataagcaaagcgatgcttagtatcttctggggctcttattggaagtatgctccaaaagcatttaagttatgctagattaaaattaatcccaaattaaaccgtcgtggcggtaacaaatgtttaatgtttacgaggggaactaaagaatacatggtgctctatttagacaaaatacacattaaaatataactaatgtatgatattacacatttatttatgtttgactaaaagttaaaataacaattatataggcaatattataatataataataataataatattattaaaaattgcagcacaggtggttgcttgttttgggaaaaagtttcgcacctggcaacaccgtgcgcaatgtttttgttttgaaaagctctcgccaacccactcccacaaccgccccttccggcctgttcactatctttctcgctctttctctcagcatcagagagcgcgcagttttcgctcatcgactgtttttgtttgttttttctgcgtgccagtgtgttttccttatattttttttgtttctgcttctcgctgcaatttgccgaccgcactccaactgacatacacacacacatatgaacgtacagtttctatatacatatgtatatgtaccagcgtacgaaaaatatcaggccgggcggtttgagtttgtccgctttcaggtacatatacaaaggttgtatatatgcatatacatatgtatatacagtgcagcagtgtgcgtgggttctacgtaattcaatttcctgcgcctccttcttatttgctgggtggaagggggtttggtggtgggccgggctgacgagggggtggtgctacttgtaattattacctacccactgaaagacctatctcatcggcgatttgcgtccaaaccttcagcttcacttcaacgttcttgtaatccggattgtggttgttgtacaccacatcgtacttctttacgatctcgatgaaatcggaggtgttatctgacgtagtcgaggactcgctaattgcgcgcgccactttcacatccttcatgctaacggcgctttgctaacggtttcggcaagcttcttatttttcggtcgcctccttgctaacagtacacagcaggagagagcgcgggctaacgagagagagagggagagagagcgagcgcaaaaatcggaatctgccaaccgtccgactatccgactaccgttctgtgtgcgaccgctccggcaaacgttggacacttgaatgaaacgacgacgacgacgacgccgccgagagctgcatgcacacacaagtacgctccccactccaccgttcccccatgccgcaccgcccctgattcaccctgccccgccccgcccccacctaccgccgcgcgcgcacactcacacacgaacgcacactcacacatacatgcatagacagcccgaaccaacaacaaccagcaacagcaacagcagcaccagcgacaacagcaacagcaaaagcggggccccaacagcgaacgtcgttggaggacgtgtaaagaagaacaagaacaagcaggcagccaggcaagctcatcatgacgaaaaaacagagagctggcggaggtgggagggcagggaaggggcgcaacatgggcgttcgcaccgcttgagcgttaaccgcccacaagaaaaaagcagcaacagcaaccacatagaaagaagaaccagagggctagttgcactatagtgctaggtatgtatttgtgtacatacatacatgcatatacatatgtatatgtgtggacacgaaacccaggcgcgacaaaattgcgatgctgcccgcactttgtggcaggcgaaatgtgctgcaagagctgcttaaatgcattttaaaatgcagaagatggaactgttgattgtcacgtgcccgtttcgtccagccaagttcaaggtcacagcataagcaatggcatatcgaaaggatatcataacgattgagaattgtgcaaagagagcatcaagagagtgatctttgcttatccttatcagtttgtctcaaccgagcttttggtacc

SEQ ID NO: 30452 - DNA, 1818 bp, DROSOPHILA
atgaaggatgtgaaagtggcgcgcgcaattagcgagtcctcgactacgtcagataacacctccgatttcatcgagatcgtaaagaagtacgatgtggtgtacaacaaccacaatccggattacaagaacgttgaagtgaagctgaaggtttggacgcaaatcgccgatgagataggtctttcagtggaggcctcgaaacggaaatggaaaaatctaagggacagttatacaaagtatcttcgctcgtttcgcgtaggcacaaagacatccaagaagtaccagtactgggcccatgcagatcacatggatttcctaaagcccttccagggaccgggcaggaactccgcgaatggcaatggaaaatccaacgacgaggacgacacagagtgtgattttggctaccaagttttggccaaggcggccagcaatggaggcgaggatgagctgaagataaccattgccactgcatcggctggttgctcatccatggggacgcacacggttaatacctatactaccgctttaagcagtacttcggcgtccggcataacatcaagtttgggcgcgaccacgcccccgaatatgatctctccaggcagcaatttgggcggaacaggaggaggttctgggtccgtgggaccgcaaatccacaacagcaatagcaacggcagtgcaaccggaagtctaaactgtgctgcagtggcaccgctcagttcgatgactccacctgccaccagtggcagtaattccgccgtagtcttgcccctgcccatctcacccgcatcctcagtcgctgccgcagctgctgctgtcagcaaggccaatgcaaatgccctggcctctctggctaaccatctgcccatgggcttgggcgtgagcggactggcccagcagatgttcccgctagccacgctcaaggcggcggcagtggctgctggtcttcccctgccacctacgatcacgccgcctggttgcagcaccggcagcgcaaccaacagcaatgtcggttgtctgatcatcgagccgcatctctttgcggcggcggacaacttcaagaaggaactgacagcggctgcggcagctggagcacctttgggattgttccagaacctggccaaccaagtgcagaacgccaatcgtttgaacggcagctgcccgagcttacccatgggtaatcccactcctccgccgccgccgccagcgccaccagcctccaaggtgcgaagggtacaaccttcgccgcaaaccacggccatcaacctaagttgctccggagggaattccgtacaaacgcagcagcagcagtcaatgcaaatgccacaaattcaacagcaacaacagccgtcgcccgccaaaacgcgtaagatttgcgatccgcgttttccgagcgattgggacgtctctgccgtgctacaggccaacagagaacttgacgcaaacactcttttcttcttgagtctggcgcggcaggtgcgagctatgcccatgaaattccagtcgctcgccaagatgcgttgcatgcgaatcgtcagtgatttggagctagagctggagaactttgattgcaacggtggagcgccaccgccggatgattcaggcggaggaggagctgggaatctcaagtactgcagcatagatactccgccaccgccgccgcaggacggctccgtggtcatacccccgccgccagtcggccccgagggctccacggagcactttgtgtatgtgatgtcgccgtcgcgtgtggagagcatgatagacatctcctccgacgaggaggcgaccatgaatggagcgccctccacgggccaggtttaa

SEQ ID NO: 30453 - protein, 605 aa, DROSOPHILA
MKDVKVARAISESSTTSDNTSDFIEIVKKYDVVYNNHNPDYKNVEVKLKVWTQIADEIGLSVEASKRKWKNLRDSYTKYLRSFRVGTKTSKKYQYWAHADHMDFLKPFQGPGRNSANGNGKSNDEDDTECDFGYQVLAKAASNGGEDELKITIATASAGCSSMGTHTVNTYTTALSSTSASGITSSLGATTPPNMISPGSNLGGTGGGSGSVGPQIHNSNSNGSATGSLNCAAVAPLSSMTPPATSGSNSAVVLPLPISPASSVAAAAAAVSKANANALASLANHLPMGLGVSGLAQQMFPLATLKAAAVAAGLPLPPTITPPGCSTGSATNSNVGCLIIEPHLFAAADNFKKELTAAAAAGAPLGLFQNLANQVQNANRLNGSCPSLPMGNPTPPPPPPAPPASKVRRVQPSPQTTAINLSCSGGNSVQTQQQQSMQMPQIQQQQQPSPAKTRKICDPRFPSDWDVSAVLQANRELDANTLFFLSLARQVRAMPMKFQSLAKMRCMRIVSDLELELENFDCNGGAPPPDDSGGGGAGNLKYCSIDTPPPPPQDGSVVIPPPPVGPEGSTEHFVYVMSPSRVESMIDISSDEEATMNGAPSTGQV

SEQ ID NO: 30454 - DNA, 3603 bp, DROSOPHILA
gcacatattgttgcaaaattgatatcaatttgttttaatggccggcccattatggtaccattatatggttagtccgtgggttataataaaacacactttattacaagcattacgggcgacgcgcgccaacaggccaacaactgtggggctattgactcggattgcacggactgcctggactccctggactagtctaatcccagattgattccaatggccttgctaaatgatcatgtccagccatcagacggtggcattagcatgttagcatcgaagcggatatccagtggtgcatcaaagagaccagaaccagtatggagccgcctaccaggccacggctggattatgacgaaaagtgtgctggcgaaatttgaatatcgaactggatttcctccgacttatacatacatatatataggtgtctctgcggggccttcggggatcctgattaagacataactcattgtacaccgtttagttatgcagatgggatccagccatggaagtgatatgctacaggaagtttatgagccaggttgattgaacccaacccagcgcaactatttgcttcgttgggtggagtgaggagcactttgcgatgatcatgttttgctatacgcttcaaaaattgtgaataaacagaattcgccatttatgcaatatacaatatattatacattgttcttaatgatgctgatgatctaatggagcacctgagtcacgcgaagccgcgcgaagttgggttcattgaacgatgtggagcgatgtgaccgaagggtccatccaactatatcatccgatgagtagctgaaaatcgataggagcagtgcgatttgcagcacatgttcccaatgcaatcaaatcatttaaggaaatctactcggtgggcgtttttttgcaaaacaattgcttataaacatggtaattagaccctggaggcctccttgtacatataaaaggaactgaccgcccgcctggagctcagttcatactttgcgaaatgaacgactcgggttatcaatcaaatctcagccttctgcgggtttttctcgacgagttccgatcggttctgcggcaggaaagtcccggtctcatcccacgcctggctttttactatgttcgcgcctttctgaggtgaatctggcatcgtccatcactcgatccaatcttttataatccacatttttgccatacccacagtttgctgtgccagtatcccaacaagaagttggccagcttgcccctgtaccgatggatcaacttgttcatcatgtgcaatgtgatgaccattttctggaccatgttcgtggccctgcccgagtcgaagaacgtgatcgaaatgggcgacgacttggtttggatttcgggggtgagatttactgattcacccactcgcaaatgaacaaactaatggttatttctgggtgatagatggcactggtgttcaccaagatcttttacatgcatttgcgttgcgacgagatcgatgaacttatttcggattttgaatactacaaccgggagctgagaccccataatatcgatgaggaggtgttgggttggcagagactgtgctacgtgatagaatcgggtctatatatcaactgcttttgcctggtcaacttcttcagtgccgctattttcctgcaacctctgttgggcgagggaaagctgcccttccacagcgtctatccgtttcaatggcatcgcttggatctgcatccctacacgttctggttcctctacatctggcagagtctgacctcgcagcacaacctaatgagcattctaatggtggatatggtaggcatttccacgttcctccagacggcgctcaatctcaagttgctttgcatcgagataaggaaactgggggacatggaggtcagtgataagaggttccacgaggagttttgtcgtgtggttcgcttccaccagcacattatcaagtgagttttgtgtgccgagttacaagtactacacgcgtttttttggcagattggtggggaaagccaatagagctttcaatggcgccttcaatgcacaattaatggccagtttctccctgatttccatatccactttcgagaccatggctgcagcggctgtggatcccaaaatggccgccaagttcgtgcttctcatgctggtggcattcattcaactgtcgctttggtgcgtctctggaactttggtttatactcaggtatgtcgtttaaaatctttgaaaactttttaacaatcactccttttcctaattagctgcacctagatattgaaaccttattgaaatttacttattttgagatttttcctgttcaactttcatcaatagtcagtggaggtggctcaggctgcttttgatatcaacgattggcacaccaaatcgccaggcatccagagggatatatcctttgtgatactacgagcccagaaacccctgatgtatgtggccgaaccatttctgcccttcaccctgggaacctatatgcttgtaaggatataaaaatgtatataataaagatatcacgatatcaaccgtccattttcaggttctgaagaactgctatcgtttgctggccctgatgcaagaatcgatgtagtctgtagtgtttatggtttgtgaaaataaaagttggactttttctggccatttgcatttgcatggctcgtttgggttgtcgccgcgcccattgacactcggtttcaacaatggggtcggcccacgcacacccagcggcgacaggtgcaacccagctgcaaagtgcagaggaggagccctagcccgagcccacgatgcagtgcctctggagccagcctcgaacttattcagacgtgacacgcattgtcatgatctgacccaacgccagacaaagaggagcggtgatcgtttagtatttggtatttagtatttggagttggagcagatgctgctccatgcccttcacaagtgggaaagtcgcccgtgtccatgaaacgttgaccggccgaaatgtcattatgtgccatgtgcacattcggccagaacgaatagctccaccactctcaaaacttcaacaacacacccaattcagcgggtgcgtgttcttatgcactgaacaaaaaatccgtctgtcaacaaatgtcaattccatttttgttaattttttttaattatttaattaattttccattatattaattgctgtcattatttgatgcctgattattgttatcaaggtttgctccaagtattccttcgtttcaagtactaaccctataaggattctgtgacattatgttttcatgttttttttttttaactatttctcttggtgtaccggcaactccccaatttggagggtaaagtgggtggttcgttgggagataggcttttgtcaacttcggtctgctcgccgcactgattaacatttgaatggcaatccacatacgagcatttagaacattgtgtccatggctctttgttgctgtctccacatctaattaattcccccatttcgaccattgttgccatggagtcggggccgctgcccccgcaagtggtaatcgcattggcaatcgcgatggtaatggtaatcgtaatggaccaaccaccgatccgac

SEQ ID NO: 30455 - DNA, 1239 bp, DROSOPHILA
atgaacgactcgggttatcaatcaaatctcagccttctgcgggtttttctcgacgagttccgatcggttctgcggcaggaaagtcccggtctcatcccacgcctggctttttactatgttcgcgcctttctgagtttgctgtgccagtatcccaacaagaagttggccagcttgcccctgtaccgatggatcaacttgttcatcatgtgcaatgtgatgaccattttctggaccatgttcgtggccctgcccgagtcgaagaacgtgatcgaaatgggcgacgacttggtttggatttcggggatggcactggtgttcaccaagatcttttacatgcatttgcgttgcgacgagatcgatgaacttatttcggattttgaatactacaaccgggagctgagaccccataatatcgatgaggaggtgttgggttggcagagactgtgctacgtgatagaatcgggtctatatatcaactgcttttgcctggtcaacttcttcagtgccgctattttcctgcaacctctgttgggcgagggaaagctgcccttccacagcgtctatccgtttcaatggcatcgcttggatctgcatccctacacgttctggttcctctacatctggcagagtctgacctcgcagcacaacctaatgagcattctaatggtggatatggtaggcatttccacgttcctccagacggcgctcaatctcaagttgctttgcatcgagataaggaaactgggggacatggaggtcagtgataagaggttccacgaggagttttgtcgtgtggttcgcttccaccagcacattatcaaattggtggggaaagccaatagagctttcaatggcgccttcaatgcacaattaatggccagtttctccctgatttccatatccactttcgagaccatggctgcagcggctgtggatcccaaaatggccgccaagttcgtgcttctcatgctggtggcattcattcaactgtcgctttggtgcgtctctggaactttggtttatactcagtcagtggaggtggctcaggctgcttttgatatcaacgattggcacaccaaatcgccaggcatccagagggatatatcctttgtgatactacgagcccagaaacccctgatgtatgtggccgaaccatttctgcccttcaccctgggaacctatatgcttgttctgaagaactgctatcgtttgctggccctgatgcaagaatcgatgtag

SEQ ID NO: 30456 - protein, 412 aa, DROSOPHILA
MNDSGYQSNLSLLRVFLDEFRSVLRQESPGLIPRLAFYYVRAFLSLLCQYPNKKLASLPLYRWINLFIMCNVMTIFWTMFVALPESKNVIEMGDDLVWISGMALVFTKIFYMHLRCDEIDELISDFEYYNRELRPHNIDEEVLGWQRLCYVIESGLYINCFCLVNFFSAAIFLQPLLGEGKLPFHSVYPFQWHRLDLHPYTFWFLYIWQSLTSQHNLMSILMVDMVGISTFLQTALNLKLLCIEIRKLGDMEVSDKRFHEEFCRVVRFHQHIIKLVGKANRAFNGAFNAQLMASFSLISISTFETMAAAAVDPKMAAKFVLLMLVAFIQLSLWCVSGTLVYTQSVEVAQAAFDINDWHTKSPGIQRDISFVILRAQKPLMYVAEPFLPFTLGTYMLVLKNCYRLLALMQESM

SEQ ID NO: 30457 - DNA, 10763 bp, DROSOPHILA
gcacattatcaagtgagttttgtgtgccgagttacaagtactacacgcgtttttttggcagattggtggggaaagccaatagagctttcaatggcgccttcaatgcacaattaatggccagtttctccctgatttccatatccactttcgagaccatggctgcagcggctgtggatcccaaaatggccgccaagttcgtgcttctcatgctggtggcattcattcaactgtcgctttggtgcgtctctggaactttggtttatactcaggtatgtcgtttaaaatctttgaaaactttttaacaatcactccttttcctaattagctgcacctagatattgaaaccttattgaaatttacttattttgagatttttcctgttcaactttcatcaatagtcagtggaggtggctcaggctgcttttgatatcaacgattggcacaccaaatcgccaggcatccagagggatatatcctttgtgatactacgagcccagaaacccctgatgtatgtggccgaaccatttctgcccttcaccctgggaacctatatgcttgtaaggatataaaaatgtatataataaagatatcacgatatcaaccgtccattttcaggttctgaagaactgctatcgtttgctggccctgatgcaagaatcgatgtagtctgtagtgtttatggtttgtgaaaataaaagttggactttttctggccatttgcatttgcatggctcgtttgggttgtcgccgcgcccattgacactcggtttcaacaatggggtcggcccacgcacacccagcggcgacaggtgcaacccagctgcaaagtgcagaggaggagccctagcccgagcccacgatgcagtgcctctggagccagcctcgaacttattcagacgtgacacgcattgtcatgatctgacccaacgccagacaaagaggagcggtgatcgtttagtatttggtatttagtatttggagttggagcagatgctgctccatgcccttcacaagtgggaaagtcgcccgtgtccatgaaacgttgaccggccgaaatgtcattatgtgccatgtgcacattcggccagaacgaatagctccaccactctcaaaacttcaacaacacacccaattcagcgggtgcgtgttcttatgcactgaacaaaaaatccgtctgtcaacaaatgtcaattccatttttgttaattttttttaattatttaattaattttccattatattaattgctgtcattatttgatgcctgattattgttatcaaggtttgctccaagtattccttcgtttcaagtactaaccctataaggattctgtgacattatgttttcatgttttttttttttaactatttctcttggtgtaccggcaactccccaatttggagggtaaagtgggtggttcgttgggagataggcttttgtcaacttcggtctgctcgccgcactgattaacatttgaatggcaatccacatacgagcatttagaacattgtgtccatggctctttgttgctgtctccacatctaattaattcccccatttcgaccattgttgccatggagtcggggccgctgcccccgcaagtggtaatcgcattggcaatcgcgatggtaatggtaatcgtaatggaccaaccaccgatccgactgcagaccagccgccaagttgggttctcgaatttagtttgtcgcgccatattctaacgatcggtcgggttcggttcccaataagccatttgtggccataatcgtttcagttaaaaataccattgaccggatatccttgcagcaataaacggtattcaaatttattaagtgcctaacaagtgaccttcaactatgagtttgaacttacaagtgattttaatgcatcattacttaatgtgtcctaaaaaatacacctaatcctgcataggatttatatctcaaaggacatttggttcagagaaatgggaaacagatgcaagtttttgtgtaggtttttaaatagttagggattcgtcaaataaagtgaatcgaaggattatcaaaggattaagtttattaagctatcctataacataaaaattctgacatatttcgtattcggaacaagactattaagttacattttagaattacttctatttttcatgatcctttagagttcgattcctcatgaatactttccatctatattttatctttatagtttatataaagtttatatcttattgccttaggatctttaatagggtaccaagccctcctccttcctccaccaaatttgtaacctttcatagccaaattcacaattctgaaaaaaactttcggagttcaaagcgacactttccaagtacagccaccgcttgaggtcaatagctaacgctttccgaaaacccagttggctttagtggcgattgggttgtgcggagagcataaagagttgggtggacaaaaagccggaagcgacatccggagttgcggatcgatatgagtggggcgacacgtagctcggctagattttcgtttaatgatccaaattcacgttacgcattgtgcacattatggctgcagaaaggcagaaatatatttaactattcatgtgattttcccattttccacccgccacacacttctcggcgcggggaaaatctccctattgaggtcgcatacttcatgtcattttgttggccaatgaactaattagatcatgtcggataaaccagcgcgactaaccacgaattctgtttccagctaaacgctaaacacgctatagtttcgatatccaaaatccaaaagccaggttgcggtgaaaatgccgcgatcaagctagaaaacccctttccaagtactcaaaatcaaaccattgtggatcacacagcatgagacctagaaagggaatacacgtgttgctgacgaccctagtggttagtctaagcctcagtaaaattaatggtaagtttaaactatgtacataaccttattggaaataaatataataactttagtaccttatttgttccaatggtttttatgcctcatttaccaacaactaacttaattcttttttaaaagaagctttaaatgtccttgaaatatatcatcgatataataattcatctgtgataatatgatcttgagctaccatagactagtgatataactaattatcctgtgcaggtcaaaccacctgtaagaatggcctaggccgagtgctctatgaaagactgcccaaccagcagctccaggggtacgatgatgatgtggtgcgtgatacggcgccaccattccgtgtgctggaaaaatgccaggacctgtgcctgcgcgaccgatccggctccaataatctggtgcgcacgtgcaccagctttgacttccagccaggcagtcgaatcacctcctttggaggcaactccgagtacgaggagtccctgtgttatttgacatccgagcaggcgggacccgaaggcatcggtagcctgatgctggtgcccaatagtgtacactttaacgagatttgcctgacttgtaagtgcctacgatactttataggatcatgcttttatgatatccttgaatccgcagccagtcgcccggagagggagtgtcccagtaggagatatgtcttcgagagacatccccgcaagaaactgaagctgcccataagtgatattaaggagataacggctgccaatcgctccgattgtgaggacaagtgcctgaatgagttctcttttgtctgccgatcggccaactttgattccaccatgcgctcctgcacgctgagcagattcacccgacgcacccatcccgaactgatggaagacgatcccaactctgattacctggagaacacctgcctaaatggtgagtctagattatggtagccaagtgcctggactcactctctgaaccattgattagccgaaaggcgttgcgatggactggccgtttttgtcaaggaggagaacaagcgcctgggtggccccttcgaggtggacatattcaataacatgacgctggaggagtgccagaccatgtgtctccgggccgagaagtaaggcatatggataatatctctatttcagcgtcatttaagctaattgcacacaccgcattcccgcagatacttctgccgatccgtggagtttgacgaccagagcaaacagtgcatcctctcggaggaggactccatatcgcagaaggatgacattagcattagctccagtcccacacaccatttctacgatctggtgtgcctcgataatcgtaagtggctaccgtaaagaccatctcgtgtgagtcgagacgagaaaagtcaacagcgacaacaagattacagtggtgcatcccatcacaacggttgcatccacttccattgccccaaccatctgcacttccacttctacgtctatgttatgttgtattcccgttgcagaacgagccaacgattatccagataactcagtcacctcgcacctcttctccagcggccggcggccagatacagcattccagcggtaccgcaactccaggctgggcggcgagtttcactccgagatcacgggccgttcgctgagcgagtgcctggacgagtgtcttcgccagacgagcttccagtgcaggtgcgtttttagcgtcgaatgttgccgttgccatttttgtttcaatacccttgctaaagatcatcttagttcaacaagaccatggcatttcaaaaataatacatagctcttaaatatctttctaaatggcttcacatataatagcattactcagttgcttagatagtctagatacatatattttaagggtacttccatcttcgacgcaaggccttacagtctttctggttctcctactgcctcactaacccaaccaaccactctattctatcgcaaattacaggtctgcggtgtacagcgatcgttttcgtacttgtcgcctgagtcggtacaatcaaaaggacggcatgcgcattatatacgatgctgattatgattactacgagaatctgatgtgtaagtggttagaggaggtgctaatagcgggccagtaatccctgacatagctgctggttcttctcttgcagtgaatgtggtgggcggaggcgccgatggcgatggtggtgggcacggtggcagcagcgatggcaagcgacccggggatcagtcgggcagcaactggagacagcctaataagcacgacgatcgctacgggtcgggtgggtcaagtgttggtggtggctcgcatggtggaacgggttctggtggctcaagattgccaccgggcgagggcgtcgactatggcaggccatacgatcgttatccggacattgcgggcaatgaatatggtaggcagttcactttatgatctctaaatacacagctaatatactgttaaaccagatcgtaatccttatggcggagatcgcgatagagaccgctatcccccagatcgttatggatcccgatatcccactggaggagatggaattggctacaaccggccctatgatcgtttccctgatgattatggtaagtttactacttgttaaggttctgtaacccataatcccacaaccataattcacgatcacatcgttctaattctaattctactgacaactaattcactaaccccacgtcagatcggtatccagcgggtgcgggtgtcaatggcgatagagaccgcgaaagggatcgagaccgctacccagtagttggtgacagagatcgctatccaggcgctgtagacagagatcggtatccaggtgtcagggatagagatcgctatccggagccttatccgccagagcgctatgcggacagatacggagatcgacgatatccggaaagggaaagagatcgcgaccgtgataggttgccataccgtccactgccctatcccggaatcaatgacaatagcctgcccagtgatttgccgcatactcgaccctatcccaccgatgacgatgctcccttccggccctatggatatggaggtggacgctatggagagaacagatacgaaggccgataccctcctcgattccctcccagccgagaacgagatcccgtgggaggctacactggcagggatgctcctgacagcatattcccggacagacgctaccgcccctcgtcgatggattctccaaggtatccctatttgccagactcgcggggaccaccgggcagatatgatgatatagtgcatagtgccaggaggcccgagcccgactcggccaagcgatatccgccagcgccaattgctccaacgggaagctccagcaagtacgcctccaccccgaaccggtttccggtaggtaacgatcgttatcccattgacatctacaaatatggcaatcgtccgggacccaatgatcttggcaggcgaccaggtaagtacttcgggaagggactaaccaactaccaacttgtaacccgtaactcaattggtggcaagtgcagatgaaatgtgatctatgctaaccagtatacccaactaggtctggagcgtccgccacctcccttctacgattatgactacgaggagcggtatggcgatagatatggaccatacgaccgggagtacgatggaccgccgggtcgaaggccaccaagtggtggtccctatggacgctacgacagtccctttaaccggccctatggtggtaatggcctagacgatcgtcccttgcccctgcctggcctgggtctctcccatccacccactccgtacggaggaggtggtgcaggtcatgtcggtgtgggcgtgggtgtcaactcgggtcccccgcgacctccgatcacccgttgcgaggagagcgacaatttcaagcaaatagccgccaggcacaagatgcgtcgccactttgtgcgacgagctcttatcgtccccagcctcatccagtgtgagagggagtgcatcgagtcgcgggactttgtgtgccgcagcttcaactacaggtgggtggggggtggactgggattgaagatacaagataatcggtacacgagccgctacaaattcacattgtaaatttcaatttgcagagactcggctgcctccggctacgaggacagagatagggatcgcgaccgggactcaccgaactgcgagctgagcgacagagattcgcgagagttggacatccacgatccgggcaccttcgacgcctccaactatgacttctacgagcgcagcattggacgcagcgatggcgagtgcatggacggttggtggataccttattgaaatgtagatctgttatattaaaataaaatgtattgttcgaatgatctaatctagtcacgcaaacgtgtaacgaggagggcatggaattcacgatccgcacgccagagggattcttgggacgtatatacacatatggattctacgatcgctgcttcttccgtggaaatggcggcacggtgaacgtactgaggctcagtggaccacagggatatcccgactgtggaactcaacgggtgagttacttttagaatgtgtagtcgtttgaattttaattatcctgagacccatcattaactttgtatcttacagtatggcgacactttgaccaacatagtggtggttcagttctcggacaatgtgcagaccagcagggataagcgatacaacctcacatgcatcttccgtggtccgggagaggcagtggttagctctggttacataggagcagggtaatgctgaaactctatccaacgatcaaaattgctgatgcacatttccatttcaggtccggtagtccaatccccattgaatatctaccagcggagaatactctcagctccaaggtgcgcttgagtatcctgtaccagggtagacccactaccaccatagctgtgggtgatccactgaccttccggttggaggcacaggatggttacaaccacgttactgacatatttgccaccaatgtggtggccagggatccctattccggacgcagtatccagctgatagatcgctttggatgcccagtggatccatttgttttccccgaactggacaagctgcgtgatggtgacaccttggaagcccgctttaatgccttcaagatacccgagtccaatttcttggtcttcgaggccaccgttcgctcctgtcgcgaaggatgtcagccggcctattgtcctgggcctgcgggtcgtcaggaaccttcctttggtcgccggcgtcgatcactaaacaccactgagatacccgaaccggaagcgctggctctggagggcagcagccaactggaggcatccacactggatgaagtcacagtcgtgaacagcaccaccgtgagtgccactttgggtcaggttcccctaaatgagacacaattgggggagaagaccaaggagactgaggaaccggagcaagtgcgggaaatgattgaggtaagtgtttgattggtgggaggggatattctgcataagctaacaaaatcgattaaggtctttgaaacccgcgaggaaattgagaaggagtcgtatccccgcaagctagtggccccggtggaaacggtgtgcatgactccggctgagtatcatggcctaatcacagccattatcctgttaatgatcctgctattcagcatcacgctggtggcgggcctgggatacaggtatgatgtctttaacgggctagagatcagtgctaattggcgccttttacagacgctactggaaatccatctcgaagaaccgactcgtggaccgacactcgccgatccactcgctcggacactcccattcctccatacgcacccatgagcgcttcacagagatcggacatatgcccaacctgaatggaggaggaggtggagcggcggcaggaactgggggcggagccaatcagagcgcatcgaatcgggcctcaaacgcttttcgcaccaacatgtccatgttcggcggctcattacacaagacatttgccacggggtgaggaacggcgagtcgccaatcgtccaaccggtccacttatgggttgtttgttttatgtctttacagcaatttggcgcgcatgtgccagctgccagtgataaatccgatgcgtagcaccaaccagagcagccaccagttcgaggatcccagcgagcccatctacacggatccctcgctcttcgagcgttccaggcaagtggcggaccatagtgtaacacatccgcagaatgagttcccgaccaccgttcgcaattgtaaatatgttcgcctttattccgatttgtctaaccgtcacgttagcaccactacaagggtctgcagatgcagaggcccaccttgttgcaaagtccgtcccgtccaccggctatctggcagttggtagtgcaccagtcgccttgcaactggcacaggccttggaacgtgggcatctcacctgtaactaaaccagaagttaactcccaagttaggcacaatctccaactgaaatcagactcacttgcatgggcaccgactaaacagactaacaaaataagcagacagacgcgtaggtagtccatgctgatgagttgtcagatttcgactaataagctggcaagctggatggctggctgcgaaggcgataaaccaaaccatatcagtcaaatgaatctgaactcatcactccgccggctctcttacgaaatatttggaataataatattaagctagctgattaacgcttggtcgtgttttgtttcgttcacagatcgctgcgaagtctgaccatggtggccgagtccgaggacaatcaggaggtctgagattgcaactccaagcctcctgtgattagttgtaaataagctaaaggtttttaacttcagttaatcaaagacaatccgacaagtaaacacatacgctagccaaatgcgtgggaccctcgaatattcggtggtccattaagtagcctaagaattgcaccactgaccagtatccaaatattatgatcttatttatctaagcctaacaacagaaaacacaagcaagtaattattctctctaccagctaagatatgaaacgcaataaagcctaaacatattcatatcaccacagactttcgttctgcccagaggaatgcaaagctgatcggtcattaatcaacgtacaggattgcaattgcagtggcactttgaatggccgcttggccagtcgagggttaacgagctaggccaattgccagttgcagtggcagtttccgttgcagacagtagccagcgggtcttagtagttgcaattgcatcccgctttgtgggtaatcggagggttggtcaaaggccactcataaatcaagcagcaggacggctactgaacataactgaaattggacctcagtgggtcacgaagctttacatatcattaggaactactttctttatgatgactacactactttcgcatatgcggttgtaaactttcgtgccgaaaattccactatcagcatgcgaaaatggatcacatccagagaaaacttaccacaaagcatcgtagcatccattcctgaccccttttaacaaaaatgcccaaatacacataaattgcaaattttcacattggaaagacacttttccattgagtacactttaataagaatttaaataaattaaaaccgatcattatattcttaaacatatataaaaaaacataaattaatgcagatatggaatcccaattgctggtcttgactagcacatttgaaaagtgttcggtagaacgtagagctttgcaaatgactcattggtgggaaatttgaccaaagcgatgca

SEQ ID NO: 30458 - DNA, 4917 bp, DROSOPHILA
atgcccttcacaagtgggaaagtcgcccgtgtccatgaaacgttgaccggccgaaatgtcattatgtgccatgtgcacattcggccagaacgaatagctccaccactctcaaaacttcaacaacacacccaattcagcggcatgagacctagaaagggaatacacgtgttgctgacgaccctagtggttagtctaagcctcagtaaaattaatggtcaaaccacctgtaagaatggcctaggccgagtgctctatgaaagactgcccaaccagcagctccaggggtacgatgatgatgtggtgcgtgatacggcgccaccattccgtgtgctggaaaaatgccaggacctgtgcctgcgcgaccgatccggctccaataatctggtgcgcacgtgcaccagctttgacttccagccaggcagtcgaatcacctcctttggaggcaactccgagtacgaggagtccctgtgttatttgacatccgagcaggcgggacccgaaggcatcggtagcctgatgctggtgcccaatagtgtacactttaacgagatttgcctgacttccagtcgcccggagagggagtgtcccagtaggagatatgtcttcgagagacatccccgcaagaaactgaagctgcccataagtgatattaaggagataacggctgccaatcgctccgattgtgaggacaagtgcctgaatgagttctcttttgtctgccgatcggccaactttgattccaccatgcgctcctgcacgctgagcagattcacccgacgcacccatcccgaactgatggaagacgatcccaactctgattacctggagaacacctgcctaaatgccgaaaggcgttgcgatggactggccgtttttgtcaaggaggagaacaagcgcctgggtggccccttcgaggtggacatattcaataacatgacgctggaggagtgccagaccatgtgtctccgggccgagaaatacttctgccgatccgtggagtttgacgaccagagcaaacagtgcatcctctcggaggaggactccatatcgcagaaggatgacattagcattagctccagtcccacacaccatttctacgatctggtgtgcctcgataatcaacgagccaacgattatccagataactcagtcacctcgcacctcttctccagcggccggcggccagatacagcattccagcggtaccgcaactccaggctgggcggcgagtttcactccgagatcacgggccgttcgctgagcgagtgcctggacgagtgtcttcgccagacgagcttccagtgcaggtctgcggtgtacagcgatcgttttcgtacttgtcgcctgagtcggtacaatcaaaaggacggcatgcgcattatatacgatgctgattatgattactacgagaatctgatgttgaatgtggtgggcggaggcgccgatggcgatggtggtgggcacggtggcagcagcgatggcaagcgacccggggatcagtcgggcagcaactggagacagcctaataagcacgacgatcgctacgggtcgggtgggtcaagtgttggtggtggctcgcatggtggaacgggttctggtggctcaagattgccaccgggcgagggcgtcgactatggcaggccatacgatcgttatccggacattgcgggcaatgaatatgatcgtaatccttatggcggagatcgcgatagagaccgctatcccccagatcgttatggatcccgatatcccactggaggagatggaattggctacaaccggccctatgatcgtttccctgatgattatgatcggtatccagcgggtgcgggtgtcaatggcgatagagaccgcgaaagggatcgagaccgctacccagtagttggtgacagagatcgctatccaggcgctgtagacagagatcggtatccaggtgtcagggatagagatcgctatccggagccttatccgccagagcgctatgcggacagatacggagatcgacgatatccggaaagggaaagagatcgcgaccgtgataggttgccataccgtccactgccctatcccggaatcaatgacaatagcctgcccagtgatttgccgcatactcgaccctatcccaccgatgacgatgctcccttccggccctatggatatggaggtggacgctatggagagaacagatacgaaggccgataccctcctcgattccctcccagccgagaacgagatcccgtgggaggctacactggcagggatgctcctgacagcatattcccggacagacgctaccgcccctcgtcgatggattctccaaggtatccctatttgccagactcgcggggaccaccgggcagatatgatgatatagtgcatagtgccaggaggcccgagcccgactcggccaagcgatatccgccagcgccaattgctccaacgggaagctccagcaagtacgcctccaccccgaaccggtttccggtaggtaacgatcgttatcccattgacatctacaaatatggcaatcgtccgggacccaatgatcttggcaggcgaccaggtctggagcgtccgccacctcccttctacgattatgactacgaggagcggtatggcgatagatatggaccatacgaccgggagtacgatggaccgccgggtcgaaggccaccaagtggtggtccctatggacgctacgacagtccctttaaccggccctatggtggtaatggcctagacgatcgtcccttgcccctgcctggcctgggtctctcccatccacccactccgtacggaggaggtggtgcaggtcatgtcggtgtgggcgtgggtgtcaactcgggtcccccgcgacctccgatcacccgttgcgaggagagcgacaatttcaagcaaatagccgccaggcacaagatgcgtcgccactttgtgcgacgagctcttatcgtccccagcctcatccagtgtgagagggagtgcatcgagtcgcgggactttgtgtgccgcagcttcaactacagagactcggctgcctccggctacgaggacagagatagggatcgcgaccgggactcaccgaactgcgagctgagcgacagagattcgcgagagttggacatccacgatccgggcaccttcgacgcctccaactatgacttctacgagcgcagcattggacgcagcgatggcgagtgcatggacgtcacgcaaacgtgtaacgaggagggcatggaattcacgatccgcacgccagagggattcttgggacgtatatacacatatggattctacgatcgctgcttcttccgtggaaatggcggcacggtgaacgtactgaggctcagtggaccacagggatatcccgactgtggaactcaacggtatggcgacactttgaccaacatagtggtggttcagttctcggacaatgtgcagaccagcagggataagcgatacaacctcacatgcatcttccgtggtccgggagaggcagtggttagctctggttacataggagcagggtccggtagtccaatccccattgaatatctaccagcggagaatactctcagctccaaggtgcgcttgagtatcctgtaccagggtagacccactaccaccatagctgtgggtgatccactgaccttccggttggaggcacaggatggttacaaccacgttactgacatatttgccaccaatgtggtggccagggatccctattccggacgcagtatccagctgatagatcgctttggatgcccagtggatccatttgttttccccgaactggacaagctgcgtgatggtgacaccttggaagcccgctttaatgccttcaagatacccgagtccaatttcttggtcttcgaggccaccgttcgctcctgtcgcgaaggatgtcagccggcctattgtcctgggcctgcgggtcgtcaggaaccttcctttggtcgccggcgtcgatcactaaacaccactgagatacccgaaccggaagcgctggctctggagggcagcagccaactggaggcatccacactggatgaagtcacagtcgtgaacagcaccaccgtgagtgccactttgggtcaggttcccctaaatgagacacaattgggggagaagaccaaggagactgaggaaccggagcaagtgcgggaaatgattgaggtctttgaaacccgcgaggaaattgagaaggagtcgtatccccgcaagctagtggccccggtggaaacggtgtgcatgactccggctgagtatcatggcctaatcacagccattatcctgttaatgatcctgctattcagcatcacgctggtggcgggcctgggatacagacgctactggaaatccatctcgaagaaccgactcgtggaccgacactcgccgatccactcgctcggacactcccattcctccatacgcacccatgagcgcttcacagagatcggacatatgcccaacctgaatggaggaggaggtggagcggcggcaggaactgggggcggagccaatcagagcgcatcgaatcgggcctcaaacgcttttcgcaccaacatgtccatgttcggcggctcattacacaagacatttgccacgggcaatttggcgcgcatgtgccagctgccagtgataaatccgatgcgtagcaccaaccagagcagccaccagttcgaggatcccagcgagcccatctacacggatccctcgctcttcgagcgttccaggcaagtggcggaccatagtgtaacacatccgcagaatgagttcccgaccacccaccactacaagggtctgcagatgcagaggcccaccttgttgcaaagtccgtcccgtccaccggctatctggcaatcgctgcgaagtctgaccatggtggccgagtccgaggacaatcaggaggtctga

SEQ ID NO: 30459 - protein, 1638 aa, DROSOPHILA
MPFTSGKVARVHETLTGRNVIMCHVHIRPERIAPPLSKLQQHTQFSGMRPRKGIHVLLTTLVVSLSLSKINGQTTCKNGLGRVLYERLPNQQLQGYDDDVVRDTAPPFRVLEKCQDLCLRDRSGSNNLVRTCTSFDFQPGSRITSFGGNSEYEESLCYLTSEQAGPEGIGSLMLVPNSVHFNEICLTSSRPERECPSRRYVFERHPRKKLKLPISDIKEITAANRSDCEDKCLNEFSFVCRSANFDSTMRSCTLSRFTRRTHPELMEDDPNSDYLENTCLNAERRCDGLAVFVKEENKRLGGPFEVDIFNNMTLEECQTMCLRAEKYFCRSVEFDDQSKQCILSEEDSISQKDDISISSSPTHHFYDLVCLDNQRANDYPDNSVTSHLFSSGRRPDTAFQRYRNSRLGGEFHSEITGRSLSECLDECLRQTSFQCRSAVYSDRFRTCRLSRYNQKDGMRIIYDADYDYYENLMLNVVGGGADGDGGGHGGSSDGKRPGDQSGSNWRQPNKHDDRYGSGGSSVGGGSHGGTGSGGSRLPPGEGVDYGRPYDRYPDIAGNEYDRNPYGGDRDRDRYPPDRYGSRYPTGGDGIGYNRPYDRFPDDYDRYPAGAGVNGDRDRERDRDRYPVVGDRDRYPGAVDRDRYPGVRDRDRYPEPYPPERYADRYGDRRYPERERDRDRDRLPYRPLPYPGINDNSLPSDLPHTRPYPTDDDAPFRPYGYGGGRYGENRYEGRYPPRFPPSRERDPVGGYTGRDAPDSIFPDRRYRPSSMDSPRYPYLPDSRGPPGRYDDIVHSARRPEPDSAKRYPPAPIAPTGSSSKYASTPNRFPVGNDRYPIDIYKYGNRPGPNDLGRRPGLERPPPPFYDYDYEERYGDRYGPYDREYDGPPGRRPPSGGPYGRYDSPFNRPYGGNGLDDRPLPLPGLGLSHPPTPYGGGGAGHVGVGVGVNSGPPRPPITRCEESDNFKQIAARHKMRRHFVRRALIVPSLIQCERECIESRDFVCRSFNYRDSAASGYEDRDRDRDRDSPNCELSDRDSRELDIHDPGTFDASNYDFYERSIGRSDGECMDVTQTCNEEGMEFTIRTPEGFLGRIYTYGFYDRCFFRGNGGTVNVLRLSGPQGYPDCGTQRYGDTLTNIVVVQFSDNVQTSRDKRYNLTCIFRGPGEAVVSSGYIGAGSGSPIPIEYLPAENTLSSKVRLSILYQGRPTTTIAVGDPLTFRLEAQDGYNHVTDIFATNVVARDPYSGRSIQLIDRFGCPVDPFVFPELDKLRDGDTLEARFNAFKIPESNFLVFEATVRSCREGCQPAYCPGPAGRQEPSFGRRRRSLNTTEIPEPEALALEGSSQLEASTLDEVTVVNSTTVSATLGQVPLNETQLGEKTKETEEPEQVREMIEVFETREEIEKESYPRKLVAPVETVCMTPAEYHGLITAIILLMILLFSITLVAGLGYRRYWKSISKNRLVDRHSPIHSLGHSHSSIRTHERFTEIGHMPNLNGGGGGAAAGTGGGANQSASNRASNAFRTNMSMFGGSLHKTFATGNLARMCQLPVINPMRSTNQSSHQFEDPSEPIYTDPSLFERSRQVADHSVTHPQNEFPTTHHYKGLQMQRPTLLQSPSRPPAIWQSLRSLTMVAESEDNQEV

SEQ ID NO: 30460 - DNA, 2730 bp, DROSOPHILA
ccacttagataggcaattttaacaccactgctcagcgtgtagaccccacgtcgaccaagatacgtaagattggtgcagatttcaccgtccgtcagattttcaaagtatttttcatgctccctttggttgggtcccaggatataggtgggaacagtgactaagtacagggaaagggttaagagaataataaatgcttatattacacttaacttactatgcttaaaaccatttttgtaggcaatcagttcctcgttttgcttgtcctccccgaagaagtcaccgacgcagcaaaggatttcgaagggtcccgcttttttgttgacctgctccacgcgctgaaatagctgcttgaagcgacctcgcacatcgcccacaactaggctaggagaaataaacaatattaaacccttaaatcatataatttataccatgttttttactcacattttggtgcccgcgtccatggttatcgataactgagcaatcgattgaatcttcatcatgttggtactgccaacttggtgcattaattgggcggcagaattcgtaatggaaatctaattaggtcattgattattttagaaatattaaatttctcaaagccaaatcatgttccttttaccgaattggaacataattctcgcaattatagaccatttcgagcaccatgacacattttacagcagcattcccagcaccacagttttttttcggcaattgctgtttaattgagcgaagaacgttctatgcttatataacgaactataaccttaccgcaatgtcaatggcccaaaacatgacattatttatgacattggccccaaacagcagcagattgcaacaatgaacttttgctgggcttttctggtcatgcgtggctggcactattaagtggccattactcttttcgttccattagatttggagctgcgtgagggatataaaatgggccttgcgatttcatattcatatcagtcattttactcactcaattgcagctatgtcgcccagtcagcttcttgtgatcttcgcttcgctggccctaaatactcgtctagtatttggccaagccacgattgattgccaaagaccaccgcaactagtggtgggttttgagtttggtttttttttaattttaaagtgattcttaagatattttgacactttcctaggatcccgcactctgctgcaaggatgggggtcgcgaccaggtggctgagcagtgcgcccaacggattttaggaacagcaaatggacagaaggcaggaggtcctccatctttggacacggcagcagtgagtaatctcagcctatgaaattgttaagaagtcgcaatacataatacattatctacttagtgcctagctgagtgcatcctcacatcctccaagtatattgatgagccccagaaactaaacctggcaaacatacgcagtgatctctccgctaagttctccaacgataccctttacgtggaaaccatgaccatggcgttctccaagtgtgagccccaatcgcagcgcagactggccatgatcatgcagcagcaacaacaggtgcagcagcaaaagacgcagcagcaacaaccaagatgcagccccttctcagccatcgtccttgggtgcacctacatggagtacttcaagaactgccccgatcatcggtggactccaaatgcccagtgtactctggccaaggcctacgtaacgcagtgcggtttgggtgcctaacatcacgacctgatagagatggtgcttgtacaatgtacatacgtttataaaaagtagtcattaaataagaatcaaattaactttttatattcatctaattttggatcgctggaactaattaacgaggtagtaactatgtgacgatcgcacctgaagtatacaaacgatctgaattaaaacttgtgacgaaatattaaccgttttttagattatctcactttgtttaggtttgaaataaaatataaagaaaatgctattttatattgttgttctttccgttaatcatagaagtacgcaccatatacatttatgtaacatggagtaaggctgaaggctggcaacaacccggttggcagcgctgttgagcagcaacatgattgtcggaaatcgaagttatcgacaatcagtcatcgaaggaacgatcgcaaggcagcagtggagtcgagtggaagtcagcgttgcagtcagtcgagttctcagcagcagtcgttcggtcacaaactaagaatactttatataattaccgcatttagaattaaactaataattaaattaataataaacaataataataaacaatcttacatgggggctcgtccagtcctaaatcggttatatgaaggtgcagttgtttaaagaaaaaagacattgtggtgtgcgtgggtatagtctttaaaagttgtaaagttgtggctatatctattgcatttaaagttggaaaaatcagttgtacagattttgtttgaacacaagtcggtaaaagtcgggaaagctgctagagagaactgataaagttgaaattgtcgtgtgcgtggatttagtctttaaagttgtaaagttatggctacgtctactgcattgaaagttgaaaaaatcgattgaactcatacagactcaagtcgttttgctgttgtggaatttaaaacaattaaattgcaaaggtggtgaaattcgtttctaacgaaaatcaaaatttgtcttttaaccggtggcgccgtct

SEQ ID NO: 30461 - DNA, 600 bp, DROSOPHILA
atgtcgcccagtcagcttcttgtgatcttcgcttcgctggccctaaatactcgtctagtatttggccaagccacgattgattgccaaagaccaccgcaactagtggatcccgcactctgctgcaaggatgggggtcgcgaccaggtggctgagcagtgcgcccaacggattttaggaacagcaaatggacagaaggcaggaggtcctccatctttggacacggcagcatgcctagctgagtgcatcctcacatcctccaagtatattgatgagccccagaaactaaacctggcaaacatacgcagtgatctctccgctaagttctccaacgataccctttacgtggaaaccatgaccatggcgttctccaagtgtgagccccaatcgcagcgcagactggccatgatcatgcagcagcaacaacaggtgcagcagcaaaagacgcagcagcaacaaccaagatgcagccccttctcagccatcgtccttgggtgcacctacatggagtacttcaagaactgccccgatcatcggtggactccaaatgcccagtgtactctggccaaggcctacgtaacgcagtgcggtttgggtgcctaa

SEQ ID NO: 30462 - protein, 199 aa, DROSOPHILA
MSPSQLLVIFASLALNTRLVFGQATIDCQRPPQLVDPALCCKDGGRDQVAEQCAQRILGTANGQKAGGPPSLDTAACLAECILTSSKYIDEPQKLNLANIRSDLSAKFSNDTLYVETMTMAFSKCEPQSQRRLAMIMQQQQQVQQQKTQQQQPRCSPFSAIVLGCTYMEYFKNCPDHRWTPNAQCTLAKAYVTQCGLGA

SEQ ID NO: 30463 - DNA, 8716 bp, DROSOPHILA
gtccaccgacaatgcgtccatcgagcttcggtatatgaacctcttcgttccggtatataggatctgccagggagcagcccactccgagcaccagaaacacaaccaaaatccgtgacattttcgagcaactgaacgcaaaagtagcgctatgtgtagatttatagaatactcgtatccttatctatcggctgtagattgggattggattgccgattacttggtaatctaatgatagttttcgtaatcaagaaacagacatgaacaatggctagtcataaatcttggccacaattctttctgccgtttttcccagattacgtttctgctcgatccatgagtggtgaacttgcaagttggttttggggtaagtcaataaacccatcattgattatctcgcttttctcgttcgaaatcaattgtatttactagctttcactaactatcgctatgtatgtatgtacatattttatgttggtggtttattaaatttagctctacccaaaagcaggctacatttgaattctttcctttttatataaaatatttattattttacataggtaaaacattagcgttaattgcttaaatctaagacatttacactgacactaacactaagattgcacatttccggcccaagactgctgacatttatcacaatacgcatccgttacgatactaaacgatatataatgttgattgattgcacttacatttcttagggcttgggttttcgattccttcttctattttgatatactgttggtacctgcactttgcgtattgtatgcagttccccagggtttcacgttcctaattactaaagattatcagctaacttagatgtattaaaattgcaccttgtggtttggcaagaatctctatgttattgcactgattgttgctattgcgtttcttaagtcttaaaaagtaagtctttcgtatattttccatattgcacgaccctagaaactatttatgcacttaagcatagcctaatctaactcttcctaatcatcttgtagagcacagagtgcgtttctatgctctctgcccccgactcccacatgtcctccgcgttggtctcctcgtccgtttccgaagatccacagcaggtacttcgtccgcgtccattttcatccgaggagtaggatgacattgttgtggtgctgccccgcacgtttcgctcctgggaattcgtttgggaatgggaacgggtcagagttttatcagattccgcatcgctgagatcacaagcaacgactgcgttgttttccggcgatcgacgactgtgacttggagagaccatgtgctcgaggtcctcgaaccgattgtcattcggaccgctttcctcctcgttgtcctcgatggtgtccacccgaatgatctgtccgcgtccacacggcatcttgaaattataccgatcgtagacatttcgcttgtacagttccgttgaatcggtgctcatgtatccgctgtccagttgaccaaagcgttgctcgtaatacgtctggctacccggttgtcccattccagcggactgagctgcatcttcgataatggaggcaatgccgtcatcctcgaggaacccggcagcagttttgctaccatatgttggtgctggactttggctgggactaaacttgttggccgccatagtgacaaactttcgccacgcattcttcaggtccttggctttcttggcgcgatcctttagtccaatggcaatctgcattccagccgtgagctgggcttgttcgatttcacagcgatacacagtttgaacgtttccgccggcactagcatttccggaactactagccgctcgttggggataggcaatgcccactggaactccggcgttcctgtacatctcttttgttcgctcggaaagatgactgctactccgattcgagcgtgagcttatggacagcgcatcgaactgggccacatccacctcctttacgctcttattgctgccaccgaactccggctcgggggcaacgtcctttggggaatccggaccagcttttgaaacctcctcccgctgacttttccgtcgattgagatacttcgtcagactgtagtcgttgcgcaggctgttgatctttttgttgtacatcccttcgtagtcctcttccggtatcttagcattgattttcggggatctggaaccctttgcatgagttctctcctcggtggttgccgatatagcactggacatggtgttgttgcaggagttctcgaactccgaggtgcctgtgatctcactgtgcaggctgtaggcatcttcatctggagcctgatgttccgatgagtttgggggaggaggtggtagtggtcgtttgctttgcaccaacggtgggcagtaatgctgattgacctttggtcgagtaggaggagctttatccgctggcttcggtgatgaaatcgtaatagtggtcttgtttacttttgtgatatccatcactgagtgggttggtgacgtctccatcagacgctggcgacgagagtgcttggcctccagggtgagaatacgcccctcctcttccggtgtttgtgcaaccttcttctcgtacttgatgttgtcctgagcgattaaaggcgactcatagatctctctcaagttcctaaatgagttgctggatcgaaggatgaaggaagcggtccttggtttaatgccctgattgggtgcaggactgatttgccgactcaaatccggcagagaactgatctggctaaagtccgagtcgattggcttatgcccatcccaagctgaaatgtcgcagaagctctgcttcttgggcttacgatccagtgtatccggttcgaattgatcgctatccgttcgctccagatcggaagggggttcatgttccacctcgatggtcatgcttccccgaaagggcgtgtcatatttgattcgagctgccgcctccttctgcctttgttgctgcccaggatgtggatgttggtgctttgcagccaaacgctttttcatctcgccctccttgcgaaatccgttcatacgatcgtatacagtgtgactgatctccatctcctcctcgagcggaagagcggtactcaagcttggactcaattgggaactcacatcggatgacggtgaactggacgagtgggaactcttgcgtttgctgggttccagacgttcaagactatccgtttcgtagtccacaatcagatactgcggggacttccttctataaatcggggaatcgggttggaactgcttaagagatttacggctgagagagctgtaatccggagtgggcaccgatggtatgctactctgcgtactgctatagatgtctttgattcgtttctctatggtgctatcataatcaggcgttggaatatgcgctgcaaactcgcgcttcaaggaatcgtagatgacctccggcgctttcatgtttctcagcatgttgtagtgctgccgatcgaaggaggtgagcgaggtgggtgtggagttggcggcagcgaactgatccagaacctcgctacgcttcttcatcgatttggagcgactggaggcactgcgcaatgaggccgcaggtgagtctgccagcatgaacttgggattattgtagatttccccgccggtctctgcaaatccatagacattggcggccacggaaaaggcagagaatccctcataagtgctacccacatttgtcttcggcttgggtgactgttctggactgctctttccggtgcttcggctggaatgtggacccgaaggcgctggagaagatgactttgcattaccttcatctgcttttgatttctgcattggaggtggtggtggtcgctccttgggtgcacttatctcctttctcaatgagcccttgttgggagatccggatgatggcttctttgcagtcggtggagcaggtcggtcgagcgtcttcggtgccggagtcgcatccgagtttggtacactttgcagccactgctcgatgctgttccgcttatcgcccattcccttccccgccagactctgctgcagcggaatattgaacatgggtgaactggaactggactccggatgctgctcctccggaattatgttcagagagggttggtaacgctttgaggccattttgtacttggcaatggcgatgacctcgcgaatcttctgcaggaactcaatggcagcttgaggcggttcctgaaaagttggtaaaaaaaaaacgaacgggtatgcaacaaatcattattaatcatttttaactctcatacttatttattttcatgcatttgttaattaaaacttaccgctagtagatgaggctcaaaataagcgggattgaagtagagcttcttgcgcacattaccactgaccatggcacgcaagttctccagcttctcctcgctcatgagctcatcaattacggccacattttcagcgggcagacactcgttgtcctgcaggaagtcatccacatccattgcagcgttatctgttccacccgaaggcttcggcgacttactgagctgtggatgcaccagcacggatgtctataaagtgtagttctgtatatttcatcaatcagaattatatagccaacccaccttgatcttttcctccatttcacactcagaattcgaatttgaaatatcgctggcaaacccggaattgtgttctcgttcactcaactgtggaaaatgctgcagcaatggattatttttcacaatgcccatatcctcctttaaactgcctatacttgtacgtgtattggactcatttccatttcccagacccatgctattggaggagtatatgctacccactcggctaaagggtgctccatacgtaacctgatcattcttaggataattgatgtcgtttgtcagattgtctagggaatgacgagagctgtgccgctttcgtttcttcatgtaaagatatagaaacactgaggccacatagatgagacccaagagcaggctacagatcccaatgaccacgtactcacgcatggtcatgccatccgaagtggaggccaaagtggtggagttggctggttggaaaaagacctcggggacatctgtatgtataaggagattaggataagcttggatttctttgatgttgctcattattaatactcactgtgggcatattttacgggactgccattcactctgaaagccacacatggtgagtgaacattcctgggcggcatgaggggttcacccttgacgtgattgctggcattcaaggccaccgtcatgtcgcgacacaccagatgcaccacaatcaggcgaccctgcatcttctggcgcagatcagcttcacccagccacaagaggaagctgcgtccctcatcgcggaacatgcgaaacgggtagtcggtgtctatggggttccgcagatccgaccagccatttgaacccaggtactgggctccggttaccgcgcaaacgggtgtgtgaatgcctaaaagtttaaaatgacagtaaatggcattaatgagccaatagaatacactgactttcactaatttaccccaactgtttacttgatcaaatttataactatattgtccaataaaacttatttcaaaattggtatttaacagtaattagaaaccagttgtatgtaatttattgattattatttctgaagctttgtcaagatcgaatatctttcaggttatgtataaaaggaaataatatctgagatactacaattattataacaactgaaaagtggtattgtgagctacttactggcaaagctgatctccctgctgggatagatgatctgacccttgagcggcaggaagacaaagggtatcttttccgaggaggaaccactcacgaatggcgacagggagcactctgtaacaatgggcggaaaaatgggaagcgattaggtgctggaggttgtgggaaagtacgttcaaatggcggcgataacgatcgacgcttatcaattacgaatcggaattggtagtgaaactacatatctgtgctgttatttttccggccaacccagctcttactttcggtccgacttggggtccgattccgattccaagtccaattccaattccgactccaactccaattccgatcttcgggtcggattccgaacctgtgttagagttagaccccgaaatggcagcggtctcagattgtttatgttggcagacgacgggcgaaagtttcctttcattcattagcagcggggaaacaagcgatttgttcaataataataacattttttccctctttgcgtcacgtttcgttttcattctgcagccctgcacaatttcagtggcgcttattacagcatttctttcattcggttggactttttttttcgattttttctctatttttttttttcagttgggcaaccattgtgctcggggatatgacaaaacaatggatggatggatggatagtgtctcacatgtgggagcgactcccaccgcgaaatggagcacacaatttggctgtggaatcgttggatggcttccgcaatgcacactcaccatggatgtcgtccacgcatatgcccagatcctcgcgataggcccgctgatagggaagacatcggcaggtgcacccagtctcaccgctcgcatctatattcgccacttgaccgcgacccttctgcaacttgagacgacgggtcaggagctccatttgaccgccgcccaaagacgaggtcgccggattgagtccatctatggattggtggattttctctgattatgacaggcacacattaccacatgctaatctctagcttaccgttgccttgaccgcttccatcgccggtcgaacggaccagcgacgctgtgccacttgagagtccgatgcaggtgtccgcgttgcaggcgctgctcaaacctgcgcagagaaaacattaagatggattgagtcgggacttcacaatatcttcaaccgattgacggctaatcaaacgggtggctggacccaacctgaccggaccgggccgggccaggccttactggtaaaattaatgctgctgtcagcggatcagccacgaaaaagcgacgcatcatccagtcgaagaagccacatgccaagtcaactgaccaatgacagtgacactggcactgcgattggaaaaatacgcaagactccaatactcttgccatatacatgagcaaaataataaagttggaaatgaatgctacaaattgctcttgaatttaacattttaattaagcaaagaaaagttttttattttatagatcatctatcgcaataataacggaacactcttctccagtaaaatatattctaattttaaaacattgcttaaatagcgttaaaaatcatttatggccgcataaatttagaaacagatgagtcgaattctagctaagctaacgtgaaaacattcaatgaatgaatcaatgaattcgagcccgttgttctttgatataccacctgtttccaagtggttaactcaccgcttgtgtggaaggtatcgccgtcgtgctgtcgtgtcagattgacgagctgcccgttggtctgctgcagttcctcgagcagcaagctggccggcattagtggctcctcggcgagatcttcgctgggatagtggttcctcgccctcgggtgtgtaagcggtcgggcagccgaagtgggcgtggcaggcggaagggtgacgacagcgagcagaaggagcagcggtaaggattggagccgcatcttaacagcaacatagctggatggaacgcactctgggggattcgacgccgcagctgcaactggttgagtggcggagggtgggcggtggtggtggtggtgtggagtggagtaaaagaaaacaagcactaattaattaaaaataagtccaaattcgtagctagcgaaacgaaaaccagctagtcagttgacattctttgggaccccgcttaatgaggcagaaattgtttggtccgttttgctggaaatgctgaaatggagcaacatctacatccagttggtgctagtttgccggtggctaacggacaacatttaaacaaatgttgcaattaaaactcgttctggcggcaagtgtatatacttattggttgggacacggcgaggagctggcataatgctgcactggatcaagtgcgtcgcagtgggaaaactgtatagcgtttaccgttaccaaaagccccgctgctgctgctgctgcggccgctgctgcacttggctcagaacaccccgtttataccgctaatcagttgcactttagcagctgctttcggccaggccaatttacataaatatttcacacacacagcgcgcgaaggcaccacagaaaaattattggggactcctaactgttcatatctacgagttctactgatctcagaagactgtgcttgttttttttttttttttttttttgttgttctgtgctttgcttttttggctcttcaaaagaagaacaaaagagacgggtgcgtagaggtaaaggcatattatctggagtcataatgtgcgcgcgaatgaatgagagaagaaagcgataaaaagcaacagttgcggcctaatttgaaagtaaaatttctttacaaaacgcagtagaacacagcaacaaaaactacgaacagcatagtaaagttcgttgcctaagtcttttgattgaccagtcaccaccagcgctggcatcataatcgccatccatctacattggacattggagtctacaagctta

SEQ ID NO: 30464 - DNA, 4885 bp, DROSOPHILA
atgcggctccaatccttaccgctgctccttctgctcgctgtcgtcacccttccgcctgccacgcccacttcggctgcccgaccgcttacacacccgagggcgaggaaccactatcccagcgaagatctcgccgaggagccactaatgccggccagcttgctgctcgaggaactgcagcagaccaacgggcagctcgtcaatctgacacgacagcacgacggcgataccttccacacaagcggtttgagcagcgcctgcaacgcggacacctgcatcggactctcaagtggcacagcgtcgctggtccgttcgaccggcgatggaagcggtcaaggcaacgatggactcaatccggcgacctcgtctttgggcggcggtcaaatggagctcctgacccgtcgtctcaagttgcagaagggtcgcggtcaagtggcgaatatagatgcgagcggtgagactgggtgcacctgccgatgtcttccctatcagcgggcctatcgcgaggatctgggcatatgcgtggacgacatccatgagtgctccctgtcgccattcgtgagtggttcctcctcggaaaagataccctttgtcttcctgccgctcaagggtcagatcatctatcccagcagggagatcagctttgccagtaagcattcacacacccgtttgcgcggtaaccggagcccagtacctgggttcaaatggctggtcggatctgcggaaccccatagacaccgactacccgtttcgcatgttccgcgatgagggacgcagcttcctcttgtggctgggtgaagctgatctgcgccagaagatgcagggtcgcctgattgtggtgcatctggtgtgtcgcgacatgacggtggccttgaatgccagcaatcacgtcaagggtgaacccctcatgccgcccaggaatgttcactcaccatgtgtggctttcagagtgaatggcagtcccgtaaaatatgcccacaatgtccccgaggtctttttccaaccagccaactccaccactttggcctccacttcggatggcatgaccatgcgtgagtacgtggtcattgggatctgtagcctgctcttgggtctcatctatgtggcctcagtgtttctatatctttacatgaagaaacgaaagcggcacagctctcgtcattccctagacaatctgacaaacgacatcaattatcctaagaatgatcaggttacgtatggagcaccctttagccgagtgggtagcatatactcctccaatagcatgggtctgggaaatggaaatgagtccaatacacgtacaagtataggcagtttaaaggaggatatgggcattgtgaaaaataatccattgctgcagcattttccacagttgagtgaacgagaacacaattccgggtttgccagcgatatttcaaattcgaattctgagtgtgaaatggaggaaaagatcaagacatccgtgctggtgcatccacagctcagtaagtcgccgaagccttcgggtggaacagataacgctgcaatggatgtggatgacttcctgcaggacaacgagtgtctgcccgctgaaaatgtggccgtaattgatgagctcatgagcgaggagaagctggagaacttgcgtgccatggtcagtggtaatgtgcgcaagaagctctacttcaatcccgcttattttgagcctcatctactagcggaaccgcctcaagctgccattgagttcctgcagaagattcgcgaggtcatcgccattgccaagtacaaaatggcctcaaagcgttaccaaccctctctgaacataattccggaggagcagcatccggagtccagttccagttcacccatgttcaatattccgctgcagcagagtctggcggggaagggaatgggcgataagcggaacagcatcgagcagtggctgcaaagtgtaccaaactcggatgcgactccggcaccgaagacgctcgaccgacctgctccaccgactgcaaagaagccatcatccggatctcccaacaagggctcattgagaaaggagataagtgcacccaaggagcgaccaccaccacctccaatgcagaaatcaaaagcagatgaaggtaatgcaaagtcatcttctccagcgccttcgggtccacattccagccgaagcaccggaaagagcagtccagaacagtcacccaagccgaagacaaatgtgggtagcacttatgagggattctctgccttttccgtggccgccaatgtctatggatttgcagagaccggcggggaaatctacaataatcccaagttcatgctggcagactcacctgcggcctcattgcgcagtgcctccagtcgctccaaatcgatgaagaagcgtagcgaggttctggatcagttcgctgccgccaactccacacccacctcgctcacctccttcgatcggcagcactacaacatgctgagaaacatgaaagcgccggaggtcatctacgattccttgaagcgcgagtttgcagcgcatattccaacgcctgattatgatagcaccatagagaaacgaatcaaagacatctatagcagtacgcagagtagcataccatcggtgcccactccggattacagctctctcagccgtaaatctcttaagcagttccaacccgattccccgatttatagaaggaagtccccgcagtatctgattgtggactacgaaacggatagtcttgaacgtctggaacccagcaaacgcaagagttcccactcgtccagttcaccgtcatccgatgtgagttcccaattgagtccaagcttgagtaccgctcttccgctcgaggaggagatggagatcagtcacactgtatacgatcgtatgaacggatttcgcaaggagggcgagatgaaaaagcgtttggctgcaaagcaccaacatccacatcctgggcagcaacaaaggcagaaggaggcggcagctcgaatcaaatatgacacgccctttcggggaagcatgaccatcgaggtggaacatgaacccccttccgatctggagcgaacggatagcgatcaattcgaaccggatacactggatcgtaagcccaagaagcagagcttctgcgacatttcagcttgggatgggcataagccaatcgactcggactttagccagatcagttctctgccggatttgagtcggcaaatcagtcctgcacccaatcagggcattaaaccaaggaccgcttccttcatccttcgatccagcaactcatttaggaacttgagagagatctatgagtcgcctttaatcgctcaggacaacatcaagtacgagaagaaggttgcacaaacaccggaagaggaggggcgtattctcaccctggaggccaagcactctcgtcgccagcgtctgatggagacgtcaccaacccactcagtgatggatatcacaaaagtaaacaagaccactattacgatttcatcaccgaagccagcggataaagctcctcctactcgaccaaaggtcaatcagcattactgcccaccgttggtgcaaagcaaacgaccactaccacctcctcccccaaactcatcggaacatcaggctccagatgaagatgcctacagcctgcacagtgagatcacaggcacctcggagttcgagaactcctgcaacaacaccatgtccagtgctatatcggcaaccaccgaggagagaactcatgcaaagggttccagatccccgaaaatcaatgctaagataccggaagaggactacgaagggatgtacaacaaaaagatcaacagcctgcgcaacgactacagtctgacgaagtatctcaatcgacggaaaagtcagcgggaggaggtttcaaaagctggtccggattccccaaaggacgttgcccccgagccggagttcggtggcagcaataagagcgtaaaggaggtggatgtggcccagttcgatgcgctgtccataagctcacgctcgaatcggagtagcagtcatctttccgagcgaacaaaagagatgtacaggaacgccggagttccagtgggcattgcctatccccaacgagcggctagtagttccggaaatgctagtgccggcggaaacgttcaaactgtgtatcgctgtgaaatcgaacaagcccagctcacggctggaatgcagattgccattggactaaaggatcgcgccaagaaagccaaggacctgaagaatgcgtggcgaaagtttgtcactatggcggccaacaagtttagtcccagccaaagtccagcaccaacatatggtagcaaaactgctgccgggttcctcgaggatgacggcattgcctccattatcgaagatgcagctcagtccgctggaatgggacaaccgggtagccagacgtattacgagcaacgctttggtcaactggacagcggatacatgagcaccgattcaacggaactgtacaagcgaaatgtctacgatcggtataatttcaagatgccgtgtggacgcggacagatcattcgggtggacaccatcgaggacaacgaggaggaaagcggtccgaatgacaatcggttcgaggacctcgagcacatggtctctccaagtcacagtcgtcgatcgccggaaaacaacgcagtcgttgcttgtgatctcagcgatgcggaatctgataaaactctgacccgttcccattcccaaacgaattcccaggagcgaaacgtgcggggcagcaccacaacaatgtcatcctactcctcggatgaaaatggacgcggacgaagtacctgctgtggatcttcggaaacggacgaggagaccaacgcggaggacatgtgggagtcgggggcagagagcatagaaacgcactctgtgctctacaagatgattaggaagagttag

SEQ ID NO: 30465 - protein, 254 aa, DROSOPHILA
MRLQSLPLLLLLAVVTLPPATPTSAARPLTHPRARNHYPSEDLAEEPLMPASLLLEELQQTNGQLVNLTRQHDGDTFHTSGLSSACNADTCIGLSSGTASLVRSTGDGSGQGNDGLNPATSSLGGGQMELLTRRLKLQKGRGQVANIDASGETGCTCRCLPYQRAYREDLGICVDDIHECSLSPFVSGSSSEKIPFVFLPLKGQIIYPSREISFASKHSHTRLRGNRSPVPGFKWLVGSAEPHRHRLPVSHVPR

SEQ ID NO: 30466 - DNA, 2414 bp, DROSOPHILA
tttccagcatctctattttgaacattgctagcgtatttttgcagagatcttcaagcaaaacatattggttccaaaagtaacttaattaaaaaagccatttctaaatgagcgttgtatatgttttataggtagaaagattagaagtgttatcttgatataacatttatattagctgaaacattgaattccaattctagtgcttgatattgcagaaattaataaaagatctataaaatcagttcgcgatgttcgtcttgaacaattcaaactgtagacgtttatatggtggccatcttgtaacattgtagccatctatcgctcgcgaatgggacggcactctttactggggttttgtctttatgtactcgtgtgtccggcactgattagtggctctcccttatcgcatatgcacacatatgctctccgcaatgccaacttcttgcgatcacctttgaaaatatgctgacgaaggcaggaggcaaaacgaaaagcgcagcgaaaagttaactagtgggcatatctgggaataatgaaatacaagcgactgattacacacgagtggcggcttataattatattgattttaatataagttttagagagactcattcagtcctcccaaacagcagaagccggagcacgtaagcaccggcgatctagcgccaaaattagttaatattggaaagtgtgcgatttgggggggattaaatatcgtagtttatgtgatttgtacaatcgttattatctctgcatgccgcgtgtcaaacttgtgttatagataatcaaaatccattttcgaattcgattcgtttgttttgccacgttgtttgtttctgtgattttgtttgcccccccaatagcatgctgaaatgcagaaagtagaaccataaaccgaataccatgatttcctatataccatccattcagacgcgaaccgctaaaagccaaagagcccacagaacccagcccgtaaattaaagccccaaacagagattagatcatggctgaggatccggtgaaccagcaggcattcgctgaggacgtggcagctgccgctgcggctggaggagccggcggttttgccggtcccgagcccggacatcccgactttaagatgcccagtgccgaggagatctggaagctggtcgagggcatggagggaatttcggacgacgagcgagccgagctccgcgagagcatctttaacccgaagccgccgtcgccggaggacttcatgcgccagtacgggcatccgggccacagttcccgggagtacctggtgttcttcgtgatgctggccctcatactcattgtctttggtaagcgtcctccggaacgagccactaacgagtcgtataacccttatcgggcgcgatatacgcacccacctgggtttctgcttaaagggcgataaggttttaggaggcggctatgtcgaagcactcactcactcgctcacgagccacagctagaatgtttgcttcgtttaaaagcgttcgatttttgataagataaccagtggtaagcgtaggatccaccgcagacataggtagagtggaatccaaagagcagtatttgccagagacccatgccgggctgtagttgacacaccacttagccccttttccgaacaacccaaaacatgagttggtcgggttccagtgacgagctcggggttattgagcagctgaaaaagtccgtggagtcgatcgtggccaaaactgggcccagcagcaagttctccaaggatctcgtccagcggatcggcgagatgcagagcaagctggagtccctggccgaaacggatcggcatgtgtttctcgccgagatgaaggacaagttccagcagacgattggcagaatcgaggagcgaatagtgcagcacgcccatttcgcacagacctactccagttccatagtgtcggcagtgatctttctcttggtctccatattcggtctcagttcccttgatcgcataatgtatcaacgtcaccttactaaccgtctcccttctttccgcattacagctctctttggctacaagctgtacaaatccctgacggaaaaggagctcaagaagcaggagaaactgaagagcaagcaacagaagaaggccaagaagtcaaactgaaggagatggaggcgaggatatcattgacgtagtgcactttccggccctgagaccttccatcttgttaatcaatacaatcgccctgtaaatgactaaatcataaaccagtaaacgtaataaaataaaacgtaccccataactcttttaaatgccacggtaattgtgttgttacgacgagtcgaattaattgccattaaaatacggcatcaggaaatgcaaatcggtgtcgtgacctaacttgttgctgccatctaggcaatccgtccaatcctggcctccgttg

SEQ ID NO: 30467 - DNA, 414 bp, DROSOPHILA
atggctgaggatccggtgaaccagcaggcattcgctgaggacgtggcagctgccgctgcggctggaggagccggcggttttgccggtcccgagcccggacatcccgactttaagatgcccagtgccgaggagatctggaagctggtcgagggcatggagggaatttcggacgacgagcgagccgagctccgcgagagcatctttaacccgaagccgccgtcgccggaggacttcatgcgccagtacgggcatccgggccacagttcccgggagtacctggtgttcttcgtgatgctggccctcatactcattgtctttggtaagcgtcctccggaacgagccactaacgagtcgtataacccttatcgggcgcgatatacgcacccacctgggtttctgcttaaagggcgataa

SEQ ID NO: 30468 - protein, 137 aa, DROSOPHILA
MAEDPVNQQAFAEDVAAAAAAGGAGGFAGPEPGHPDFKMPSAEEIWKLVEGMEGISDDERAELRESIFNPKPPSPEDFMRQYGHPGHSSREYLVFFVMLALILIVFGKRPPERATNESYNPYRARYTHPPGFLLKGR

SEQ ID NO: 30469 - DNA, 2489 bp, DROSOPHILA
taagcaccggcgatctagcgccaaaattagttaatattggaaagtgtgcgatttgggggggattaaatatcgtagtttatgtgatttgtacaatcgttattatctctgcatgccgcgtgtcaaacttgtgttatagataatcaaaatccattttcgaattcgattcgtttgttttgccacgttgtttgtttctgtgattttgtttgcccccccaatagcatgctgaaatgcagaaagtagaaccataaaccgaataccatgatttcctatataccatccattcagacgcgaaccgctaaaagccaaagagcccacagaacccagcccgtaaattaaagccccaaacagagattagatcatggctgaggatccggtgaaccagcaggcattcgctgaggacgtggcagctgccgctgcggctggaggagccggcggttttgccggtcccgagcccggacatcccgactttaagatgcccagtgccgaggagatctggaagctggtcgagggcatggagggaatttcggacgacgagcgagccgagctccgcgagagcatctttaacccgaagccgccgtcgccggaggacttcatgcgccagtacgggcatccgggccacagttcccgggagtacctggtgttcttcgtgatgctggccctcatactcattgtctttggtaagcgtcctccggaacgagccactaacgagtcgtataacccttatcgggcgcgatatacgcacccacctgggtttctgcttaaagggcgataaggttttaggaggcggctatgtcgaagcactcactcactcgctcacgagccacagctagaatgtttgcttcgtttaaaagcgttcgatttttgataagataaccagtggtaagcgtaggatccaccgcagacataggtagagtggaatccaaagagcagtatttgccagagacccatgccgggctgtagttgacacaccacttagccccttttccgaacaacccaaaacatgagttggtcgggttccagtgacgagctcggggttattgagcagctgaaaaagtccgtggagtcgatcgtggccaaaactgggcccagcagcaagttctccaaggatctcgtccagcggatcggcgagatgcagagcaagctggagtccctggccgaaacggatcggcatgtgtttctcgccgagatgaaggacaagttccagcagacgattggcagaatcgaggagcgaatagtgcagcacgcccatttcgcacagacctactccagttccatagtgtcggcagtgatctttctcttggtctccatattcggtctcagttcccttgatcgcataatgtatcaacgtcaccttactaaccgtctcccttctttccgcattacagctctctttggctacaagctgtacaaatccctgacggaaaaggagctcaagaagcaggagaaactgaagagcaagcaacagaagaaggccaagaagtcaaactgaaggagatggaggcgaggatatcattgacgtagtgcactttccggccctgagaccttccatcttgttaatcaatacaatcgccctgtaaatgactaaatcataaaccagtaaacgtaataaaataaaacgtaccccataactcttttaaatgccacggtaattgtgttgttacgacgagtcgaattaattgccattaaaatacggcatcaggaaatgcaaatcggtgtcgtgacctaacttgttgctgccatctaggcaatccgtccaatcctggcctccgttgtcatgggaaacggggtcgttttgtcgaagcttctcctgtcaggccagctattaatagttaaattcagtttccagttacccagttaagcagcaacactcggaaaggatcaacaatttttgcggaaataaaaaacatgtcctattccagccgtaagttaaaagctcaaccatgacttatctattaatctaatgtgtcaacatgcccttctaggatttggtttcgacttccatctgccggatgagggatggtgctacccgaagaacgacatgcatttcatccgcagcgcggaatgggtgcccgtggagaaggcaggcgtgggccgctcattcgccaatcccaatggcgtgatctatccgcgggtggtaggcatgattccacgctacggcggccacgttccgggcaacaaatttcgtgtgggcaacacctatggccgttccaccatcgacgccaagcgtcatctggccctcaatcatgattgaggaccgagttatcggaacactcactcaccattagccaatcaaattcgctgtgttacgcttacagaagcacccgaaataaatcgtatccagtagaagcctgtagaaaatggcaaatagaaataaaatcatacaaattcaaatgtccaagaaaagcacatttaatttatgatggctttttcgagcaataaaattaattaaactttaggtcacaagataagaatatattcgttatggtaca

SEQ ID NO: 30470 - DNA, 489 bp, DROSOPHILA
atgagttggtcgggttccagtgacgagctcggggttattgagcagctgaaaaagtccgtggagtcgatcgtggccaaaactgggcccagcagcaagttctccaaggatctcgtccagcggatcggcgagatgcagagcaagctggagtccctggccgaaacggatcggcatgtgtttctcgccgagatgaaggacaagttccagcagacgattggcagaatcgaggagcgaatagtgcagcacgcccatttcgcacagacctactccagttccatagtgtcggcagtgatctttctcttggtctccatattcggtctcagttcccttgatcgcataatgtatcaacgtcaccttactaaccgtctcccttctttccgcattacagctctctttggctacaagctgtacaaatccctgacggaaaaggagctcaagaagcaggagaaactgaagagcaagcaacagaagaaggccaagaagtcaaactga

SEQ ID NO: 30471 - protein, 162 aa, DROSOPHILA
MSWSGSSDELGVIEQLKKSVESIVAKTGPSSKFSKDLVQRIGEMQSKLESLAETDRHVFLAEMKDKFQQTIGRIEERIVQHAHFAQTYSSSIVSAVIFLLVSIFGLSSLDRIMYQRHLTNRLPSFRITALFGYKLYKSLTEKELKKQEKLKSKQQKKAKKSN

SEQ ID NO: 30472 - DNA, 2346 bp, DROSOPHILA; identical to SEQ ID NO: 27436

SEQ ID NO: 30473 - DNA, 285 bp, DROSOPHILA; identical to SEQ ID NO: 27437

SEQ ID NO: 30474 - protein, 94 aa, DROSOPHILA; identical to SEQ ID NO: 27438

SEQ ID NO: 30475 - DNA, 5718 bp, DROSOPHILA
tcccacagagcaggagctgaagattctgcgcactcgtgagggtttggtggactccgtttaccgacatcccatattaccaggctacgccggatttgtcccgaacaaagtgagtcagattggcaagcgatatgttgctgccgcatccgctggagtagctcggcatgagacgctgatggagttgtatcggtgcgagaatcggacgctcaggcatcgggatctactggagagtgggaacggactcttcgaccgcaagatcaacgaaagactgctgccacaaacctattaccgatcgcccctgatcctggtgaccggagtgtccaagggcattaaggacgagacttgtccgccgaaaacggagaaactctgctatagcaagttcacatcgccgcacttcctggaggatgaagatgccgacaagttcataatcaatggttactccggccacattcccatgtcagtgacccgattcggggagtccaacaaggtgctgaccaaccgggcactgtgcagcttctcggactatatgtacaagcggaagcgggatacgtggtgttgtggacaggatctcagccggccgtccatcacctgcccgcccgtgggacacttcgtcgtctatcacgaggacagcggaatggtgcccaactatgcgggtcatgttcctggggagacgtacaagttcggacgcacctacgccaagaccacatacgatgcgaagcgctggctggaggtgcacaagaatcttacagtgctgcccgaggtggccaatctggattacgcctactgaagtgatccacctgcgggtatttttcctccgggcatgttcgaattgtaacgcttttgtcaaggccttgccaccccacgtcgcaagtgcagcatttattgtccttgtatcacctggtcccactggcgattgttgtgatgtatcgatacaacaacaacatccccagctttctatctacgtcgttcgttgcagcaaataaataagttttaattgattgtgcgcctttaaaatgtacgaattgtggctaatgccgtgaccaactgcagagcagtgcctctaattttcggcaccagtgtaaaatcggcggttcggggagcaaaagaagcctaaagtgtccataaaacgccaaaggaaaaaatctttagaatcgaattcgaacaattcaaacacacacacgtagtgctgcaccgttcacacaccgccgtggagtactgtaccgcagtgcgtgcgagcgaaacgacccgtgtctcggcagataacatacatttgtatacctctctttcaagtggtgagttgaatgccgattatgcaccctgcacgcgtcgcgccgagcattgtatgcaataagtgaagtgcacagccgcgaaaaaaaggaacagcatagtgaaacaggaaaccccctggaaactcaaattgcctatctgcacagatccctctagaactcccctctcaccccttattaacaaccgagatttatggcgggaactcgaacggagtgtgcgcacaggtcactaacaagtcggtgcgaccccaactgcggtcgacttgtttattaagagcgaagaaacgaataaaaataaaaacaaaaatatatatgtaatttgttgtagcaggtgagatttacgaattcggagaggagagagttcttcgtattaagaacgggggcgaatgggaaaccgtgaaaaaccgccaaaatgggttgagttctttttgcatcgattttcccggccggaatgaaaaaatttaaaattgtgtttttttaaccgattatgaatttttcggaatagttaaaataaatacataataaacaacttggcatcttggcaagtgtattgatattatacttttaaaagtaaaatacagacgattcttaaaacccctatatcggtataataaatagttaaagtgcaactatcatgctcattaataaatgtttttgttcgcttgttccttgactattgaagtacgcgtggaacattaacagtacacagtgcaattgaaagtgttaaaacgaactaatcttagcttatttaaagataatattagaaatataacggaaccagtaatactccattgagaagcaggtacatagtaacggttgcactcttttccaattgcagaagagcgagtagagtgatgagcgaatctctatcttctcaagtggaggagaccaaagtgtccgatgatgatggtgtaaaagagaaagctgaagtgtccaccgccaaagattcggcggaaacggctatggaagtggaggcagatgacactggtggtcagcagccggagcagagtgaattgttggataaggagaaatctgccacggtggatataaacacactcactccctcgacgccctcacaaaccccgccacaactgctggccgtcgaaactgccacatcgggaagcacggccgtcattccggagaacatcctgtccccgcccaagtcagaaactcaaaccgatgagactaacacggcaacatcgacgtcctgctccccagcctctgacggtcagcggtcgccggcggcggatcaacagtcatcggcaccaccgccacaggtacaggcacaggccacgccggcgccggtcaatggctccgtaccaaagtcggggaaaccactctccacagcgctcagcggcaagaagaccagcaaagcggccactacgtcaccacgtgcatccagatgccgcaaaaccaaggcgctgcccatgtacgaaagcgaaatcagcgacaacaagatgggtatccgactgtgcatcaagaaatctgatgccggagaaggcgcacctgctggtgtcacatctccgccagttgcagttcccgcagcaacaaaaactgtgcgcaagcgcgtccgtaaaccaaagcaacaggacagcgatgaggccgagtatgagccgcgcaagaaaaaaggcggaggaggtggtagtggcggcgaaaagaaggtttcaacgagtccggatgctgcggaggcggctggcgatccagtcgagcagagtgtctgggctcaaaagctgcccgaggaagtcctattcagagtgagaattaaaccaagcagcatataaatggtgttcgtaatatgaattcatcttacagatctttgagcatgctgtggatacacagggctgtctgcccaccctgtttcgccttggcagagtttgctcgctctggcggcaggtgtctcttaggcctactctgtggcgcactatggatcttaccacatgggtcaaagagaaatatcgcaccgaactcaagctcaagtggtttgtcgacaaccgctgcagtgcctgtacagacttgaatgtttgtaagttgagaagtatggtcttgagactataatttaattttaaaatatctcctttcagccaattggaaaatatcagacataaattgcttccttgccaaattgtcaagcgggtgcccgaaccttgcaggcattacgctctccggctggaaaggtttcacttcggatcatcttacgtatttggtggataacatgcacaagttgcagcgcttggacttaagttccatcaatgtatgttgtggcatgtgtttgcgaagctatatctgattcaaatttgtatcgcacaggttgagatgaatgccagcaagagcgccgtgggtgtcaactccctatgcaatgcactccagaccatgggcagccgtctaacacatctctatttggcgcacaatcgtctggcaggaataccacaaatagtcggaattctttcggtgagttcacaacgcttttacaacttatttcctatgacttatgggcttctttttcatattgcagacgcactgtccgaatctaacattattggatctctcgaacgtgaccacgcaggccacatcacacggtgtactccacattgagaagttgcagcgtggctgccagaagctaaaggtcctgcgtgtgacaaactctcatataacgccaagcacggcatcaatgcaggaaattgtaagattcgcatttcaatgttcgaactatgttttaaaagaaagcttttgcagatggactcacctggttttccggaacttgaagaactgtccgtggctgccttaacagatgaatcccgcatcataagcgacgaccatctgcagcgcatccttaagagcagctccaagctaaagctactggacgtacgcaactgtacacgactgacgcacgagagcctaatccgcttacctgcctgggatatcaagcatttattcctgtcaggttgctcagtcacacgagatatggggtgggtctaattagcattgttatgcagaacgcagactaatcaaaagttttcccaacgtaggtcgggtctggaactcattgcctcaaagtgggcgcacagtctcatagaactggatttggcttgggcgaatatgcagcagcccattgataatgcgttgcgcgccctagcggaaaagggcagagattcgccgttggcgtgagtatatattgaactaatgtatctattgtgtgctaatatatattataatttatttctcccctgcagtcatttgaatctatgcggctcctctgtttccgatgaggcggtaaaggaaatactgacgaactgccaaaatatgagctccatcaacttggcatcgtgccgtggtctgccgcgaggcgtcaagcgcttgatgcagggaccgcaggagctaggcgaacttcgggaggttctgggggtgcagctgaagagcagcagcgggagcaactaatccagtcagtgggcaagtccacacatcggttttattgttgatcaggcgggccaagtttaaatgtaatttaaattgttgcatccctcttcgcgcgaaaggcgttaagcgctttgttgattttgtaatgtagtccgcaaacatattgcaatatttgcatatttgcaatcgcttgcatcttccaataatgcttattttgtttataggccctagagcgtaactactgtactagcatagtattctctgcacagcggcagcagcgagttcctcccttttctggaggtgcccgcattagatgctgtgcgaataagcaaccttttgtaaatgcaatatgtattcataactaagttgattcgaattttttgcagcgcgaaaatcatttccttttgaagacaaccgttgcaacgattttcaatgattttttttagtatatataatggtatatatatatatatacatactgatttattgatagttaagtccgaccattgagcgtttgtaaagtatgtatacaagaattaaaaataagtttaaagtgtataattcgcaatacaaaaagaatatatttaccataaagtagtcgtcaattcaaagtcgccaaggcaatttgtagaatgttttaatccgacaagaatgtacatattggcgtttccgattagatgtttttatataaacgaagtaaccatttataaaggtaacgcatataccacacatacataacataaattaaaacaattcaattgttaagcattactagcagttaagagacggcaattaaaggtacatttaatttaaaataaacgcaaacattttcaatctacacccggcattatccatctcttgacacagcaaaacacaccgctcagtcgggtttatagtataattttattcaaatatgcgggagataatattgcattacgagctatgtacggccaagacagcaattacagtacgaacccacttttgggttcgaatacctcagtcctatatcgtatcgatcaga

SEQ ID NO: 30476 - DNA, 2724 bp, DROSOPHILA
cgcctttaaaatgtacgaattgtggctaatgccgtgaccaactgcagagcagtgcctctaattttcggcaccagtgtaaaatcggcggttcggggagcaaaagaagcctaaagtgtccataaaacgccaaaggaaaaaatctttagaatcgaattcgaacaattcaaacacacacacgtagtgctgcaccgttcacacaccgccgtggagtactgtaccgcagtgcgtgcgagcgaaacgacccgtgtctcggcagataacatacatttgtatacctctctttcaagtggtgagttgaatgccgattatgcaccctgcacgcgtcgcgccgagcattgtatgcaataagtgaagtgcacagccgcgaaaaaaaggaacagcatagtgaaacaggaaaccccctggaaactcaaattgcctatctgcacagatccctctagaactcccctctcaccccttattaacaaccgagatttatggcgggaactcgaacggagtgtgcgcacaggtcactaacaagtcggtgcgaccccaactgcggtcgacttgtttattaagagcgaagaaacgaataaaaataaaaacaaaaatatatatgtaatttgttgtagcagaagagcgagtagagtgatgagcgaatctctatcttctcaagtggaggagaccaaagtgtccgatgatgatggtgtaaaagagaaagctgaagtgtccaccgccaaagattcggcggaaacggctatggaagtggaggcagatgacactggtggtcagcagccggagcagagtgaattgttggataaggagaaatctgccacggtggatataaacacactcactccctcgacgccctcacaaaccccgccacaactgctggccgtcgaaactgccacatcgggaagcacggccgtcattccggagaacatcctgtccccgcccaagtcagaaactcaaaccgatgagactaacacggcaacatcgacgtcctgctccccagcctctgacggtcagcggtcgccggcggcggatcaacagtcatcggcaccaccgccacaggtacaggcacaggccacgccggcgccggtcaatggctccgtaccaaagtcggggaaaccactctccacagcgctcagcggcaagaagaccagcaaagcggccactacgtcaccacgtgcatccagatgccgcaaaaccaaggcgctgcccatgtacgaaagcgaaatcagcgacaacaagatgggtatccgactgtgcatcaagaaatctgatgccggagaaggcgcacctgctggtgtcacatctccgccagttgcagttcccgcagcaacaaaaactgtgcgcaagcgcgtccgtaaaccaaagcaacaggacagcgatgaggccgagtatgagccgcgcaagaaaaaaggcggaggaggtggtagtggcggcgaaaagaaggtttcaacgagtccggatgctgcggaggcggctggcgatccagtcgagcagagtgtctgggctcaaaagctgcccgaggaagtcctattcagaatctttgagcatgctgtggatacacagggctgtctgcccaccctgtttcgccttggcagagtttgctcgctctggcggcaggtgtctcttaggcctactctgtggcgcactatggatcttaccacatgggtcaaagagaaatatcgcaccgaactcaagctcaagtggtttgtcgacaaccgctgcagtgcctgtacagacttgaatgtttgcattacgctctccggctggaaaggtttcacttcggatcatcttacgtatttggtggataacatgcacaagttgcagcgcttggacttaagttccatcaatgttgagatgaatgccagcaagagcgccgtgggtgtcaactccctatgcaatgcactccagaccatgggcagccgtctaacacatctctatttggcgcacaatcgtctggcaggaataccacaaatagtcggaattctttcgacgcactgtccgaatctaacattattggatctctcgaacgtgaccacgcaggccacatcacacggtgtactccacattgagaagttgcagcgtggctgccagaagctaaaggtcctgcgtgtgacaaactctcatataacgccaagcacggcatcaatgcaggaaattatggactcacctggttttccggaacttgaagaactgtccgtggctgccttaacagatgaatcccgcatcataagcgacgaccatctgcagcgcatccttaagagcagctccaagctaaagctactggacgtacgcaactgtacacgactgacgcacgagagcctaatccgcttacctgcctgggatatcaagcatttattcctgtcaggttgctcagtcacacgagatatggggtcgggtctggaactcattgcctcaaagtgggcgcacagtctcatagaactggatttggcttgggcgaatatgcagcagcccattgataatgcgttgcgcgccctagcggaaaagggcagagattcgccgttggctcatttgaatctatgcggctcctctgtttccgatgaggcggtaaaggaaatactgacgaactgccaaaatatgagctccatcaacttggcatcgtgccgtggtctgccgcgaggcgtcaagcgcttgatgcagggaccgcaggagctaggcgaacttcgggaggttctgggggtgcagctgaagagcagcagcgggagcaactaa

SEQ ID NO: 30477 - protein, 697 aa, DROSOPHILA; identical to SEQ ID NO: 27432

SEQ ID NO: 30478 - DNA, 5654 bp, DROSOPHILA
tgaaaagatcgagtaatccccgtgaaacgcataaattaacagcccatttgcaatcggagatggtggatggcacgcaaagttgcccaagatggtttggtcgtggccgatccgccccgcctccaaagcagatcatcgaaatggaagcagtggcgacccaattggcagcccatttgcaataaccgcaattatatttgcggttgcgaaacgctgtcgaagatgtctgctaggtggtcacgaactccaagaggctctcacagactcctcaagatattccggcccaaggggcaggcgttgcttgtttcggttgcatgtgccacagtcgccggatgagtcagtgtggcaaatgtcagaatttccacaatattacattattacactgcccggctgtggcgacaagtgagctcatcatcgtgccaatcgatggagctgttaggtttatggcccaatggaattcgtaaacggtttaaacttcaacttgacactcgctggtccgctccgcttagccaaccttcccagccagcaattctctgtggcactctcggttcacacgctgctgcatcttcagacgtcttctgtctaacaagaagtccataaatatcatagttcgcctcaggctgagacaatgatgagccagcccgatgttgatactatagtcaagagtccccgctgcacttgcagccttaatgggcgacgacgatcggttgcaacaatggaaaacgtgagcggatcggattgcgtcgttctgtcaatggacaaatgcttcattgatgaaatggccgacatttggccacactcttgacccctttggaggttcccagcggcggggtcatgatacccacttggccgagatgtgtatcagggcttaattaacagcagaaacaattcaaggttcttcttgtaatttgaagtttggaaaaagcttatcgtttatttttggaacgaaccattgctgtttaacttaaaatacacatttattacaaataattaccaaaatgctatcatgagtaaagtacagttgtaaaaaatgacataatgttagtaagacattaaaaatcgtttaaaagtatttcttaatacgaataattcgaaaataataattttcagacgcttaacattattttaagtttaaatacgtccttgtgctcaagcaacaaaagtttattcgaataacactttttatggcggtcgttaaatgactatttcattacatttagcagccttttttcatgttatcttcagatttatgaattagccgcagttaatgaagttaaattttaaacaattagccacccctgcgatttttcactggcatttattttgcaatcaaataagtcaacacgccaaagattcgcttcaggccaaattgagaacgtggatcgcgatggaagatgctggattcgcatgaactttccatgtgcttgcataaatttgtgaacttaccgggcaatccctacctgcaacgatctttttcaggctctggtgatcacgacgctggtggttgcccaagcagccaagctggataacaaatacctgcccccacctgcaagtgcggccagtgcgggcggcagtccgggagcagggcttcagggcccaggaggtggcttcggcggaggtggaggattcggtggcggcggagcgggtggaggttatggaggaggcggcggtggcggaccagctggcggcttcggtggaggaccaggcggtggcggtgctggtggctttggtggtggtaataacggacttggtggcttcgcaaacggaagacccattgcacctggcggcggcggcggaggcggcggagcacccgctccacgccccagtccgtcaggtggcgcgccaccaacttctggacctcccattccgatcctctcatttgtcaacgagaacgacggcgatggcaactaccgtttcagctacgagactggaaatggtataaaggcccaggaggagggcaccgttaagaacaagggatctgagaatgaaatcccatccgtgatgggctcatactcctacacaaatcccgaaggtgaactcgtcgagatcatgtacacggcggatgagaatggctttgtgccctcgggcaacgccctgcccactccaccgcccattccggaagcgatagccaaatctctggctgcccagggcatctccatactgccgggtggtggatacagtggcggtcctggaggacagggtaagtttctacaaaataaatcaatggattaacattccatttcattgctcacttttgattgcaggagcaggtggcggcggaggcggtggttcgggatatggaggcggatccggatttggaggcggcggcgcaggaggaggatccggtggaggcggaggtggagcaggaggtggcggtggatatggatcaggtaagatacgaattcaagtcacattttgaccctttttctttttttagtcttttttgactttaactttgattatttttaggaggcggcagtggtcgtggaggagcaccaggaggtccaggtaacgactgatttatttatacaatttttaaaaatgttaacccctattagattaatttaatactttatcgattcgtttgcttctttaggtgcgccaggtggaggcggattcggaggtcaaggtaagttatgttccaacggcttacacatggatctaaaatactatttattttttaggaggtggaggaggctatggaggagctggtggcggagctggtcgtggtggttccccaggaggtcctggtaagtcctttttctagatgaaatttattgttcctaaagaaaatccgtcttaattcacttcatgaatttatatttattttcatatatttcaggatcacctggcggcggcggatttggtggtcaaggaggtgctggcggcggttatggtggtggcggcggcggaggacgcggcggtggcggagcaccaggagctcccggtaagttaacgaaaagtgttactccatagatactcaaaactaataacttacttcaactaaaggatcacctggcggtggaggtttcggaggtcaaggtaagtgatcccgcctgactttgcggttcaagttaaaactatatacactttccaggtggaggcggaggattcggaggtggcggcggacgcggcggtgctcctggcgctcccggtgagttcatgatttcattcactttatataatagataacacattgcttattttcaggatcaccaggcggaggcggatatggtggccagggaggtgctggcggcggctatggaggcggcggcggtcgcggtggtggtggagcaccaggtgcgccaggagcaccaggatccccaggtggtggcggattcggaggtcaaggtaagggattttaaaacttactgcacattcacctcgaataatacattcatcttgtaggaggtggtggcggattcggaggaggtggtggtcgtggaggtgccccaggagctccaggtgagtacaaaacataaattgtttgttactgaaaataaggaattattaattaataggatcgcctggtggaggaggatttggcggtcaaggttagttagcaaaacaatattccagttgcaggtcttaagtaaaacatcttcatcttgtaggtgggggtggcggatacggaggcggcgccggtcgtggtggtgctcctggagctcctggtaagtcgattttaatatctgcctagtggctttaaaaacataccattcgtgtttcgcaggctctcccggaggaggaggattcggaggccaaggttagtaacttagtaacagtacactgtgcattccacaaaacttacgaaattcttcaagtttccgactacttgttaaactgtgttataaatattataataattaaagtaatatttattttttaggaggtggtggtggctttggcgccggcggtggtcgcggtggagctggaggagcacccggtggacccggtgagtaacattggtttttgtgatgaagaggtcactctcccaatttgtcacaacatatagatggtatttacattttttaatgtaggatctccaggcggtccaggttatggaggaggtgccggtggaccgggtaagaagcattatagttataaacccggttttacaatctgtgtgattgcaattgtaaaacttgaattagcctcattcatcttcatgagaaaatgatgtgaagagctacactagacaagtgctattcccacacatttcagtttttttattttgacaattcttgtttggcaaagccttggtctattgttttacccacgatcgactaacgatctttcatgcataaaacatttcggcttgcacgcggtctctttgaagtcgctagattataataattttaaagactgctttaaataattacaactaatcaaagagggtttacataaatttaatgccactctaatcgcgattgtttccattttttatctaggaggcgccggtggacgtccaggcggaccaggattgcccggcaatcagtatgttccaccagcggctggtggcggagcacccggctcgccaggcagaccaggatcgggaggagttcccggcacaggatcacagtacattccacctgctccgggagcgccgggcggaggtcgtggaaacggagagttcaatcctcagacgggctatagctactaaaatcagaatttattccaaaacgccaatcaaatctctcaaatcgaagaaacgtcatttccgtgcaggctgccctcaatgttctttcgctaaaacaattaatttatttatataagcttacctccctcttccactctgacaatgtgtgtgtgcaactatcgaaataaatgattattataaaatatttgcttatcattttgcgccgcgtaagctgcggaaattgaaacaaactgcttgacttttcagatgcatgtatttcatgcctttgagttgcgactacatcttcaaactaatcaatcatttaaatgacattaatttgtcgttatttctttggggacttcttgaagcgtctgccgtactgattatagccatatggatccaccaggttgttcggtctgcccctcagttgttgggtgattagggcctgttgctgctgctcgttttgctgctccttctgctgctgttgctgctgctgctgttgttgctgctgctgctgctgttgctggttgagattctgctgctgttgtgcctgttgtgcagtaagattgctgccaaacgattgctggccaaattgtccggcatactgaccgggtaagttgccggaatgcaactgattgaacggctgttccggttgatattgcccggagtttggctgctgctgctgctggaaaccgcgttgctgttgcaactgttgttgctgttgctgctgctgttgctgcagtggagtgagcggctgttgtcctggaagctggggacgaaagggggcgttgggcagtgggggtggcagctggcggaagggcgtctggtatggattcaaattgggattgagcaagccctgttgatagggctgggcacctgcgaaatattgagggctagatggaatccccgtgccctccgctcgaaatccgttctcatcggcgatgtagcgcactgtgatgggtgtgccctccggtgaggtgtacgagtaggatccctgaatcacctgttcaatggcaaataaagt

SEQ ID NO: 30479 - DNA, 1833 bp, DROSOPHILA
atgagtaaagctctggtgatcacgacgctggtggttgcccaagcagccaagctggataacaaatacctgcccccacctgcaagtgcggccagtgcgggcggcagtccgggagcagggcttcagggcccaggaggtggcttcggcggaggtggaggattcggtggcggcggagcgggtggaggttatggaggaggcggcggtggcggaccagctggcggcttcggtggaggaccaggcggtggcggtgctggtggctttggtggtggtaataacggacttggtggcttcgcaaacggaagacccattgcacctggcggcggcggcggaggcggcggagcacccgctccacgccccagtccgtcaggtggcgcgccaccaacttctggacctcccattccgatcctctcatttgtcaacgagaacgacggcgatggcaactaccgtttcagctacgagactggaaatggtataaaggcccaggaggagggcaccgttaagaacaagggatctgagaatgaaatcccatccgtgatgggctcatactcctacacaaatcccgaaggtgaactcgtcgagatcatgtacacggcggatgagaatggctttgtgccctcgggcaacgccctgcccactccaccgcccattccggaagcgatagccaaatctctggctgcccagggcatctccatactgccgggtggtggatacagtggcggtcctggaggacagggagcaggtggcggcggaggcggtggttcgggatatggaggcggatccggatttggaggcggcggcgcaggaggaggatccggtggaggcggaggtggagcaggaggtggcggtggatatggatcaggaggcggcagtggtcgtggaggagcaccaggaggtccaggtgcgccaggtggaggcggattcggaggtcaaggaggtggaggaggctatggaggagctggtggcggagctggtcgtggtggttccccaggaggtcctggatcacctggcggcggcggatttggtggtcaaggaggtgctggcggcggttatggtggtggcggcggcggaggacgcggcggtggcggagcaccaggagctcccggatcacctggcggtggaggtttcggaggtcaaggtggaggcggaggattcggaggtggcggcggacgcggcggtgctcctggcgctcccggatcaccaggcggaggcggatatggtggccagggaggtgctggcggcggctatggaggcggcggcggtcgcggtggtggtggagcaccaggtgcgccaggagcaccaggatccccaggtggtggcggattcggaggtcaaggaggtggtggcggattcggaggaggtggtggtcgtggaggtgccccaggagctccaggatcgcctggtggaggaggatttggcggtcaaggtgggggtggcggatacggaggcggcgccggtcgtggtggtgctcctggagctcctggctctcccggaggaggaggattcggaggccaaggaggtggtggtggctttggcgccggcggtggtcgcggtggagctggaggagcacccggtggacccggatctccaggcggtccaggttatggaggaggtgccggtggaccgggaggcgccggtggacgtccaggcggaccaggattgcccggcaatcagtatgttccaccagcggctggtggcggagcacccggctcgccaggcagaccaggatcgggaggagttcccggcacaggatcacagtacattccacctgctccgggagcgccgggcggaggtcgtggaaacggagagttcaatcctcagacgggctatagctactaa

SEQ ID NO: 30480 - protein, 610 aa, DROSOPHILA
MSKALVITTLVVAQAAKLDNKYLPPPASAASAGGSPGAGLQGPGGGFGGGGGFGGGGAGGGYGGGGGGGPAGGFGGGPGGGGAGGFGGGNNGLGGFANGRPIAPGGGGGGGGAPAPRPSPSGGAPPTSGPPIPILSFVNENDGDGNYRFSYETGNGIKAQEEGTVKNKGSENEIPSVMGSYSYTNPEGELVEIMYTADENGFVPSGNALPTPPPIPEAIAKSLAAQGISILPGGGYSGGPGGQGAGGGGGGGSGYGGGSGFGGGGAGGGSGGGGGGAGGGGGYGSGGGSGRGGAPGGPGAPGGGGFGGQGGGGGYGGAGGGAGRGGSPGGPGSPGGGGFGGQGGAGGGYGGGGGGGRGGGGAPGAPGSPGGGGFGGQGGGGGFGGGGGRGGAPGAPGSPGGGGYGGQGGAGGGYGGGGGRGGGGAPGAPGAPGSPGGGGFGGQGGGGGFGGGGGRGGAPGAPGSPGGGGFGGQGGGGGYGGGAGRGGAPGAPGSPGGGGFGGQGGGGGFGAGGGRGGAGGAPGGPGSPGGPGYGGGAGGPGGAGGRPGGPGLPGNQYVPPAAGGGAPGSPGRPGSGGVPGTGSQYIPPAPGAPGGGRGNGEFNPQTGYSY

SEQ ID NO: 30481 - DNA, 2351 bp, DROSOPHILA
cacaaaacaatttccgacaacaaattggcattgtttcatgcaatatgggaacaaatattttgaagtccgtgaaatcgttgtacgcgtatatgcatgcacctcccatatattaagcggaattgaattattctaaaattgtcggctttttaaaaataacttaaaatatttcccaaaataaacacgcaaagtattcaatcacgctgttgactaattgcggtacagtgatattgtggtttatcacttccaaaagatcctacaacagcaaaaaagtcagaaaactacctagctttataaaatatttataattaagttacgtattttttctataattaaaactcttagaatatttaaagttatagagatgtctatatattatagtacgctccgaaacttcccaagcttattatgctaaatcacttcgactaaatacgtcatggattctacgatctgcctaattgatgaccaatactaatatatttaagtttctttgatctttcgagggggccaacttcaccaatgaatcattcgcacttcgacgttgcctaccgcaacaaaaagccaaagtcgcgaaatgtctaagccgaaatacctaaaaaaaaaagacatcccccctgtgaacaggggttcagcccccaaatgacgtcacacgatgggagtcgtgagcttggagctggccaaaaaggctggaccgcattgacggaaatgttgtgcggtgctattcctgctaattaaatcaaaagatgcgcgacaaatgaaattagtgccccaatactgtcaccactgggatctggctggctgcctgactgatcggagtcggtctgtcataacaattagcgcatattggagaagattcgcggctataaaaaccaacgacgcacggcggataaggcacagaacccaaaggaactccagcaccagtggacaaaccaagccaagcttaactccaaactacaaatcaaaagccaaccatccgcgaaatatattcaaatatccgataaacatgaagtgcatcatatccatcgttgtgatctccatgatcttcggtttaagcctgatccaagcagcacccatcgctaaggatgcccagaatccaggattcgtttcggccacggatattaccggagagccagtgcgccagaagcgatccagtgcggattactaccagggcgactatttcatctgctatcccaagagcgcagtgtacggcaaacatggatacggtgcaaccaatcgcagatcctacgactcggaagactatgcgccccactatttggccgacgatccattggtcgttcgccaggctcgtgctgatgccagacgcgccgcctacaccgacagctttggcaaataaatcaggaactgccatttagtcacttactctatggataccaaaatatcccatccccaaagttgggaaacagaacaggtctagctagtaaagatgtacaaatattattaatattatttattcaacacaaataaaataatcagtaaaagaataaaataaactgcaatatatttaatgaaaaatacagcctttaaaactgcagacagacagacgtgggcagatactttaggcgtagaaggtatggataagaatttagaaacataaattagaagatatatagatattcccttcgtagcatacctttaggctgtatgttaaacagactttccagactcttgatttcagtctgagacgcccccgctttgcccttaagatacaagatacattcacatataggcgactcatctggcgagcagcgattttctgcaaggcgaactccgtgcgctgagacatttcgcaccttatttgccttgggcattagtctaaaagtgtgaattgtttataaagagattacaaaaccgaagacagggcgctcagtgggccgctgtgttcgacttttgccgccataaaaacataaaaaaggcatcactttaagcgaaaaaccaaggcggataattgcaaaagaaagttttcaccatcggcctcggcataaaaggggatttcatcgagccggaagcaaacagttgcctctagagatagctaccgaaatgaccaagttcgttgcgaagaaagctatcctgctgctctccctgctccttctgggcacggcggagtcaaagccactggatgcggaacagcagcatatcgatgatcagcatgtgcgaaaggagcgtcagctgaagatggccggttctgcggatccagacgttaaaatggtggccaacgtgactccagcgacgggatctcaaccaatgtcgatgaccatgggtgtgccaatgaaccagatggccctgagctcggtcggtggccagttggtgcggtatcccaactacccgggtctgat

SEQ ID NO: 30482 - DNA, 351 bp, DROSOPHILA
atgaagtgcatcatatccatcgttgtgatctccatgatcttcggtttaagcctgatccaagcagcacccatcgctaaggatgcccagaatccaggattcgtttcggccacggatattaccggagagccagtgcgccagaagcgatccagtgcggattactaccagggcgactatttcatctgctatcccaagagcgcagtgtacggcaaacatggatacggtgcaaccaatcgcagatcctacgactcggaagactatgcgccccactatttggccgacgatccattggtcgttcgccaggctcgtgctgatgccagacgcgccgcctacaccgacagctttggcaaataa

SEQ ID NO: 30483 - protein, 116 aa, DROSOPHILA
MKCIISIVVISMIFGLSLIQAAPIAKDAQNPGFVSATDITGEPVRQKRSSADYYQGDYFICYPKSAVYGKHGYGATNRRSYDSEDYAPHYLADDPLVVRQARADARRAAYTDSFGK

SEQ ID NO: 30484 - DNA, 2777 bp, DROSOPHILA
tccaagcagcacccatcgctaaggatgcccagaatccaggattcgtttcggccacggatattaccggagagccagtgcgccagaagcgatccagtgcggattactaccagggcgactatttcatctgctatcccaagagcgcagtgtacggcaaacatggatacggtgcaaccaatcgcagatcctacgactcggaagactatgcgccccactatttggccgacgatccattggtcgttcgccaggctcgtgctgatgccagacgcgccgcctacaccgacagctttggcaaataaatcaggaactgccatttagtcacttactctatggataccaaaatatcccatccccaaagttgggaaacagaacaggtctagctagtaaagatgtacaaatattattaatattatttattcaacacaaataaaataatcagtaaaagaataaaataaactgcaatatatttaatgaaaaatacagcctttaaaactgcagacagacagacgtgggcagatactttaggcgtagaaggtatggataagaatttagaaacataaattagaagatatatagatattcccttcgtagcatacctttaggctgtatgttaaacagactttccagactcttgatttcagtctgagacgcccccgctttgcccttaagatacaagatacattcacatataggcgactcatctggcgagcagcgattttctgcaaggcgaactccgtgcgctgagacatttcgcaccttatttgccttgggcattagtctaaaagtgtgaattgtttataaagagattacaaaaccgaagacagggcgctcagtgggccgctgtgttcgacttttgccgccataaaaacataaaaaaggcatcactttaagcgaaaaaccaaggcggataattgcaaaagaaagttttcaccatcggcctcggcataaaaggggatttcatcgagccggaagcaaacagttgcctctagagatagctaccgaaatgaccaagttcgttgcgaagaaagctatcctgctgctctccctgctccttctgggcacggcggagtcaaagccactggatgcggaacagcagcatatcgatgatcagcatgtgcgaaaggagcgtcagctgaagatggccggttctgcggatccagacgttaaaatggtggccaacgtgactccagcgacgggatctcaaccaatgtcgatgaccatgggtgtgccaatgaaccagatggccctgagctcggtcggtggccagttggtgcggtatcccaactacccgggtctgatctatcctggccttgcgccggcacctggcctaaatggtgttcccggtctgcagacgaatattgccaacaactatccctcgtatccggatcccaatctgactggttcagttcctggcttcaatccctttggctcattcggctacccaggcgtggcacccatgtatggaaactccctgatgtatcccaacccccagctgcctaatggatttgtgcccaatccagccgtagataactttcaatcgctgaacaatattgtcaatatggccaatgttcagggattggctggcggcagttccggaatatatccagcacctcaaggattcggtggcgttagcccgggtctatatcccgctccgcagggattcggtggagccaatccaggattgtatccagcacctcaggtcaacatgcagggattgtatccaccatccggcggtttcctggagcgcatgaacatgcagggctatgccccaggcttttaattgagccttaaaaatccatatataataagctaatttattttatttattttcgataaatacaagaacatttatacaacagatttaacaaagcgatgttttattttatttgagtgttctttggagagagagagataaatggaaaggcatgtcatatatcaactctcgtttttcaaaacaaccgacgaatctctttttaaacgctaattaagcagcaggtgtcaagtgcaaggttggtaatttggcaaatttagcaatcggagccaggatgacaagttttgaaagtgaaacgaacatgctggtttacacccgcagagccattgaatattttcgattccatcgattttcccctagagataaaggcaccttttcccgctctgatttacgatccacagtgatttgttggcctgcgcaatgcgagtttatctgagtacctgggccattgataagttacgcaggtagttgggtcccttcccatgccggcgttaatccgataatggtgtgtattcacctgggtataagaacccgagttgtaaggtcaaagagcgtcagtctttagtgaaccactgcaccatgaactactgcgctttgaactgcattctaattgctatacccatcctgctccttttaatggatatctgtgaagccaagccttggtggcccactaacgaagctggctacgatgccagtctggatcccattgcctggtcgagatcatttgtgccggatcaagtgagaaaaacccgctacaatgtcatcccagaaccgagaagcaaacaccgccatcgccagtcctccaagctctggtaccagaaagcaataactacgtatcccaaacaattcaatgtcaatgcaaaatactacaagagatatctgagacgaagacaaaaactggcagcacgtgaacgtttcgcaaactggaggcaataaaccgctattccaaacttacacactacttaggtgctaagcaaatctgtatttctagtaattagcaaaataaaca

SEQ ID NO: 30485 - DNA, 777 bp, DROSOPHILA
atgaccaagttcgttgcgaagaaagctatcctgctgctctccctgctccttctgggcacggcggagtcaaagccactggatgcggaacagcagcatatcgatgatcagcatgtgcgaaaggagcgtcagctgaagatggccggttctgcggatccagacgttaaaatggtggccaacgtgactccagcgacgggatctcaaccaatgtcgatgaccatgggtgtgccaatgaaccagatggccctgagctcggtcggtggccagttggtgcggtatcccaactacccgggtctgatctatcctggccttgcgccggcacctggcctaaatggtgttcccggtctgcagacgaatattgccaacaactatccctcgtatccggatcccaatctgactggttcagttcctggcttcaatccctttggctcattcggctacccaggcgtggcacccatgtatggaaactccctgatgtatcccaacccccagctgcctaatggatttgtgcccaatccagccgtagataactttcaatcgctgaacaatattgtcaatatggccaatgttcagggattggctggcggcagttccggaatatatccagcacctcaaggattcggtggcgttagcccgggtctatatcccgctccgcagggattcggtggagccaatccaggattgtatccagcacctcaggtcaacatgcagggattgtatccaccatccggcggtttcctggagcgcatgaacatgcagggctatgccccaggcttttaa

SEQ ID NO: 30486 - protein, 258 aa, DROSOPHILA
MTKFVAKKAILLLSLLLLGTAESKPLDAEQQHIDDQHVRKERQLKMAGSADPDVKMVANVTPATGSQPMSMTMGVPMNQMALSSVGGQLVRYPNYPGLIYPGLAPAPGLNGVPGLQTNIANNYPSYPDPNLTGSVPGFNPFGSFGYPGVAPMYGNSLMYPNPQLPNGFVPNPAVDNFQSLNNIVNMANVQGLAGGSSGIYPAPQGFGGVSPGLYPAPQGFGGANPGLYPAPQVNMQGLYPPSGGFLERMNMQGYAPGF

SEQ ID NO: 30487 - DNA, 2342 bp, DROSOPHILA
ctgcgctttgaactgcattctaattgctatacccatcctgctccttttaatggatatctgtgaagccaagccttggtggcccactaacgaagctggctacgatgccagtctggatcccattgcctggtcgagatcatttgtgccggatcaagtgagaaaaacccgctacaatgtcatcccagaaccgagaagcaaacaccgccatcgccagtcctccaagctctggtaccagaaagcaataactacgtatcccaaacaattcaatgtcaatgcaaaatactacaagagatatctgagacgaagacaaaaactggcagcacgtgaacgtttcgcaaactggaggcaataaaccgctattccaaacttacacactacttaggtgctaagcaaatctgtatttctagtaattagcaaaataaacaaaagacttaagacacaaactagctgcttgtatttgtagcccaccaagtcgcgcatcagcaaaatcctaactcgctttaattatagccattgataatcagataattatcagaatttctaagctaattcttaaacatcgatgaggagttaaatgaatcttggtcaaaaaaaaatgtctaaggtcattgtgattgcgtttcaagaccatcaacctggtaatcgcaatggcaaacatgatgtaactatcgttagggccaagctaaagacctgagcaaacccagccatttgcacacacgcactcactcaaagaccaaactcaccgaaaacccatcccaaaagtctaacaaaatgttggatgaatgaaagtacgagtatatttggccaagatcgcagatcgcagccgttgctgggtccacactttgttgacactgcgaattagcaactcttcgcacgagcccaagtcccagaccagaagtatataaacctagttgtcatggcacttggtattaagtaccaatccagcgaacatccatcaatcagcggcctttaatctgtttgaatcccttcgagacgtacaaaaatgaagttccttgccctgagtctcgccctgatcgccgtgatctcctgctctctggccatacctgtggatttcgaaaatggagaaccactgacactcttggaattggaggcggaacaggagccacaagttgatgaactggagggcgagagagtggttcgaggactgggaggacttggaggacttggcggcaagttcggcggctttggaggactcggcggcttgaagggaggattcggtggtcttggtcacggctttggcggtggttttggaggacacggtttcggcggcggcttcggtggacttggcagcttcaagagcctattcggcaagaagttccgctaaagcaacagcactcacccaaaatatagtctaagagtttcgtaataaagcttagttaagtaacattaaaagttccctgtttggtatatgggattcagagctccatagaactgcagttcaggttcgggagtggtggtagttatacccgttttggtcctaacggtgggcggagttggtgacttaggttgaagacgactaaagacaagacgcacatgactcgcaaaacttcgccacagctgaaagggttttggaactggaaaaggaataaaattagaattttaggataatcaaataacaaaataacacacgttacctgaactttgaggtggtgccacctgcggatcgaattcccgctcatccagagctgccaccagccccacagtgatccacagcagcagcaagcggaacattttctgcagcttagcctcgtggcccccttataaacacctccgatctcagctttccccgccataaatcgaacgtgttattaataaactcttaaaaacaagcgattggatgaacttgcataaggcaagcaattttattgcacccaatggggcagcacaaaagaagtatcacaaatcacaatcaagcacaatcaaatccatgcaaactgattagccgtagaatccaccgccatagtaaccaccgcgtccgcggtaacgggtgcgggtgaccactcgagttctctggaaaccaccgccgaatccgccaccaaagccgccgccgtagtacggtggtggaggtggtccaaagaagggtggtggcggtggtccaaacggtggtggtccaaagtactggcgcactttcctaacgttctcgtctgtggaatcagactgggccgtttctccggcgtccagcagctgaatagagcttggtttctcctgcaccacttccgtttccgtttcatcggctctaacaaaattgcataagagcagagcagcaatgctgaagaaaaatattatccacttgtgatccatttcgatgtcgtattccttctcca

SEQ ID NO: 30488 - DNA, 342 bp, DROSOPHILA
atgaagttccttgccctgagtctcgccctgatcgccgtgatctcctgctctctggccatacctgtggatttcgaaaatggagaaccactgacactcttggaattggaggcggaacaggagccacaagttgatgaactggagggcgagagagtggttcgaggactgggaggacttggaggacttggcggcaagttcggcggctttggaggactcggcggcttgaagggaggattcggtggtcttggtcacggctttggcggtggttttggaggacacggtttcggcggcggcttcggtggacttggcagcttcaagagcctattcggcaagaagttccgctaa

SEQ ID NO: 30489 - protein, 113 aa, DROSOPHILA
MKFLALSLALIAVISCSLAIPVDFENGEPLTLLELEAEQEPQVDELEGERVVRGLGGLGGLGGKFGGFGGLGGLKGGFGGLGHGFGGGFGGHGFGGGFGGLGSFKSLFGKKFR

SEQ ID NO: 30490 - DNA, 2441 bp, DROSOPHILA
agccaacttgacccactgtaatcgcttgatggcttgttgtttaccacttaaaaagcccatccgcctcgcctcgcgcgatattcgacatacatatgtacatatatatatggaagcaaatagcagcgagagactcttccagaaataacagccagttaactacggaatatgcaagctcatcgactttgtcgattccaaacactcggcaaaatgaaactcgatcttgcagtacttttttgtttatccattgtttacactagagggtctcaagaaacgctcagatttattcggaaacgtctagccaaagaaaccgcctttgaatttggcaaaacccacagcgccgccaacgaatccgccgcctccgatgccacctagtccgcccaatcctcctccaacgggatagccaccgccatatccgtagccatagctgggtatcgtctgtatgacgggaacagtggtgatgatgggcacagtggacacaacgggaactgtttggatagcgggggctgccactatgggggcagcaactcctccgcctccgatgatgccgccgcccacgataccgcctccaacgactccgccacctccaaatccaccaatgtgacggggtcttctaatgttctcctcgtcgacgctggagaggatcggtgtggtgctgaccacggcgcacgccaagacgagcaggtagacagtttgccacaacatgatggggttaactgtttggtctgccccactcccagctgcttatttatgcaaattaattagtggccactgtttgcacttccaatttgcatattggggcgcccgggtaaaaaacccataactctaaggccccatctatgttttggcggttctattgggggaatcatggttttgcccactggtaaggtggttcacacctcatcatcgtcatcgtttgtggtctgaaggtcgccggcctgggcattaaaagccaggtgatttagttaaggtaactcacatcgttattggacactcagccgagatgaggtgcgatcttcaagtgcattttttgttattactggcaattggcgcttggcggactgaagcccattccctgggaggaggtggaatcggagcggttggaggagtggcagccattggcggagttggtggcatcggaggagtccagcaggttcccgttgtgcaacaagtgcccgttgtccaacaggttcccgtcgtgcaacaggtgcccctcatccaacagcagccgcaagctcttggcctagcaggtggaggtggattcattggtggcggaatcggaggtggtgccggttttggacgctacaaggaaagctatcgcgtgcgagcgaggggattcggtggtggataccgcgcccggtacgacaaaaaatttggaggaggattcgccggacttggtgctgctggaggagcgggcttagctggtggcggtctgctgggataaatacaagcatgctatgtagtttaataaccaattataataaattgtattagtaccattaatatgtttatttttaacaatgagactttgtttataactaaagcagacgcactttcttaaggataagtatttacaagctaattaataacaatcaattcatatgccgaattatggtaacataatcctgagaacttgctcctgaacaccctgtatttcttccgctctgcatttctgctgacctgcgcagattccacccccagcaaaagtccaattggcgctctgtgctctcccactttatgatttcccactctctggtggtgcatttcgtcccattcatttccgttgttcttctacttactcaatatatcacgagcacgctctaaatttcttttactcttgttttgacttgtaaagagagtggtacagtggtttacattacagtacattttttcaaaatacaataagttacaatggatatgctttcgaaaagaattttttttgaaatatacatatgtgtttaaaaatatagattattattatcattttgatttgtatctgcaaaatgttacatttaaatattaaataaagaaagcttgtttactaaaatccacaatactataagttatcaaagttttccataacaaatagtatgcggatttagttctaagagtaagtgttaagagtaccaagtttggcgctctttaaagagctggacagattcgcgagatggcagttccctcgacgtggaaatgaattcctgaaattaaacgttgttctttgcccgtcgtgtgcagtcgctctcgctcccgttattcgccgttctgggattcccgctggcggactctggtggccatcaccttgataatccttattgtgaaatatgtgaagtgctgcaaagagtctaaggatatcctgatatattaacggttaactaaactagtgcgcaatattagaggcctaaaaatagcgaaaatagcagacatgccgtgtttttgtgcctctg

SEQ ID NO: 30491 - DNA, 441 bp, DROSOPHILA
atgaggtgcgatcttcaagtgcattttttgttattactggcaattggcgcttggcggactgaagcccattccctgggaggaggtggaatcggagcggttggaggagtggcagccattggcggagttggtggcatcggaggagtccagcaggttcccgttgtgcaacaagtgcccgttgtccaacaggttcccgtcgtgcaacaggtgcccctcatccaacagcagccgcaagctcttggcctagcaggtggaggtggattcattggtggcggaatcggaggtggtgccggttttggacgctacaaggaaagctatcgcgtgcgagcgaggggattcggtggtggataccgcgcccggtacgacaaaaaatttggaggaggattcgccggacttggtgctgctggaggagcgggcttagctggtggcggtctgctgggataa

SEQ ID NO: 30492 - protein, 146 aa, DROSOPHILA
MRCDLQVHFLLLLAIGAWRTEAHSLGGGGIGAVGGVAAIGGVGGIGGVQQVPVVQQVPVVQQVPVVQQVPLIQQQPQALGLAGGGGFIGGGIGGGAGFGRYKESYRVRARGFGGGYRARYDKKFGGGFAGLGAAGGAGLAGGGLLG

SEQ ID NO: 30493 - DNA, 3826 bp, DROSOPHILA
ggagtcggagaatctatccaatgaccaggaaatcgacttcctgaaggccttgcttgaatccaaggaactaaacgcgctggtcaatgtccacacgaaggtggccaaagtgggtcgagatgatcgtctggccccggtgctctccacctctgcccaggtgttgtacgaagtcctggagcagctgtcccagcattgtcatctgaacgatgactgcaaggaggcctttcacctgctgcaggactctcacctgcaggtgagctgttttattttgatagatgaacgttcttattaatagttcattattttcagcaccttctgttcgcccacgatgcgattgcccagaaggacttctacccgcacctgccggaggcgcctgtcgaaatggacgaggacgaggagaccatcaagattgtgcagctcgtcaagagcaacgagcccctggtgagtgttcgtccagtggcaccagcgctttccatttccatgcccatctcatcgacgtgatcgctgtattgtgctgtccatcgctttccaccgtccactttcgactttcatttccgtaccccgccccgactttcaccgcctacccttcgcctttgccaactgctcctttctgcgcctccattcatactcgttctactgttgttatcgcctccatgtcaactcttttcaatgctaatcaattttgtcaactttgcctttgttaaaatcgaatgaaatcgaatcaatttctcgaattcgcccataccaaacaaatatgcattcgttaacaaaaacaaaaaaatgtaaaaatccaaaaatgtataaaaaaaaaaacacagacaggagcacagagtacggagccaattgttgtaagtaatcgaatgtccatagccgtaaaatgtccactgtaagaaataaaacagaaaacccattcgccaagcactgaagacaacaaacaacagccaggaagctgtgcacacaccaagatacatgtcacataagataccattaccatcctttgttcccattccgttgttcttgtcgctgtgacgcatccattagatacactcacatctagaacatcggaagccgcactccacacagatacacaatcgcacacacacacacactctctccacacgcacacatacgcgccttgcgttggctttctagtaacacgaattgcctacttttagggcgccaccattaaaacggacgaggagtcgggcaagataatcatcgccagaattatgcacggcggcgctgcagatcgctccggattgattcacgtcggcgacgaggtcatcgaggtcaacaacatcaacgtggagggcaagacgccgggcgatgtgctcaccatactggtaagtatgcttagaattgatcgagaaacctcattcttgatgtaattttcataccttttataaacaaccagcaaaactcggagggcaccattacctttaagctggttcccgcggacaacaagggcgcccagcgcgagtccaaagtgcgggtgagggcccactttgactacaatccggatgtggatccctacattccgtgcaaggaggcgggtctggccttccagcgcggcgatgtgttgcacattgtggcccaagacgatgcctactggtggcaggcgcgcaaggagcacgagcgctcggcaagagccggtttgattcccagccgggcgctgcaggagcgccgtatcctccacgaccgtacacagaagaacggcaccgatctggactcgaagcgtaagcatatcgcgttgccagcccattgcttccataacattcgctgttcattgtctttccatgactaaaattgctctaatttcattcttcatctgtgcccccctcatctaacactcgacccaactccaaatggtcccatccatgcattgccatcgccagccggatcatgcgcctcactatgcaccaccccacctggctccccgcgtctgcctgcgagtagcagcacctcctcctgccgccagcccaagactaaaaagatcatgtacgatttgacagagaacgacgactttgaccgcgagcagatcgccacgtacgaggaggtggccaagttgtatccacggcccggagtcttcaggcccatagtgctcatcggagcacccggcgtggggcggaatgaattgcgccgccggctgatagcccgggatcccgagaagttccgcagtccggttccgtgtaagttttcttaagtttgttttattaagtgaacaaatgaactagtgtagaaatgaccaagtgaacaaatggacctcttttcgaacatctttaatagaaaacctattcgtttttttcagacaccacccgaccaatgcgcacaggtgaagtggccggacgagagtacatctttgtggcccgcgagaaaatggacgcggacatcgaggcgggaaagtttgtggagcacggcgagtacaagggccatttgtacggaacatcggcggagagtgtcaagtcgattgtgaatgccggctgcgtatgtgtgctgagtccgcactaccaggcgatcaagactctgcgcacagctcagctgaagcccttcctcatccatgtgaagccaccagagttggacatcctgaaggctacgcgaacggaggcgcgtgccaaatccacattcgacgaggcgaatgccagaagttttacggacgaagagttcgaggacatgatcaagtcggccgaacgcatagatttcctatacggacacttcttcgacgtagagctggtcaacggcgaactggtcaatgctttcgagcagctggtccagaatgtccagcgactggagaacgaaccggtatgggcaccatccatgtgggtgcagtagatcggttgccaaatgtggacaagcatttcatgcagtttgttgatgaacaccaaagtatttttgccatacgaatttagcaatctgctagagaaacggagaagagacactatttacccgtaggcggtcctgctgggcactcccgtccggccttagtccttttcacgacatgtacctttttgcgtaacagtgaaaacaatgtaatgaatacaataattattgacagaaagtgaaggaaatttgaactcaaccagcatctaacttacaattaaattatataaacttgttgtacaaaatttatttgtgttcaaagaatgacttaattataaatgtatgtattacacgttgttgaaatcaaagtacagagttaatccccccgtaaaacctaaagctaatcgtattgtatctcagttgtatatacactcactaactgaagcatattggatacaatgtgaagttctgtgtgacgacatgtctcatttcgaaaactgatttcaccaaaaacgtagtgacaaattgttgaaaacaagtgagaaactaataaaaaaaaaaaactattttaaatgcgattgagagggaagcgtttttcattagcttagcaattgatgatgtatatattaactttatttaggttagagaagacttaaacacagctttattgggcagcgcacttgttgacatattgacatgctcacgtacatataaactcgtaaatataatctgtcacctatgctaacctatggcaaatgtgtaaattattagcttaggcatatgaagtctatccaggatgtactgatcagttttcttgattgtatcttgtagtgcgaagacagaattctacatccacacgtataactgggtcaggtatcgctgtcgtctatacatgttctacgatatcctagcctacagctagagttgcgatttggttccagaacgggacacgcttattccgtaaaactgggccagtcgtctggcctcccgccatcccgcctcgactgctccg

SEQ ID NO: 30494 - DNA, 1477 bp, DROSOPHILA
ccattccgttgttcttgtcgctgtgacgcatccattagatacactcacatctagaacatcggaagccgcactccacacagatacacaatcgcacacacacacacactctctccacacgcacacatacgcgccttgcgttggctttctagtaacacgaattgcctacttttagggcgccaccattaaaacggacgaggagtcgggcaagataatcatcgccagaattatgcacggcggcgctgcagatcgctccggattgattcacgtcggcgacgaggtcatcgaggtcaacaacatcaacgtggagggcaagacgccgggcgatgtgctcaccatactgcaaaactcggagggcaccattacctttaagctggttcccgcggacaacaagggcgcccagcgcgagtccaaagtgcgggtgagggcccactttgactacaatccggatgtggatccctacattccgtgcaaggaggcgggtctggccttccagcgcggcgatgtgttgcacattgtggcccaagacgatgcctactggtggcaggcgcgcaaggagcacgagcgctcggcaagagccggtttgattcccagccgggcgctgcaggagcgccgtatcctccacgaccgtacacagaagaacggcaccgatctggactcgaagcccggatcatgcgcctcactatgcaccaccccacctggctccccgcgtctgcctgcgagtagcagcacctcctcctgccgccagcccaagactaaaaagatcatgtacgatttgacagagaacgacgactttgaccgcgagcagatcgccacgtacgaggaggtggccaagttgtatccacggcccggagtcttcaggcccatagtgctcatcggagcacccggcgtggggcggaatgaattgcgccgccggctgatagcccgggatcccgagaagttccgcagtccggttccgtacaccacccgaccaatgcgcacaggtgaagtggccggacgagagtacatctttgtggcccgcgagaaaatggacgcggacatcgaggcgggaaagtttgtggagcacggcgagtacaagggccatttgtacggaacatcggcggagagtgtcaagtcgattgtgaatgccggctgcgtatgtgtgctgagtccgcactaccaggcgatcaagactctgcgcacagctcagctgaagcccttcctcatccatgtgaagccaccagagttggacatcctgaaggctacgcgaacggaggcgcgtgccaaatccacattcgacgaggcgaatgccagaagttttacggacgaagagttcgaggacatgatcaagtcggccgaacgcatagatttcctatacggacacttcttcgacgtagagctggtcaacggcgaactggtcaatgctttcgagcagctggtccagaatgtccagcgactggagaacgaaccggtatgggcaccatccatgtgggtgcagtag

SEQ ID NO: 30495 - protein, 416 aa, DROSOPHILA
MHGGAADRSGLIHVGDEVIEVNNINVEGKTPGDVLTILQNSEGTITFKLVPADNKGAQRESKVRVRAHFDYNPDVDPYIPCKEAGLAFQRGDVLHIVAQDDAYWWQARKEHERSARAGLIPSRALQERRILHDRTQKNGTDLDSKPGSCASLCTTPPGSPRLPASSSTSSCRQPKTKKIMYDLTENDDFDREQIATYEEVAKLYPRPGVFRPIVLIGAPGVGRNELRRRLIARDPEKFRSPVPYTTRPMRTGEVAGREYIFVAREKMDADIEAGKFVEHGEYKGHLYGTSAESVKSIVNAGCVCVLSPHYQAIKTLRTAQLKPFLIHVKPPELDILKATRTEARAKSTFDEANARSFTDEEFEDMIKSAERIDFLYGHFFDVELVNGELVNAFEQLVQNVQRLENEPVWAPSMWVQ

SEQ ID NO: 30496 - DNA, 2659 bp, DROSOPHILA
atatgagctccatcaacttggcatcgtgccgtggtctgccgcgaggcgtcaagcgcttgatgcagggaccgcaggagctaggcgaacttcgggaggttctgggggtgcagctgaagagcagcagcgggagcaactaatccagtcagtgggcaagtccacacatcggttttattgttgatcaggcgggccaagtttaaatgtaatttaaattgttgcatccctcttcgcgcgaaaggcgttaagcgctttgttgattttgtaatgtagtccgcaaacatattgcaatatttgcatatttgcaatcgcttgcatcttccaataatgcttattttgtttataggccctagagcgtaactactgtactagcatagtattctctgcacagcggcagcagcgagttcctcccttttctggaggtgcccgcattagatgctgtgcgaataagcaaccttttgtaaatgcaatatgtattcataactaagttgattcgaattttttgcagcgcgaaaatcatttccttttgaagacaaccgttgcaacgattttcaatgattttttttagtatatataatggtatatatatatatatacatactgatttattgatagttaagtccgaccattgagcgtttgtaaagtatgtatacaagaattaaaaataagtttaaagtgtataattcgcaatacaaaaagaatatatttaccataaagtagtcgtcaattcaaagtcgccaaggcaatttgtagaatgttttaatccgacaagaatgtacatattggcgtttccgattagatgtttttatataaacgaagtaaccatttataaaggtaacgcatataccacacatacataacataaattaaaacaattcaattgttaagcattactagcagttaagagacggcaattaaaggtacatttaatttaaaataaacgcaaacattttcaatctacacccggcattatccatctcttgacacagcaaaacacaccgctcagtcgggtttatagtataattttattcaaatatgcgggagataatattgcattacgagctatgtacggccaagacagcaattacagtacgaacccacttttgggttcgaatacctcagtcctatatcgtatcgatcagatcatctagttcttctgcagcttatccacgtcctgaatgtaatcagtgccgaccttcacgatggcggcgccagttcccaagcccgccagggtcgccagcagtgcattgtcctgtggcagggcggacttgatgagcgcccaggccagaacggatcccatggagaatagggtggcgcccagcagggcgtacgcacctcgcttgttgttcttcacgtccttcaggtggggcctgccgtaaatgtagaaggcactgcccaccaccgcggagatgaggaacacgttcgtcaggtccttcttgggcaggattttgggcacgatctgggggttcataacattcaccgcaagggctccgtagctcaccaggccgtgcagcggtatgtagtagttgaacacattatcccgggtgaagggcttgaggcccactttgtcgcatatgctgcaggcgtcttttgactgtgtcccggccattattatcggtgaaaatgcaattaagtttttggatcccggtgaggtcgacgagtcttcttcttcttgttatgtaaagaatagggctgccaggtcgcgatatatgtgaaagttatgtcggtcttcgcggacactctgcagatggtatatcactggttctaggtagatatgtgtataaagatgtaaatgttttgaccaatataatatgtcaatgtctgagagatcctaatatataaatgtacatatctgacagggagagtacttgttatcaagggctttaacgcttggagcgctcatgttagtgggcgttttgcgtatttgcataacattagccccgatatttcctgaatgtacaattaaaaacaaatgttatagttattttcttggctggttttttaaaaattttcgaatttttaagtttagtggttccggaacgagtcacctttctgaacaagaagtgtcaactctgttgaacagccggcacggtgtgcacaaccaggtggcaacaccagccggcgcaggagaatgagtggaggagtgcctgagaggtgggaggaccgaatggggagagacagagagcgaaataggtgcgaaaaatttgtagttgcctggaaattcctcaatttcaatttgcaaaaagtaaatatcagccgccccaaagcaacgtcgataaatgtgcgcgccccgcgagcagagaacaaccaacgccagctcctgaagcacttcagtccagagatatcgccgagagccacagtgcagcagatccgtggacgacatgttgacgcacaaaacttgtcaggcacgtaagaaaatgcaggtgagtgcgccaattgaaaacgggaaggaaagcggacacctaagcccaaactaattcaattaaaccgtcggacgccaggtttccttcgtgatacgggacgccgaggagaaacagcaccggaatggcgtaaacgctctgcagctggatgccaataacggcaagttgtactccgccggtcgcgacgccataatccgtgtgtggaatacacggacggactccagcgagaagtacatacaatcgat

SEQ ID NO: 30497 - DNA, 659 bp, DROSOPHILA
aagactcgtcgacctcaccgggatccaaaaacttaattgcattttcaccgataataatggccgggacacagtcaaaagacgcctgcagcatatgcgacaaagtgggcctcaagcccttcacccgggataatgtgttcaactactacataccgctgcacggcctggtgagctacggagcccttgcggtgaatgttatgaacccccagatcgtgcccaaaatcctgcccaagaaggacctgacgaacgtgttcctcatctccgcggtggtgggcagtgccttctacatttacggcaggccccacctgaaggacgtgaagaacaacaagcgaggtgcgtacgccctgctgggcgccaccctattctccatgggatccgttctggcctgggcgctcatcaagtccgccctgccacaggacaatgcactgctggcgaccctggcgggcttgggaactggcgccgccatcgtgaaggtcggcactgattacattcaggacgtggataagctgcagaagaactagatgatctgatcgatacgatataggactgaggtattcgaacccaaaagtgggttcgtactgtaattgctgtcttggccgtacatagctcgtaatgcaatattatctcccgcatatttgaataaaattatactataaacccga

SEQ ID NO: 30498 - protein, 153 aa, DROSOPHILA
MAGTQSKDACSICDKVGLKPFTRDNVFNYYIPLHGLVSYGALAVNVMNPQIVPKILPKKDLTNVFLISAVVGSAFYIYGRPHLKDVKNNKRGAYALLGATLFSMGSVLAWALIKSALPQDNALLATLAGLGTGAAIVKVGTDYIQDVDKLQKN

SEQ ID NO: 30499 - DNA, 2537 bp, DROSOPHILA
tttaaaggaccttgttcaccgcctttcctttaaaggttgtggaccccaacatggacctgcgcacggtgcgccactttatctggaagcagtcgaccgatctaacgtttcagtacaagaccaaacagaatttcaactacgatggtaaataagagagcccacgcattgaacaacacaagaacacctatcacaaacacaacgcatacttgatttctgcaattgctattgcctaaccgagagttgtgcttatatatatccgccccataggttcgatcggggatagcttggagcgcgtgacgcgcaagtattgaacgctggcaagtgatctcccgcctaaccgaagcagtaccgatgcattattgaatgagaacgagattgagcagatcgattaacaatttatatttttataagttgattttgcaatatatttgagttaacctgcgattcgtctcatctcttctcgactcgactcgtggacaaacacaaacacattcaaggagaatctgtacgagcgttaactttaaatttaaaagtgcaccggagtacttttgtttgttcacttctcgttaggaataaatatgtacttcagattcagacttataacaattaggcttgcgacacacgtagataagcattgcaaaggagtaactgcagacataccattaaatcgtatttgcatctgaagcaactagacctagagtattgcgcatatatgtatgtatgtaatattcacacttgtttcacattaggtttatacataattatttacatagaacatacataggtataagaaatctgttaaatatacagaaaaatcaatgcaatggtagtagcccaacttgtaaagagctctatgcaagccaatttgtacataagtaataagcgaaaatcgaaaaccaggatggaaatcaattaaagttattaaattatttggaaatcaagcctgtctctcagtccctaagatgattacccgccctcttaactaacaactaggagtgtgctcctaacgccgacgtcgcgtgcccgccactcgggaataggactcgatgcaggtcagcaggctgagcagctgttgcttcagcgtcgagggtatgtggtatccgtggataatcctccgtggcgcgttgctcgtccggatcagccagcgggcgaccagccagaggcagttttcgcgcagcgatctcatcggaaagtggatcagcacttcgctgcgtacgtcaaccagctgatccggactctgctggctcttgggtacccgcacccgaatcggctgaaagatcctctgcgagcgtacgtgcatccgttcgcccgtgtagtaatcccggaacagccagctgtgtgtggtgaacgtgttcacccgcacctcctcgaagggcttgagggtaaggtacatgttctcccgctcccgctcgcacacccagtacagatccagggtgcgataggtggtgtttgcaaacagcacgtacacctccacctttccctgatcagcgcccaccagctgctggccgtcgcggttgttctgcgctatttggagcgccatctccagcagggtgctaagccgatctgcaatggctgccaaatcaattttcgttgttttacgtttgcacaagccgtgggaattggattgaatcaaatcacaacaagctaacaacaagtatagataaaattcacttcttatcagttacggtaacatttttcctgctgcgtgtcactgcagctggccacactttcgatgaatgtcttatcgataaggggtaaatcagctgatttgcctccgcctctcgcgaaaagtaaacaaataaacaccaagaaataacaaaatatggcattttgcatagcagttattggcaaggatgtgagttttatttttcatttgaatacaattaattgcatgacaaattccccacagaacgcccccctgtacctgaccacatccgatatggagcaggaactggaattgcaatatcatgttaacgccgccttagacgtcgtggaggagaagtgcctgattggcaagggtgctccggagtccaaggagctgtacctgggactgctctactcgacagagaaccacaaaatgtacttgggtgtagttatgctggtgaatttgcaactgattggtggttgatttcattacagatacggctttgtgaccaacactcgggtgaaattcatagtggtcatcgactccagcaacgttgcccttcgggaaaacgaagttcgagcagtgggtatccaatctaactatctaaatgaaagccccaaatacctcctaccctctgtatcttccagatcttccgaaatctccacttgctctacaccgatgccatctgcaatcccttttacattcccggcgaatcgctgacttcaaagtaagcgggcttctccttaaagaatatataagttgctcttaatacgttacttttatatctgcaggaagttcgatcgcgctgtccagaaactgatgagcggcactgcctagctgtagattaatactgaacgaataataaagcgaattatttatcaaatgcatacgtctt

SEQ ID NO: 30500 - DNA, 537 bp, DROSOPHILA
atggcgctccaaatagcgcagaacaaccgcgacggccagcagctggtgggcgctgatcagggaaaggtggaggtgtacgtgctgtttgcaaacaccacctatcgcaccctggatctgtactgggtgtgcgagcgggagcgggagaacatgtaccttaccctcaagcccttcgaggaggtgcgggtgaacacgttcaccacacacagctggctgttccgggattactacacgggcgaacggatgcacgtacgctcgcagaggatctttcagccgattcgggtgcgggtacccaagagccagcagagtccggatcagctggttgacgtacgcagcgaagtgctgatccactttccgatgagatcgctgcgcgaaaactgcctctggctggtcgcccgctggctgatccggacgagcaacgcgccacggaggattatccacggataccacataccctcgacgctgaagcaacagctgctcagcctgctgacctgcatcgagtcctattcccgagtggcgggcacgcgacgtcggcgttag

SEQ ID NO: 30501 - protein, 178 aa, DROSOPHILA
MALQIAQNNRDGQQLVGADQGKVEVYVLFANTTYRTLDLYWVCERERENMYLTLKPFEEVRVNTFTTHSWLFRDYYTGERMHVRSQRIFQPIRVRVPKSQQSPDQLVDVRSEVLIHFPMRSLRENCLWLVARWLIRTSNAPRRIIHGYHIPSTLKQQLLSLLTCIESYSRVAGTRRRR

SEQ ID NO: 30502 - DNA, 3455 bp, DROSOPHILA
gaggtcactctcccaatttgtcacaacatatagatggtatttacattttttaatgtaggatctccaggcggtccaggttatggaggaggtgccggtggaccgggtaagaagcattatagttataaacccggttttacaatctgtgtgattgcaattgtaaaacttgaattagcctcattcatcttcatgagaaaatgatgtgaagagctacactagacaagtgctattcccacacatttcagtttttttattttgacaattcttgtttggcaaagccttggtctattgttttacccacgatcgactaacgatctttcatgcataaaacatttcggcttgcacgcggtctctttgaagtcgctagattataataattttaaagactgctttaaataattacaactaatcaaagagggtttacataaatttaatgccactctaatcgcgattgtttccattttttatctaggaggcgccggtggacgtccaggcggaccaggattgcccggcaatcagtatgttccaccagcggctggtggcggagcacccggctcgccaggcagaccaggatcgggaggagttcccggcacaggatcacagtacattccacctgctccgggagcgccgggcggaggtcgtggaaacggagagttcaatcctcagacgggctatagctactaaaatcagaatttattccaaaacgccaatcaaatctctcaaatcgaagaaacgtcatttccgtgcaggctgccctcaatgttctttcgctaaaacaattaatttatttatataagcttacctccctcttccactctgacaatgtgtgtgtgcaactatcgaaataaatgattattataaaatatttgcttatcattttgcgccgcgtaagctgcggaaattgaaacaaactgcttgacttttcagatgcatgtatttcatgcctttgagttgcgactacatcttcaaactaatcaatcatttaaatgacattaatttgtcgttatttctttggggacttcttgaagcgtctgccgtactgattatagccatatggatccaccaggttgttcggtctgcccctcagttgttgggtgattagggcctgttgctgctgctcgttttgctgctccttctgctgctgttgctgctgctgctgttgttgctgctgctgctgctgttgctggttgagattctgctgctgttgtgcctgttgtgcagtaagattgctgccaaacgattgctggccaaattgtccggcatactgaccgggtaagttgccggaatgcaactgattgaacggctgttccggttgatattgcccggagtttggctgctgctgctgctggaaaccgcgttgctgttgcaactgttgttgctgttgctgctgctgttgctgcagtggagtgagcggctgttgtcctggaagctggggacgaaagggggcgttgggcagtgggggtggcagctggcggaagggcgtctggtatggattcaaattgggattgagcaagccctgttgatagggctgggcacctgcgaaatattgagggctagatggaatccccgtgccctccgctcgaaatccgttctcatcggcgatgtagcgcactgtgatgggtgtgccctccggtgaggtgtacgagtaggatccctgaatcacctgttcaatggcaaataaagttgttgacaaatagcacccaaaagcatgatacgaattttttagttatagttagctcaacgccgaaaagattgcaacgcattatgtcccaatttgaataatatgatcgttggttttttgaaaataatttacttgaatttatgcatagatatgtgaagcttaaaaaacttgttctactaaaaaataacagaaaaatttacttaaaaaaaggctgatgtaaatatcaacaaataagtcttaacaccattttccatcaattaatgctataggatcatttagaagaatatcactgaaaagtttgctaatcaatctgaatagtaaacccacctgtgcctcaactccctcaccataccccaagttcttcacgtatccctgtgcctgggcagtggttccatcggccgacgagtatccgtaggagaagcttccatccagattgagttcgttttggtaggcagtgatgggcacatagttttgctgctggtactggttgtagcgggtatagggattctgtagagcagctccagttagtggaggtgccagtgggttcagtggattcctttgaccaggaaacagtccttgaccctgtacgggattcggctggcgtcgctgaaagggattggcctgctgttgcagcggctgcagtggaggcacctgcggacgctgtccctggaatccggttcctggcaactgagcctggctgacggaaaaccagaggctggccagcagacaggccacccagcggaggtgccggaatcgaggggtacgggctacagacatttaggctgtcagtgggcaggtgccgtggatcataaatctcgcgaacggagcacaaattacacgctcgataaacccgacgattcacttatggagctgggaaacactgctgatgctggagattcaatcgcgtaccgaagcaaatccgttgctgccactggaagtcactgatcgaaagccgtgccacgactgcaattgcggctcccaccggcggccgtatttatgcggttctcgatcgtcgggcccggcggttcgtcaggccctaaagctcagctcagttatggtcagaacaatcggcggcttcctgtgccctggctatcggcttctgactgcatctcgatggtaatctcgcgggcggccagtgtaatttatctgcgtgttaacaagccgctgggctggcagctttattggttttttatcggccattgacagaaggacaaacgaatttcgtttggcttcggctttggcctgggctgattgatatcttcatggtggcccaccggtcgtcttccgcgcacttgtttatgagccagccccatatgcaaattctgggtctttttgctccagcacttgtcttcgcatctgcctcaaaggtgtttgcttgagttatgtgctgacagtggctggtggtctatgttgtatgttggatagccccttcattttcccttggtcaaggtggaaatcggacctcaacttggcctacaaacatcatttgtcaaatggcatactaatcaaatgcgatactgcttatccccaggatagcttgagagcttttcgtgcccgaagtgttccattgttccacgctccagtggggttaatcatcaatctcgatgggacggggattgctcatgtctaggtgtgatgtggtcgccatcactcatttataactgccaagtatctgacagatacattttcgtttgtcatcagtatgagctgccattaaaaggcgaacatgtcttgttccatgttcagcttcatctataattgcatatgctaattctgt

SEQ ID NO: 30503 - DNA, 1110 bp, DROSOPHILA
atgtctgtagcccgtacccctcgattccggcacctccgctgggtggcctgtctgctggccagcctctggttttccgtcagccaggctcagttgccaggaaccggattccagggacagcgtccgcaggtgcctccactgcagccgctgcaacagcaggccaatccctttcagcgacgccagccgaatcccgtacagggtcaaggactgtttcctggtcaaaggaatccactgaacccactggcacctccactaactggagctgctctacagaatccctatacccgctacaaccagtaccagcagcaaaactatgtgcccatcactgcctaccaaaacgaactcaatctggatggaagcttctcctacggatactcgtcggccgatggaaccactgcccaggcacagggatacgtgaagaacttggggtatggtgagggagttgaggcacaggtgattcagggatcctactcgtacacctcaccggagggcacacccatcacagtgcgctacatcgccgatgagaacggatttcgagcggagggcacggggattccatctagccctcaatatttcgcaggtgcccagccctatcaacagggcttgctcaatcccaatttgaatccataccagacgcccttccgccagctgccacccccactgcccaacgccccctttcgtccccagcttccaggacaacagccgctcactccactgcagcaacagcagcagcaacagcaacaacagttgcaacagcaacgcggtttccagcagcagcagcagccaaactccgggcaatatcaaccggaacagccgttcaatcagttgcattccggcaacttacccggtcagtatgccggacaatttggccagcaatcgtttggcagcaatcttactgcacaacaggcacaacagcagcagaatctcaaccagcaacagcagcagcagcagcaacaacagcagcagcagcaacagcagcagaaggagcagcaaaacgagcagcagcaacaggccctaatcacccaacaactgaggggcagaccgaacaacctggtggatccatatggctataatcagtacggcagacgcttcaagaagtccccaaagaaataa

SEQ ID NO: 30504 - protein, 369 aa, DROSOPHILA
MSVARTPRFRHLRWVACLLASLWFSVSQAQLPGTGFQGQRPQVPPLQPLQQQANPFQRRQPNPVQGQGLFPGQRNPLNPLAPPLTGAALQNPYTRYNQYQQQNYVPITAYQNELNLDGSFSYGYSSADGTTAQAQGYVKNLGYGEGVEAQVIQGSYSYTSPEGTPITVRYIADENGFRAEGTGIPSSPQYFAGAQPYQQGLLNPNLNPYQTPFRQLPPPLPNAPFRPQLPGQQPLTPLQQQQQQQQQQLQQQRGFQQQQQPNSGQYQPEQPFNQLHSGNLPGQYAGQFGQQSFGSNLTAQQAQQQQNLNQQQQQQQQQQQQQQQQQKEQQNEQQQQALITQQLRGRPNNLVDPYGYNQYGRRFKKSPKK

SEQ ID NO: 30505 - DNA, 3766 bp, DROSOPHILA
atggtggcctgtggtcaagctcttcccgtagatcccgaacgtgaacccgtggctatcctgaagtccgagatcatcaagacagaggagggctacaccagcgcctacgtgggagcagatggtatatctcgcaacgaggaggcttttttggtggacaagggtaccgacgaggaggctctggaggtgaagggatcctacaagtacataaacgaagacggccaggaggtggaggtgttctatacggcgggaaagaacggatttgttccctacggcagcattatcaatccggaaatcacggccgttgccgaagcagccaaggatctgccaaaggtggagaaggtggagaaggcgggtaggccttagaaagtgtttcctgaataagatctcgtagaagtgaataagtaaagaagcgataagaccagagtattgtctctgggcaaactaaaataaaagtcaacgcgactgcgaaagagttgttttaatctatctgtgtattcttccaatttgcacattttacttagcgtgcgaaggtgcacagagaaaaatgggagcaaagtaaaaccatcgaacttagaaataaatcatttcatacattttttttagaaaatttcacctgtctgactttcacttttcttaaaacaaccactttagtcgcgttaattttcccagtgcacaaggaatacatacatatacccggcttaagagaccttgaaaacatacccaaactggccacagtatcaaagtctgggacgtcggatgattgagcacacgtttggccactttgcggtacagtgagccctgggggcatcaaacgagagagacacctgtttcaatacatcattacacgcttaaacatcgtccattagctcgaatcaaagacgaaatgaagatctaacgaacagggaaacataagaatggaattggttatataatgaggcataaatcatctcgcaatttgcataagttatgggtttcagactcccagtataggctgtcttcctgtttacacgccgtatgcatggattacgcccttctccagcagaattagaactcccacgaagaaaatgtagtaggaaacgagtagaaagccacaagctcgtcgcagcttaaagtttgtggttagtacggaaagcatggagaagcccattccaacctccaagaagatgcaaaccgtctccccaaatccaccttccgttggctgctggcagatcccttaacaaaactttatattgcaacatttactgtactacaacttacgaatatgttaccgggcgcgtttacaaacgagttcaccaccaatggcagggccaagaaaacaaaggatgcttttggggaatgtaaatcttatatatagccttcgataatatcttctgattacctaccaaatactggtgctgagaatgtggccgtcattgccatgcgaggccatccctgatgggccagtgacagattggccaccaaatcgttgctacttagtgcccagcaaatggccgtggcaagtgagaattcctggcttacttgcaatatggtcgccatcgtaaagaacatggcattcacctcggtggttaagcagaagatcaggaagacggcggccatgaaacccacgccagatgtaaactgtaagttagttaggatgagactggttaaagttggatcttaaaaatattatttgtttttcgcaatattggtaagattatttgagattaaatggtcaaattagcctagttttagcacatatttatttctatattctttgtcataaataaaaaaccggttatacatatgagaacgtggctgagatatgcgctagaaataacaaaaacttaccctgaaaaatatgggcggggtgtcagtgcgcgtgagaaaaaatatcaatgtagccacaggaatcattaggatcagcgcaatcatatagacggctaagcccgcaatgctatatcctcgaactggaatacagatcgtgaggtgaaagagtccggcaaatttcaaaggtaacttcacctattatgtaggctatgtaggtgggtacaagaaccacctggatgttaaagagcagcttggaccatccgtactggggtgcctccatgtcgacctttggaatgagtattctcaacaacatatcgatgggttgcttcactatcagatacagcttcaccaggaaggttccccgatgaaatcgatccttgtcgaattcggcaacggtattccaaaattgccggaatattcgcttatttcgacttccgtgtccaatggagggtcgatcgatttcttgccgcttcagtggcatctccttctgcggcttcagttcctccagctgcaacgcctcagccacattcagttgtctttgctccatttctgataaagagtaagcgatgttctgctaactgataaaacaataaactcactctgaatgcgggcaatcagcaaatgctgatcaacgatggccaccaccacatagccaacgaatatgaaggcactgggcaacgcagctagccagctgattcccttgggtcgcttgtggatgtaatccatgtagaccgtattgaggaacaggaaaccgaaatccctcaggtaagtgtttgcccgcatattgaagggcttggtcaggatcaccagtccggccacaaagatgtgcagaaacatggcctgcgacatgcacgagaggaatgagtgcttggaggtctgcactctcgaggcaatcgccgtgaagaaatccggtgatccatttgcaatggccagaactgtaactccagccgtgctctcgttcattcgcaataagtctgcgattaccatcaaagttggacagaagctgaggtagtagtatgttcaatcatattggtagtacattttgatatcattgttgtactcactagttttttattgttatttgcatcatccagaagacataaatggtaatcagaaacatgcccaacacactccagaaggaattgaaactatttcggacatccaccttgcaataatgccatcccaggtagttgaacaaattcatattgattagacaatcaggtgtcgtttgcacaaatttgcatttttgtgactccagcagatcgtgcaccatggagcaagatatttcggaacgcatttttagcttggttcataagtctcccgactatttattcttgtgagctgatcaaaaaccctaggcatcttatgatgttaaaataagaaaggtttgaaatttcatcaacttacagaagattatttggttgccatttaataaaatatgcttactgttgttctcgttagtgttaattcgcaaaaacaaacataaaaacgagtactgtaaatgtttaataaaggccatctttatgagatccataaaaatttttttgggaataacttttgagtttcgggttgtttacaaattcctccaaatgtattttgctttgtcccattactaatcaacaaaatatttccatttgctatgtgctcaccaatccgttagcgcttgattataaaaatcgttaatctttgtatattctccaataaagttataagccatgatcgtcataccaatagtttgcagtcggtgagataatatttcttcgaccagctttctgcttaaattagcactaaccataacgaaatttatgataagtatttatatgcaacacggaattcgcatttcacatgcagctgctgttgctccatttgaatcgagaaagatgcggatttcagatagggaatcgttttattgctagccagttaaattagatcgcacttgattttaaattaaacaatacttgag

SEQ ID NO: 30506 - DNA, 1335 bp, DROSOPHILA
atgaacgagagcacggctggagttacagttctggccattgcaaatggatcaccggatttcttcacggcgattgcctcgagagtgcagacctccaagcactcattcctctcgtgcatgtcgcaggccatgtttctgcacatctttgtggccggactggtgatcctgaccaagcccttcaatatgcgggcaaacacttacctgagggatttcggtttcctgttcctcaatacggtctacatggattacatccacaagcgacccaagggaatcagctggctagctgcgttgcccagtgccttcatattcgttggctatgtggtggtggccatcgttgatcagcatttgctgattgcccgcattcagaaaatggagcaaagacaactgaatgtggctgaggcgttgcagctggaggaactgaagccgcagaaggagatgccactgaagcggcaagaaatcgatcgaccctccattggacacggaagtcgaaataagcgaatattccggcaattttggaataccgttgccgaattcgacaaggatcgatttcatcggggaaccttcctggtgaagctgtatctgatagtgaagcaacccatcgatatgttgttgagaatactcattccaaaggtcgacatggaggcaccccagtacggatggtccaagctgctctttaacatccaggtggttcttgtacccacctacatagcctacataatagttcgaggatatagcattgcgggcttagccgtctatatgattgcgctgatcctaatgattcctgtggctacattgatattttttctcacgcgcactgacaccccgcccatatttttcaggtttacatctggcgtgggtttcatggccgccgtcttcctgatcttctgcttaaccaccgaggtgaatgccatgttctttacgatggcgaccatattgcaagtaagccaggaattctcacttgccacggccatttgctgggcactaagtagcaacgatttggtggccaatctgtcactggcccatcagggatggcctcgcatggcaatgacggccacattctcagcaccagtatttgcatcctttgttttcttggccctgccattggtggtgaactcgtttgtaaacgcgcccggtaacatattcccaacggaaggtggatttggggagacggtttgcatcttcttggaggttggaatgggcttctccatgctttccgtactaaccacaaactttaagctgcgacgagcttgtggctttctactcgtttcctactacattttcttcgtgggagttctaattctgctggagaagggcgtaatccatgcatacggcgtgtaa

SEQ ID NO: 30507 - protein, 444 aa, DROSOPHILA
MNESTAGVTVLAIANGSPDFFTAIASRVQTSKHSFLSCMSQAMFLHIFVAGLVILTKPFNMRANTYLRDFGFLFLNTVYMDYIHKRPKGISWLAALPSAFIFVGYVVVAIVDQHLLIARIQKMEQRQLNVAEALQLEELKPQKEMPLKRQEIDRPSIGHGSRNKRIFRQFWNTVAEFDKDRFHRGTFLVKLYLIVKQPIDMLLRILIPKVDMEAPQYGWSKLLFNIQVVLVPTYIAYIIVRGYSIAGLAVYMIALILMIPVATLIFFLTRTDTPPIFFRFTSGVGFMAAVFLIFCLTTEVNAMFFTMATILQVSQEFSLATAICWALSSNDLVANLSLAHQGWPRMAMTATFSAPVFASFVFLALPLVVNSFVNAPGNIFPTEGGFGETVCIFLEVGMGFSMLSVLTTNFKLRRACGFLLVSYYIFFVGVLILLEKGVIHAYGV

SEQ ID NO: 30508 - DNA, 2704 bp, DROSOPHILA
catcaaagttggacagaagctgaggtagtagtatgttcaatcatattggtagtacattttgatatcattgttgtactcactagttttttattgttatttgcatcatccagaagacataaatggtaatcagaaacatgcccaacacactccagaaggaattgaaactatttcggacatccaccttgcaataatgccatcccaggtagttgaacaaattcatattgattagacaatcaggtgtcgtttgcacaaatttgcatttttgtgactccagcagatcgtgcaccatggagcaagatatttcggaacgcatttttagcttggttcataagtctcccgactatttattcttgtgagctgatcaaaaaccctaggcatcttatgatgttaaaataagaaaggtttgaaatttcatcaacttacagaagattatttggttgccatttaataaaatatgcttactgttgttctcgttagtgttaattcgcaaaaacaaacataaaaacgagtactgtaaatgtttaataaaggccatctttatgagatccataaaaatttttttgggaataacttttgagtttcgggttgtttacaaattcctccaaatgtattttgctttgtcccattactaatcaacaaaatatttccatttgctatgtgctcaccaatccgttagcgcttgattataaaaatcgttaatctttgtatattctccaataaagttataagccatgatcgtcataccaatagtttgcagtcggtgagataatatttcttcgaccagctttctgcttaaattagcactaaccataacgaaatttatgataagtatttatatgcaacacggaattcgcatttcacatgcagctgctgttgctccatttgaatcgagaaagatgcggatttcagatagggaatcgttttattgctagccagttaaattagatcgcacttgattttaaattaaacaatacttgagtagtctaggttctaggagagcttaggcagtcttggtctcaaccttcttctcggtctcggcctcgatggcggtcttgacctcggcttggggcgcggcatcgaggaccacctggacaggcgccacctgggactcggcgggcaggggctcggatttctccaccacaaccgattccttggcaaccacaggctcctccttctccactggggcggcttccttctctacagcaacttccttattgtccagttcctgggagcgggccttgcgatacttctgctcatcctcggaaaccttgggcagaagggcagctgacttggccaactcggtgatctccttgggaatgatggtgccaatgggcacgaatccgttctttccggcggtgtagtgcacctccacggtgttgccatcggcgtcgatgtagctgtacataccggacacctccaaggcctcgtcctcggtgccggcgttctcgatcactccctgctcctggcgcacggactggtcaccgccctcgtagctgaagtggaaggagccatcggggttcttgttcgtctcaaacctcagcagaggcacaatctcacgcttctcggtggtgctgtcaacctggccaatgctggcagccagagatccgccgaccagggccaacaagcagatggcgatcttgaacatttcgttggctattcttgtggggtgagagagatgggagagatttggtgctttctaggcgggaaccgacggacgacttggcttaccacatcttccatccactttatataccggcgtttaatgtgcgcagcagccgcgaattaacatctttcagtcccattacgccataaccaaaaaatacagaaatatacccaaaacaaaagcgaaagaaaaaacggaaaaaacacaaaagaaattctatggaagcgcgcagaatgtgacttaataaaacactcacatcttagcgacaacatttgcatatttgtgattcagcgacttggcttaaacgtaagtcaacaagaaaaaacagaggtcaagtgataaagcccatgatgatggggcactgtaatgagatcgatttgggccggttatacgaatattccagcaatcgaaaaaaatcccaccaagacacgtcataaacttgtttctcattcgctgccagtcaatccatcacttaaagtgcccgaaatatctaggcaagctgattgattgccaatgtttaggaaactgcatagcatattagcatagtgctacacacacgctccagaagacaaaggggcataaattaagatacatttgaggtgcgcttataacgagtccatatatcggtttcggattcgaatcgcacgcgatccatcagtcatcagtcatcacacgggaaactacttggccaccgtgagtgtgtgcaaaaagcatcggctagtagtaaagtgagtaagccaaattgtatgtcaaatgtgaaaaatgcactaagccagcggcaaacaactcttcctctcggcgaaaaactgcaatttgaaaagccgcccgaaggccaaagcaaaacgcgggcaaccgcgaaattggccaagtaacatggaaaacgaacgaaagggaaaaaccaacgggtagcgggagttggccaaaaatctcgggcgatgttcatcatgttcgtgatcatcttccaacgccgagttggctggattttggcagcagctattgctgtaatttttatgaattgcaactgacatttcctacacgctg

SEQ ID NO: 30509 - DNA, 704 bp, DROSOPHILA
ccgcctagaaagcaccaaatctctcccatctctctcaccccacaagaatagccaacgaaatgttcaagatcgccatctgcttgttggccctggtcggcggatctctggctgccagcattggccaggttgacagcaccaccgagaagcgtgagattgtgcctctgctgaggtttgagacgaacaagaaccccgatggctccttccacttcagctacgagggcggtgaccagtccgtgcgccaggagcagggagtgatcgagaacgccggcaccgaggacgaggccttggaggtgtccggtatgtacagctacatcgacgccgatggcaacaccgtggaggtgcactacaccgccggaaagaacggattcgtgcccattggcaccatcattcccaaggagatcaccgagttggccaagtcagctgcccttctgcccaaggtttccgaggatgagcagaagtatcgcaaggcccgctcccaggaactggacaataaggaagttgctgtagagaaggaagccgccccagtggagaaggaggagcctgtggttgccaaggaatcggttgtggtggagaaatccgagcccctgcccgccgagtcccaggtggcgcctgtccaggtggtcctcgatgccgcgccccaagccgaggtcaagaccgccatcgaggccgagaccgagaagaaggttgagaccaagactgcctaa

SEQ ID NO: 30510 - protein, 214 aa, DROSOPHILA
MFKIAICLLALVGGSLAASIGQVDSTTEKREIVPLLRFETNKNPDGSFHFSYEGGDQSVRQEQGVIENAGTEDEALEVSGMYSYIDADGNTVEVHYTAGKNGFVPIGTIIPKEITELAKSAALLPKVSEDEQKYRKARSQELDNKEVAVEKEAAPVEKEEPVVAKESVVVEKSEPLPAESQVAPVQVVLDAAPQAEVKTAIEAETEKKVETKTA

SEQ ID NO: 30511 - DNA, 3548 bp, DROSOPHILA
cttctcttttgcccactaaaggtcatgtcgctcacccacgcctccgccgcagccctcgtcttggccctctgctgcctcagtttcattcaggcgcagccacaacgcggacttcccccaccacgcggcaactccttcgacgcgaacgcggtgattctcaagcagaacttcgacctgaatcccgatggctcctatcagtacaagtaagttggatccagggatggtaggatcaatttcaggatttggaatggataaaaacaaatcgaacaatctgaaattaagttcaattaggatcatatagagaatcctacaaaacattgcattttaatagctttaaaattttttaatatcttcatatgtgagaagctctttggaatcaaaaaaaatcaaggattttaaatttaaatccatgtgtttttttttcttttttaagtgtttctaatgagtattattataaatttttaaaacttgtagctacgagacaagcaacggaatccgagcggatgaggctggctatttgaagaacccgggcagtcagatcgaggctcaggttagtgtgcttttcagtgcagcattcagcatattgtagcctatttttcggtggtgctgaaactctttatttccctgcacttacaggtgatgcagggctcctactcgtacaccggacccgatggcgtggtctacaccatcacctacattgctgatgagaacggataccgcgccgaaggagcccacatacccacaccgccaccagttcgcgccgccgccgctcccggaagattcttcaagtaatccgctccgctgtagaatcgtgttttaattcttcatcgttatgatcaagttggcaatcatttcgttgtgggtcagtgccgaactggccgaaagtgaaccagaaacagacaggagagagagagagagagagagagcagctgctcgttggagatcctttatcccacccataatcatttccattttattcctgcccctgaaaaatctcactaccttcgtgcttcatctgtgcatttctacagccaattcaaattctacattctacttagtgcttaacgaacaatatgtgagattatcatatgtaaattacgtaagatcgattgttaaatgtcgtacggcaacgcatgctcagcaataaaacaaaaattgcacaaaaatcaatccaaagccttgtggtcaaaccacatttaggagaatgatctcagcattgtgatgtaggacatcgccgtgcgaacaatctaaaaacggaaagttagaaaagagtattcatgtaaatccatgtattgtacaatggaaatgattcacccaccgatgagaaggcctccatgtttgcctcgaaaaagtatcccgtaatgcggaatccccgatgagcccgcatcatgctgatcagcaaggatcggcagatcgaggtagaggctccaccagcacccaaactctcgtgccacggactgtcgtagatggcccactcgaagctggcactctccgtcttcaggttctccccgcagtagcagtagatataggcttgtataatgattgtggctatgaatgaggcatagtagacgccctctgtctgggcaaaagtaatggagaacagatatcccagcatgcagagttgcagagatgaaatgaagaactgggcgcagataatcggttggtagcactgattcagatcgttgcacatatccaagctggtctggtacagggcaaagactttgttcaatgtggcctgtgattctttaagggatccgcccttaaatctaaccaccttgtactgcgcaattttgaagaaggcgcacaggttgctggtgaaggaacagaatatggtatccaagctgacagcaggtaaaaccacacctgtcgaggcgaaagcgctccagatgaagctcaaaacataattgcgaatgatgtggatattccagggaaaactttaggaacaaagcctgataacttgatcaccatatatcatatatatcatttgtacatacagacagggaaaaggcaactcgggctctgcatgacctgctaaccaatagctgagacccattctcacgaggggcagaacactattcaaggcccaggcgaggaggaaacaagtcctaaacagagtgcacattcgttgatcctgcttgtttgctgcgttgagaatctcggcgtattcctcgccctgttccgcctctataaaataataaatgaaatgatacacattctggccgaaatggattacaactcaccattcgacatgagcaaacgaaatttgtcaatcagtcgcttgaaatcgcgacgtaagtaaagtatcatgctaaacttgaataggcccagaatggttattagtagggccaccatggcatcggccagcagcaatacattcttccaattatggagcacagctgccaggataaagggaaaaatggcagctatgctaaacacattcattgctctataggggcgtttccacatttctcgattttcactaaagagatcaaagcccagaagggcaatggtgctcttctgtacttgcagaaaactgtccatgtcgacaagggttaattcggcctcacactaagtcaagtgtgttcagttcaggggttttaaacctttcaattgagtaggaataaatgaaatacagatgcgaaagtacagctctttaatacccttcctttgtttacaacatttacaaatgcctattacatatgaattatgaattatgaattatattttttttttatcttgtgattgatgctggataatcaagatataatattatatatatctacttatatatttcatcccgacaaatttctaccattagaaagtgcccactttcatttccggttcagtactttccattaacgacgtcaagggttttatagggtttcacctggtggggatactcctttagagggtataatatatcacgcccaaataatacctccgtttgacacctctttaggcatagtaaatgagaactccggttaaattttaatgttctttattcacgccctgacatccgagggtcacatgtctcgccaagtgattgctttgaccagaggcgtggtcagcgatgtcagaattgctacaggccaaacacttgcctccaaaattcaaagaaatcccattctgaggattcattgctataggcggtagctctctcatcgggatagtccatgaattcgatatagtgatcgttacagtcggtatgatcccaggcgtaggcagagaccagacaaaggacactgatgaggacctggagtgttgggcgcatctcgatttccgttcaattcgatagattgttagttcaaacttaagtgcaactgatgacaatttcgactcaacggcagctcttatacgggaagattgcacactcgacgcttctgtgcggtaaatatgtttttttatcgtagtttttgacggtaatatttccgttccatatttacagtgatatatattactattctaatttcgtacagctttacttttttgtcattatagaagtattcaaagcttaaagttgtgtccactactgtccgcggaattatatattt

SEQ ID NO: 30512 - DNA, 1361 bp, DROSOPHILA
ccttgtcgacatggacagttttctgcaagtacagaagagcaccattgcccttctgggctttgatctctttagtgaaaatcgagaaatgtggaaacgcccctatagagcaatgaatgtgtttagcatagctgccatttttccctttatcctggcagctgtgctccataattggaagaatgtattgctgctggccgatgccatggtggccctactaataaccattctgggcctattcaagtttagcatgatactttacttacgtcgcgatttcaagcgactgattgacaaatttcgtttgctcatgtcgaatgaggcggaacagggcgaggaatacgccgagattctcaacgcagcaaacaagcaggatcaacgaatgtgcactctgtttaggacttgtttcctcctcgcctgggccttgaatagtgttctgcccctcgtgagaatgggtctcagctattggttagcaggtcatgcagagcccgagttgccttttccctgtctttttccctggaatatccacatcattcgcaattatgttttgagcttcatctggagcgctttcgcctcgacaggtgtggttttacctgctgtcagcttggataccatattctgttccttcaccagcaacctgtgcgccttcttcaaaattgcgcagtacaaggtggttagatttaagggcggatcccttaaagaatcacaggccacattgaacaaagtctttgccctgtaccagaccagcttggatatgtgcaacgatctgaatcagtgctaccaaccgattatctgcgcccagttcttcatttcatctctgcaactctgcatgctgggatatctgttctccattacttttgcccagacagagggcgtctactatgcctcattcatagccacaatcattatacaagcctatatctactgctactgcggggagaacctgaagacggagagtgccagcttcgagtgggccatctacgacagtccgtggcacgagagtttgggtgctggtggagcctctacctcgatctgccgatccttgctgatcagcatgatgcgggctcatcggggattccgcattacgggatactttttcgaggcaaacatggaggccttctcatcgattgttcgcacggcgatgtcctacatcacaatgctgagatcattctcctaaatgtggtttgaccacaaggctttggattgatttttgtgcaatttttgttttattgctgagcatgcgttgccgtacgacatttaacaatcgatcttacgtaatttacatatgataatctcacatattgttcgttaagcactaagtagaatgtagaatttgaattggctgtagaaatgcacagatgaagcacgaa

SEQ ID NO: 30513 - protein, 385 aa, DROSOPHILA
MDSFLQVQKSTIALLGFDLFSENREMWKRPYRAMNVFSIAAIFPFILAAVLHNWKNVLLLADAMVALLITILGLFKFSMILYLRRDFKRLIDKFRLLMSNEAEQGEEYAEILNAANKQDQRMCTLFRTCFLLAWALNSVLPLVRMGLSYWLAGHAEPELPFPCLFPWNIHIIRNYVLSFIWSAFASTGVVLPAVSLDTIFCSFTSNLCAFFKIAQYKVVRFKGGSLKESQATLNKVFALYQTSLDMCNDLNQCYQPIICAQFFISSLQLCMLGYLFSITFAQTEGVYYASFIATIIIQAYIYCYCGENLKTESASFEWAIYDSPWHESLGAGGASTSICRSLLISMMRAHRGFRITGYFFEANMEAFSSIVRTAMSYITMLRSFS

SEQ ID NO: 30514 - DNA, 2714 bp, DROSOPHILA
tttacgttgcacagatttatttgatattataaaacggcagcacgtaaacaattgaaatggttttctgtgttttaatttggctattaagaagctctttaaagcttcggctttttgttaacttaatgcgctttatttagacttatgagctttcacagaactttaacataacttgattataatcttgatttggatcactttattcaaaagttggcatcaagttttgggaagctactgttttgggactgctaccaccagtaactactatagctgtttctccaggggctgtaggaattactccatccactgttccagcctccattccatcctccattccagctgccactccatcctcctccccatcctgtattccatccgcctccccaacctccgctcagccatctagctggtctattgccctccttcgcttcctgaccacccaaatcagccacgtcatctagtgttgctgcagcagcaggatcctcattcacaggattcgaaaaaacacatcccacgagagtccatacaaccagtaagaagaaggtgaaccgcatgctgaccattctgaacactctaaaatgaattgcgatctgaactgccttttatagctccaagagtgcagttcttgtgcctctaattattacatattcgcaacttgcagaagagaagttctaaggccctgaccccactatatatggttaacaccaaacgataagttcacttaacacaatttacatacggattggcaaagcaagagaattcttagccaacagaaattcaaattgaacaaaaaagtaaaccctttttagtgaaataaaatttataaagaaattagactaacaaaaacaattattaaaactaatttaaaattaataaacaagataacaatgatagattttgaaatgtagtttgattcgaagttcggtataattagactcgctatgggtctgataacttatcataaatgtgtctatctgttacttaatactgatcttcttatggtctagccaagcagactgagtagaccgctcagcgcttgtggatttgctcccgctcctgtcgctccagctgccccgcccccattggcgagaagagggcgtagactgctgccaagggcctgacccaaaagaccggctaactgggcttgctgagcggtggatagctgtggggttccacctccggatactgctcctgctcctgatgccgaaccaacggccgaatttgttggagagcttgagatgacagctgaactgctgtatgagggataaccgcctgatccggcagttccactggagctataagtgggccggtaaccataatagggctgcggtctctggtatccaccataattgtagtagctgggtctgtagtagttctgcccatagccgtagccgaagaccgggtatccatagttataaccgtagttgggatatccgtatccatagttgggcctgtatccgtagctaggataactgccgccgtagtatgagtccgattgggtgcctcctccggctgcggaggatgaaccaccacctggtctgatgggtggtcctgcgggcaggggaacatcgaagagcggtccaccacctcccagtaaaaggggagtcaataatcccaaggtcctgccttgaggacgttcactccgggacttactcctctgaccggagaccatcaggaagagaaggctcagcagagccaaacgcgcgcgtagatacatttcgtaaccgtaacagtctaatggcgattaacaactgcggaccgactgaaaaacccaataatattttataccacagtgttcttggatgaatttccaaataagtttgcaaaaaaatgaaccagaagaccttcggcacctgcaaataatgaacgcaggccgagcggaaccacgcaactcttggccagaacgtcatcaactggttggcgccacgcggctttcacgcccagttcgagatcatcttgttttggcccggtctgcagacgagcacacccgacattgaccttgccgaaagttggccaaataagtcagcaatctgtttcacaccgttaactcgatcgctcacttccgtgggtttttttttcgcatttgtcaggttgtttcatttcattcacattcaaaaagccaacaaccgggggcgtttttctattctcgcaggctataataataaagattgtcaatagtaaagttaattagcgagctggaaatctattcacccttgagtagatgcatttcactatagacgttcgccaggtgaatcatcttatacgctgtgtataagagcggagtcttcccattttctgtttccaggtgcttctgggattgtctcgaattattatatttgcactaattgatcagcgtttcgccagacatggaaatctttgccttttaatttaattaagtgtggctagacatctgccagttagtcaatcttatcaggcacttaatccacgcgtgctattatatttatatatacatgtatatatatgacttagctttgatttataatgaaatattaacgaattcaagtcaatgggtatcgtagagctgatattatgtgtttacttattcatgtaatataattttcatggtctgaagcaggaaaatgattgtccaaatcataagacgattgtttaaaacaatataatttaagactaaactatattggttttccaaggttcagtgctaccgggtaaacgcctatttttgtttttaaacatat

SEQ ID NO: 30515 - DNA, 714 bp, DROSOPHILA
atgtatctacgcgcgcgtttggctctgctgagccttctcttcctgatggtctccggtcagaggagtaagtcccggagtgaacgtcctcaaggcaggaccttgggattattgactccccttttactgggaggtggtggaccgctcttcgatgttcccctgcccgcaggaccacccatcagaccaggtggtggttcatcctccgcagccggaggaggcacccaatcggactcatactacggcggcagttatcctagctacggatacaggcccaactatggatacggatatcccaactacggttataactatggatacccggtcttcggctacggctatgggcagaactactacagacccagctactacaattatggtggataccagagaccgcagccctattatggttaccggcccacttatagctccagtggaactgccggatcaggcggttatccctcatacagcagttcagctgtcatctcaagctctccaacaaattcggccgttggttcggcatcaggagcaggagcagtatccggaggtggaaccccacagctatccaccgctcagcaagcccagttagccggtcttttgggtcaggcccttggcagcagtctacgccctcttctcgccaatgggggcggggcagctggagcgacaggagcgggagcaaatccacaagcgctgagcggtctactcagtctgcttggctag

SEQ ID NO: 30516 - protein, 237 aa, DROSOPHILA
MYLRARLALLSLLFLMVSGQRSKSRSERPQGRTLGLLTPLLLGGGGPLFDVPLPAGPPIRPGGGSSSAAGGGTQSDSYYGGSYPSYGYRPNYGYGYPNYGYNYGYPVFGYGYGQNYYRPSYYNYGGYQRPQPYYGYRPTYSSSGTAGSGGYPSYSSSAVISSSPTNSAVGSASGAGAVSGGGTPQLSTAQQAQLAGLLGQALGSSLRPLLANGGGAAGATGAGANPQALSGLLSLLG

SEQ ID NO: 30517 - DNA, 2363 bp, DROSOPHILA
tcagcggcctttaatctgtttgaatcccttcgagacgtacaaaaatgaagttccttgccctgagtctcgccctgatcgccgtgatctcctgctctctggccatacctgtggatttcgaaaatggagaaccactgacactcttggaattggaggcggaacaggagccacaagttgatgaactggagggcgagagagtggttcgaggactgggaggacttggaggacttggcggcaagttcggcggctttggaggactcggcggcttgaagggaggattcggtggtcttggtcacggctttggcggtggttttggaggacacggtttcggcggcggcttcggtggacttggcagcttcaagagcctattcggcaagaagttccgctaaagcaacagcactcacccaaaatatagtctaagagtttcgtaataaagcttagttaagtaacattaaaagttccctgtttggtatatgggattcagagctccatagaactgcagttcaggttcgggagtggtggtagttatacccgttttggtcctaacggtgggcggagttggtgacttaggttgaagacgactaaagacaagacgcacatgactcgcaaaacttcgccacagctgaaagggttttggaactggaaaaggaataaaattagaattttaggataatcaaataacaaaataacacacgttacctgaactttgaggtggtgccacctgcggatcgaattcccgctcatccagagctgccaccagccccacagtgatccacagcagcagcaagcggaacattttctgcagcttagcctcgtggcccccttataaacacctccgatctcagctttccccgccataaatcgaacgtgttattaataaactcttaaaaacaagcgattggatgaacttgcataaggcaagcaattttattgcacccaatggggcagcacaaaagaagtatcacaaatcacaatcaagcacaatcaaatccatgcaaactgattagccgtagaatccaccgccatagtaaccaccgcgtccgcggtaacgggtgcgggtgaccactcgagttctctggaaaccaccgccgaatccgccaccaaagccgccgccgtagtacggtggtggaggtggtccaaagaagggtggtggcggtggtccaaacggtggtggtccaaagtactggcgcactttcctaacgttctcgtctgtggaatcagactgggccgtttctccggcgtccagcagctgaatagagcttggtttctcctgcaccacttccgtttccgtttcatcggctctaacaaaattgcataagagcagagcagcaatgctgaagaaaaatattatccacttgtgatccatttcgatgtcgtattccttctccaacttcgtcaaatactaaaactcatcgcccagctgggctttaatttatagccaaacatttgccaagaacacccagcacctggtgtcataaacaaaggcagttcattggcatttcttgattgccattgagtgtctttttttacatttttcgtctaatttcaatcgcagtcaggcaaagacgccgagaataatcgtcggtttgaaaaacccaaaaaatcgcttatacaaatacataaggttgacccaatcttaatgggtatataaaatgaattatgatgcggaagtgtgaggcaaccgtggaacgcaaactagatctctttggattgtaactcgatgtgcaactgattgagatcataatgggtagataattaactgtgaatgatgcaaggttactataataataatcagagtaaaatatattcttaagatccatatttgaagtaccaagtaaccagataccatttgagacgaacattcttgacatgacaagacaaatcaacaaaagtcgataaagactacaattagcaatccgataacccacaattggataccgctcttcaggccagccaacttgacccactgtaatcgcttgatggcttgttgtttaccacttaaaaagcccatccgcctcgcctcgcgcgatattcgacatacatatgtacatatatatatggaagcaaatagcagcgagagactcttccagaaataacagccagttaactacggaatatgcaagctcatcgactttgtcgattccaaacactcggcaaaatgaaactcgatcttgcagtacttttttgtttatccattgtttacactagagggtctcaagaaacgctcagatttattcggaaacgtctagccaaagaaaccgcctttgaatttggcaaaacccacagcgccgccaacgaatccgccgcctccgatgccacctagtccgcccaatcctcctccaacgggatagccaccgccatatccg

SEQ ID NO: 30518 - DNA, 363 bp, DROSOPHILA
atggatcacaagtggataatatttttcttcagcattgctgctctgctcttatgcaattttgttagagccgatgaaacggaaacggaagtggtgcaggagaaaccaagctctattcagctgctggacgccggagaaacggcccagtctgattccacagacgagaacgttaggaaagtgcgccagtactttggaccaccaccgtttggaccaccgccaccacccttctttggaccacctccaccaccgtactacggcggcggctttggtggcggattcggcggtggtttccagagaactcgagtggtcacccgcacccgttaccgcggacgcggtggttactatggcggtggattctacggctaa

SEQ ID NO: 30519 - protein, 120 aa, DROSOPHILA
MDHKWIIFFFSIAALLLCNFVRADETETEVVQEKPSSIQLLDAGETAQSDSTDENVRKVRQYFGPPPFGPPPPPFFGPPPPPYYGGGFGGGFGGGFQRTRVVTRTRYRGRGGYYGGGFYG

SEQ ID NO: 30520 - DNA, 2408 bp, DROSOPHILA
gcagctgaatagagcttggtttctcctgcaccacttccgtttccgtttcatcggctctaacaaaattgcataagagcagagcagcaatgctgaagaaaaatattatccacttgtgatccatttcgatgtcgtattccttctccaacttcgtcaaatactaaaactcatcgcccagctgggctttaatttatagccaaacatttgccaagaacacccagcacctggtgtcataaacaaaggcagttcattggcatttcttgattgccattgagtgtctttttttacatttttcgtctaatttcaatcgcagtcaggcaaagacgccgagaataatcgtcggtttgaaaaacccaaaaaatcgcttatacaaatacataaggttgacccaatcttaatgggtatataaaatgaattatgatgcggaagtgtgaggcaaccgtggaacgcaaactagatctctttggattgtaactcgatgtgcaactgattgagatcataatgggtagataattaactgtgaatgatgcaaggttactataataataatcagagtaaaatatattcttaagatccatatttgaagtaccaagtaaccagataccatttgagacgaacattcttgacatgacaagacaaatcaacaaaagtcgataaagactacaattagcaatccgataacccacaattggataccgctcttcaggccagccaacttgacccactgtaatcgcttgatggcttgttgtttaccacttaaaaagcccatccgcctcgcctcgcgcgatattcgacatacatatgtacatatatatatggaagcaaatagcagcgagagactcttccagaaataacagccagttaactacggaatatgcaagctcatcgactttgtcgattccaaacactcggcaaaatgaaactcgatcttgcagtacttttttgtttatccattgtttacactagagggtctcaagaaacgctcagatttattcggaaacgtctagccaaagaaaccgcctttgaatttggcaaaacccacagcgccgccaacgaatccgccgcctccgatgccacctagtccgcccaatcctcctccaacgggatagccaccgccatatccgtagccatagctgggtatcgtctgtatgacgggaacagtggtgatgatgggcacagtggacacaacgggaactgtttggatagcgggggctgccactatgggggcagcaactcctccgcctccgatgatgccgccgcccacgataccgcctccaacgactccgccacctccaaatccaccaatgtgacggggtcttctaatgttctcctcgtcgacgctggagaggatcggtgtggtgctgaccacggcgcacgccaagacgagcaggtagacagtttgccacaacatgatggggttaactgtttggtctgccccactcccagctgcttatttatgcaaattaattagtggccactgtttgcacttccaatttgcatattggggcgcccgggtaaaaaacccataactctaaggccccatctatgttttggcggttctattgggggaatcatggttttgcccactggtaaggtggttcacacctcatcatcgtcatcgtttgtggtctgaaggtcgccggcctgggcattaaaagccaggtgatttagttaaggtaactcacatcgttattggacactcagccgagatgaggtgcgatcttcaagtgcattttttgttattactggcaattggcgcttggcggactgaagcccattccctgggaggaggtggaatcggagcggttggaggagtggcagccattggcggagttggtggcatcggaggagtccagcaggttcccgttgtgcaacaagtgcccgttgtccaacaggttcccgtcgtgcaacaggtgcccctcatccaacagcagccgcaagctcttggcctagcaggtggaggtggattcattggtggcggaatcggaggtggtgccggttttggacgctacaaggaaagctatcgcgtgcgagcgaggggattcggtggtggataccgcgcccggtacgacaaaaaatttggaggaggattcgccggacttggtgctgctggaggagcgggcttagctggtggcggtctgctgggataaatacaagcatgctatgtagtttaataaccaattataataaattgtattagtaccattaatatgtttatttttaacaatgagactttgtttataactaaagcagacgcactttcttaaggataagtatttacaagctaattaataacaatcaattcatatgccgaattatggtaacataatcctgagaacttgctcctgaacaccctgtatttcttccgctctgcatttctgctgacctgcgcagattccacccccagcaaa

SEQ ID NO: 30521 - DNA, 408 bp, DROSOPHILA
atgttgtggcaaactgtctacctgctcgtcttggcgtgcgccgtggtcagcaccacaccgatcctctccagcgtcgacgaggagaacattagaagaccccgtcacattggtggatttggaggtggcggagtcgttggaggcggtatcgtgggcggcggcatcatcggaggcggaggagttgctgcccccatagtggcagcccccgctatccaaacagttcccgttgtgtccactgtgcccatcatcaccactgttcccgtcatacagacgatacccagctatggctacggatatggcggtggctatcccgttggaggaggattgggcggactaggtggcatcggaggcggcggattcgttggcggcgctgtgggttttgccaaattcaaaggcggtttctttggctag

SEQ ID NO: 30522 - protein, 135 aa, DROSOPHILA
MLWQTVYLLVLACAVVSTTPILSSVDEENIRRPRHIGGFGGGGVVGGGIVGGGIIGGGGVAAPIVAAPAIQTVPVVSTVPIITTVPVIQTIPSYGYGYGGGYPVGGGLGGLGGIGGGGFVGGAVGFAKFKGGFFG

SEQ ID NO: 30523 - DNA, 4900 bp, DROSOPHILA
taaatatgcatattgaacgaggcaatgcaatgcgattgaggtccggctgtgcgtttcagttgcgaaatgagttgcgaacaggatttatattcagatttagccattagccaaatgcaacaccttcgacgacgtgtggacacgtcgactttgattcggccaactgagtgatccggggtagtagtgtcagatgccaacattacttatgcactgaaagaaataaataaaggatttacatgtgtagtaatgtataattgggctgcatgacatgcatgataatgatcaactttcaagcaataataattctatgacatcacgacattcatacggacagaaagacgaacatggatttaccattaaaatgtaattataatataatataataaagtatctaaagaattttttacttggatctcctagcaattttaaccatattctcaaatgcaaaatgtgaagttcttgcaaatagatacacagactaatgggtccgcatttgccaattaattgcctacaacgcccaggttgctttgaatcacaggtggacatttggacaggtttgctcagctcactggcagctccactttggccattcaaaattgtttatcgctttgacgagttgcagtagcaatttcgacaccgtatgcccataatgaagaaacggcattgataataacaaagtaatgataaattagatgctgttgacgtctaattcatttttgatgatagtattgattttatacataaatgacacaatttcccttttattttgtaaaacattatggcattttcactttaatggtcctgtaaaacacaagttagttgtaaagcacagaaaaactttccatttcgatgacaagaagtcctttaaaattcaaataaatatataattctaattctaaataaataattctaagcaatggtttatgtatttaaactccttaaattttgttccagtttttaactagcacatatacatcaaaagagcggaactagatagtctacaatgatgcaagagaccggcaatcaaatgggacagacccatatgcaccagcgggttcctttcaacgacacggttctgaaggactatcatctcacgagcaccgatatcgagaagtttgtaaagctatggcaggagtaccagatgaagaacatgacccctcaggtggatgagtgccagggctattgccagggggaaatatacaactggttgcgagcctacaacagcatccatggatacgtttcgctgatggtaagtaatactcgtgattacaactccccctgggcacgaaacccgcaatgttggccaaaacaaaggaatcggttgactaatgatgagcaagggaagccaagacgatacacacagaccttcgccgacagaccactgatgaatgtaggggacttctttacctttgaactcttgccaaagtcgtccttttttcgaattaaagttatagcatgcgctcagcttaaccatcaaaatcacaaatgaaattagtggccgggaatctcggtcttttgtttatgtccgggtttcccttttcagggcttttttgaaaaggatataaattatattagatgtagttaagccgttgaggcgttaatgtgcttttttcattataattttcagtcgtaagtcattttgcgttgtagcagacggcctttaccacaggaattgggtcagaaaataccgagaatccatttccatcaaggctagttcatagcccatcttttcaaataaatatacaataaatcaaatacagttgaaaaatgtaactttattgctttccttcgttcgcacaaaaaatagtttacctcttaaattgaaataaaattctgaaccaaacttcggttactgtagttccatttttttttttttttgcttgtgtgagcaatgttaagaaatgtaaatacgagaggtcacgacagttgagttgctgctcacgagctgaataaataaaatattcatccactttggtgtccaaggggagtgcattcagttgaaagtatgtgagcgctcacagtttcgatttgacaaaggacgcattttatgttgattctttcttgtttctttaaatcacctagatttgcattttcgggacaatagcaaacatcttgaacataatggtcctgaccagaaaggaaatggccaagacgcccataaataatatacttaagtggctggcggtggccgatatgtttgtgatgctggaatatataccctatacatcgtatcagtatatatatatggggccaggtaagcatacatttagtaataatatttaataatagtcttggttatagctttacttgttatttatttattagtgttatcagctagattattattataaaggtatactcttgatcaggatctacacacgtctgtctgtccgtttctaagggtatattttgttaacaattttgttaacaattcccatatatcctttcccctttgcacttacttttagttgagtaacgagtatgtggtagtcgaggcaatcggctatgaccttctctgtaggtttcctttcttttttaattttaagccgtttaaatttttttgaattatttaatattctttgtatggctgttgcaggtgaaaaagatttgagctacacctgggcggtttgtctgctggttcacatgcacttcacccagatcctgcatacgatttccatcggattgactgtcacgctggcggtgtggcggtatgtggctatcaggtgagatgatccttcggccagctatgcatgacttattccggaattcgccgtcatccatgtagagtttgtctccggttcacattcatgataatccacatccgcaattcgaacagacatccggctaatctgattaccacatcattgtggcaatgtggcttctcttctcttcccccgtcttttgtttatagccaaatgttaccgtctctattccacagacatccgaacgggggctgtgccaatttcctgctagcacattcccgggaggcgatcctcctgcccttcatcctgtcgccgatcctctgcctgcccacgtactttgtgttccaggtgcgtgagacgtacgacgtggacaaggtcaactcggaggccatgtatcatgtttatttcgacaaggactcggtgctctacaggtgcgcttagataagaagtctgatgtcatttatgcatcctgcgaagaaccaattgtaaaatatttcatcgtgaaaatccttaacagattcaacttctggatacattccgtgctcatcaaacttctgccgtgcggcatattaattgtgatcagtgcagtacttatgcacgttttgtgcgaggcatcgagacgtcgcttgaagctgagggattacaacaatcccgccaaatatgccatccagcttaatctgaatgaaaccaaatccaagaagtaagtacgcacttgactcgtttagtgcttaagaattcgcctcatttgcagtttgccttgttagtttcatgatctttgatttttctgtttttgaatggtctcggattttgtcaaatctcttcttaggttcctttttgccatcttttttataaatttgtctttttgtttttgtatcttaggccgcctcgctgtgatcgccgtaacgatcggactacccttttgctggttgcggtactggttttgtttctgatcacggagtttccgcagggattacttggtctgctgtccggagtgatggagaagtgcttcttcgcccactgctatccgccgtttggagagctgatggatctgctggcactgatcaacgccgccgtcggattcgtgctgtacggtctgatgtcgaaacagttccggaccaccttccgatcgctgttcatgaagcggcactttggcagcaccgaaatgaccagattgacccgcgtaaccacgacttgcgtctagttgggcacatctaaagatgtgatcatgggcaggagcaaacactagtgagggatgaagtaggtgagggacatccaagatgttccggcccggcattgaatttgaattttctaaagcataaactttataaaagtttcgttgactaaacaaagcctaaatatgagaaactgtgagtgtggaattattgtacgggctgaccagttgatcagttgatttccacaatggtttacttttaggtgtagtcctaaggcgttgactggtgcatcgatcggtttagaaattgattctgcttgtgatctggctgtttcgcaaagtgccatttcatttccaaataattacattgattagtttaccagttggtgtttcaaattcgtattagtatataagtttcataggctaagtcagctgtacaaagctgtacaaatacgagacatttacttttccataagatgcagaaaaaaaaacaggaatccatcatcagcaaaactgtagccatgctaagaggactgaagaactcactgagccccgagttgctctctcttcttagctggaatcacgaaagaattctattttgattgtatggcgttaactggttttcaacaaagtgccaatgcattttaaattggctaattgaataaccatattttgagtactttttaagtcgcttatactatttataaataaatgtgaacactttcaaaaaaaatatgtttgatgtgagttgcatacaaatgaaacgtttattgctttccattaccgaaaaatgaacatctaattctgactgacaacagcattcacctccagtggcaattcgtccggcagaagttccgtggcccgattgtgtcccaaatcagactcgcccatatccgcggaatccagcaggatgccattgccctgattcgagatgcgcagcagggatttcagcttggtggcttggaatttgtactgcaggataatgagattgataaaatctgctctcgagggagtttcgaccataatgtaa

SEQ ID NO: 30524 - DNA, 1245 bp, DROSOPHILA
atgatgcaagagaccggcaatcaaatgggacagacccatatgcaccagcgggttcctttcaacgacacggttctgaaggactatcatctcacgagcaccgatatcgagaagtttgtaaagctatggcaggagtaccagatgaagaacatgacccctcaggtggatgagtgccagggctattgccagggggaaatatacaactggttgcgagcctacaacagcatccatggatacgtttcgctgatgatttgcattttcgggacaatagcaaacatcttgaacataatggtcctgaccagaaaggaaatggccaagacgcccataaataatatacttaagtggctggcggtggccgatatgtttgtgatgctggaatatataccctatacatcgtatcagtatatatatatggggccaggtgaaaaagatttgagctacacctgggcggtttgtctgctggttcacatgcacttcacccagatcctgcatacgatttccatcggattgactgtcacgctggcggtgtggcggtatgtggctatcagacatccgaacgggggctgtgccaatttcctgctagcacattcccgggaggcgatcctcctgcccttcatcctgtcgccgatcctctgcctgcccacgtactttgtgttccaggtgcgtgagacgtacgacgtggacaaggtcaactcggaggccatgtatcatgtttatttcgacaaggactcggtgctctacagattcaacttctggatacattccgtgctcatcaaacttctgccgtgcggcatattaattgtgatcagtgcagtacttatgcacgttttgtgcgaggcatcgagacgtcgcttgaagctgagggattacaacaatcccgccaaatatgccatccagcttaatctgaatgaaaccaaatccaagaagccgcctcgctgtgatcgccgtaacgatcggactacccttttgctggttgcggtactggttttgtttctgatcacggagtttccgcagggattacttggtctgctgtccggagtgatggagaagtgcttcttcgcccactgctatccgccgtttggagagctgatggatctgctggcactgatcaacgccgccgtcggattcgtgctgtacggtctgatgtcgaaacagttccggaccaccttccgatcgctgttcatgaagcggcactttggcagcaccgaaatgaccagattgacccgcgtaaccacgacttgcgtctag

SEQ ID NO: 30525 - protein, 414 aa, DROSOPHILA
MMQETGNQMGQTHMHQRVPFNDTVLKDYHLTSTDIEKFVKLWQEYQMKNMTPQVDECQGYCQGEIYNWLRAYNSIHGYVSLMICIFGTIANILNIMVLTRKEMAKTPINNILKWLAVADMFVMLEYIPYTSYQYIYMGPGEKDLSYTWAVCLLVHMHFTQILHTISIGLTVTLAVWRYVAIRHPNGGCANFLLAHSREAILLPFILSPILCLPTYFVFQVRETYDVDKVNSEAMYHVYFDKDSVLYRFNFWIHSVLIKLLPCGILIVISAVLMHVLCEASRRRLKLRDYNNPAKYAIQLNLNETKSKKPPRCDRRNDRTTLLLVAVLVLFLITEFPQGLLGLLSGVMEKCFFAHCYPPFGELMDLLALINAAVGFVLYGLMSKQFRTTFRSLFMKRHFGSTEMTRLTRVTTTCV

SEQ ID NO: 30526 - DNA, 2299 bp, DROSOPHILA
aacggaaatccccttttggccaaaactaaaacaagcatgatagacagctgtagccaaattgctcgactatcagatacccgctatttagctgatgggagtgcgattgagaaatgtcaaacatttcttgtcatatgaatagaatttagtaagtgaaataaggaatggaaaacaacttgaaacaacgggaaatttatcaatctaaataaatgcgtaaatttaaaatgtataaaaggactttagagggtcggaatcgtttcccattccctttacatactttataacgggtaacgggcttataatagtttttaatacttgaatgtaattcacaccatgccttttaatatagtatgtatgtacctatgtacttatttactaaaacaagattcctctaattcaattattagaatattcgccctattcattcctattcaagtaaggttttttttgtgactataaatttaaggccacagtaacatggttataaattaataatttctgatacttaaggaagacaaaccacgatttctgataaataaagttaataaaaggactacagaattaaaagcttagctttctttgccaaatgctcttttagtcgctggctaagtaatgtttatttcaattgaaaagtttatgggaaaaaagaaagactttaaagtgtaactaaagtttattcgaccgtatctctgctggatttttcttttcaataaaaaacttactgatatatcaaagtagttgaaaaaagatcattgccgagcaaaaaactttgttactccgtacagggaaagtattccaattcgttcaacccacataaatgttgtttaagttgagtgaaatttgatttcgcattttcaggagaacacctcaaaagtcagctaaacaaagaacacgaatttaaatcattagaatttggtttttgtttaacttatatttcgaatgggatttatttggacatttcagttagttaaggtagtcaggtagagttggagtgctcggaacttcagaattgggccacaaaggtgttcgggtcaatcaaagtggccacctcccaggggtgaacaactgaaggacccggaatccgattgtaagcgtctgaaaaaagcaaaaaaaaaaagaagaaaaacacggggtcaatccggtaacagttcacggaaactattgtcccaactcaccgattatcttctggatggccgtccgggcatccaggatctgtgtgggcggggcgggagcgggggcggcgctgacaaggaccagacagatggtaacgaaggcgatggcggcgacaaggattctcgacattctggggctttggttcggtattctggagcttggatggtaatctaattgaaatagctgcgaccgcagctatttatactcgaagaaaccgggatgatgaaagaaagccagcatagcgatttggcgatgagcttcttgtttcgaagcagctgtttggaaattggatttcttgttttgaatgcgatgccaaccaatttctttggcgctacttaatccggggaatgtccgcactcgaagatggcaaacaagtttcggaaagaacaaacgatttgagttgggaatttttgaacaccttgcaggaaagcataacaatgcaaaatgcttttcgaacatttaatgcaaatgtataatctttttgaatgctaatagtttggctaaaggttgcgcttatgaacttcaaaagttgaattttcaatgaattggcttgtagaaagcaaccatttatacatgaaatcaatttcatagtctttcaatttggttactttattatccttaaacagattttaagaatgtaattgagtttattaaacatttccttgctttctttcttgtaaatgcatagacataagcatattatttaacccaaaaatccatttaattgtaaatataaatattgtaattaaattaataattaaataattaaatttaattgtaaatatatactcataaacatattattttacccaaacaatattcttgtcgatacaatcgtcttatcatcgtatttcgcttattatataaatgggtattgaatattctatacataagagattataaaattctttttgaatattcttgccgtaacacaaatgttttgcatatgacagttcattgtacgaatgtgtgactaaaaaaaaaaatctctgtttatgttttgttttgctatcttttatttcatttgttatgcctcagatgctttgggcatttccaactacctcaaaaaaaatgccggccacatgaaagatacaaataggagaagaatcttttgcttatttgtcgccat

SEQ ID NO: 30527 - DNA, 219 bp, DROSOPHILA
atgtcgagaatccttgtcgccgccatcgccttcgttaccatctgtctggtccttgtcagcgccgcccccgctcccgccccgcccacacagatcctggatgcccggacggccatccagaagataatcgacgcttacaatcggattccgggtccttcagttgttcacccctgggaggtggccactttgattgacccgaacacctttgtggcccaattctga

SEQ ID NO: 30528 - protein, 72 aa, DROSOPHILA
MSRILVAAIAFVTICLVLVSAAPAPAPPTQILDARTAIQKIIDAYNRIPGPSVVHPWEVATLIDPNTFVAQF

SEQ ID NO: 30529 - DNA, 2436 bp, DROSOPHILA
taacactagtggaagttttgagtacatgtaaacttctcaagctaagtaagtaagcgaaaaggcaaaataaaaagttcgattaatggcagattggaaaatattgacttagacgctaagattttcatttgttcctaaggacaccattagattataaatacttcaaacatataagattcgctgttaaaataaacactatgtttggaataagtgcgtcgtaacttacatggagtgcgctgctcctcagtgacccacaatgctttccttttgaaccccttttaattggatcccaaagcgtttgctcgccaaatggcagcacttagtgccgccgagctaaagaacaaccaactgcagttctgcacaatcttggccataatgtggcgttctaatgtttataatttcgcttgtggagcataactaggagtgtttaactactggggattactttggacccaagctgggggtctttagtgtagacttgcagcatatatgtgcataagcggagcactaagtgtggttactcacaactttcagatccgtgtacaattcttatcaggtatttcagaaaggtttggtaagaaaaatgctgtagtacttcaagcaactaatttggaccacaaaatttgcacttttccaagaaagttttactcatggccggaaggaaaacgaactgagttgcaacgttttagttataattttaaactgtaagccaataaactaagttatttgtgtaagcctaatttgtaagccgtaatttatgcaaaattgttaagcttttcttttgggtttctgtgggaagttttgttgtgattgcagtgagtttttagggctaaatttaaaactctttaaattgaattgaagacacacgtttgactttaacatttatttacatagcaatcgggaattgtttgggcaggaaatctgatgcacgtgcgaatgtttcggcaatgctgctgcactacaaaggtgtctaattgatccgccgctccgtgtgcgtgcctaattagaagtggtggatggagtggtaggtgggcaggtgataggacaccgaagacaccggatggtgggcaatcagcggggcatgggcgatgagtggggcatgcgatatgattggggcatgatgcaccagcgtgggtgcagctatgtagtgcgagtgggtgaccaagggggcatggtagccgagccccaatgatatgccgcgctttgccttgacagaggactcctcctgctgctcctcggcggcgggagcaggtgcggccaggatgcaggccaaactggcgatgagcagcagcagctgtgccgtttccaagcaattttcattggtatttaacgatgaaaagcgggaaaaaatgacggattattagaaattcttaagaaaatatcatataattttcgcaattatcttcttcgctctgacgatagcttacagtgaatttcatgttgttggtatatttaggatttatgtgtaactcgacttgaaactgttcgcacaccactggctttaattgaactaacgacgctggcagccagaacctggttatttataccattcggattgttctcaaaactcactcaaaactaagtcaaacgcactcattaggcgaaaactatttaggcccaaaaataaagtaaaattcgcacaagacacgcatcgagaaaaatatgcccacatcaagccaaaattgcacaaacaagccaagcgactcaagaaatatgtacatatgtatgtatgtagatagatgtgtgtgcctgtgcgtatccatccgagtggggccgaatgtatctgagtatctgagtatccgacggatcgccacatcgccagtccacataaattgttttttaattcagcaaattatttggagtactcactttgagtgccaataggcgcctcaatttattagccgctgctgtggtcaatgtgttcatctctaatactaaatgccaaagccattaataacaataatttctatctggcagatacttgtcagcaattgtcgcagtgtctgagtatgtgagttatgaacactccattcgaagctaatctattgtacaatcaaatggaatggtgcatttcaaagctaaaagctattagctgtgtaccaaaggtaatggccaaggatatttgttgcctgttcaaaaatggcaaaaataacaaaatttcatattaagtattaagtattgtataaatattgtggcgtatacaaacaggcaggtattttgtcctttctgaaatgtaatagaaagttagacaaggctgtgcaaataagactaccaaccaaaggattaaataaattagccaagggcacgaatttcattatgccttgaaatgaattgacataaccgaaaacaatttcgcattggcctgccggcgacaacaaaaaattgattgacactgtttggccgggctaattgaaaaagacactttaagttacaactaaa

SEQ ID NO: 30530 - DNA, 303 bp, DROSOPHILA
atgaaattcactctgctgctgctcatcgccagtttggcctgcatcctggccgcacctgctcccgccgccgaggagcagcaggaggagtcctctgtcaaggcaaagcgcggcatatcattggggctcggctaccatgcccccttggtcacccactcgcactacatagctgcacccacgctggtgcatcatgccccaatcatatcgcatgccccactcatcgcccatgccccgctgattgcccaccatccggtgtcttcggtgtcctatcacctgcccacctaccactccatccaccacttctaa

SEQ ID NO: 30531 - protein, 100 aa, DROSOPHILA
MKFTLLLLIASLACILAAPAPAAEEQQEESSVKAKRGISLGLGYHAPLVTHSHYIAAPTLVHHAPIISHAPLIAHAPLIAHHPVSSVSYHLPTYHSIHHF

SEQ ID NO: 30532 - DNA, 5334 bp, DROSOPHILA
attacttggtctgctgtccggagtgatggagaagtgcttcttcgcccactgctatccgccgtttggagagctgatggatctgctggcactgatcaacgccgccgtcggattcgtgctgtacggtctgatgtcgaaacagttccggaccaccttccgatcgctgttcatgaagcggcactttggcagcaccgaaatgaccagattgacccgcgtaaccacgacttgcgtctagttgggcacatctaaagatgtgatcatgggcaggagcaaacactagtgagggatgaagtaggtgagggacatccaagatgttccggcccggcattgaatttgaattttctaaagcataaactttataaaagtttcgttgactaaacaaagcctaaatatgagaaactgtgagtgtggaattattgtacgggctgaccagttgatcagttgatttccacaatggtttacttttaggtgtagtcctaaggcgttgactggtgcatcgatcggtttagaaattgattctgcttgtgatctggctgtttcgcaaagtgccatttcatttccaaataattacattgattagtttaccagttggtgtttcaaattcgtattagtatataagtttcataggctaagtcagctgtacaaagctgtacaaatacgagacatttacttttccataagatgcagaaaaaaaaacaggaatccatcatcagcaaaactgtagccatgctaagaggactgaagaactcactgagccccgagttgctctctcttcttagctggaatcacgaaagaattctattttgattgtatggcgttaactggttttcaacaaagtgccaatgcattttaaattggctaattgaataaccatattttgagtactttttaagtcgcttatactatttataaataaatgtgaacactttcaaaaaaaatatgtttgatgtgagttgcatacaaatgaaacgtttattgctttccattaccgaaaaatgaacatctaattctgactgacaacagcattcacctccagtggcaattcgtccggcagaagttccgtggcccgattgtgtcccaaatcagactcgcccatatccgcggaatccagcaggatgccattgccctgattcgagatgcgcagcagggatttcagcttggtggcttggaatttgtactgcaggataatgagattgataaaatctgctctcgagggagtttcgaccataatgtaacggtgcaagtaatttttgtaagactttctggccaattatgcggtggaatatctattcacgtgccaatgcatacatccactgggaatgatggtatttcggacgacttacttccgttggcaacagaagatcctgcgcctgactcatgaaccggttatactgctccgtggacagggccaatctgccggtttcgtagcaaaacagtgcaaagttcagcacaaccaagggattacgtccggctccctgttggccagttgccatggaactggccctttcgagggccacgaatgcgttctccatatcgtccagctttcgcaaacaaactgcgggtaaaggaggaagaagctgttattttggggaaaacttacactgaaaaaagggatatatatataagatatattataagagatacaggtaagcttacattatatgattaaaatgagcaaaaaataaagatgcaaaaattgatcagaactttttataatattatattttcgaacaatatattttacgagtgcacttgtacaaacttacggcccaggagcatgtagcactcggcattatccttgcgcaggtttatggctgcggccagcgtgtgaaaggcactggcgtattgttcagctgcagccaagatggggcaaatagaaaacaacagatgcttcttaacggaagaaatggcaacaaacaatgcaggatagaaaagggtacacaaatgccttcggctcggatttgtcctggtgctgttaagaaatttattaaaacctccaacccacagagtttctcgctagcctcgagtgtatatttgtacccgaaatccaaccttctcttgcagtttggtttcctattgtctctttttattcggatttcattttgccctctttttgaccaaggcgtggcaaagatgaatgttgataaaactcgtgattgtttttggccaaacgaagaagacatttcaaaggatttttatagtcaaaaatctgaccctataatatgtatatgtattcttgatcagaatcacttgcagagtcgatttggccatgtatgtacgtcttctcttttacgcaaactagtttctcagttctagggtattagcttcgtccttttaatatcttaactaactctcatgtttaaaatagaatggcagcgcagaatataaaatagttttcacaggctgcactgaacaagtgaataatatgaaatctgcaatgctaatgttaatggtaatatcttttgagaactttttgagtacaagcgtcatcgaaggataacttgattgatactagtaggataatagcctactatttatatttaaactcctaaagtgcacttagatttcggagaactcacatgcgatgtagattaaactgaggttgtaaagggcattgtagttaagtggcgatagccaaacggatttgcgcagcgatgaaatggcctgttggttattaaacatttaaatgtacgcacaagtaatacacccatcttgtcattccattaccacaatgaacttctgcttcttgaaaaagcacaatccgatgttattccacagctcggcaatttccggctcagcgtttgcgatttggctgtatttgctgagggcgccatcgatatcgttgcgggactgttcacaatattcacacaaattcagcattaaatgcgacttaacagattgtgtcaaaggaaatacatataccacatttacctgcaaaatggcaccaaaggccagaagtcccttgggcgagcatttccgttcgatgctgacgacttccgctaaacgatcgtgtgccttttgcgtttcgttgattttcaaatacagcacactgatttcaatcagaacctccgagttctcaggagtcaagctgaaaaggggcgaatgggtataaaacgaaaaaaaagcgagggacagcgagattaactactaactgtagacagttctctagaatttcaatggctttctggtactgtttgtccttgcgatacaactccgccaaacgaacgtagctttccagcttccggccggattgcacggccaactcaaaataggtcctggcctcgtcctgctgctggctggccacatccttttgactctgcgtcgtggccgctctatagagtagctcgcccagataatggtaaatctcgtggtcctgtcgactgctcctttgttccgcctcccgaaaaacgcccaaagcctgactaaaacggcccattatgtatctgaaacgaaagagagttggcatcaagcttttaagccgcttttgaaatatgtatgtaaatgttaaagtatcattattgtatcgaatccaattatttttgcgaaaaaggaattttaaactcagttaaccatcaatcttatctaacacagaaatgtcttttatacttgcaattatataatcataaatagattaaaaatacacgaaaaagggatttaattaaagtatctacgctgattatgattaattaaccagctaacttggttattaatgaaatcctttaaatccattgaaagttcgccgaaaaacaacaacactatgatgagtaagacccttcgagtgaataaatgattaaatgtttaaaatgtaaatgtgtgaattttgcgataatatatacaaagttacccacagtgttcggccgatttccttgtaagtctcgatattcctgggattgagctccgctgatttttgcaaatgtctgagcgcctcgatgtggttgccctcttcacggtcaattagaccctggcgaaggccatcaattagaaaagacaccgagcattagccaccacaagcgaccgcagtgctccttgtttttcgtcatctcacctggacaaagtacaggtactcgggattcaaatggcgattcagctcacgttcgatgagtcggcggcagcgcgtgaattcgcggcgagtgaaataaatgtggagcaaccaatcaatgttggcatcgctgggcattttgggagctaatcgaaggacgaaggacacaggacattgaaaagtctatgcttgacgcaaatggcgaggaatttccttcacctggacgaacaacctccaaggtgggcaattcaatcagtctgccgttgcagttgatctgctccgttcccggttcgtacatggattactttagtgtttttccaggactgtgagcaaaagctcaacttcaaaggtaacttgcttggtaatattgcgtttcgatttgttttggccgccggcaactttgttgtgtcgagtttgtgttgccatggttttttgcatttaaggttgccaaggcagacgggctggaaattaacttgttaactgaattagtgcgcatttcagtcgggccaaaaggcccaaaaaagagcgtacgaaaattccgcgttgtgtatttttaattagctgcgacatacatgtcgaaaacccattcgaaactaatcgaaatgcaataaaaacaaactcaaactgggcaaataattggcgagacaaaaaggcaagctggcagatcttgggataaccagttccttggaactcgccacgaagtcccgactctgacaccgcctaattactcaatttatttcacaccggccaaagtggcaaaatctgttgcacttgttaccatttcgggccaaaagacaacatgtgatcgtgagctacatttcaaaccgtttacgcgacttaggctaaaacagcaaagcaattaatgcacaaaaaatatcgtacaagatcactaccaatatctgtatcaatcgatcgatcgattgcggcgctgctttcagatctttcgatctcagatcttagatctcaaacgggaagtggccacctgacgtcttttttttagttcaaatggccgctattttttttttctttagtcggaagtacacaaacacttggccccaatgtccgctacgaccacaacgattgacagtcttgatggattcgcgatgccaaaatggggtttcaattgcaacagattaaaaatcaattactgcaaggcagttaacgaaaattacgtagaataaacattgttctaatcttttatggcggcacagtaaatattacttaaccagttctttcaaaaagcaatctatcaacttaattcaaaacttatttaatggaatatttgaattttgttcaaa

SEQ ID NO: 30533 - DNA, 1461 bp, DROSOPHILA
atgtacgaaccgggaacggagcagatcaactgcaacggcagactgattgaattgcccaccttggaggttgttcgtccagctcccaaaatgcccagcgatgccaacattgattggttgctccacatttatttcactcgccgcgaattcacgcgctgccgccgactcatcgaacgtgagctgaatcgccatttgaatcccgagtacctgtactttgtccagggtctaattgaccgtgaagagggcaaccacatcgaggcgctcagacatttgcaaaaatcagcggagctcaatcccaggaatatcgagacttacaaggaaatcggccgaacactatacataatgggccgttttagtcaggctttgggcgtttttcgggaggcggaacaaaggagcagtcgacaggaccacgagatttaccattatctgggcgagctactctatagagcggccacgacgcagagtcaaaaggatgtggccagccagcagcaggacgaggccaggacctattttgagttggccgtgcaatccggccggaagctggaaagctacgttcgtttggcggagttgtatcgcaaggacaaacagtaccagaaagccattgaaattctagagaactgtctacacttgactcctgagaactcggaggttctgattgaaatcagtgtgctgtatttgaaaatcaacgaaacgcaaaaggcacacgatcgtttagcggaagtcgtcagcatcgaacggaaatgctcgcccaagggacttctggcctttggtgccattttgcagtcccgcaacgatatcgatggcgccctcagcaaatacagccaaatcgcaaacgctgagccggaaattgccgagctgtggaataacatcggattgtgctttttcaagaagcagaagttcattgtggccatttcatcgctgcgcaaatccgtttggctatcgccacttaactacaatgccctttacaacctcagtttaatctacatcgcatctgaacaatacgccagtgcctttcacacgctggccgcagccataaacctgcgcaaggataatgccgagtgctacatgctcctgggcctttgtttgcgaaagctggacgatatggagaacgcattcgtggccctcgaaagggccagttccatggcaactggccaacagggagccggacgtaatcccttggttgtgctgaactttgcactgttttgctacgaaaccggcagattggccctgtccacggagcagtataaccggttcatgagtcaggcgcaggatcttctgttgccaacggaatacaaattccaagccaccaagctgaaatccctgctgcgcatctcgaatcagggcaatggcatcctgctggattccgcggatatgggcgagtctgatttgggacacaatcgggccacggaacttctgccggacgaattgccactggaggtgaatgctgttgtcagtcagaattag

SEQ ID NO: 30534 - protein, 486 aa, DROSOPHILA
MYEPGTEQINCNGRLIELPTLEVVRPAPKMPSDANIDWLLHIYFTRREFTRCRRLIERELNRHLNPEYLYFVQGLIDREEGNHIEALRHLQKSAELNPRNIETYKEIGRTLYIMGRFSQALGVFREAEQRSSRQDHEIYHYLGELLYRAATTQSQKDVASQQQDEARTYFELAVQSGRKLESYVRLAELYRKDKQYQKAIEILENCLHLTPENSEVLIEISVLYLKINETQKAHDRLAEVVSIERKCSPKGLLAFGAILQSRNDIDGALSKYSQIANAEPEIAELWNNIGLCFFKKQKFIVAISSLRKSVWLSPLNYNALYNLSLIYIASEQYASAFHTLAAAINLRKDNAECYMLLGLCLRKLDDMENAFVALERASSMATGQQGAGRNPLVVLNFALFCYETGRLALSTEQYNRFMSQAQDLLLPTEYKFQATKLKSLLRISNQGNGILLDSADMGESDLGHNRATELLPDELPLEVNAVVSQN

SEQ ID NO: 30535 - DNA, 4108 bp, DROSOPHILA
acgaaactaatatgcgtaaaattagaggatggcggtatgagtgccgaagttgcagctgtatggggtaaaagctaatttcccagcgagttccgaaattgcgtttgtcgcgcacttggctgctataacttatgtggaaactcaaaggattatgctctaatccaagtcagcttaatctgccaatacactcaacaaaaaatatcattcgaaaaacgattcttaattctttgattgttggtttggtttcaaaaacatttctcatgcatttttttcaagtgcacccactcgtgcgacatgtggaagagcttaatcaaccctcgcatggcccttttgtagctctgtcaacaggcaaaagcgattcaaaagaaaaatgcgagcagcaagagacaaaggactgcgcccaaaaggaaccaggatacgaggaggcccagccaggaaaatgaaaaagaccaaaaacatgccttttgacagctgccgaaacttttgcatgacatttatcactgtcgcataacaaatgagcgacagcagcagcagcagcagcagcagaggcagcggcaacaaacatcgaagagtgataaaccccagcattggcggcaaagtttttcctcgaagcgggaatccatcccacctacacagcccggagtcgaggaggaaagaatcgggcccagcctccgtacagccgggcataaacttaaagatatccagagacgcaaacagaacctgaatgtggcaagtgggcaggggactcgattggggactgctgtggatgtggatgaggatgaggttgcggctgagacagtaagcccgatctcccccagtatcccgatgtatatacactccttatccctttaccctcccttccactaacacacacacacacagacgcacacaaacccatgacacatgagttgtcaatgcaatataataaatacgatttttgactttgttaaagcgctgccaaggcgtgtcgttgtcccagatgtctctcaggcccccatccttatcagaaagtggggagcatgtgggcgggggaaatgcgcattaggccgcaggcggggcaacggatttgccagctctggtcctggccgcatacaataaaggataatatgcataaaatgctcaagtttatacgcaccagttaaaatgtcatttcgagcttatgcgtgagagtttgtgtgcggcaagtggagggcaaaattgaaagaaaagaaaaaaaaacgataaacgatattaagagggctgcgagtgtaatacgagtatgccgaatagagcatatccttggctacagcactaaggatctaagacgaacttaaagggagcaacataagcctaatcggtagagcccttggttcttgcacttaattatgccatttgtgtggaaatataggactagggtatatccactttagagatatggcgtgttaagtgaattcttggttttggaattttagatctaaagagaacttataaacataattctacacatataacaatattacccttgtacttaaccattattccttcgtaggaattgccaagtaatagttttaagtaacttctaatggattgttgttcatagctaatataccccactgtaagaaaagaacagggcaagagtgggggaaaccacgagaagagcatgtgacaggcaaacaatgttgcctttattgatgtgagtctgagatgcgacatagagcataatgtggtttccgagacatgcaatataaaatggattaccgaaggaggagttgtgaatgcgaccgggacttaatccacagggccgtccatcataatggggtatctctgcccgatttcctgcagcaatttccgtttaattatcaaccgggctggccaaccgtaatccggcaaagacagagagaaagagcagggcaatgggaaaaccttaaatccgcattccataagcaaaactatgcagttgacctgagttaacatctacttaaagcagacacaccggcagacgacggagaactctttgtccaagtttgtgggttcgccgatggtgccaagcgaaacgaccccattaggtgatagacaaaatcgtaatcccaaagcaaatcagtggctctgccctgtgtagttgcaaatagatgcaaagagctcgagagctgacagccaagttacggccataaaaaggggcacagacagcagatagcccgaaatagagttggtagtttggtaggttggtagaaggtagagcacgaggatgatggtcaaactgaaccggcgactttccgccacacgtgctgcaaaagctggaaaagcaggaaaccgagcaagacctctgcaactgtcgaatgcaaaacgggcgaaggatgaggtgctcttactatccagacccccagtgacataagtacgaaatggccaagaacgatggtggtgtcggtgcggagagggggggtgaatcgatggcaaagcgcgggacaaaattggcaaaacgtcaacacagttccgccccggtcgcgaaatgctttttggccatatttatggagcgcaggaaggccgaccatattgggcatcattaagctgttttggactccggcctctgagggcgtaaaatgagcagtctttcgatttgagatcgttgacctgtggccgaacccctcgacaagatgcaattgccatcaagtgaccttgatggcccccgcatgttgccatgaatgcatatgcacatttagatagctagccagatagatagatagatagatagatagatagatggatagatggagacagagattcttgggtgtgagcacagtctgatggtgacttgtgttttacacaaattgacatctgaaatggcagattcatttgagtaatgcggaagtgcgtgtctctggctcaacaggcacactctgtatccgtataaatgtatttgtatctgtatctgcatctgagtttggtcctcctttccctggcagcatatctgtatctgtatctgctttgtccatttgcggacgcttcgcttttgctcatcaatgcgcaattatttatttatacaacatgtctaacggccgtctgtctgtctttctgttgctgttgctgatgttgctgctgctgctgctgctgctgctgctgctgatgttgttgcatgttggcatggacaaaaccccaacaacgacgcccacacagatgttccaacacctctgcactggctccccccttttggggtatccccactaccccgcacaccccagcgcatcattaaattaaacttgtatgagaattgttgtttgcgtagctgttgctctttcggccttttcacatttcattgccattgccggcattcggctcttgccaatcagtaattccacttttgtatgccatcgccccgctgctctgcgttgttgtttcacgcagctccttttgtgttccgatttgagctatttccgctgctgacagcagcaggaaccccctacaaacatggagtacaccctgtatttccacttgcccgcctaaaatcgttgcgctgatatcttaaatgacactcgccggtaaataaagattgacgtcaaattcattatcgcccgcaacaagggacctttcagcagggggagtgggtgagtttggagtgggtttccactgtatagatgtgtcaagtgcaggcgcacgcagttgtactatgccaaaaagttgagctccatatgtgctgtggccatatttgaaagcaaacaatctgtacatgcacaataattgttatcgatttttaattgaagtcacaaagggagctggtgaatgtgcaattaaaaaggggaataacaatatttgaatatgcagtcgatgcttgaatagttcatgccaagacgttgtgtcatataaattgatttccagcaagcagcaagtttttaggaactagactgcatctaatgttttgagtgcaaaagtctaaggtttcgtacgaccctactattaaaagctgattaaattcatcgttcgtatgccattaaattgctcaatttgctgcattccgatgagcttttagtgaaacagtgccgcccaatatgggcatgcctgccccccaatgcaagccccatttcctttcgccgcccggcattgcaacacgaacaatcgctccatatacgttgctgttgct

SEQ ID NO: 30536 - DNA, 159 bp, DROSOPHILA
atgcaacaacatcagcagcagcagcagcagcagcagcagcagcaacatcagcaacagcaacagaaagacagacagacggccgaccagagctggcaaatccgttgccccgcctgcggcctaatgcgcatttcccccgcccacatgctccccactttctga

SEQ ID NO: 30537 - protein, 52 aa, DROSOPHILA
MQQHQQQQQQQQQQQHQQQQQKDRQTADQSWQIRCPACGLMRISPAHMLPTF

SEQ ID NO: 30538 - DNA, 2186 bp, DROSOPHILA
gggcactggaggactgaaaatggcaaatggaaaaggcaaagcgcagcagcagtggaaaaactaatagcttcactcaagctcctggcattgacagctaaatgtgcgcggcaaatgcaatttgcagtttgcagtttgcagttttgcggccaaaggagctgcaccactttctaagcaaatagcccggccaagctctcaaacgaaaggcaatcgagaaagccagctgcaggccataccagccatgtatctgtatctgtatctctagctgaatgggagacagagttttatttcgggaccagacagatagtcaacacgtggcccagcggatgaggatgctcgtaatgacgagtccaaggaggaagcaattcgccgcccacccgaagggccaatcgcaaatgcggaaacatgcgagagaatgcagtgaaatagaaaaattaagcaactgtcaaatcctgtaacgcataacgagcatatcgggggttcgacatacccactacgcagtccggggcgaaatttaatagcactgctggagagcgaggcagctcggtggactctggttaactggagcagccataaaaagcagcaaaaacacaactgttgacaggcgggcgggttaagagccgaggcggaggggttggcaatcggatagccattgcatctcccagccacttcactccgcatcgccatccacatcccctttcgcattcccatttccatccgcttgtgctgcttttgcagagcttttgttctacccttctggccaagtggatgttataacttggtaattcgatttgcacaaagtattttccctgcgagccaagcgacagagactgcgctgctgctgctgctgctgctgctgctgtctctgttcattgcataagcgcatttcacagtacagttgccgcgacggcagtggcaacaagagcagcagcagcaacatcagtagcagcagcaacagcaaaagcaacaacagctgcaacaacatcatcaaggggcagtattatcaaagacaaacgacaaatcgcttgccagtgccggcatctgctgttgttgctgctacagctccactagcaacatctacagcagcaacattgcggttgccattgtgttgctgctgctgctgctgctgctgccgctgccgctggatgtcgctgcctggcatcatcatcgagttacgttcttgtctcattgccgcgcttatcgcgccatgttttgttgtttcgcaaatcgatttgacgccgtctccttggcttgccatcgccatcggttcgtcgtcgtcttcactcaagtgtcaatttgtagtggttgctgccgctgtgttgcagttgttgccgttgttgttgctgctgctgcaaatgctgttgctgttgcacatggcacgcagtgggtcttgcatattgatggggcaatggcaggccacaggcccactgctcaatgttaataatcgccgactgcaatcaacattgctggcgatgttggtgttggtgatggggtatggatgatggggggaattggggattgttgctgggggattcgtgctctggtttatccctctgcggattcagtcccttcattaattcctctacaaattaattgtttctcgtgcattttttgatgctcgcgccgaagggccattcatttggcggagtccctggtcaaattgaaaatcgtgcagcttcatcgcatcccactaatgacaaataataattgctggcaatttctttaattccacttgagtataattactcggactggctgcagcacaacagcaacaacagatgagagcgcctggcattattaataaattgctattggtttctcaggcttctggtggtcggtcagttggaagaaaaagcttagtggtttctcgaccgtttacacaagggttgccgtctttaattcacttcatgtcctttcagctcaagtcgatttgttatgatcaaacaccaggtttgtgggagagtaaattattcatgttattctggcgaactcacttcatttgaaacaaagtatcctgttgccatttatatacccatacatatcggcatacacacatatagcccacataccaacttgttttccgattcgtttgggtgccgtttttttttttatatacgtttggcttgatacaatgagcgcaatgaatggctgaatgaatgcttgccgacttgaatggatgagcaagcgta

SEQ ID NO: 30539 - DNA, 186 bp, DROSOPHILA
atgagacaagaacgtaactcgatgatgatgccaggcagcgacatccagcggcagcggcagcagcagcagcagcagcagcaacacaatggcaaccgcaatgttgctgctgtagatgttgctagtggagctgtagcagcaacaacagcagatgccggcactggcaagcgatttgtcgtttgtctttga

SEQ ID NO: 30540 - protein, 61 aa, DROSOPHILA
MRQERNSMMMPGSDIQRQRQQQQQQQQHNGNRNVAAVDVASGAVAATTADAGTGKRFVVCL

SEQ ID NO: 30541 - DNA, 2168 bp, DROSOPHILA
tgtgacattggtggtgttggtggtcgtaaaagcgggctgaacgccttttaatcgccgctgtgttaacgtgcaacgttgcgtatgcgcaattttctgtcatttttattactgatgaacatcgcaaaattacagcaacactctgccgcacacacacacacacacacgtattcaatgtcaatcatcatttgcagcaatttattattataataataaatgttcagggctcttcccttgggtaaggggagttccccagcacttaccagctgaaaaaatgcttgccttctttgcttgccaacgaaaagtgtgtgttttctttcaagtagttaacatggaaaacgttgaacaaatcgcattaattgctgttgtggcagtggctgtgtaggatgggacgggggaatgggccaactaaatgctgaggatgtggggcttaatgcgggacaacttttgtcggagcccgcatgtgtgcatgtgtgcgaggatgtgctttttaagtaccgctatgacaggcagtaaaaacaacttaacttggcttgccaagccaagccaaagcaaaccgaaaacccaaggcattgttgagctgttaatgaaaagtcaacttgatttcatgccagaccagccagccagccagccagccaaccagccaaccagtcacccagtcacccagccgtccaaaagccgaggctttcttccttcctgctcgtttggtccttcagcgccttcacaactgtgtcgcatgcaaagccaatgtgcaacaagatggcaagaaaagcaaggctctctctcagcccaaaagcgtagcaactgaaaaaactttcactttatcattaagcctgacgggtgaactttttcgagtggctgtgctacgtcgtgtgtggccagtttcccaggctctggcaggactctctatattgaaacataaatagaattataaatactctacaggcatcgtcctcgtgtgaatgtgtgtgtgtgtgtgtgaaaaatcagttaaagttattgcatgtcgtcgcagctcgacatagacaaatgttgctcttgtcacaagtggaggaggcagcaacagcagcagcagcagcagcagcagcagcagcagcagcagcagcaacatcagccactcctggcccacccacgtcaactggctgtcttcgtgtgcctgttgccaacttgacgaaaattgaatttcgaaacatgctggctaaaaagaaaatgtacaaaaaagaaccagcaaaggactataaaaaaacgacggcaccgaaaatgaaacaaaacaacactagctggcaaaagagaaacatttcagcggcaaaaacggcaacaacaaccatgaaaatgacagcgtaaagccggcaaatgcaacaacaatagctgctgctgctgaagcaacaaaaacaaatgccaacaaaatggcggctgttaaagtgcgaaaaacgcgtggaaaactgtttgaacagcaaggagctgctgcggcaaaggaattgagcgaacgcagcagcaacacaacaacagcaactgtatttagtgccgccatcatcgcgagacgcgcgtgtgtgtgtgagtgagctgcgctaagtgcctttgcccttcgtccttcgtccttcgtccttctatacttacccaaaagcacccctccccctattacttatgccccccccccttttcgccatcgccctttattgtccttgtttgcctgttatgttttttagctttacgtaaattgcgtaaattgtgtgcattttattacgctacacttcatgctgtcacgcccccccccccccaaactccactaccacttccgcctccatacgtcaactctttttcattttcgcaaacattttgccaacatttttgttggctcctctgtcagcacgacgaaaatgtcttcgtcagttttattaggtgagaactgtgagttgttacacgggcgtacttatgtatgtatgctgctatgttgtgtgtgttttttgtaaattgcgggcatgttttatggtttgattgcctcgaaaataagccttcagttttgacccatttcgaggcgaattaatgttcattcttcgtccatctatctggggacaggcaaacaagcagctcggtcggccctgccccgtcactcaattccacctttaataacacattttttttgggctaattgatacgcctgacggcatcgc

SEQ ID NO: 30542 - DNA, 168 bp, DROSOPHILA
atgtcgtcgcagctcgacatagacaaatgttgctcttgtcacaagtggaggaggcagcaacagcagcagcagcagcagcagcagcagcagcagcagcagcagcaacatcagccactcctggcccacccacgtcaactggctgtcttcgtgtgcctgttgccaacttga

SEQ ID NO: 30543 - protein, 55 aa, DROSOPHILA
MSSQLDIDKCCSCHKWRRQQQQQQQQQQQQQQQQQHQPLLAHPRQLAVFVCLLPT

SEQ ID NO: 30544 - DNA, 2329 bp, DROSOPHILA
attcggaaacgcttccttcagcatgttacatcttttttaacgaatctccacgagtaacgggtataataaacggaattaaaaaagtgtaacagttttgggcggcttgtggtatacgtatactttatatactttatagggtcggaaacaaacgttaccctacaagtaacgggaataatattactatacgtaccttatttaatcttttaaaaattattaatattgaacgctatcttttttgaatgactttaatactaatgctgatataaaagtgggccttcccttataagctactccctttattgaacatgaaaagaaaaaaaaaattataataatacgagttttatcgttcactaacaaattttcccttttcgctttccgttttttcggtctccacggatttttttgttcatcctatgccacaggttacaaaatgtcccgtccaatatgcaggaatcgcctaaccaacgccgatgtcgatgatacgctctgcagcgttactaatcgtccggaggcgtcggtggaacaatgtaatacacacagttgtcctccccggtaagtaatatctttgctggttataaacttattaaaaaagcaccatattcgaaatttttaaaacaatatcgagttctttggacaggattgtctgatttaaatattaggtttgaatttggataagtgatgcgatactttttatacccgttacgcgttgagtagattcgttgaaaagtatttaacaggcagggggaaacgtttccgaccaaaataaagaatatttatttttgattaggatcaatggccgagtcgaactgcccctgtccgtctgtcctaaccatttattttccccaccctatcgtgtgccattgactgcttatggccactattcatttattttctgtgcagctagttcgccaattgtacttaacatctttaaattcttaggtggatagcagacgattggagcacttgcagccgcctttgtggtcacggctaccgtgagcggatggttgtctgtgccgaggagtcgaacggcatcaagacgagggtgagtgttaggaatagcttccataaaggtcatgtggtgttgacaaagtcaccgatgattttgcgtacggcaatggtggggagcgtcaacacgttattgtcgtgttatttatactctgtcttttccaacaggtggccgatatcatgtgccgcacacccaagccaccaacacaagagacctgcattatcgaggagtgtccgcactgggaggtcgaagactggaccggtgtaagtactttggatctcagcctatttcccaccaagttgtctaacaaccacacgccttgagcgctgcacaagaaactgtaggagccaaacctaggcgcaggaccgcagtactataccttgcaccttgactatgtcagaataagcgtacagaggtctctcattttatgcaccggatatgtgtctatgattggaagatgctgtttgcaagctgatctagcaaattatacccgttactcgtagagtaaaagggtatgttagattcgttgaaaagtatgtaatacgcagaatgaagcgtttccgactatataaagtatatatattctatcaggatcaatagccgcgtcgactagcaatgtccgtctgtccgtatgaacgtcgagatctcaggaactataaaagctagaaggttgagatgcagatgaaaggagtaaatcttgaatttaatctttaattaattttaccaattctaaattgttcagacttcctgggcagacattttttcaaaattaaaaattactatatatatgtaatattcccatagtatttgaaattcgagtaagcttttcttaccttcttccgcactggatattactttgctttgtgactcgttataacctgctcgcctctagacagaatggcctgagtatgaaacagcggcagtttcgttgccaccgggtgtctgcttaagtttgttccttagttcccattctcacctcacgtgcttccttctcctgttaccatgcattttcaatgtgtttttttgtttttttgtacttctactttattaggctcaacaagccaaaacctcttttacgtaggggaacttatgaggaccgcttggggtgttaagtttttacgttactcaattgatttgtttaaagactttttctgaatggtatttaacgcctgctactgttagatttctttaaatttgggacaaccttagtgcaattaagagtaaaaggtataacaagttaacgtttatatccagtaaaacgggcaacgaaagaagaattatattgaatttataacaatgaagctgcggatgcatcgttacgca

SEQ ID NO: 30545 - DNA, 198 bp, DROSOPHILA
atggttgtctgtgccgaggagtcgaacggcatcaagacgagggtggccgatatcatgtgccgcacacccaagccaccaacacaagagacctgcattatcgaggagtgtccgcactgggaggtcgaagactggaccggtgtaagtactttggatctcagcctatttcccaccaagttgtctaacaaccacacgccttga

SEQ ID NO: 30546 - protein, 65 aa, DROSOPHILA
MVVCAEESNGIKTRVADIMCRTPKPPTQETCIIEECPHWEVEDWTGVSTLDLSLFPTKLSNNHTP

SEQ ID NO: 30547 - DNA, 2597 bp, DROSOPHILA
acttgatgtccacatggatgtccctcaactcgttaggaaatttactacgcactttttgttgtgggttttcagttcgccaatgggccatgcgaaaaaatatttctgtggctttaaatattttaattgtcgctgttggctctgttctgttatttcataatcgtatgctctttgttgtaagtcaaaaagggtgtagttcgaaatgcacaataaaaattgtaatattttggcaaaatatttataattattaatgctaatttcaacaaatccaatgcatttctggcattctatttggacgatggctaaatactttggtgttttgtatctgtttgtgatattttaattttactgtcgcatttgatcataaattaagcgattaacaaataaggggcaccgtgggttatgggtgctcttttgaattccctcgatgtggcaatggatggaaggggccagtaaaactatattgcttttgataaatgccgatggttaggactcagagtgcgccgcattgagcggtttagtacttagtactcaagtgatattagaattcctggtagattaaaaaaaataacaaaataattgaaatatgaaaatgtgtcagaaatgtttcatttaatcatatccaatcgcgtttgccattcaaataaatctcaaaatatataaaaacaaattttttacattacagtgaagtttttgataagccatgttcgatacaactaaatactttccgcgttcagttgattccgagcatccgtcccagtcggagcacaatgagtccttgtcactggatcatgtcgtcacctacgatatggtccataacccggagggaagatcacctgatcacagtgtcatcgaaatgacatcggaagctgaccggcatataggacacgatgtcacttcatctccccaattgatgattatatttgaagaaggcgacatcaacagtgcactgcactttattattgagtcggttcataatccctttgcctcgaatgcggtggccatggttctggttgaagagaaaattcgcggggagatcgtcgagcgaatcctgtctaagctacatcctcttagtaagtttgtggccgaacatcctagctatctggcagcactggagaaatgccacacctccaactttaacataataagggcctgcatttcggaggttgccccaccaatggcttcacccatttttgtgtgtgactgtacgcacgataagctgggaagttacccaactggagtagtaacatttcacacattccgcaataaccaggaggccattgccataagtcagtgcgaatcgttggccttcgcatccgtctccatttggaacgaaacgctaactggatgctacgatctcgtggcggccctcagctcgtcctatttttttctaaactgcgccaacgttgacttgtcgccaattttaaagccacacaaggcccagaaaaattacgtggtagttgaaaacggctttcacttcgaaaccctacgtatctatgacaatttcaaagccattgtatttcccattggcggacaaatattgccagacatcgaggatcacaaggaggagcacgcagctatcttctttttggaagcttagtattggaatgacttccacgacttcccctttcatccgatttcgcaaaagtgcttggcagattcaaaatttaaagttattttgggtgtttttatggttattaacgttcatgatgcgtgccaatatacaatgtaagtgcagctgtcagcggtaataacaatatttcttttcttccggatattgactttttgggcgtcttaatgaacgcaggttttttgtatataggttgcgaattaattcgacacagcgtgactaactgtgtattcgatttttttaaattttattgggacattgagaaatggtaaaatgttggtctgttatcttttcgcttaaatattgttttgtttattcgtgccgaacactgtaagaatgttttctagctctgcagccgatacttatattcaacttggcaatctgatactgggcatgaccgaataaatttacgatcgcacagcattccggagtcaccacaagcatctgccccataaaatcattttctttatgggagtatgatgagcgtatgagtgacgccaagtcgtcgcttttgggcacttaaggtctgaatccaaaaataaagcccgctcgtcagtgtaattatcagttttgtgtgtttttctgccttggaatttattccccataaatctcccgcatgtatctggcccaataagggggaaaggcttatcaggtgcagtcacaccctcctctgggcagctcatccttcccagggcgttgggaaattcattataaaatgcggtttgaattatttgtcaaaatgtctggtccaggacgcagtgacattgatgttgacattgacagacagactgggtcgaatgtccccgacagaccaagcccaactcactcgcccgatgtgacaaaataaatgaaattgttaatggccagtgagtcaccgagtttatcgagttggtagcgtcattattgtcagctgcatcaggacctgtccgacggccaataaagtcttttaaaatagacattttattggtga

SEQ ID NO: 30548 - DNA, 597 bp, DROSOPHILA
atggttctggttgaagagaaaattcgcggggagatcgtcgagcgaatcctgtctaagctacatcctcttagtaagtttgtggccgaacatcctagctatctggcagcactggagaaatgccacacctccaactttaacataataagggcctgcatttcggaggttgccccaccaatggcttcacccatttttgtgtgtgactgtacgcacgataagctgggaagttacccaactggagtagtaacatttcacacattccgcaataaccaggaggccattgccataagtcagtgcgaatcgttggccttcgcatccgtctccatttggaacgaaacgctaactggatgctacgatctcgtggcggccctcagctcgtcctatttttttctaaactgcgccaacgttgacttgtcgccaattttaaagccacacaaggcccagaaaaattacgtggtagttgaaaacggctttcacttcgaaaccctacgtatctatgacaatttcaaagccattgtatttcccattggcggacaaatattgccagacatcgaggatcacaaggaggagcacgcagctatcttctttttggaagcttag

SEQ ID NO: 30549 - protein, 198 aa, DROSOPHILA
MVLVEEKIRGEIVERILSKLHPLSKFVAEHPSYLAALEKCHTSNFNIIRACISEVAPPMASPIFVCDCTHDKLGSYPTGVVTFHTFRNNQEAIAISQCESLAFASVSIWNETLTGCYDLVAALSSSYFFLNCANVDLSPILKPHKAQKNYVVVENGFHFETLRIYDNFKAIVFPIGGQILPDIEDHKEEHAAIFFLEA

SEQ ID NO: 30550 - DNA, 3392 bp, DROSOPHILA
atgtacatacatatgtatatatatagaccaatccgggggaacgaaagcccaactaaaaacggctattggctttaaaagtgtaataaaaatgcatttacacctccaccaaaaaagggataaagaagcaacaaaagcttaaaaagcaagccaaaaatatggaatagattgggaaggcgcgccagcacacaaaaacaaagagcagcaatccaacactaataattcgcttttattgagtgtttctggtgcaataaaagcatttcggttggatttcccttcgccggtcgtaaaaaattttggaattttattgaccagagagccaggcgaaatgcaagatcattttgatacgcagcgaacggcttgctccgcggtgaatctccttcccccaccccccacaccctttaaagaaacttaacgagccaacaaattactacacgtcataaaactcaactcacagaaatataccaagatgcgaccgcggcggcgcggtctaaaaataatattcgtagcgcccaaaaggcaggcgacttctttaggggccctctgcccctcgggtgacattatcaaaatgatttagcagcacagtcgcggtgacattaggcagatttccaatgccattggatggcacatttaatagacgcaccgcagggcggtaaactatcgaaaaagcaagctttaacatcaaattttgggacggcaactgaagagggactacgatctaaccatcaagtaatttgtacatttgattatttggctttcagaagcttgcacttcaaaaacacattgaaatgctataagtatatctaagcatatttaaatacatttccaagttgcaataggaaaatgtatttcatttttatttatgcacgttatgtggagtatccttattgaattataaatgttcatggatcactgacatgcatacagaatatttgccatgcgaatttcgagtattttcgttaccaaggaattttaaaaattcacggtcgggagagcccttgttttagttcccggaagtttcctgaccaaacatgggctgcgcattcacggaatcgttttcgtcacctgttgagatcacagtgatcaccgatgatcgctccttagctttctgcatcatctgctctacggtttggcgccggtagcgacggatatttccctgtgtcacctgacccttttcatccatgcgcatctgctggggatgtcggcgcaaccacgtccacggcttttcacgattaaatggttcgtgcaggagcaccgggagcggatcgccataatacactcggttcgtggtccgcttaggaacaggctcaacatcgctggccttcttccttttcttcgagccgcgtgccgagtggctcttgagcacggctttcgaagcagaagccttgactctttcatagtacgaatcggaatttacattggccttgatgctatgccgtggcggctgtttttttggatttgtgacattgctgtccaatttgaggtctttgatggcagttattagtttctcagtatcgcgcgtcagataagtcttatcattaacgcgaatgagcaatttggcgagccgcctggtccgctctaaagctaaagaatccgtgaaaacccatttttcgggcgtgtgcatgacatctaagcccgcggactcaaggctggatccaaaaacatatccaggatctcctgctgtgcgttgctccaggccggtgttgagatgacttctgttttctgaggccctggcttccgagtttcttaatcgcctcctgccgttttgacgagcgattgagtcgtgatcgataccagctctacgcgctatggaatcccttttaagtgtccctcgtaggccgctaacgcctgcatcaaatgcacggagctcagtgggtggagattgcttcaaaacagtttgcacggcgctcattagtagctgcagtgagtcctggctaaggcggctccttacattcccatgagtatcgaaaattctcataaagttctcacaggcaccgcagttcacaaagggaactctacaagaggggcttaaggtctccgtctcggcgggatgaaggatctctgaaaagttctggagggtcagtgtgtgcaaaaagtctgacaccaaatccggcggacgattcagggtcgtggccagggccaaaataatgcgctggttggtgaggaaccaacgctccttgtgcgacttctgcggacatcgacaccccagctccatcaggaccgacaggcgtttctcctccaccgagtcattgttcagctgcttgtatgggttcttcggggagtttcccgccggaggctttcgcgaagagcgacaggcacagggcgcaaatcgctgaaggcaaaagccgctgccgagaagattgcccgcgaagattccattcctcaggctgagcattctcgcaataactgttttagttcaaaatatattttccccaactaaaatagaactgtcatatgaaatttgtaaagggcgtctcaagtgagaaaatgcacatatgtatttgtccaatatgtccaagccactcaatcggattaatcccagctctgcttaactttttgtaatgttcctgtgctagaagtggtcggcaggaattgatccacctggcagataccacaaatccgctacgcagtctggctaacgcgggatagtcgtcttcagcaaaaccagtacgaaatctcgacggttgtgacaacgtggatacatttgaaagacatttacaaaacaaaaatgccagtcataatcgattcgactcttctgtcacgaactataatagttatatattacttatttttcaattgggctttgcgttaaaattgtttacttttaaatgttaaatgttgttaatgaacagaccgttttatatctttctttctttccgcctgttcagattaattcagataactgtctgcgattcaggtttatgttgcatagttacacagttacgatcttcatcgttctcataactgggctactcaaattgaaattagctgtcaaaaatagagaaaacttactctcggtatgtatgtacatacgtatgcgagatcccttataatttgtataaggcatcaaaatacatatgtacatatgttgtattttgttacacatacatatgtacatatgatgtgtattgatgcattctcacctggggacgaactattatacgtgtatacacatgttggtgtagctaggtgaaggtaggcagaagggagaactgtgaaataaccgtcagcttgaggattgcaaaaaaaaagctggacggtaaatgacaatacacctccccgtcaaccattgtgcttcactttggcaccaacaacaattaaccctccgcgaaggcaagaacaaggaaaactcaaaaaaccaaacaactaaaagggggaaaagaaacaaaacttaa

SEQ ID NO: 30551 - DNA, 1392 bp, DROSOPHILA
atgctcagcctgaggaatggaatcttcgcgggcaatcttctcggcagcggcttttgccttcagcgatttgcgccctgtgcctgtcgctcttcgcgaaagcctccggcgggaaactccccgaagaacccatacaagcagctgaacaatgactcggtggaggagaaacgcctgtcggtcctgatggagctggggtgtcgatgtccgcagaagtcgcacaaggagcgttggttcctcaccaaccagcgcattattttggccctggccacgaccctgaatcgtccgccggatttggtgtcagactttttgcacacactgaccctccagaacttttcagagatccttcatcccgccgagacggagaccttaagcccctcttgtagagttccctttgtgaactgcggtgcctgtgagaactttatgagaattttcgatactcatgggaatgtaaggagccgccttagccaggactcactgcagctactaatgagcgccgtgcaaactgttttgaagcaatctccacccactgagctccgtgcatttgatgcaggcgttagcggcctacgagggacacttaaaagggattccatagcgcgtagagctggtatcgatcacgactcaatcgctcgtcaaaacggcaggaggcgattaagaaactcggaagccagggcctcagaaaacagaagtcatctcaacaccggcctggagcaacgcacagcaggagatcctggatatgtttttggatccagccttgagtccgcgggcttagatgtcatgcacacgcccgaaaaatgggttttcacggattctttagctttagagcggaccaggcggctcgccaaattgctcattcgcgttaatgataagacttatctgacgcgcgatactgagaaactaataactgccatcaaagacctcaaattggacagcaatgtcacaaatccaaaaaaacagccgccacggcatagcatcaaggccaatgtaaattccgattcgtactatgaaagagtcaaggcttctgcttcgaaagccgtgctcaagagccactcggcacgcggctcgaagaaaaggaagaaggccagcgatgttgagcctgttcctaagcggaccacgaaccgagtgtattatggcgatccgctcccggtgctcctgcacgaaccatttaatcgtgaaaagccgtggacgtggttgcgccgacatccccagcagatgcgcatggatgaaaagggtcaggtgacacagggaaatatccgtcgctaccggcgccaaaccgtagagcagatgatgcagaaagctaaggagcgatcatcggtgatcactgtgatctcaacaggtgacgaaaacgattccgtgaatgcgcagcccatgtttggtcaggaaacttccgggaactaa

SEQ ID NO: 30552 - protein, 463 aa, DROSOPHILA
MLSLRNGIFAGNLLGSGFCLQRFAPCACRSSRKPPAGNSPKNPYKQLNNDSVEEKRLSVLMELGCRCPQKSHKERWFLTNQRIILALATTLNRPPDLVSDFLHTLTLQNFSEILHPAETETLSPSCRVPFVNCGACENFMRIFDTHGNVRSRLSQDSLQLLMSAVQTVLKQSPPTELRAFDAGVSGLRGTLKRDSIARRAGIDHDSIARQNGRRRLRNSEARASENRSHLNTGLEQRTAGDPGYVFGSSLESAGLDVMHTPEKWVFTDSLALERTRRLAKLLIRVNDKTYLTRDTEKLITAIKDLKLDSNVTNPKKQPPRHSIKANVNSDSYYERVKASASKAVLKSHSARGSKKRKKASDVEPVPKRTTNRVYYGDPLPVLLHEPFNREKPWTWLRRHPQQMRMDEKGQVTQGNIRRYRRQTVEQMMQKAKERSSVITVISTGDENDSVNAQPMFGQETSGN

SEQ ID NO: 30553 - DNA, 3822 bp, DROSOPHILA
tcgcttccagaacattctggccctgaatcgcctcggaagcccactccacgtgacctccagtggaagtttggacttattccatacctcgtctgcttatacattgatttcccgcgcacatcatttccatcagctcatcctcagcaatcgtatctttctattagaatgtttctatgcgtttcctaactggtcgatttttccagttgagccgctcgcctgcaaattattttattgaacgcaattgtttttggctttggctcgtttgttattcggcggcggcagcaaattactttttatggctggcggcgggcttttcacttcccatttgccattttgcctgcccatttcccgtttgccgatcgcctctgttgaataagaggcactgggcttcaattctgagaattctgggtttcaacgcagtaaataagatatttgcgaccttataaattttatatgtatattccgtctatattatcagaatcgagtctatttagccatgtcctgaagtccgtccgattctacacttaggtttaaacaacatatgcatatttaaactttaaactttaaactttatattagtcgaagcgagccgaaccacaccactgtatcatacagctgtcacttgaatttgaatgttaattaaaacacagatagtctctataaaaaagcttcttataactatcgttgagactactggaagttcccacttaacaatctatgtgatctattaagcttatggaaattaaaccccctttttttttgttttatacgtgatgcaaagtgcactaagagcgttataagtaaggaaattaaaatatacagccgttgcattgaaaatctgatacgatgagcactcatgacaattggtttattgattcgaagatattttttacatgtgctagctatcttcgcttatactcgaatctaactttgtaaaccgaaatttatgttcgaatatatcagtcttaatttttgttttttcaaataaccttactttcccaattcaactcacctgcgttagtttcccattgacaatgctgagcgattccaggctcgagcgtacgttgcgcaggctgttgtccttgagagcctccaggtgcgaatgggagaactgcaggtgcctgatatggacgcccggctggaagacgtcctgcgatagtgacgtcaccgaacggtcaaagtcgtagatggacagcgagtggatcggcgccgatattctctcgagtgttgagcgcagcgatatcgccgtcgtgccggggcactccaggaatagtcctgaaaatggaacgaattaatcacgtgggtaacgccgacggacaggagcagtgtgtgcatttcaattaattccatcaaagcaactgtcccagctagtcgattgcactgcttgttagtagtctgcccgcaggtgccagttaatattcatgtgtgatgtgagaaggacacggattgacagtcgacttgtaaatacacactttggttggccaaattaaagaaaatcattttgtgcaatatgtactggtcgtgtttagtttgaaatatagagttaatcatcattctagctttgaaattatttatccaatttataaataaatatcgccaaaattaactagttggaaagctgcaaaaagaaaacagcatgtatgtacatacacggttaatattccttgactacactgtatttcgttattgacaagcctcgatagaatgattccctggtgccttgtgtaaacacttcctgttctggagatgtactcttaaggcggtctgattaaaagagatactcaataagactctgggcagtaaattggaataagattttattcaattgtagcacacgaccagaaatttaaatgaaaaaaaaaaaaacccttttctatcctttctccacaaaaacctaggctgacttttcttctattaagaagaaaagggaagaaggtaaactattatgtacggggtatctgatattcgatggcttgatatggaattcgttctcacgtcctgagtgcaataaactttgcctcggcggctcggctgatgcgtttaattagttcgctctaccgttcgcacttaccatcctcgaacttgtagcagggacaggcggtgttgtcgaagctggggcactcgatgccagccgcacctcctccgtctcccccggcgagtcctgtgccaggaccaccgcccgccgggtgtgctgctccgccggaggagccgccaactccgaccccgactccccctccgcccatctcggttaagagaagctcacgtacagagcctttggcactggagatcatggccgtggctgcggcgcccggtggcaggggcagcagccccaggagcaaggcagtcggcaacagggcgcacagaagcaactgcagctccaacttcaaccgcaggacatgctgctgtacgccggcaacattattgcgattccgtttgtgtttgtgtttgccttcgcattcggagtctgtcggtttggtctggtgtttgtgcttcttggcagccgccgcctctgcatttgtccccattgccatttgctctatttgacgtccttgttgctggcgctgattatgctgctcctgatgttgctcctgtcgctgctgctgctgctgctgctgctgctgctgcatcatctgcggatactgctgtggatgttgctgctgcttgttttgacgttgagctcgttgtttttgcggcacgaggttttcccgattttccgattccttgtccttcgcaaggactgccgcctgtccgtttgttgacttcgtgcatttcgctaataagtttacaagcgctgctgacgtccttaaatttcttcctctgcacattttccttatagtcccttgtctttctgttacagttcctgttcctgcgcctctcgccagccgtctgtttgtccccgtctcgttcagccggtctcaatcagcgtgtcgcacttgcatggatatcctcctgtttccatatccctgcaaggtggggaatgtcgaaaaacccaattaataaagaattagtacaagcatttttgtggcaattcatttccccatctaggagtgggatttgaaatacctagcccagccactaggactgaagagtgaggaaatagtaacgaaaggacttgaacagatcaacgcccaagataatgcaaaaaccactcgggtttccactgagaattaaagaactagttaaaaatgtaatgtaattaaagtgctaatgcgaaaacccagttagagcttaattatacagcaaattaatggttccatgcttatgtgagtaactacggagtcaggtccctggacttacccacattccagggtcccggccgcaattttatttgtctttcgagcagccagcctttggaccgatttttttcctgccatgttatgctgacagcataagaccattttttttttttttttttttttttgtcggactgccatcgtttataatatgaagcattctctggcttgcctttgcagcagttttgccactttttctcactcttgaatttcgtttcagtcttttcatttctattttcaattttaatgctcgctgcctccctaaaggaatttgtgtcaagtgtgtgaattttttcggcttttatggctcctaatataccgactttccccctcgtggaacacggtcacgttggcatgctttattattattattttattacttagtcgttgttgttcgctcgtttagtaattaatgcgctttttcgctattccccattcaattccactctagggccattaaatgccattaaaattatggcagctaatgcgccaaataactcctgccggccgcccgtcgtcttaaccggaaatt

SEQ ID NO: 30554 - DNA, 1026 bp, DROSOPHILA
atgtgcagaggaagaaatttaaggacgtcagcagcgcttgtaaacttattagcgaaatgcacgaagtcaacaaacggacaggcggcagtccttgcgaaggacaaggaatcggaaaatcgggaaaacctcgtgccgcaaaaacaacgagctcaacgtcaaaacaagcagcagcaacatccacagcagtatccgcagatgatgcagcagcagcagcagcagcagcagcagcagcgacaggagcaacatcaggagcagcataatcagcgccagcaacaaggacgtcaaatagagcaaatggcaatggggacaaatgcagaggcggcggctgccaagaagcacaaacaccagaccaaaccgacagactccgaatgcgaaggcaaacacaaacacaaacggaatcgcaataatgttgccggcgtacagcagcatgtcctgcggttgaagttggagctgcagttgcttctgtgcgccctgttgccgactgccttgctcctggggctgctgcccctgccaccgggcgccgcagccacggccatgatctccagtgccaaaggctctgtacgtgagcttctcttaaccgagatgggcggagggggagtcggggtcggagttggcggctcctccggcggagcagcacacccggcgggcggtggtcctggcacaggactcgccgggggagacggaggaggtgcggctggcatcgagtgccccagcttcgacaacaccgcctgtccctgctacaagttcgaggatggactattcctggagtgccccggcacgacggcgatatcgctgcgctcaacactcgagagaatatcggcgccgatccactcgctgtccatctacgactttgaccgttcggtgacgtcactatcgcaggacgtcttccagccgggcgtccatatcaggcacctgcagttctcccattcgcacctggaggctctcaaggacaacagcctgcgcaacgtacgctcgagcctggaatcgctcagcattgtcaatgggaaactaacgcaggtgagttga

SEQ ID NO: 30555 - protein, 341 aa, DROSOPHILA
MCRGRNLRTSAALVNLLAKCTKSTNGQAAVLAKDKESENRENLVPQKQRAQRQNKQQQHPQQYPQMMQQQQQQQQQQRQEQHQEQHNQRQQQGRQIEQMAMGTNAEAAAAKKHKHQTKPTDSECEGKHKHKRNRNNVAGVQQHVLRLKLELQLLLCALLPTALLLGLLPLPPGAAATAMISSAKGSVRELLLTEMGGGGVGVGVGGSSGGAAHPAGGGPGTGLAGGDGGGAAGIECPSFDNTACPCYKFEDGLFLECPGTTAISLRSTLERISAPIHSLSIYDFDRSVTSLSQDVFQPGVHIRHLQFSHSHLEALKDNSLRNVRSSLESLSIVNGKLTQVS

SEQ ID NO: 30556 - DNA, 4130 bp, DROSOPHILA
tatctaccagcaaggcaaatctgttggtatttgcaggggctacatttttgatcaaggtagagttatcgcggtgtatttttcggcttgtttcccaaatctgaattttccgggctgagctttcgctttattgtaatgtagcggtccattccagtctgccaggtcgacccagcttttttgtttacgttttcgttttgttttgctgccagtgcagcagtcccgtttattgctagcggttttgctttcgctgacttagtcagaccgtgagcgggtgcagccgatgacgaggcagagcgggctgccggtccctctccagctgttgttgttggaggtagcggggcttctgtcggagccaatagagcgggagagcaggagcgcgctctttcttgatttgttggtagaagaaggtttcctgggctatgggttattgaccgctcgatgtctgcgtttgggattgtcggtgagacgtaggagaagtacgcgttgttgcgctgaattgagagtcggcgttcgtcatgctcgcgctgacgctgggcgcgagtgtcattctgactcatagttttattatttaagataacaattcactatgtatttaagcgatcttgcatcgcatagagcgtctctttcgctttcagattttttatttagtttattttatttggcgttcacttcactcaaaacaaccgattttgtgcggagcacgataaaaacgtcttcacacgtcggcgatcgaataaattattattattaattaaaagtaataataatgatgatattaagtatttaatgtatttagctgtaaggcatgccacattttagcatcgtgaacttactttgatgaatacatattgatcccagtagctcctcagtgaactatcgaaactgaacaatcccatttctttccgtttcacactcccatactacattccgaatgtaaagctgaggaggacttcagatttgaagtgagtctaaaaacgaacagctgcatataggaccccttcaaatgtgcgccgccgtctgcgtgatggtcacggtgcccacggaagccgaggaactgaaactgtgccccaagccgctggttggcgcatcatattgctccagctgcggtggatgtgtaaggagcaggtgcactgaggaacccagtggcgaggtgtgcgaacgctgttggcgcttgagtcaaatagccgggagcagtgtgcatagagatgccgttccaatggccaatactctccaatacagcactacgtctgcacctatgtcccaggggagggccctgcagctgctcaatcttaagggggatgcctctttggagaaactgctacgggccattgccaaagagctgcgattggagaacgtcttttggacgcacgacatcagcgggaggcaggtccaggcacgcttcgaccttctgcaggacgagcgatacgagagactgctgtgcacgttgcaagattggggcgtcggtgatcgacccggcacccatgtgtctgccctaacctgcctggaaacccgggctaagccctgcctgcaggtacccagacaagaccatgacaatttcgtggatcagcatcaggaacatggagagggtcagggccagggtcagggccaggcccagggccagggctggcagagcttcatggactcggtaagatgcaggctgaatgtcaaccaggtcgtgcgccaagttcggcgggatgccaccctaacctttgacttcgtggtgctgcttattgctgccgctctgctatcgtgcgtgggtcttgtcgagaatagttttctttttctctccagctccatgctgatttcccctttgatgggcccaatcatagcggccatattcggttcagtgatcggcgatcgggacctgcgatggttgggtctgaagaacgaactcctgggtatagctgcgtctgtggctattggattcttctttggggccatggtctgtggtttcggtcactttttcgcgatttccaagggactcacggaggaaatcgtctcacgatgcgacacgcattcccttgccatcggagtatgcacagccttggcttcgggagctgcgggcgccatagcggttttgggtggcaatacggggtctctggtgggcgtggccatctcagcctccctgctgccgcctgctgttaatgccggacttctgtgggccctggccgtcggagtccacgtactgccggacgaccatgagcccctggccagcatggtgaagcacaggtcgtactcctctcaactttccgttgagctactggtttgtgcagctgtcagcatggccctcaccctccttaacataatttgcgtttggctgatgggaacggttgttttgaggattaaggaagtggctccagcggttcagcgacaccagaagttttggcatcatgacatccgcacagcacgcgaggtggcgctagatccagtcctgcagagtgccatagatcgcctggacaagtctcaactggattcggacgcgtcaccttaccagcgcgcctggtcgccagggctagatcgtcagaccgcctcgcacacaggaattggaagctacgacattaacctgtcctgcagcaaggatcagccgaacaactatcacacggtgcatggcttccaggagttctgcatcacgctgcatcgacttaagtctgcacataaggtcgccccaccaccgactataatggagctgtttacgcgcgcgcctccaaactccgaccagaccaatattgggggcagtgacttcagcagctgccgcagtctgccggacatcagcagccattcccgtctctggccacataaaccacccagtgctatgagcatccaaggcctgatctttggtgcagccaagagcggggaacctggacccgctgtccctatggcaacaagttcgaatagggaacgcgagaagatgaatgtccactggcgggaggaggaactgcaggaggacctcgtcctgagaagggaaatcctgaacagcagggagagcagtccgctcagaaggcccggacaagttctgatacccctgcccaggctagaaggcaatttcctgatgaatcggcctctcagcctgttgccctacggcaggtcagagggagcgagccccggggaaaagcaagacgagttccaggcttagcaatgtgctcagctccaagtcatatccttaaacctaacatcaccagacaccatcaagagctccgcaaatatccaagatgaagcctcgagcttcgtgtccagctttgattactcgccgatccggcggcagtgtccttatttgccaaccacttcaagccgcaagctctgacggtcgtgaaatatcaaaaaagatgtttatacgatgaaatatgtataagccaaagaacaaaattgtaacaaccatggatggaaaaaaatacatataagccttaacagcacgtaaaagctgattttgcgatgcagttcagtccagttaattgcctaatcccaatagataaactaccctataaaataaaatgctttccccgtcaaatctcaaaataattcgtttcaaattgttttgttttatgaaaagattgcgacatcgatgtttcaacactatcgctaagttaccaccacaccacacactacaatggataactcgtcctcttgcaagctgagttccactttgtccaggtccggcatttttatagccttaacttggccaagtgaagctgccgaatgaagactgcctcgcttaattcatagtggtaagtaagattgttggctctttctttcctttttttctggtccactgcaaagtgaaccaactcagtagatatcgagctgtttctgccttttttcctccttttgcctatactcacttagcaagtatttaagccgcctcatcgggcagcaaaagtttcaggaacttcattagttcgttaaatttgactttatattgtcgattctaatacgttttgaaatacagcatagaatggttaaagatcatcctcgccataaaaagcttatttttatggaaaaatttgtttctccctctttttaattttccttacttttattatttacggtattagtttaggatcagagcttatgtacatctttttacttggttaagttaattatatagttatataatgcgattttcgttggcatcatct

SEQ ID NO: 30557 - DNA, 2130 bp, DROSOPHILA
atgtgcgccgccgtctgcgtgatggtcacggtgcccacggaagccgaggaactgaaactgtgccccaagccgctggttggcgcatcatattgctccagctgcggtggatgtgtaaggagcaggtgcactgaggaacccagtggcgaggtgtgcgaacgctgttggcgcttgagtcaaatagccgggagcagtgtgcatagagatgccgttccaatggccaatactctccaatacagcactacgtctgcacctatgtcccaggggagggccctgcagctgctcaatcttaagggggatgcctctttggagaaactgctacgggccattgccaaagagctgcgattggagaacgtcttttggacgcacgacatcagcgggaggcaggtccaggcacgcttcgaccttctgcaggacgagcgatacgagagactgctgtgcacgttgcaagattggggcgtcggtgatcgacccggcacccatgtgtctgccctaacctgcctggaaacccgggctaagccctgcctgcaggtacccagacaagaccatgacaatttcgtggatcagcatcaggaacatggagagggtcagggccagggtcagggccaggcccagggccagggctggcagagcttcatggactcggtaagatgcaggctgaatgtcaaccaggtcgtgcgccaagttcggcgggatgccaccctaacctttgacttcgtggtgctgcttattgctgccgctctgctatcgtgcgtgggtcttgtcgagaatagttttctttttctctccagctccatgctgatttcccctttgatgggcccaatcatagcggccatattcggttcagtgatcggcgatcgggacctgcgatggttgggtctgaagaacgaactcctgggtatagctgcgtctgtggctattggattcttctttggggccatggtctgtggtttcggtcactttttcgcgatttccaagggactcacggaggaaatcgtctcacgatgcgacacgcattcccttgccatcggagtatgcacagccttggcttcgggagctgcgggcgccatagcggttttgggtggcaatacggggtctctggtgggcgtggccatctcagcctccctgctgccgcctgctgttaatgccggacttctgtgggccctggccgtcggagtccacgtactgccggacgaccatgagcccctggccagcatggtgaagcacaggtcgtactcctctcaactttccgttgagctactggtttgtgcagctgtcagcatggccctcaccctccttaacataatttgcgtttggctgatgggaacggttgttttgaggattaaggaagtggctccagcggttcagcgacaccagaagttttggcatcatgacatccgcacagcacgcgaggtggcgctagatccagtcctgcagagtgccatagatcgcctggacaagtctcaactggattcggacgcgtcaccttaccagcgcgcctggtcgccagggctagatcgtcagaccgcctcgcacacaggaattggaagctacgacattaacctgtcctgcagcaaggatcagccgaacaactatcacacggtgcatggcttccaggagttctgcatcacgctgcatcgacttaagtctgcacataaggtcgccccaccaccgactataatggagctgtttacgcgcgcgcctccaaactccgaccagaccaatattgggggcagtgacttcagcagctgccgcagtctgccggacatcagcagccattcccgtctctggccacataaaccacccagtgctatgagcatccaaggcctgatctttggtgcagccaagagcggggaacctggacccgctgtccctatggcaacaagttcgaatagggaacgcgagaagatgaatgtccactggcgggaggaggaactgcaggaggacctcgtcctgagaagggaaatcctgaacagcagggagagcagtccgctcagaaggcccggacaagttctgatacccctgcccaggctagaaggcaatttcctgatgaatcggcctctcagcctgttgccctacggcaggtcagagggagcgagccccggggaaaagcaagacgagttccaggcttag

SEQ ID NO: 30558 - protein, 709 aa, DROSOPHILA
MCAAVCVMVTVPTEAEELKLCPKPLVGASYCSSCGGCVRSRCTEEPSGEVCERCWRLSQIAGSSVHRDAVPMANTLQYSTTSAPMSQGRALQLLNLKGDASLEKLLRAIAKELRLENVFWTHDISGRQVQARFDLLQDERYERLLCTLQDWGVGDRPGTHVSALTCLETRAKPCLQVPRQDHDNFVDQHQEHGEGQGQGQGQAQGQGWQSFMDSVRCRLNVNQVVRQVRRDATLTFDFVVLLIAAALLSCVGLVENSFLFLSSSMLISPLMGPIIAAIFGSVIGDRDLRWLGLKNELLGIAASVAIGFFFGAMVCGFGHFFAISKGLTEEIVSRCDTHSLAIGVCTALASGAAGAIAVLGGNTGSLVGVAISASLLPPAVNAGLLWALAVGVHVLPDDHEPLASMVKHRSYSSQLSVELLVCAAVSMALTLLNIICVWLMGTVVLRIKEVAPAVQRHQKFWHHDIRTAREVALDPVLQSAIDRLDKSQLDSDASPYQRAWSPGLDRQTASHTGIGSYDINLSCSKDQPNNYHTVHGFQEFCITLHRLKSAHKVAPPPTIMELFTRAPPNSDQTNIGGSDFSSCRSLPDISSHSRLWPHKPPSAMSIQGLIFGAAKSGEPGPAVPMATSSNREREKMNVHWREEELQEDLVLRREILNSRESSPLRRPGQVLIPLPRLEGNFLMNRPLSLLPYGRSEGASPGEKQDEFQA

SEQ ID NO: 30559 - DNA, 2121 bp, DROSOPHILA
aatctacaattgcagggttttcgttcggggttggttttggttttggctttggctttggttgattcccatttcggtgtccatatttttgggtggcaattttgtaattgaatttgctgtgcggatgttgcgtctgggtgttattgatagtcgagcattatttgaaattaatttggattcgtgaattggttgccagttgccggttgcaagtggcaagtttctagtttctagttgctagttgctagttgccctctccccgccggttgcccacatgcccactaattatgtttaatgcttaagctccaagttgtgccaaagccgaaagtaggacttagtggggggattgggtggctgggcttgcaggatggttttgggagttgggtgctgggtgttgtgtgtgtgtggggggggtgtgtggtgtgtgggcattgggtggcattggctggggttgcgcaacctggcgcaacgcaaacaggaaaaacaaacgcaaaatgcaaaaccttcaattagagctgctgctgcggcttccaatgccatcgtatgcccggctgattttgaggccggcaatcctttaattgggcacaaacgccctcccactcatacaagtttttgcccctcattttgccccgcccctccgactgcaagtgcttatatttatttggagacagaggaagagtctactcgcataattaaggggtttgccttcttcgtcgaagattcagggccgaaaggcatggaattggtagtattagccgtattcttctcgcagcacagatgcgataagaggtttcagctaatatcagttggccacttgcacttgcacttgacagctagcattttacttccacatagaaatacatagctttgcaattcaaagctgccaggttgccggtataccaaaaatctagattcccacgagtgtgggattactttacttattgctcatattatgaaaaacttaaactgaaacgactacttctattcgcagatcccccaaattattatgctgaccttcgatggcgctgtgaatttgaacaactaccagcactaccaaaagatattcgacggcaagcgcaagaatcccaacggctgtctgattcggggcaccttcttcatgtcgcacgagtacaggtaagttgtcagctcagatggcaaattgtagtttaataagccagctggctgagctgacacttgacaattgatgtgtgctgtttgcttttgcttttgcctttgctgttctcgttctcattctcgtttcactggggtgaatttccattcattttccaaatgcacattattttggcattacaatattacgcatacgccggctacgcaggaagcagccgaatgcgtcttctcgagctgttttcaaagttctcggggccagaaagtcaagtgagtcgagcgagagtctctattttgcagacaaagtttttgttcaaaatacttgtcacatacttgccatgcccaccagcccccaaccccccggcgtggcaaccacccaaccttctgcccgctacacccacacacacacttgtcagtcaagtcagtggagtccgctctgctctactaattgttgttgataaattgggggtgacaaagttatgtcaactgcaaaatgaattttcgccaaaatatatgaactacattttgacagacttataaaaacggcagtacacacacacacacacactcgtactcgcactcgcacaaccacacaggcaacaaagtaaaagcccaacaacaaaatgaagtgaaggaaaatgatggaggaaaggcagcagttacacaagtacgagtgaacagtatgggccaatggtttagcagcgaaaagagacataaaaacatgtgtacaaataattaatttcgaaaaatcgaattagaacataaggacttaagtccctggatgttcgagctagttaagcataatcaatcaagcattaaatattaactgttagtatattacttgagcttttattccaaggtccatcagatctcaccatctcttgaggctatactaaaacgaaagtgtaccttttttttagtctgttttatactaaatacaagttgatcactattattgtgatggctttttatgccccccaacacacacacacacatata

SEQ ID NO: 30560 - DNA, 132 bp, DROSOPHILA
atgctgaccttcgatggcgctgtgaatttgaacaactaccagcactaccaaaagatattcgacggcaagcgcaagaatcccaacggctgtctgattcggggcaccttcttcatgtcgcacgagtacaggtaa

SEQ ID NO: 30561 - protein, 43 aa, DROSOPHILA
MLTFDGAVNLNNYQHYQKIFDGKRKNPNGCLIRGTFFMSHEYR

SEQ ID NO: 30562 - DNA, 2800 bp, DROSOPHILA
ctcaatatcctcagcgctacttaagtccaagcttagattaatcctccttcacaattcagctttaaaaatcccaacagaggaaccgtaggaagtaattgttgtctacgtgtcttgagttgaggtgaataacagcactgatgggcatatgatcagaaatcagatcgtagcacttattgtttggaataccattgacgataacgatatcattctttaatccgcatttttttggttataaaattaacattatgaacgagcacttattaaaaactagtaggtcctattgcagcttgcaaacatgtaccaaattagaaatgttttttatcgctagagaaattgtttgagcagccgtcataaaatctccaaaattagtgtcgttcgaatgctagcatcttaatggaaaccatagtcaagagaatttcagggcggtaaccgagctgaaactttttattcttgccgttttcaaacctaaagaaatttcaactttattttcaccaaaacggcggcacatgtctctgtccatccgtccaccgtttcctttcacctgtttcacacctcatgcattagtttacggcaaactgaaagagagagaagctaaaattataaagatctgaccgggcgatggatgaaaggggaaatggggtaactgaaagagcagctgctgcgaaactatttctcgcacaattgtacgaagtttttaattagtgtgaatgactttcaagattgcgttgccgttcggacctggatcaaactgaacctgaagctggatctggatctggagctgaagcttcgccttcacgggaaatggaaaagtgggaaagtgaaaaggggaaagtgggataatggcgaaatgttgaaccgtaaagggagggcggaacgtactctttgcatgagatgccagaaaatgcgtacccctcggtcgagcagcgcaaaagaattccataaaattttcttttgcatcaacttgcctaggtcctcagcaccgccacttttatcacgcccaatgcggcccatcatcattactgttttgtccgggccacaggtgtacatcgtacaggtgcactgtcgtagcaaaaacatgtgtgaaaagtgtttcttgtttcattcgaatatttttcatctatactacatctgtaaataaacaaactcattttcaagcacacaaaaaatttaacaattttaaaacatttgtaaagccaatatacattttaagctcaaaaagataggcatagttaaatttgagaaactctcttgctgctcccaaaaaggttaaaaaggaaagttaggcaacgaagatcatacaaataatacagaagcattgtaaaacaaaactaggtccaactcctcttgatagataagaggaaaccttttaagatgaaagctcaactctacccagtagtttatcttcacagttcttatattgaaatgcccgacttgacccgctaataaccaccgtttatgttctgaattctcagacctgacgtctacatcctgaccgttacccagatgctccagtacgtgaccgacccaaaggagcttcgcgatgtcagccaaattgagtcgtggaagtgcgacaagagcgtgtctgtagcccccaagccctgcaatatctggcagacgtgtgcgctgcccttcaagattcccgaacagaatctgacggatacgcgctatatggagacctgtcgggaatgccctaatgtgtatccctggctgggcgatgcaggcggtacgggaatcgcgggtcgcgataactatatctttgccggtggcgaaaatccagaggaagaagactctgcgaagtagaagaggcaacaacctttcactctatccaacccataaatttcccacccttgtttttttattttgtgcctctctgactcttttttttttttgttgagattttcctctatagtgtacgcttagtaatttcccacacatgtgccagtcatcgtgatggaataatgagctgctgccttatttttttttttataaatatctccttgttccttcttctatttttctttgacctatagttcttaagcgaaattatgtcaaattgttcttagtttttaagagactaagtgcttgtgagaacatagttttttgcacgaataaattgaccacttttctaaaaactgcgttgttttaatatatttattacgcacatatgtattcgtattctcgaaaaggtatgtattttaccaatatccgaaatctatttgttaaatcatttagcgtattattcacaagtgtcatacacttagcttttaagaagcaaacctttcatagattctacatgaaggtttcattcgaaccaatttttagaaaacatattaatttctaaaatacgacttgacaatcaaaagtgtctcccaaactctagacgaaatctatgttcaattcattttcgcagcgtttcaattaaaatatttgtccaccacttgaaacgcgaaaactttttctccgtgcgaaattatggtttgcccaaaagtttgcagatgaccgggatgatgcccaaagctccgactccggcaatcccccaagagccgttcaggtggcttataaatgctaacagacaatcgataactgccgggcataaatcacgacggaatcgacggtcccgctggcgccatctgggtgtcgcgttcgtctcccaaaagtgtgaccgagtccaatgaaaacagagcgactacacacaattcaacttgcaaattgcatttatgcattattcagcggaactgcaagaagcggcccaaagtgcaatttacaacttttgccagcaatatcaactatgtatttaaaa

SEQ ID NO: 30563 - DNA, 405 bp, DROSOPHILA
atgcggcccatcatcattactgttttgtccgggccacaggtgtacatcgtacaggtgcactgtcgtagcaaaaacatacctgacgtctacatcctgaccgttacccagatgctccagtacgtgaccgacccaaaggagcttcgcgatgtcagccaaattgagtcgtggaagtgcgacaagagcgtgtctgtagcccccaagccctgcaatatctggcagacgtgtgcgctgcccttcaagattcccgaacagaatctgacggatacgcgctatatggagacctgtcgggaatgccctaatgtgtatccctggctgggcgatgcaggcggtacgggaatcgcgggtcgcgataactatatctttgccggtggcgaaaatccagaggaagaagactctgcgaagtag

SEQ ID NO: 30564 - protein, 134 aa, DROSOPHILA
MRPIIITVLSGPQVYIVQVHCRSKNIPDVYILTVTQMLQYVTDPKELRDVSQIESWKCDKSVSVAPKPCNIWQTCALPFKIPEQNLTDTRYMETCRECPNVYPWLGDAGGTGIAGRDNYIFAGGENPEEEDSAK

SEQ ID NO: 30565 - DNA, 2459 bp, DROSOPHILA
gtacagtttacacggcttcgccagaagcctcccgaccgcagatggccagcacatgctaatagcgccacatctctcgtttgctcacaccaaacgtagtttctctggcccataaactgactgccaactaccaacttctgtccatttgtggatgcctcccgttgagtcgggacgtggacggtgacgggatgggcacggagatcgagaaaaccggcaggcaaccattcaggcagcaggcggcggcaaaaagtggcaaatgtaatttaataaattaattacatcaattagctgctgcatttttattgaaattgctgtaaatattgggctagacaactcgagcagccagcagtaggcattttgcgcgaatttatgggacatttttcatcgccgttcgtcggaggagagtctaacttatggcgaatttatgcgacatggtccggaggagtgtactcctggcacgggaccaaatgaaggcgctttgtattgattagcgttcgctgatccagacaagtggcccactgtcttgcgggccggaccatgtgatctaaaacaattttccagcggcagaccgcacggagcgatatgtgcactaagtcaagttccccatcccatccgcacgccggagcagatggcttaatttacggtgtcgcgcgcggacgtgactgaactgctaccacctccatctgcataatcacctggttactgaccactggacactggacactggctactggccactggccactgaccaccggtcactggaaatgaccgaaacaattggcgaccgcattcggtcgagcatttgaacagtggctgcatattgatggagcgccaaatgcactgctggaaaggtgcattaggtgattgatttgagcttcggcctttgctttgcttttcgggtcaatgtcaacaatttttttttttgggtgggacgcactgtccgaatcttaagcagtttgtataaaatcgggccccgccgccccaacgccacatattcatcgcaatggcgctcagctcgactgttgtctgtcttctcgccggtttgcttctcctcagtctcgcgcgggcagatgtgggcgtggccacgcagcgtcttcgcccagcggatcagcagaaatcggccctgtatccagcagccggctttaagccctctagacagtttggccttccggcaaccgaccagcaaccgaaatccgctcgccttgtggccaacagtgaagcgcaggaggatctcgacgacgccgccgaggaggtggaggtgacgcaaccaaagacagtttctgtgccacgcctagttcctgctccagggccagcattaccggtaactcccaccatcgcatactatccggccgaagccgtgggattcgtccagccatcaactttcgccaagttcatcggtggcccacagcaggctgcaccatatgtagctgcgtcgcagtactaccaagcctattttggatagacacgaacagatacagatacagataaagatacagaatacattaaaaaaggatttataacgtcttagttaacttatataactttaattgttaaacctgacctgttccacacagacagtaatcccatacatatgtccaaacatacatatgtccatctgtccgtatgaacgtcgacatatctgaaattataagagcgataagattcaggttgtttcagagtaataacaataaatatacaatatacaatatacaatatacaatacaagtgtttcaatttttctttaattggtacatttatcttatctcccgttgatatgtgtttctgttgtataacataatttaccatcctgatcaagaatgttttcgatctagtttttgttattcgctctaaaaaactccatttgggcccaaataaaatagctaactgcttacgaaagaatctgaatgccccttattgatgtttttcccatttcgttacttatattttggtgttcaaaatacaagaattacacagtgattagtgattacctagtgttggcaaattcgagaaataaatgatcaatgatcaatgtctagttcgaaattcacatcaaatatattgtggtttattgaagaaaactttcaacatatgagtggcttagaatgagtacatttgttatttgcgtagcatgacaaccctcggctatttgttaacaaatcctactcgtatcctgaacataggccagatggttagaagtgcattgcgtattacattttaacttcgatcctagcttgtttgtaaattaagaagtgctaccactaaaattacttctaagttgcctgtggtacttgcgtttaattgttcgtttgatcattcgaatagtgcgatcggaggccattcgacgaagccatgctccatcaaaacgccaaatcctccgaagacagcaattctggctgcttgccgtttagatagaggtggctcgggggggggggggggggcagctctgacaatgagtgagcaac

SEQ ID NO: 30566 - DNA, 459 bp, DROSOPHILA
atggcgctcagctcgactgttgtctgtcttctcgccggtttgcttctcctcagtctcgcgcgggcagatgtgggcgtggccacgcagcgtcttcgcccagcggatcagcagaaatcggccctgtatccagcagccggctttaagccctctagacagtttggccttccggcaaccgaccagcaaccgaaatccgctcgccttgtggccaacagtgaagcgcaggaggatctcgacgacgccgccgaggaggtggaggtgacgcaaccaaagacagtttctgtgccacgcctagttcctgctccagggccagcattaccggtaactcccaccatcgcatactatccggccgaagccgtgggattcgtccagccatcaactttcgccaagttcatcggtggcccacagcaggctgcaccatatgtagctgcgtcgcagtactaccaagcctattttggatag

SEQ ID NO: 30567 - protein, 152 aa, DROSOPHILA
MALSSTVVCLLAGLLLLSLARADVGVATQRLRPADQQKSALYPAAGFKPSRQFGLPATDQQPKSARLVANSEAQEDLDDAAEEVEVTQPKTVSVPRLVPAPGPALPVTPTIAYYPAEAVGFVQPSTFAKFIGGPQQAAPYVAASQYYQAYFG

SEQ ID NO: 30568 - DNA, 3439 bp, DROSOPHILA
gtaagaattttgtattttaggaaatacttaaagtattttcactcgatttaatttttggcgcacttttcaaacaataacggatgtcactcaaatgatttaatggttttcaactttaatgctcttttttgttgcttaactcacatattgattttgttttattatagcaaatttcgtataataaatgttagaattacacgaacactttacttttcgatttgaatttgtttgattttaatccacctcactgaattgcagattttttcggcgtgctgttatttatccacaaaataataatttttaggcagtaataactaacaattagcgaatatttgtctttagggaactttgctaattttcatgttcatgctaatgttagctattggttttgaattttatatttaatattaaaaagttaaataattaacttctgataaatattttttaatatagcttgtatttttagaactcttattaattcactcaatcacttttgataataaatttcctcacacaaaccgttgcttacaaatatttgtattttatttcgaaacttttaaaattgaattatttattgaattaaaatttattaatttccaaattactatgttttaatgtttatccaataaatatcatttatgacacctttctaactcattctcattgatttcacttaatacatttattagtaatcatcaatttgatttatattcaaatgtgattaaatgccacttgacacacctgattagaaaatttcattttcttagagcttcgaccgcagcctggtttcttcacaagctcgaaaaaccaaataaaagaaagctgccgataattaacaatttccagcgaattgagcacaccggcaaagtgctaagtttgcatttcggcagtgtaacacagccagaaatgaatatccgccaagcgcagcagaaaaacctcaacttcagcagcggggccatggcaaaaccacaatccactctcaatctccagctttgtgttttcgtttccatatttattgcgatttttgttttgatattattaattttacgtttcaaacttaagcaaaatcactaagccagctcggggacgatcatctcttcaagctttcagcggcgactcgttgaatccgcgagccgcgtaatcggaaggcgccgatcgatcggagaccttgggatagccctcatctccgggcacgcactgcttgcgcgagtgaatcacacgccagccgcccttccgggtccagtccttaaataaaagggttatacattaaactatgcatataatatatatatattaaacgatgaaacacagctaatttgttgaaagaaggcgatcttaagtatatgcattaagtataaggtctttagagcaataaaactaaaactatctataagaatttccttaatttatagaaacaaaaatgtaactttcaagactatcacaacttttaaattcaaccgtttttacagctcttaagcgcttaaaaatacaaagcaacaatacgagtaataccataggttcattataaaaataacttttataacattataaagtaagtttgaaattgataacaattcttacatttaaaatatacatgatatgttagttacatttgaaagtttttggaattttagccaatgatgagcagtttttatagtacatgggcatacacatgtatagacatatattaaattctttacgtgatggttttgatttaaatttattatgttttaagactagtatagttttaagatagtgtagtggatacgttttgccaatttgcatataatgaaaagcgtgggcctgaagttattttccctatgaacacacttttctattgcaactaactatagttgagatacattaacttccgataccatgcattagtacatttggaatgacttatagtaatagccaacttgaatcctcgaccaattacttacattctggttgtacttgaagtagtaggcgccggcgtagattccggttagggcgagcagagcctttccggtccagaagcgcacggtgtacgcgcgctgaaagccctgcaggcgaggaaacggatgctcctccggtcaaaaacttgattacataatacccacgacaacaactcaccaggacgggttccaaaacattgcagaccttgtcgaggggagcgcggtagaagcgcttgatggggttgttcagctccagctccagggcgggcaccttgcggggtccatggtgcagctcctggtccttcagccactgtttgcgccaggcgcgctcctccggcgacatgccgatcaggcgctcacgctcccgcaccatgcggcccgcaattaccatcggcttcacgccgcccgtttccgaggcaccaccagctaccattttggaccgtttgttttcgaactttgcgatgtggacgttggaaaacgccaacaattgtataatttaatcggacagcgacaatggaaaaacagaacagctgttgccgccagtgtgaccgcactcttaaatataccagaaactgcgatggtatttttaatacccattactcatacagtggagggtatactagatccgttgaaaagtatgcaacacgtataaggctgcgttagtacccttttaagctaggtcaatacatctgtttataatttgttgatgaatttttccgggattatttcttaattaggactacatacgcctataagcacggcatttcgaaacccgctctgtgaacaaccgcaaaaaaaaaaaattattttcaaaatctcttttgtgaattttatgttcatagttgcacccacttttatgccattatttcaaaaactgtgcataatttattaatgcacttttcccgaaatttccctaaagataaatgaaatcatgttcgaagacaaaaagagtcaagtaaaatttcattactagattttgtaatactaaaaaatttgtttcaatgcatttcttatggcccagttaccaaagtcgccgggcactacaaaataatattttagactcattagagtgttcctctccacggaaatctttagtaaaaggcgaaagatttattcgacaattgaagagaaaccagagtgactttaaatcggaaattctttgccgtaccactaagaaattgcttgaacgtgttgggaatcataatgtttgttaaacgtaagcaacccttaaattatgtttatagtagaaatattcctcatattaaactactatatccaactatgattttatttattttattttgcattaatttttcgaatttatacgaatgtgtgaatatggcacccatatatagatttcgatatagtagtcagatttataatatatgttttcaaaaagattatatatttatttataataaccaatgcatgttttattaaaatcctggcagcacaataataattaaaatcaactactttgcccattttgcgctgctttttgcctg

SEQ ID NO: 30569 - DNA, 671 bp, DROSOPHILA
tccgattaaattatacaattgttggcgttttccaacgtccacatcgcaaagttcgaaaacaaacggtccaaaatggtagctggtggtgcctcggaaacgggcggcgtgaagccgatggtaattgcgggccgcatggtgcgggagcgtgagcgcctgatcggcatgtcgccggaggagcgcgcctggcgcaaacagtggctgaaggaccaggagctgcaccatggaccccgcaaggtgcccgccctggagctggagctgaacaaccccatcaagcgcttctaccgcgctcccctcgacaaggtctgcaatgttttggaacccgtcctgggctttcagcgcgcgtacaccgtgcgcttctggaccggaaaggctctgctcgccctaaccggaatctacgccggcgcctactacttcaagtacaaccagaatgactggacccggaagggcggctggcgtgtgattcactcgcgcaagcagtgcgtgcccggagatgagggctatcccaaggtctccgatcgatcggcgccttccgattacgcggctcgcggattcaacgagtcgccgctgaaagcttgaagagatgatcgtccccgagctggcttagtgattttgcttaagtttgaaacgtaaaattaataatatcaaaacaaaaatcgcaataaatatggaaa

SEQ ID NO: 30570 - protein, 167 aa, DROSOPHILA
MVAGGASETGGVKPMVIAGRMVRERERLIGMSPEERAWRKQWLKDQELHHGPRKVPALELELNNPIKRFYRAPLDKVCNVLEPVLGFQRAYTVRFWTGKALLALTGIYAGAYYFKYNQNDWTRKGGWRVIHSRKQCVPGDEGYPKVSDRSAPSDYAARGFNESPLKA

SEQ ID NO: 30571 - DNA, 3198 bp, DROSOPHILA
attgtctatgtaggctatgttgtgagttctaagtgataatgtaaattattattactattatgcatttaacaaaataaataatcttaccccacaattaactcgatgttttcgccaagtaattcgtccgtgatttcgttgaacttctcgtagtcctgtggaaagtcgttgaaatcgaagagcaggaggatcctccgcctggcgactctcaagctgcaaggaatattccataaaatgtgatggttagatgataaggtaagtcacatacgtagttgcgacattctgaagctccagggccgcctgtagaccatttagccattctccatcctcgcaggctgtcttattcacaaactggaagaattccagcaagagctgccagctgcaaagtcttggttcaccaaagggcagcacatttgggtgggaagcatcctcagtttttatttcatcggtgtcgcaacccacgaggacgaaggacacgtagtccttcctatcgcacacgatctgcaattgtttcagttagcatatttaactgagttcccaattgtatttcacacaccttgtccttaagaatctccgccacacattttgcggacttcagcttcacttcttcggcggcacatgttcgcacatccagtacaattataaggcattcctggaaatcaaacaatggagataccttaacattaaatgcgattatttgtgaacctaccttgttagaagccatcaaacaagtttatttacctaaattcagcgactatgtttttaaatttcacaacaataataccattcagtcgataacagaaaacaccggcggcttactgacctaatgcactaccacctatcgcttatcgatatttctagcaccgcgttgccaacttacttgctaactgttacttttcataaaaacgaaatgcaaaattttgttttaattataaatagtcaatatatttggttcgtgctcaaaatactaataaaatagtaagcaatagttccccatatctccctatgcctttccgtaggtctgcagcttttccagatactccgcattctggctcaggtgattgaatatcaagttcgtatcgaggacattcgtcgcaggacctccatattccgcaggcaaactttcgtagccaaccatttcgcgcagcttgctcagatgtcgcccatcgtgggtaaagatcttttaaacgaagcatttttagagtgaacaaattaaatccttatatttttttttaccttttctttgaactccttgttcatgaagggcataaacaaagtggaggttacgtgcatcaggaaacctcgttgtattatatgcacgatgcgctgactgaagggcagaactccgttcttttcgtttaccaccttcataaacgccggcgaaaattgcctgagaaaatttcgatttgtcctggaatttaataatcggaaaaataaaaataaataaaaatagactattgggaaaagaaattaaagaaaaataccatttttcaaaaatattttagattcaattcacaaaatcattgaataaatttaaactgtaaaatatacttttaaaaacacaaataatacttgaaatgcgttttcatcttactatacatactaagtaatactactaatcaagataatattgagaataaataagcgtaacttttgtgtaataataattttataggatataacacacccttgaagatcacaaatgaccgtaatcccattctgttggacgcgcgggagcagcagcagcgactcgaagatcaggtcgtccatctcgacgagactctgcagatagtcgggatagtcctggaacccatccaccgtcttaaagacgaccagcacccgtccactgcgatccgcctggggcataacatagcgacagtgggtgccgtagaagagctgacgatagtgctcaatgggatgacgggccacccaggtgggatggcgtcgcttgaactcatagtagtcgtgtatggcctgataggccttgattgtgtcccagcgcgtgtagtgcagaaacttggtcagcagggtgtcctcggtgcccactcttaggtcctcgcattctgaaacagtttcatctggctgatcgaatcgaggaattcacacacagcatttagcttactctccaccagctgcctgagttgctcaattttgaaaatctgctcggccgtgtgatcgacacgggcggtgaggaaaagcattttgggtttaggctttgaattttgaacgaaatatcgtccaaaggtgttatagaattttgatcggttgcttttcaagagccagaagtttcacatttacacactcaatccgttaacgatccgcactcgcaacgcaaacaacgctcactgactaaagtatccatgaaatgcgatttggtgtagatggtttatttgctttataaccggtgcgtgctcaaattgctaatggttccaaattgcctagaaatacatatctagttttcagcttgaacttggcttctatggtgatttattgcttttagtatgtaaataaaatcttttagaaaagtaaatcgatattataataaacaaatctaataatataatttctttaaaatttttttaaatctttacgaattctttcttaaacgaatggtatttaatcaatgctgcaaaggcctcttcttcgctgaagttatcaacttgacctaaccacgtatcttagccacaattcaattatgacggaggtgggtgggtggccaaaggagtcgggtgttgagaaaaagtcaagtcgaaaagcggaaaaagtagtcaacacgcgaaaggaaactataagtacgataattgaagaaaatgccagctacacacgactactacgtgacttaataatgccccttgtctgctcatactaacggccacaacgtgttgcttcatttacagatctatataatgcaatatacattatatacaattacatattcagctatatactacattaaagatatgaattacatatctatctacatatatactacattcaagatagttttttgtttggctcttttatttgttatttcactgcatactggaataagttggcctgtaaagaactaaatatagttatacccggtaaatcaaaaaaaaaaatctaaagtctgtctggtgcctattgtttaatgcatttaaacattttgttaagccaaaaaaaaaaaaataatattaaaataggcttctttgttttttt

SEQ ID NO: 30572 - DNA, 786 bp, DROSOPHILA
atgcttttcctcaccgcccgtgtcgatcacacggccgagcagattttcaaaattgagcaactcaggcagctggtggagaaatgcgaggacctaagagtgggcaccgaggacaccctgctgaccaagtttctgcactacacgcgctgggacacaatcaaggcctatcaggccatacacgactactatgagttcaagcgacgccatcccacctgggtggcccgtcatcccattgagcactatcgtcagctcttctacggcacccactgtcgctatgttatgccccaggcggatcgcagtggacgggtgctggtcgtctttaagacggtggatgggttccaggactatcccgactatctgcagagtctcgtcgagatggacgacctgatcttcgagtcgctgctgctgctcccgcgcgtccaacagaatgggattacggtcatttgtgatcttcaagggcaattttcgccggcgtttatgaaggtggtaaacgaaaagaacggagttctgcccttcagtcagcgcatcgtgcatataatacaacgaggtttcctgatgcacgtaacctccactttgtttatgcccttcatgaacaaggagttcaaagaaaagatctttacccacgatgggcgacatctgagcaagctgcgcgaaatggttggctacgaaagtttgcctgcggaatatggaggtcctgcgacgaatgtcctcgatacgaacttgatattcaatcacctgagccagaatgcggagtatctggaaaagctgcagacctacggaaaggcatag

SEQ ID NO: 30573 - protein, 261 aa, DROSOPHILA
MLFLTARVDHTAEQIFKIEQLRQLVEKCEDLRVGTEDTLLTKFLHYTRWDTIKAYQAIHDYYEFKRRHPTWVARHPIEHYRQLFYGTHCRYVMPQADRSGRVLVVFKTVDGFQDYPDYLQSLVEMDDLIFESLLLLPRVQQNGITVICDLQGQFSPAFMKVVNEKNGVLPFSQRIVHIIQRGFLMHVTSTLFMPFMNKEFKEKIFTHDGRHLSKLREMVGYESLPAEYGGPATNVLDTNLIFNHLSQNAEYLEKLQTYGKA

SEQ ID NO: 30574 - DNA, 3194 bp, DROSOPHILA
ctcattgtctttgtcttttgcataatttatttatattttcattttcatcgggcgtaattcgcgctgttaaaatgaagcagcagcagcagcagcagcaggcagatgcctacatttccggctcagcaaataattacaagcttaataacaaatttaatattgctcggcctcgaaggccggtcattttatttattgtttaccctttgtgcctccttttatctggggccgtgtgcgtgtatggttgttcacctttaactgtttatattcgcacacgctccttgccttttaatgagccaacaaaaaaggagcatgtccttcgtcctgcgaccctttttgtttgccagccattgaggctccctccaacttacattcgtccttttggccttacttacacttgtcgctgtttgtcgctctttaagtcgtctgaagagctgttggccttgcaattagttgaggaccatgtcaggctttctactctttgttccgccgcttgttgcagcgccaattttgatggcatcattgcaccccggggccactccaaagttgctcacttcatgaagttcccagagagcgttacttagacgctccgactaattgccaaggcaagttcttggccgtcacaacaacaggggtaatcaagacacaaagttttgtgttgaatatggagaaatggtaatagtcttttataattcaacagcaaatgctttaacaatttttagtcttaatttttttttatctaaaatagttactatttttttacagcagaattttatttttacaaatcaattaaaaataatataaataataaatcagtcaggctagctttggctttcaacttttactgctaccactcacactaactaggaagccggaaattttgggaagctaaacttagaaacacaaaaattagactgtaaaatcaaaagaatgggtaagatttaaataaattagcaggcaaatattaagacaacacctccctgcagatgctcaaggagaccaggatatgcggctggatccgccgctctttgtgacctgtgacatggagcagtttcgcgatccaaacaagaagcgtgccgccaacgatgcctgcgaggagctggacaagctggatgcccaggacgagatcagtgtgtcgagtatcatttcggcgctattgagaccgattgagccctcggacgatcagtacaaggtgtgcgactggggcatcaatcccaagcagtttatgcccaccaaacaggcgatcattttcaaggaacagttgttcatatcgaagttgcggaatacaaattgcaagctaaatgaaaatctaaaaatcttctttgagcgggaacttgagcagattggacgcttctgtttgaatgtggaggaatcctttgatggctatgtgatcttcagcagcagcaaaatgaagaagggcaagggtatgacggaatgtggtcaccagttaaaggggaagtacgatgacaagttccttctcatctgcgagaagagatcggagttcgaccgaatcgacaatactcgggtagagaagacgctggagttgcgaaaccatgccgatttgatgctaaccgccattcgcgaaaccaaaatcaatgaggaagtgcagcgcttcaaggctcgcatcgatatcaaggatcgcgatcatgtgttcgtcctggatggcgggattatgctgctgatgcgacacctagtgtgcaacaattttgtgggcaacttcgagtactacacaatgaatttgtatggccgggtccttcgctgcaatctggttgtttccaaggagcgcaaggaggtgcgaattttctatcgcacatacaagaatgtcgtgcacatcttcacccagcaatgtttcaacgatgagctccaggatgtggccgagaccttcatgactcctgagggccggattgttctgcattattggcgtggctataactaccttttgcatgccgcctgcatgccaccgaagagaaaggaacctatcctacccaaattggaactaatgtggcgccaaaacgaacagctttctcgcaagttccgggagctcaaagccctcaattacgagaacgccaccagctatctgagcagcaattcacagctggccgattttatgcaggattatgtgctcaatctgttgcggtacaagcccagcaatgtcctagagttctccattatgtttttccagaatatgtcaaagggatagcttaattcttaattaggtaatgagtgttttcaaaatttcaagtgatctttggccagataatcctataaatacattcgggatgggcctatttagtatatagtttattttagtttgcattagagtgttaattgaattgaataaaataaaaacaatgtactgaaaatttaaatggcacgccattaatttttcgaaaattcaatatagtaaccgttgccaataagctgaactcaacaatcaggcaccccagcaacccatttctttgtttgcgcccttcaaacaatcgtccaaaattttcaattttagtctgtgcccaacaccaaacgaaagtcattcgtatactttacaatccacgtgatattttgatattttcacaagttagtcgtaagttgagcaataatgaattgtttggagaagaaatcgccggaggcaaatccagagtgtaagggcaggacgattgagttaaatccgggatctgcttgcccggctccgctaatctgtcccctgccgacggaaccaccctcccaccgactgaaaaagccaccgcagcccgccctggtagccttgacacctcatcccgatgaggccgcccaacagcacctggtccaaaatattatgggttctgcccaagagcatcagaagctacaggcggatctccaagcgggagttgaccaacagcagatgcaattggccgatatgcgagctgaacagtacaagcaatcgaacaagccactcagaatggaggaagtgcagtttgcggtgagatgagttaattgatactttttcgtatatatggtaaacttttatgttaattacatacgtttacattatttgctttctttctgcacagcgttccatggaccccgaagcagatgacttgcggaatccaccgtgctacttgccccaacagggcgatgagttgcctcacaaggaccagctgatgcccatgggtccgattggtccatgggcatcgggcaaggtggattggagccccatggccggc

SEQ ID NO: 30575 - DNA, 1194 bp, DROSOPHILA
atgcggctggatccgccgctctttgtgacctgtgacatggagcagtttcgcgatccaaacaagaagcgtgccgccaacgatgcctgcgaggagctggacaagctggatgcccaggacgagatcagtgtgtcgagtatcatttcggcgctattgagaccgattgagccctcggacgatcagtacaaggtgtgcgactggggcatcaatcccaagcagtttatgcccaccaaacaggcgatcattttcaaggaacagttgttcatatcgaagttgcggaatacaaattgcaagctaaatgaaaatctaaaaatcttctttgagcgggaacttgagcagattggacgcttctgtttgaatgtggaggaatcctttgatggctatgtgatcttcagcagcagcaaaatgaagaagggcaagggtatgacggaatgtggtcaccagttaaaggggaagtacgatgacaagttccttctcatctgcgagaagagatcggagttcgaccgaatcgacaatactcgggtagagaagacgctggagttgcgaaaccatgccgatttgatgctaaccgccattcgcgaaaccaaaatcaatgaggaagtgcagcgcttcaaggctcgcatcgatatcaaggatcgcgatcatgtgttcgtcctggatggcgggattatgctgctgatgcgacacctagtgtgcaacaattttgtgggcaacttcgagtactacacaatgaatttgtatggccgggtccttcgctgcaatctggttgtttccaaggagcgcaaggaggtgcgaattttctatcgcacatacaagaatgtcgtgcacatcttcacccagcaatgtttcaacgatgagctccaggatgtggccgagaccttcatgactcctgagggccggattgttctgcattattggcgtggctataactaccttttgcatgccgcctgcatgccaccgaagagaaaggaacctatcctacccaaattggaactaatgtggcgccaaaacgaacagctttctcgcaagttccgggagctcaaagccctcaattacgagaacgccaccagctatctgagcagcaattcacagctggccgattttatgcaggattatgtgctcaatctgttgcggtacaagcccagcaatgtcctagagttctccattatgtttttccagaatatgtcaaagggatag

SEQ ID NO: 30576 - protein, 397 aa, DROSOPHILA
MRLDPPLFVTCDMEQFRDPNKKRAANDACEELDKLDAQDEISVSSIISALLRPIEPSDDQYKVCDWGINPKQFMPTKQAIIFKEQLFISKLRNTNCKLNENLKIFFERELEQIGRFCLNVEESFDGYVIFSSSKMKKGKGMTECGHQLKGKYDDKFLLICEKRSEFDRIDNTRVEKTLELRNHADLMLTAIRETKINEEVQRFKARIDIKDRDHVFVLDGGIMLLMRHLVCNNFVGNFEYYTMNLYGRVLRCNLVVSKERKEVRIFYRTYKNVVHIFTQQCFNDELQDVAETFMTPEGRIVLHYWRGYNYLLHAACMPPKRKEPILPKLELMWRQNEQLSRKFRELKALNYENATSYLSSNSQLADFMQDYVLNLLRYKPSNVLEFSIMFFQNMSKG

SEQ ID NO: 30577 - DNA, 2621 bp, DROSOPHILA
aggaggaaaatcaattaataaataaatgcggccacaattaaattccatttggcgatacgcccgcgtcgcttgggcgcccaattgattgcattttaaatgtgtttgttcagcagcagggggatattttgcattcggccaaaatgcatgctgcatttaatgcaacattttttgctctcagctttccaccaactgaaactttttcaaacgcataactgctgtgtgtttgcgcgtgtcctggcagatcattttggtaattatcgtctgcaaaaaatgtttcactgaagagggcttaaccatcagttcgagttgtgcaaccgaaatgatggtataatgttgtaagaggattaataatgcgtttcagcaattaagagtggtaaataaagtgacaaaaaatcatacagcctacaagcaaagggatttaaatagttaaattaggtgcattttatcacttttaaaatatatgaaaatggtgttgtagcttttaaatatatgtaagatgctgattttacgattcaataattaaccgcttacttacttaatcgcgttttaatttggaaaccttgactatattgtacagtaaatattaaaatattataatttattcaattgaccaaatgagttttttcttttattcaagatcctcaggattttacattcttattaaatacctcaatcttaatgaatgtttaatttcactcgactttaagttcgattcgaacaatttggctcaggtcaatagatttaatgacattacaccggcgatttcaaagcaaagtgtaggccgcaccgccaagccaaccaaccacaaagtgcaattgaggcctcgtggtggctgcttgtgggttttaggttggtagcggtgccaattaggatctagaagtggtggggtcatttcaaaggagcaggctccgcttttccgctcggtcctccgtttgaaattcaactcgaaaaatgaaattgaagtatcaaaagaaacaccagccgctcgacccaattaaacaagcacttcgaaagtttgcacgaggtgagtaatgatacaattaaggcgcggtcgatctcatccaaatatttttagggctattcaaatttgaacaaatcgaatatgcttttaatgaaatatttttctccaacagttcttggcaaggccttcttatacctcggcaccccacccctgtgtccactccaccagtccagtgcgttgagcctactgcactgtcactatttaggcgtctgtccaatctgcgctctgagctcattttcaggaagcgggacatcatgttcgagtccgtgttcttcgtactgcggcaattctacaactttgtctgccccatgcaaattttctatgaaatcgaggatgctgaacaagtaggacgccaagaggagtgggatatttggaaggaactttgagatttgacggcatgacaaccaaaccaattgattaatggcgggctgggcggaaactgttcgcaataaagagatctctcgcttttcctcttaagtcacccaggtaacaccactccgattcgcacataattttcgcataaattgtcaaatgtttaaagccttgccactgagcaacagccaaggtaacctaagccttcggattaaatttattgctcctagctcttggttttgtaatggttggggtgataatggtgtctgttatcaggcatcattgagtgtcattgaaacgccagtaattgcgtattaaaattatacacccgggaccatttgcttaatgaaacgaagccgtgtctgaaagctaattaggttgtcgtttccctggaatttatgcaaagtaattgaagaaatacaccgaagggagtagtagtgggtatgggaatagttctcgtagtctctgatcaggattttaattttccactcgaacgaagatctttagttagcacatatctgttgatgcattacggaaggtgtcaccatcaagctcgctgctttgcaattcaaatgtggtctgtgtggctcacctttgacccccattccgattcccatttcccaaacagcgcctttcaataagccggtccgagttgcaggtccagccgtcaatctgccgattcgcattcaatttgtttagcttgtcgaaccacccacatgtcgaaaaggccttgacatgttttccgcccttttgccagtcttttctcgccgccccaacagttgacacaatttgacttttggcatccaaacgttcgaacaacgccctgaacttttgaactaatctatttgtatttgtttagtttgctagagataaagttgccattgtgttgctgagcaatcgtgtgtatgtatgtttttcaccctcgggcaggtgcaaaatatatatgtaagtgtgtgtgtgcgagtgtgtatgtgtcaagtgaggcaggtcgattgagtttccataatggctttcttagtggcgcagacccatcagagaggaacaagttgattatgataagcaaacaaatgctgctatgttcatctactcatctattttcgctatataaaagcttagtgactggcattaaatagtttaacataatcctttatatttataaaatattaaaaataatattaataattaatagagcatacttaggaaatactatactataaactaagttact

SEQ ID NO: 30578 - DNA, 512 bp, DROSOPHILA
aagcacttcgaaagtttgcacgagttcttggcaaggccttcttatacctcggcaccccacccctgtgtccactccaccagtccagtgcgttgagcctactgcactgtcactatttaggcgtctgtccaatctgcgctctgagctcattttcaggaagcgggacatcatgttcgagtccgtgttcttcgtactgcggcaattctacaactttgtctgccccatgcaaattttctatgaaatcgaggatgctgaacaagtaggacgccaagaggagtgggatatttggaaggaactttgagatttgacggcatgacaaccaaaccaattgattaatggcgggctgggcggaaactgttcgcaataaagagatctctcgcttttcctcttaagtcacccaggtaacaccactccgattcgcacataattttcgcataaattgtcaaatgtttaaagccttgccactgagcaacagccaaggtaacctaagccttcggattaaatttattgctcct

SEQ ID NO: 30579 - protein, 43 aa, DROSOPHILA
MFESVFFVLRQFYNFVCPMQIFYEIEDAEQVGRQEEWDIWKEL

SEQ ID NO: 30580 - DNA, 2881 bp, DROSOPHILA
aatattgcgaaaaacaatacaaacgcacagtgcattttccaactgatttgaaaatccaaagttgcccattagcaaaccaaatacgcgcagttgccaccgcaaaggggacgtggcatgggcaagggcagggagcagggaatttcgactttggcgccacacgaaaagccgactgactttacatgggaaattggcaaaagccaagccatgaaattgtacaacacgattttcacatttcgtacatgacaccatttcgttttcgactgccgagaacagggacagtggcacacatgtgtgtaaggcgcccgtgtggctgggttgcctagttgacatgcctgtgtgcgtcgaggaaaattcacttatggaaatcgaagattttcactgcgccctccattctttttcgttttttttttttaagggaaagcgagggaaaactaaactgatatgaagtatcagcattcagtattcaatgtaaatcctttaagctgcaagtgcgttcgaaaggagactcttcgccacgtattcatggattcctggctgactgacaggttgactgcgcctccgagtggagcttctgccccatatttggtgggttctgcggggaaaagcggaatgcggtctgtgtgatgaaggcagagaggacggtgcctatatccaaccagaaaccagtaaccagccaagagatgtgtgtcaagtggcgcagcagagggtgaacttagtacttatcatcatattcatgctgagtacaatatcacggcaacataagcccaatatatctgcggaatcagcgttattcgccattagctgacaagattatgttgtttatttttcgaaaaggtgttccctagaaatttctatcaatgacttttttgaattccattaagctacatatacagcattacagcaatacatttatacacataaacatacgcaagaatacggcttgaccatgttcctacaatgtccttcggtgatgcgaggttctaaacacttttctcagcacatgagcgatttcagttctggaagccatcagaacacggacaatttcagcgattgttggttggaatccaatagtagtcaggattcgtatttcggtcaatctagtcgactgaaacttgccctcctggattacaaacagttcaacgctgcaaggactattcagtgtcatgtgaggggatttttggccagaagtactcttaaaaggcagatcgatgctgccaccatcattagcaagtggtggcgtggtttctgggtgcgacactcaaagttctcctttatgcaacagctgttacagcagaggatcatccagtatcaccacgatatggccactaagattcaggcgctgttccgcggatggatgactcgccagtacttccaggacttccagggcatgaagtcgctccgaatacagtatgtggaagatatgctcagttcgctttacagaaaggtccacagaatgcgaaaggaacatatgctaccaggaatttatgcattaagggaatctgagtaagtccttgaaaatcctttttccttttcacactttaattgttgttgagtcttattcatagtctgctaagtaagatcgaggacctttctagtacctttggctaccgctttcataacggccgtgtgcgggcagccattgcaatgaagcgatccttcataaacgaccggcgacatgagttccgaaagggaaatacttattccaaagtgccttatccgggaccctatatagaaaacattaacgacttagaatttaccttgccaaagcgaatgacaccacgtttgcagcgtacgattctggtatatgacaaggcaatgagagataagaatgtggagaaggtgtacatgaactattcaaccagtaagtttgacaccatatagttgctctttacgataaccaatatctatttatcactgcagaacgtcgtatgagcatgcatgtcatgcgagagaatatgcgaaatcgtttttgcaaagattttgtaaagcgtttggcaaaaaggaacaagacacgaaacgcacaggatcgtaacattaaatactatcttgatgatcttctaacgaccgctgatgaatataattgtttttgcaagccccaagtaaaagacgatagcttgtgccaataggttgtctcagtaattaactttccataagacaccgagagctgggaaaatctattttcacattcgatctgttttttattatgggctcttcaaattgtgaacctgtattgaaaatagtttatgcattagcatgcaaaataaatttaagttacctacgagtatgaacaactttaaaacaattttacaaataaatatatattcccttctaaaaaatctgggcaaaaaattgatgctgactttcattcttatgcacaagacaactggcagccattcagatatagcttgaacatctgtcccaccttccatttgaccattcaaagtgcccgggggaaacggacaaaatatttccatttcttactgtcatcagtcacaaaatttcagaaattcctcgacataaaactgattttgtccctcatctgaagacgaataaagcagagcgcttaaacttttttaatgtcaaggcaacaaaaattggagaaaaacgaattccgttctcctttgtgtggatgactgtgcgtttttagcagctcgcaatttatttgcaaacatttattatagttacttttgttttattcgctttgagtactttcgcgttctgagcgatggagatggcaaaaagtaggggtcacttttttatgcggcattgttttatggtcgcttcgtggctgaaaatgtaatgccacagccataaagaaaatccaacaccagccctgggctgataagtcctgtgagagaagaagccaatccaagcttggaaa

SEQ ID NO: 30581 - DNA, 819 bp, DROSOPHILA
atgagcgatttcagttctggaagccatcagaacacggacaatttcagcgattgttggttggaatccaatagtagtcaggattcgtatttcggtcaatctagtcgactgaaacttgccctcctggattacaaacagttcaacgctgcaaggactattcagtgtcatgtgaggggatttttggccagaagtactcttaaaaggcagatcgatgctgccaccatcattagcaagtggtggcgtggtttctgggtgcgacactcaaagttctcctttatgcaacagctgttacagcagaggatcatccagtatcaccacgatatggccactaagattcaggcgctgttccgcggatggatgactcgccagtacttccaggacttccagggcatgaagtcgctccgaatacagtatgtggaagatatgctcagttcgctttacagaaaggtccacagaatgcgaaaggaacatatgctaccaggaatttatgcattaagggaatctgatctgctaagtaagatcgaggacctttctagtacctttggctaccgctttcataacggccgtgtgcgggcagccattgcaatgaagcgatccttcataaacgaccggcgacatgagttccgaaagggaaatacttattccaaagtgccttatccgggaccctatatagaaaacattaacgacttagaatttaccttgccaaagcgaatgacaccacgtttgcagcgtacgattctggtatatgacaaggcaatgagagataagaatgtggagaaggtgtacatgaactattcaaccagtaagtttgacaccatatag

SEQ ID NO: 30582 - protein, 272 aa, DROSOPHILA
MSDFSSGSHQNTDNFSDCWLESNSSQDSYFGQSSRLKLALLDYKQFNAARTIQCHVRGFLARSTLKRQIDAATIISKWWRGFWVRHSKFSFMQQLLQQRIIQYHHDMATKIQALFRGWMTRQYFQDFQGMKSLRIQYVEDMLSSLYRKVHRMRKEHMLPGIYALRESDLLSKIEDLSSTFGYRFHNGRVRAAIAMKRSFINDRRHEFRKGNTYSKVPYPGPYIENINDLEFTLPKRMTPRLQRTILVYDKAMRDKNVEKVYMNYSTSKFDTI

SEQ ID NO: 30583 - DNA, 2840 bp, DROSOPHILA
agtcacaagtccactgggaaaattttataattcctgtcgaataaaaactcttgcagtttcctcaagtatttactggaaaagtgacaccaaaggcaaggatacatgcggttgaaaacattttaaattagaatcgtatcgaataaacatatattggagactaagtaattccatgtataatttgcaatttatatggtaacttaacgatttttcttcctataaaagtctataaaagtacttttattccatcactctatttttgtcaccaaaacattgcaattaaaattacatctcaattacacatcctgccttgcggtaccatttaaaaccgacgtatggtcgctaggaatatccaaccagaaccaccacgcttcgtcgaacccatgtcctctcagttacatttgcacagttgaccatgcgtgggtttgtctactagatcctcacatgcagacaccctcttacatggcctctggtccgtcgggagatattgtaattgattgtctccgcctggatgaataggagttggattgaagtatcatggaccggagtggcaaaaactttcatcacggttcgttattcggcggatagaaatttgcatcgccaacggtccgagttaaaactcgtggtagaagtaatagaattatgaagttgttctgaacagtatgcaatctcgtactttattttgtaacgcttacttgattggttgtgtcacagagaacaccaatagagtaatttaatttatatattcccacaacatgccataatatggtatatatgattgaagatcccggctaagggcttccaaaatgtagttcacttcagcatcagggtgccatccactctctcgttccgatttagccagctttcattttaggccagatatccaaagcgtagtctaacccgagggcggcgtcgatgagattgtcaatagctgtcagagcgaaaaatcgcctttgctccctgggaaacccaatccacttcagttccttttccacttcggcaccaaacactcgattttgtgtctgctccagggccaataactatacaccccacccaaaaaaaaaaaaaacaatagtaaaaagagcacacgtttcggaaaacctaaaccaagtcaagatgtgtggtggctgggcctgtgcctcctacaatatcgcctgctgcaatccccgcctgtcgacactgcgattctctggccgctgtttcgcacccacgccctgcggtccatgtgatgactgttccatttacggcggttgctgcggtggctgctgcgggtgctaggtgatctctgacctggagtagccacagagttgggtggagagtccggaattcaactatcttgaagtaggccttgggaactgttggctgtcagccatgaaacaaatatcattcagtcccagtccagtccttgtcggaacaacaaccttaaacgttcaccggggtaagtttcatttatgcttttataaaattttatttaaaaattttatttttaatcattcacatttccatatagttcccacatccgtttcctaaccatgtgtggtggctgggcttgtgcctcctttgacctggcctgcaataatcctcccttgtcaacactgcgtttcaccggtcgggactttatacccacgccctgcggtccttgcgataagtgttatgttctagatactagccgcaagaagaacaccaacaactgctatgttccgcacatcctgtctccactggatgcgcagctctgcacactggcgagtactcagaaaaaaaaggaagacgaataaacgccaggaggaaatgcggtcttatactactaaaattatcagtgtagatcttcttgtaccagccatttccatgggaaaccaataaaaatttgagggactaatactgactaagtaagtttgttccttagttagagatcttgtacctacgctgtcgcgcctaattattttcatatttttcctatcggtatcctggtcctggtaaaactgtcgacaattttagtatatttttttttaaaggaatattaaatttgagccatacaatttcaagaaccattagagaaagaattatacctcatggtatacttaggatactcaatcctagtaagattgtgctatctaggattttggtatattttcttatttttcatatacgtatcaatggaatatgaaatttctcaagaaatttgacaaatagtaaataagaagttacttgtttaagtacattaatttattgaaaagctcgaaccattgtgtaagtgaaaatgtggttcaaaccaaaagcacaaaaaaatttcacgtcgttttcttcaggaattgtcgtaccttgggtttctcagtaaaaaggcccaaagcaaccccattcgccggcacaacagcacctgttaggaggacatgtccagggaccacagggaggattgggtccacagcagcagttattatagttcatggctggcagagcgggtccgacggggccataagccagggcataggataccgatccacaagctccttggcaacacatcttcgggaggataggttataactgaaggagatattcgatagaaaatctttcggggaaattaggactactcacattttgtttaaggcaagagaaatgcttgagtaaagatttccaaaaatgttgaaacacgaaattttttcgtacttttggtttatgtactggtgaaagcgtacggagctgtttacaaaacaagtaaatagactggaatgagctgagctaagaaaaccaagcccatgccctgggaaattcttcccgaagccaacttgatgtggaaaaatttaaaaccagctagaaagccagaaaggaaatcaaagtgggctagagaa

SEQ ID NO: 30584 - DNA, 768 bp, DROSOPHILA
caaacactcgattttgtgtctgctccagggccaataactatacaccccacccaaaaaaaaaaaaaacaatagtaaaaagagcacacgtttcggaaaacctaaaccaagtcaagatgtgtggtggctgggcctgtgcctcctacaatatcgcctgctgcaatccccgcctgtcgacactgcgattctctggccgctgtttcgcacccacgccctgcggtccatgtgatgactgttccatttacggcggttgctgcggtggctgctgcgggtgctaggtgatctctgacctggagtagccacagagttgggtggagagtccggaattcaactatcttgaagtaggccttgggaactgttggctgtcagccatgaaacaaatatcattcagtcccagtccagtccttgtcggaacaacaaccttaaacgttcaccgggttcccacatccgtttcctaaccatgtgtggtggctgggcttgtgcctcctttgacctggcctgcaataatcctcccttgtcaacactgcgtttcaccggtcgggactttatacccacgccctgcggtccttgcgataagtgttatgttctagatactagccgcaagaagaacaccaacaactgctatgttccgcacatcctgtctccactggatgcgcagctctgcacactggcgagtactcagaaaaaaaaggaagacgaataaacgccaggaggaaatgcggtcttatactactaaaattatcagtgtagatcttcttgtaccagccattt

SEQ ID NO: 30585 - protein, 80 aa, DROSOPHILA
MCGGWACASFDLACNNPPLSTLRFTGRDFIPTPCGPCDKCYVLDTSRKKNTNNCYVPHILSPLDAQLCTLASTQKKKEDE

SEQ ID NO: 30586 - DNA, 6084 bp, DROSOPHILA
agagagctgtgctcagtcaataaaatgctagtggaaaattgactgatctcttgaaaattaaagaatgatcttcattattaagtttaagtctcggtgtaatatctttcggttaatttacagatgaatcggcaatcaagtgtttgctaaaaatggtctagttatatcattaaatttttattttgtgcgtaagtatttaacaaagacggaatttaaaaaaaagtcctgaaaatatgaaaatcaacacttagaaatcaacacatcataaatataacaatgccaaacaatagcatcgatgagttgtcgcagtaccgcagccaagtcgtcctggtaaagagggcgtctaaaaacttttgtaacccataacccccgcgagttaaagggcttgccaatgtctctgatattgcgattcaatgtgtccaagcaatgtgatgggtaaagtaatgatcttaaaaagaaaaaattgagattctagagtttctctctgataaaaagacgtttaatgttaccattccagacacatcaaaagcaactgtaaagcttcctgggtctggttggatactttcgaaggtttacccagtacctttcagtcatttattagactttgattacacagaaacctcgatctcgagttggagatcctgttagtcgtagaagcattccgaaagttccgagtacaaatgggaaatctgcacaacccagatagacacggctagtgatcctgataaagaatatatatttactttacatgttaacaattttttagcgaactttgtataccacttttactctaaaagaaaactacttagtcttttaacctttactacttttctgaacgaaataatatttttattcaataaaattgagtacggtttatccgaaaatatggagatattttataataatggtattttgtagatgtgtcttgtttggaagttttcacaacaaaatgtggagattatcatgtagaggtacaaagtcggagttccaattaaataggtgtttactcaactgtcacagactttgctaagtttctaggacagtcaacgtcgcatccgcgaagcacggcaatatgataagacagtagttgcattgggataacggtgagaattccttgcaggcagtcgacggtgcgaggaatctctagatggcgggaggagaaagccttggtctcctcgtctccctcctcgcagataataatcgggcatcctttgcgggatgtgacctgctgtagagcgttcatgcactttacgtaaacggggtcccgcaaaacaatcatcagcacgggcatggagtcgtctacgagagccagtgggccgtgcttcaattcaccggccatgatgccctcgctgtgcatgtaagtcaactctttgactttctgaaaggcgtaaaaagaggacttaagcatggggaaataattccaaaaaagtatcttaccaatgcaccttctaggcaagtggcaaagttgtagcccctacccattatcagaagcgacttgtgttggtataggtctttggccagttctttaactttggagtccagctgcagaacgtctcggatttgatccgcgagcttggacaacgcctgcagaatctcaagccgtcgctgttgcagtgacagtcgatcttcggacataactagagcgaacatcaccagggaaatgaattgggaggtgtatgccttggtcgaggccacgcctatctctggtccggcattaatgtgcactccacaatgcgattcccgacatatgctgctgcctacggtattcgtaatgcccacaatcagggctcctcgctgcttacagtaacgtaaggccatcagggtgtcggcagtctctccggactgcgatataaaaaagcagacgtcgtctcgaaaaataggagtgtttcggtctaaaaagtcggaagccagctcaaccatcacgggaagctctgtgagttcttcgagcagctgcctagtggctacagcgctgtggtaagatgtgccacatccaatcaacatcaggcgtcgacagcgtttgatttcaggaatgtagtctttgatcccgccgagcactatggcgttaccatcgaagcggacgcgaccgcgcattgtgttcaccacggagtcgggctgctcgaaaatctccttttgcataaaatagtcatagtttcccttcatgatctgttgaatttccatttttagggtagtgatttcgcgagcgtgcggatcatccaggctcttctttaggcgatgtatactcaaagttccatcccgaacagcagcaacatcgtcgtcctaccagaaaataagagtgaaaggatatgtaacatagcatcgccatttttttattttattatcgatatgctagtaaaaattcggccatacaaccattcaaaaatcccatacttttaaaaatgtttttgattttttggattttatttttttcttgcaagtttctagcgatatgccgaacagaatgttgaaccttgtagtttgctactcgctgagtaacgagcatctatctgatggtcgagtaaatcgactacagcgttttctcctgtcttgtaaattcccagaattttttttgtaaactgtaaatgtgcatttacaacgcatttagaactaatcaagttcctcaaaaactggcaaaatttgtttagaaaatcgaaggcaatttgcatacaaaacgagaaaattgtatagtcgagttccccgactgtcagataaccattatttactggaagtgtgaacgagaaacttcaatattacagtttttaaaggtctatgttgctgaaatctttcggcttaattttcttgacgtagagatacggacagaagggaatggccagattgactcggcaagtgatcctgtatttacttttcattgaatctagtatatccctttactctacttaactcttcttaacgggtataaaaatacaccttttagcccaatttggaaaagctcaccgtttttcatcaaaatatgttgaattcgctctcacaaatgctatgctaaggtcttgccaacataagaaatttttttaaaatcctctaggaatagctcaattttatatacccccatagcctctgaacctgtcaagatagagacgtatgtcgtttgacggacattttttaatgctttgtcataattctaataaaaatcttttttaacattttggattatgactacgaacgatttattctaaagtttaaataatttttctagttttttgggtgaatgtgtacattttatatagttattttttcaattgttttttaacctcatcaacatgtgtttttgcttgataatagaaagaatcaactatattacctccaaatagatgacccggttagtgtgctctatgacggctgaggcgtccgatgcgaaaaagtactcaacttccttctcttccaagggcataaactcagaagtgctttccgaacggggaagcactggcagttcacgagattgtccatgtgggcgaatatctagctcgttaattttgtattttgtttgtgcggcattcatgattcgttgaatgtacagttgaaaatagagggtcgatttaaggtggcattgatagcattgcgtgcccattcgtagtttcgtagcgatagaaacagaaaggacagtacaatgtcatccgttgtaagcgatagcaggtgcgtaattaagagtggggtgttaatgggtatcgagtgcaataatgcacaaagggatatgaaataaaaataaatacgttgaaaaaatattttactatgatatgttactaaatattcaattgtagatatataaagctagaaattagaatcgtctattcgttagcgcactggaatcttgaaaactatagaagcaggtgtcgattcgttttaaatttatgtgaattcttttctatcaattgatctaaaaagatttctcggcgaacaatgtgtaaaatgttgaatctctgtttattaatatgagactatatgccaaatggtttttattttttaataaacttacttattattatataatatgatataaaaatataataaaataatcattatattatggatattatatgatttttaaaatttgtgcgcatttttttttccgaacgtcgacagatattggttttctgatattgtataaaagtgaattttctactgtcatacagtctgacgagataaattttgtagaatgaaatcgaagtattgttttatataaaccgaattagaattacaagtgtaagatggtaggtgccttgtacgataagccgtccaaaaccaagcaagcattattttaaattgatttaataacttaatcaacttgtaattaccttgaggttttccagagtcggcatctaaaaaaatgtttgcggatgaaaaaaagtgtaagttttaggttaattattgttcaatccatgtttagacgcaagcttttaatatattggtagaagagaggtgaaagaattattttacattttcagttagtgtgcacaaagcccccgccacgtgttatcgattcaaaaagcaaatgggttagtcaggtgactaccttgatcggtgcagagcttcttgtcatctacggtacgacatcggcgccgagtttaacacagttgcggcgggcagaagtagaagggccgtcaaagtggagtggcaacaggacaatggcggttgttatagaaaacaatcggtcaaccacgacacatagacagttaattacaaaaagtaagaagagaaaggaatggctggtgaagaaactgactgtggagagactgctaaagccgataaaccattgctgtgcttaccttttccgtacagaattggaatgtggtctgtggctaggcgtgtttttgtcttgattcccactagcaagggcgaactacgccgcgacgccacacactctccgggaaagtattttgactttacggcaatagcaaaggcgccctccacttgaaggatggcttgctcgaccagctcgcggaaggagtaggtggggtgggttttccacaggtggtgtactagcttggcaaatacctctgtatcagtatccgactcaaactcataacctcgcttcgaaagaaaagtctttacatcattgtagttggtgatgatgccgttatgaactacgacgaaaccattttcgtcgtccgaacggtgtgggtgggagttcttctcgcaaggaacaccatgggtggcccagcgggtgtgagcaatgccaacgtgggtcaggacgggttcgctgtattctcttccgctgaagtctgtggaaaaatgtttacttttgtctacaattttctacagaacttacgctcttgaattgcttcttcaagcactttgaccttgcccgttcgcttgaccatcacgatgtttttattatccggagagtcaattgccactccagtagagtcgtagccgcggtattccaatctcttcaagcccgtgaccagaaggtccagcacctcctggcgggacttgggtgtcagataatttagatatgcaaatattcctattgttataaagtgttataaagaattaatatacatgtaaagcactctaatataataattaaaattacaatgaatcgtgtatgttgattgcgcgagatttaatataaaccttaataggacgtgccccatatgccggcatattaaagtttataaatgtctctgtgcgccgtcggaatcaaactttaaaagaagacaattattcaataacttgaggagaaaaacagatgttccaaatttgtctcaaacttttactgctaagtcggaaaaaaatatttttgctttagtacttaccacacatttttatagatatttgtaattaaagatgttagtaaatatctgtaaataatataaaccgtttaaaaacatatatttgaaaaataataattttgttacttataatattgaaatgtttacttcccaagtcaagtctctccccaaggcaagtctccacggaattttatcttgaactcaaattgaaaacaagaatgctatagtcgagttttccgactatatgatactcagtaatcagcttgtgaaaatgcgaacgcgaaatttcaatatttttctgggatatcgatagatagagtttttgggcgcggccaaaagt

SEQ ID NO: 30587 - DNA, 2125 bp, DROSOPHILA
agatatttactaacatctttaattacaaatatctataaaaatgtgtggaatatttgcatatctaaattatctgacacccaagtcccgccaggaggtgctggaccttctggtcacgggcttgaagagattggaataccgcggctacgactctactggagtggcaattgactctccggataataaaaacatcgtgatggtcaagcgaacgggcaaggtcaaagtgcttgaagaagcaattcaagagcacttcagcggaagagaatacagcgaacccgtcctgacccacgttggcattgctcacacccgctgggccacccatggtgttccttgcgagaagaactcccacccacaccgttcggacgacgaaaatggtttcgtcgtagttcataacggcatcatcaccaactacaatgatgtaaagacttttctttcgaagcgaggttatgagtttgagtcggatactgatacagaggtatttgccaagctagtacaccacctgtggaaaacccaccccacctactccttccgcgagctggtcgagcaagccatccttcaagtggagggcgcctttgctattgccgtaaagtcaaaatactttcccggagagtgtgtggcgtcgcggcgtagttcgcccttgctagtgggaatcaagacaaaaacacgcctagccacagaccacattccaattctgtacggaaaagatgacaagaagctctgcaccgatcaagatgccgactctggaaaacctcaagatattcgcccacatggacaatctcgtgaactgccagtgcttccccgttcggaaagcacttctgagtttatgcccttggaagagaaggaagttgagtactttttcgcatcggacgcctcagccgtcatagagcacactaaccgggtcatctatttggaggacgacgatgttgctgctgttcgggatggaactttgagtatacatcgcctaaagaagagcctggatgatccgcacgctcgcgaaatcactaccctaaaaatggaaattcaacagatcatgaagggaaactatgactattttatgcaaaaggagattttcgagcagcccgactccgtggtgaacacaatgcgcggtcgcgtccgcttcgatggtaacgccatagtgctcggcgggatcaaagactacattcctgaaatcaaacgctgtcgacgcctgatgttgattggatgtggcacatcttaccacagcgctgtagccactaggcagctgctcgaagaactcacagagcttcccgtgatggttgagctggcttccgactttttagaccgaaacactcctatttttcgagacgacgtctgcttttttatatcgcagtccggagagactgccgacaccctgatggccttacgttactgtaagcagcgaggagccctgattgtgggcattacgaataccgtaggcagcagcatatgtcgggaatcgcattgtggagtgcacattaatgccggaccagagataggcgtggcctcgaccaaggcatacacctcccaattcatttccctggtgatgttcgctctagttatgtccgaagatcgactgtcactgcaacagcgacggcttgagattctgcaggcgttgtccaagctcgcggatcaaatccgagacgttctgcagctggactccaaagttaaagaactggccaaagacctataccaacacaagtcgcttctgataatgggtaggggctacaactttgccacttgcctagaaggtgcattgaaagtcaaagagttgacttacatgcacagcgagggcatcatggccggtgaattgaagcacggcccactggctctcgtagacgactccatgcccgtgctgatgattgttttgcgggaccccgtttacgtaaagtgcatgaacgctctacagcaggtcacatcccgcaaaggatgcccgattattatctgcgaggagggagacgaggagaccaaggctttctcctcccgccatctagagattcctcgcaccgtcgactgcctgcaaggaattctcaccgttatcccaatgcaactactgtcttatcatattgccgtgcttcgcggatgcgacgttgactgtcctagaaacttagcaaagtctgtgacagttgagtaa

SEQ ID NO: 30588 - protein, 694 aa, DROSOPHILA
MCGIFAYLNYLTPKSRQEVLDLLVTGLKRLEYRGYDSTGVAIDSPDNKNIVMVKRTGKVKVLEEAIQEHFSGREYSEPVLTHVGIAHTRWATHGVPCEKNSHPHRSDDENGFVVVHNGIITNYNDVKTFLSKRGYEFESDTDTEVFAKLVHHLWKTHPTYSFRELVEQAILQVEGAFAIAVKSKYFPGECVASRRSSPLLVGIKTKTRLATDHIPILYGKDDKKLCTDQDADSGKPQDIRPHGQSRELPVLPRSESTSEFMPLEEKEVEYFFASDASAVIEHTNRVIYLEDDDVAAVRDGTLSIHRLKKSLDDPHAREITTLKMEIQQIMKGNYDYFMQKEIFEQPDSVVNTMRGRVRFDGNAIVLGGIKDYIPEIKRCRRLMLIGCGTSYHSAVATRQLLEELTELPVMVELASDFLDRNTPIFRDDVCFFISQSGETADTLMALRYCKQRGALIVGITNTVGSSICRESHCGVHINAGPEIGVASTKAYTSQFISLVMFALVMSEDRLSLQQRRLEILQALSKLADQIRDVLQLDSKVKELAKDLYQHKSLLIMGRGYNFATCLEGALKVKELTYMHSEGIMAGELKHGPLALVDDSMPVLMIVLRDPVYVKCMNALQQVTSRKGCPIIICEEGDEETKAFSSRHLEIPRTVDCLQGILTVIPMQLLSYHIAVLRGCDVDCPRNLAKSVTVE

SEQ ID NO: 30589 - DNA, 3134 bp, DROSOPHILA
agctccgagaactccaactacctctccgagattcgtcaggcgtgtcacataatccacgccgtgctgcagaaatccaagcactatcgcaggcatctatcggaatcctcgagagcacagacgaactcgaacgggcacagtagccacacagtgtcgctggtcaaggagcacggcatgatcctggaggtcagcacgcaacccaagtcggacgggcaatcccaatcctcgacgagcagtcgcttcgtggtggttggtcgtctctttcagtcgccagccaaggaagtgtacgtgtgtcaccggtccgatgttccccagaacatagtcgaaatggccttccggttgtccttcttctcaatgggatgacatcttggaaggatactaccaacttagatactggctatgcgtagaattcttgctataatataaacacaaatatttaaaatgtggttttaactaaacaaattacttttatataggcattcaaacaattttttaaaattatatttaagaatgcataattaatcattttcagcaattctattacgaaagcatttgatttaggggaagtgcaattttgtattttcaaaattcgaaaagcgcaagcttgccaaaactctaagaaattgaaaaatatgtacatttcctctgaaacgcagcgaataaatatgtatgtatgaaggtatttcaagaggaacacaaacatcgtgcgaatgtgtttcattcattcatagttcgtactagagaagccatcaaaagtgtacactatttttagagtttggtgggagggtcccattctaaaagtagttccacgcaccagaagtcaaaagacacgccgaccaataaatccacgtgaacgagtggctcaaggtggtgctccccaaattgccaatttcccaagattcgtcgacagttgtgtttgggtgtttcaacagaagaggattcttggtggatggatatgatgacagctacgtggatgctgtgtcttgttctctgctccacggcgatggcgacggaggaggaatcgggcagtggactgttcaacgtcaccgggaatcccttggatacagaagctgctccaaaactgcccagcgaagtgcagaaagctgtttgcactgtgactgcgggggaggtgaaggcatctgccgaggctgtcaccacaaaaacccttaagggagtgtgtggatcaggtgggtggtcagtggtctcttgcccgtttgatcttgaaactatttatgctttgtgtgcagatgaaatgaacatggccttccgaagtctggagaacaagctctacgaagagcttcgtgtaatgaaactgattttggtgcacttagccaaggcgaatggacttaagctcaatacagccttttccccatctgtgaccactccacctccgactatgaggccaatcactagcgctgcggtgccgccaatcttcaagccaattgatcctcccaagaagctttccaattccaccaattcgaaagccgaagagaacgaagttgctccagacttcggacttaagaagactcctactctgaaaaacttggattcgaacgcaaatcttggagctcgtgaaaatgaagtcgataagttcaataatactgtactggccgatcaggatgtaaagttgttcacttactattggaagttggagaacgttacggaacttatcaaagcacctaaattggccactgtcagtagtccgatattcagctttaaaggtacatcagtatttggtgtggatctaccgcgtattagttatatctgatttcttggtaatccaattacaggcaagtccctgcaactaaagtgcactttccatcacatgaatcgcgaactgctgaacctgcaactgggatacggcgtctttaacccaaaatctaaaactggccaaagcaacaacatcttgttagaaatggacggaattttccagaacactaagtggaccgaagatatccagctgaagcacaagatttccatactggatcaaagtcacacccaacgaagaacgcaagatctcagttcacaggtgctgaacaagctggacacgggtttctctatcccaaacagtgtgctcctcggtagctcttacatcaagcagaacgcgctgttgatccaaattcttttatatttgtgaatgacaaaacaatgttttttttcgagcaattaaaacaaaaagagaccaaaaccatgtgctattaagaaagacctcaatttccttattgcagtttaaagcttgctgcgtgctcccttcgccttaatgtcaaggaatggcagagcaatggggtaaagctccttgcacgacttaaaggtcacaatatcgctgattggtttgtggcgctccatgtttgtgatctccacgggctccgcttctgacgtggcattttcatcggtttgctgggatacaatgtgtacggacagaacgcgtcgctcttcgccatcttttgcgataaatttctggaaagtgaaagaggtggtcagaccaagatgcactttaaaggatccatattctctcaccttgaagtagtctacaaagtcggccttgctaatcttacggagtattgctacctcagcctcctctctttcaaagtggtacgtctgcatggctatttcgccatagaactggctgaattgctggaatatggtcttaggtttttccagcttcttcacggccaaagcctccttgtgccgctcaaactcatccaatggcatgtcctcaataacttgctgaagatatgagaaactagtttataaattgcttactatagacaatccttatccttaccagataagtttgcagaaagttttcaatacgatcttccacataggacgggtgctttgctgactgcacaattattcgtatgccattagctccattcaccttacgcacgccactgaaaacgatgtaacccagttgttcctttgtgcgcaggcaatcgtagcaaggttcggagagcacctgagacaccaggtttaccattatgtttgtgtgatctgtttgtgcgccgcactgcaagtagagctgtgcgcaggagctcttgtggaactcattctccttctcaaataagtagctgtcgcctttaatggaacagaattcgtgattgggtacaaagagttgagcagtatgtcgacatacc

SEQ ID NO: 30590 - DNA, 1005 bp, DROSOPHILA
atggcgacggaggaggaatcgggcagtggactgttcaacgtcaccgggaatcccttggatacagaagctgctccaaaactgcccagcgaagtgcagaaagctgtttgcactgtgactgcgggggaggtgaaggcatctgccgaggctgtcaccacaaaaacccttaagggagtgtgtggatcagatgaaatgaacatggccttccgaagtctggagaacaagctctacgaagagcttcgtgtaatgaaactgattttggtgcacttagccaaggcgaatggacttaagctcaatacagccttttccccatctgtgaccactccacctccgactatgaggccaatcactagcgctgcggtgccgccaatcttcaagccaattgatcctcccaagaagctttccaattccaccaattcgaaagccgaagagaacgaagttgctccagacttcggacttaagaagactcctactctgaaaaacttggattcgaacgcaaatcttggagctcgtgaaaatgaagtcgataagttcaataatactgtactggccgatcaggatgtaaagttgttcacttactattggaagttggagaacgttacggaacttatcaaagcacctaaattggccactgtcagtagtccgatattcagctttaaaggcaagtccctgcaactaaagtgcactttccatcacatgaatcgcgaactgctgaacctgcaactgggatacggcgtctttaacccaaaatctaaaactggccaaagcaacaacatcttgttagaaatggacggaattttccagaacactaagtggaccgaagatatccagctgaagcacaagatttccatactggatcaaagtcacacccaacgaagaacgcaagatctcagttcacaggtgctgaacaagctggacacgggtttctctatcccaaacagtgtgctcctcggtagctcttacatcaagcagaacgcgctgttgatccaaattcttttatatttgtga

SEQ ID NO: 30591 - protein, 334 aa, DROSOPHILA
MATEEESGSGLFNVTGNPLDTEAAPKLPSEVQKAVCTVTAGEVKASAEAVTTKTLKGVCGSDEMNMAFRSLENKLYEELRVMKLILVHLAKANGLKLNTAFSPSVTTPPPTMRPITSAAVPPIFKPIDPPKKLSNSTNSKAEENEVAPDFGLKKTPTLKNLDSNANLGARENEVDKFNNTVLADQDVKLFTYYWKLENVTELIKAPKLATVSSPIFSFKGKSLQLKCTFHHMNRELLNLQLGYGVFNPKSKTGQSNNILLEMDGIFQNTKWTEDIQLKHKISILDQSHTQRRTQDLSSQVLNKLDTGFSIPNSVLLGSSYIKQNALLIQILLYL

SEQ ID NO: 30592 - DNA, 4618 bp, DROSOPHILA
ttttataattttaagggctgttcgaattttcaggatgtcttcgcgggtcctaaaaaacgatataaactgtacacatgacgagaaacataagggtaatctctttgcgtggaaatgtttcaaagaactaagcagaaatggaaatcaggcaataaaatcatatcatttatccctaagccttttttcgaattcctgaaaatgaaaagtccttctatagtaaactatttggcaggatatctaagtcataaaaataataaatacgggaaaaaaatcaagaaactaatctgcaaactaatccactgaaacacctgattattttgtatacacgaatcaatatatatttgcaaatatatagtattgtatatgcttatttacacagttataaatatatatagttagttatttaaagacatgtatgtgtgtactattatagtttaacaaatgccatgtgtgcataacgttaaataaatttatttgtacgtttgcagagtaaatacgttttttgttgtgtgtaataccatttctgcgatattgtttgcaataatacactgtaaatagctataccttgatattatgtatatataatataaggtacttcgccacaatatgttatataccaaaattccattatatgtctcgttcaacgttgggtttttggaatgcatataatttgaaatggattatttatgtatatagagatgctttaagtacaggactttaaacagtatcagtttcaaaataataataaatcaaaaccagaaacctttgatttaacaaaagttctaacataattaaacatatttttggtattacatagaaaataagtattataatctttttctcaaaagaacagtaaccaattgaagtagttttatctatgtacattaaacatttcaaaaataataagccgaaaccataacaactgtatatctttcactgatttgattttagttcacgatctgtattcgggttgaagctttgggttccaattggaagaattgacttaggaatatccggacgtttcgttttcgctttcctctacaattgatttcttgtcctccggcttgctgcgtcctgtgaatctctcgaagatggagtgcttactggacttcttgccaccggaagttgccttgaaggaaccccacggcacctttccagcctccgaagtggtcataaggatggagtacgaggagcagacctcgccctctttgctgttacgaatcccgtagaggaagtacaccaccataccgatacaaacccagacaaagaaccttacccaagtcacggcatccagatggaccatcaacaagatgttacaaaagattccaagtgcaggaacgaagggaaccaggggaactttgaagatcaggccacgggtgttctggttatggacagctatcacggccacgcaagtgcctgctgcgaagatgatgaatccatagatgatcagtgcccaccaggtgcccgtatagagttgcgtccacgacacctttagctccacacagatggcaaagctcaggaagatgaacagcatcacggcgacggacaccacagatcccggttcgaaacgtcctagtaggggttccaagcacctgaactgggcctttagtcttccagctaagacttcctctatcatctcactggtcggtgaggaggtatccatgctggactgggacgccacatcctcgtcatcatcgtcgtcgtcgtcgggacttccagccactgcgggtaccctaatcgtggtatgaattcgctccatgggacgatatcgcaggatgatcacactggccgagacgatggtgtaggccaacaaagtgccaatggacataaactccaccagcttggccagatcgaagaccaaagcgaggcaggcactcattaccccggataccactagattcagcagtggcacctgggtggtcgggttaatcttcccaaaacagctgaagagcaatccatccgaggccatggcgtacatgcagcgtggcagggcgaacagggatcccaacagggtggtggtcattccacacagagctccgatggagataaggtacttggcccaggagaggttcaattgcccaaatgcctccggcaatgaggcagccggattgatctcactgatgggaatcataagggtcagagcggcgctgacaaggatgtagcccactgtcaccacgaacaatgagatcacagtggccacgggtatggataccgatgggtttttggcctcctcaccggaagtggctatggaatcgaagcccacgaaggcgtagaaacaggtggctgcaccggcgatgactcctccaacgccgtagggcagaaatccaccctcagcctcggaccaattcttaccatccgcataccagaatcccacgctgatgaccagcaccatcacggctatattgaccagggtgaggagactgttaaacaccgccgtggcctttactcctccggccagagcagccgcgtaaacaatgcagaccaggaaggctaagacgtcggggtattgggccaatccgggctcgtggatgccacccgttagctccagcgttgtgttcccaatccaaccgcccagcattgaatccacgtatccactccaggccctggccaccgaagctgcacccagcatatgctccagcaggatattccagccgatgacgaaggcccagaattcacccatcgagatgtaggtgtacacataggccgatcccgccttgggcactcgagtcccgaactccgcgtaacatagggcggccagcatcgaaataaatccggccaggatgaaggataatatgatcccgggtccggccatttccttggccacagttccagtcagcacgtagatgccagcgccaaccatatggccaatgcctgggggtaaacacatatgttcatatttaatatatgaatgtagagatagtcttgttttttcgttgatggcacatactctaatttctggttcttgtaaagcaataattctgatgtcaaggaatatatgtagataaggtaaattatgttctattcctatctgaagggttttaaaatctctacaaatctctagggggttttcaaaaccatgtatgtcttcatatcagggattttctctactttgaaggttagtctagtgcgttgttaaaaatatatatatataaataataaaaaccgcttagggaatggcttttaaagaagttgttaaatgtttagcaagtcattttgaattaagagtggcttgtctctggccgaaagatgcgcgtgtggccccgtaaaacttgtttaaaaatgcttaaatacttaaacattcaacgtgttcaaataaaaaaaaacagtaatttctacaatgtatctttaagtacccccaactctgaactttaagatagcagatgtttgcattgaaagcattgtagcccccaacatattgttccctaatcgagtggtaaaccggagaacaagccggttactgatcgattaactgaaagtacccaatagagcgatgtcgaaggtgttgaggcatcggtttagcggcgtctccatgacgtcagtgggcaccgacttggtgcgattcatcttggtgcaaatgcccgacaatatgtgcctcaggatcgcacgtcgtgagctcggcatcctggttgagacgaaagttgaaaccgagctgaaaggagttcgcgcctcttgggccacttgaaggatctgaacttggggatatttggatatatttcacggaatattcgatgcggcacacgggacactttcacttgttgtacacaaacagctgtgactatatcgatttttgcatcaaattcgaaagctcagtgggcgaattgccgagtgtttgcacacggccaggaggcagctttcgtcaccgagctttttttgaagtgcgataaaattgccacactaaatgttgtagtttttaaaaaaccttcaatatggaaattatagagtgaatgatacaaaaaacgatactacaaaattattattcggaatattccgatgtcttttaattttcaatgcgataaataatctctaatgtaatatttaaatttttagttgaaccttaaaactattttctttgtattatgtttttactgagataaatacatgtagggccccgcaaagtatacaatttaattccgtctaatcgtaaataaaatatctgcatatatttccatatgatggagcatacttttaaaggccaattaacttcgtttgaaagcttgcttgtgtttgtgagccaaaaccggaaactaaataagcgtaaccattttaaacaaattgttattgctcctgccaatcaaatgatcgacatttataagtggaatgtcgtttagtgatgattagaataatgcgtttacaaaactatcgtatattttaagctaaaagtctttaaaaattaatgccaactgattgtagataaatattccgaatattagcaaaatagggaaattatgagtaccgcgaatgctattgccatacctgcaataaaattttaaaataaacagccaataagttgtattattattattttatgtctgaaattaattttaatcgccacaaagtgtgtttgcactaccaaaacttggagaacaagtgaggtttacttttgcctatttcttcgtagcca

SEQ ID NO: 30593 - DNA, 2010 bp, DROSOPHILA
atgccgagctcacgacgtgcgatcctgaggcacatattgtcgggcatttgcaccaagatgaatcgcaccaagtcggtgcccactgacgtcatggagacgccgctaaaccgatgcctcaacaccttcgacatcgctctattgggcattggccatatggttggcgctggcatctacgtgctgactggaactgtggccaaggaaatggccggacccgggatcatattatccttcatcctggccggatttatttcgatgctggccgccctatgttacgcggagttcgggactcgagtgcccaaggcgggatcggcctatgtgtacacctacatctcgatgggtgaattctgggccttcgtcatcggctggaatatcctgctggagcatatgctgggtgcagcttcggtggccagggcctggagtggatacgtggattcaatgctgggcggttggattgggaacacaacgctggagctaacgggtggcatccacgagcccggattggcccaataccccgacgtcttagccttcctggtctgcattgtttacgcggctgctctggccggaggagtaaaggccacggcggtgtttaacagtctcctcaccctggtcaatatagccgtgatggtgctggtcatcagcgtgggattctggtatgcggatggtaagaattggtccgaggctgagggtggatttctgccctacggcgttggaggagtcatcgccggtgcagccacctgtttctacgccttcgtgggcttcgattccatagccacttccggtgaggaggccaaaaacccatcggtatccatacccgtggccactgtgatctcattgttcgtggtgacagtgggctacatccttgtcagcgccgctctgacccttatgattcccatcagtgagatcaatccggctgcctcattgccggaggcatttgggcaattgaacctctcctgggccaagtaccttatctccatcggagctctgtgtggaatgaccaccaccctgttgggatccctgttcgccctgccacgctgcatgtacgccatggcctcggatggattgctcttcagctgttttgggaagattaacccgaccacccaggtgccactgctgaatctagtggtatccggggtaatgagtgcctgcctcgctttggtcttcgatctggccaagctggtggagtttatgtccattggcactttgttggcctacaccatcgtctcggccagtgtgatcatcctgcgatatcgtcccatggagcgaattcataccacgattagggtacccgcagtggctggaagtcccgacgacgacgacgatgatgacgaggatgtggcgtcccagtccagcatggatacctcctcaccgaccagtgagatgatagaggaagtcttagctggaagactaaaggcccagttcaggtgcttggaacccctactaggacgtttcgaaccgggatctgtggtgtccgtcgccgtgatgctgttcatcttcctgagctttgccatctgtgtggagctaaaggtgtcgtggacgcaactctatacgggcacctggtgggcactgatcatctatggattcatcatcttcgcagcaggcacttgcgtggccgtgatagctgtccataaccagaacacccgtggcctgatcttcaaagttcccctggttcccttcgttcctgcacttggaatcttttgtaacatcttgttgatggtccatctggatgccgtgacttgggtaaggttctttgtctgggtttgtatcggtatggtggtgtacttcctctacgggattcgtaacagcaaagagggcgaggtctgctcctcgtactccatccttatgaccacttcggaggctggaaaggtgccgtggggttccttcaaggcaacttccggtggcaagaagtccagtaagcactccatcttcgagagattcacaggacgcagcaagccggaggacaagaaatcaattgtagaggaaagcgaaaacgaaacgtccggatattcctaa

SEQ ID NO: 30594 - protein, 669 aa, DROSOPHILA
MPSSRRAILRHILSGICTKMNRTKSVPTDVMETPLNRCLNTFDIALLGIGHMVGAGIYVLTGTVAKEMAGPGIILSFILAGFISMLAALCYAEFGTRVPKAGSAYVYTYISMGEFWAFVIGWNILLEHMLGAASVARAWSGYVDSMLGGWIGNTTLELTGGIHEPGLAQYPDVLAFLVCIVYAAALAGGVKATAVFNSLLTLVNIAVMVLVISVGFWYADGKNWSEAEGGFLPYGVGGVIAGAATCFYAFVGFDSIATSGEEAKNPSVSIPVATVISLFVVTVGYILVSAALTLMIPISEINPAASLPEAFGQLNLSWAKYLISIGALCGMTTTLLGSLFALPRCMYAMASDGLLFSCFGKINPTTQVPLLNLVVSGVMSACLALVFDLAKLVEFMSIGTLLAYTIVSASVIILRYRPMERIHTTIRVPAVAGSPDDDDDDDEDVASQSSMDTSSPTSEMIEEVLAGRLKAQFRCLEPLLGRFEPGSVVSVAVMLFIFLSFAICVELKVSWTQLYTGTWWALIIYGFIIFAAGTCVAVIAVHNQNTRGLIFKVPLVPFVPALGIFCNILLMVHLDAVTWVRFFVWVCIGMVVYFLYGIRNSKEGEVCSSYSILMTTSEAGKVPWGSFKATSGGKKSSKHSIFERFTGRSKPEDKKSIVEESENETSGYS

SEQ ID NO: 30595 - DNA, 2204 bp, DROSOPHILA
tgcctatggactttaatttgattttcccaatagaattattagattttcttgacttttgctgcggggacggcactcgttgctctgcggattctgtaaacgagcagattggagatttgtctatcaatttgggtcactaacttggcctttcgcgtttgctgtttggatcttccacaaagtgctctttaaaagttggctgacttcattaacttaaacttcgaataaaatagaaaaaataaagtatataaaaaaaatttaagtataacagaatttatataaagatcggtggtagctgttaagtttattgcaaatatatgtgagtgtaaaaattgatacaaaagatataagcactcaccgcggtcttaagctactaagtcatcaatatacctaaagcatatgttgataacgatttgaactaatggtaaagtataccttagaaataaatttacgactatggttgcgtatcagccaacttcacatattaaattcactttgtgaaggctcccagcaatcgctccaggctgattgaacatttcacttaacatatattgcttgcttttttgtgattgcaatgtttcgcaggtctaactattactttttgaaattaattacgtatttcaattctttaggtagttaagtacagtttatgttcgatgttcgacttagctgttgtttgtacaatagttcgtgagtttaacaatttatacagaatacttattggctgagtcgttagctgattgttttttttttttacaaaatttgaatttttggtatatggtaggtatgtgcattgcggatattttcaattcaattgctcctttgcgttaatttgctttctgagtgatatgcgaacatttttcgatacattgtcggctgtttagcaaataaagagagacgcgtcgctcggtgaactgttgcatgtgtttcttgtgcgcttttctcagctacagtacatgttttgggttatatatgtacattttgagttttgtgtgaacgagggcccctaaatcatgtgcgacatcatgcaacgactcacatcacggttggcgcgatgcaaatgaccttgataatgctgatgaatgcgctgatattgatgtggctgctgtggatgttgctgttgctcttgatgttgctgctgctgcgctggaaaactcgtctccgattccatcatcatcatgccgccggtggcctgcatctcgtaatccatcaaagaggcctgcgttccaattatttgtgtggcaggcaaggaaaagaaatctgcaaggcaataaaccgatcattaagttacattaacttatataaaataatttacaatttattataattgtatgtacaaactgaagtctattccgatttttctcagtgcaacggcaatgcaacgcaacacgttgacactatcgatgcttggcccaattaccgatcgtttatttataaccaattcggagcagagcagtgtgttgtcatttcttatctacgagttagtttctttttttctgctttttgtttgtgctgataaccttatcaacgcaatcggaaactataaggtaacgaaggcaaaacggagtgcacagattaacaacaactaattaagtgtagtcatagttgcaaaaatacatatgtatatttattccaatagaaaacatttaaaattgtatttctattattttgtaccccttttaaaaatattaatatagatcaaaaaaattgagatatatatttaagtaaatcgtggacaaaactaaatgaaatattcgtacatatcattgaaatcacttaaaaacatttaagaagcgtttataccctcagaaagagtatagattattgattcactcccgcagatatacacatttcttttaccggctgtatatatttacgcccacactgccttccccctttgttttcttctattgttggaacacttttgcgaatgcagattgattaaactggcggtgtaagaagaatcgtaacactctgttgacccagtgtacatagtcatctccgcagtacctccagttaatccccactacttgtgtgttttgtttagtaggccaaacacaccgatatacatatatgcatatgtatgtctataaagactgagtcaagccggtttttctttgctaaatttaagcggctgtcaagtgctatcgtttcgagtccggtaccctctgtatgccacagatagtccggatcccaccgaataactgaac

SEQ ID NO: 30596 - DNA, 204 bp, DROSOPHILA
atggattacgagatgcaggccaccggcggcatgatgatgatggaatcggagacgagttttccagcgcagcagcagcaacatcaagagcaacagcaacatccacagcagccacatcaatatcagcgcattcatcagcattatcaaggtcatttgcatcgcgccaaccgtgatgtgagtcgttgcatgatgtcgcacatgatttag

SEQ ID NO: 30597 - protein, 67 aa, DROSOPHILA
MDYEMQATGGMMMMESETSFPAQQQQHQEQQQHPQQPHQYQRIHQHYQGHLHRANRDVSRCMMSHMI

SEQ ID NO: 30598 - DNA, 3159 bp, DROSOPHILA
aagtaaagccatctacttttagaactttttaaaggtaagccattaaaaattatttaacatattttcgtgtcttaaaatatgggttgagtatgcatgcctaaactttctatatgactgtgaataaatagtgacatttttgcaaatcacaatcacaacttagaagtgcggatatgagaatattgtaagtatacatatgtataccaaaccgaaaaagcacgctttagtcgagttcttcgactatcacatacccattacatggctagcaatggaaaaacaaaaacaaatttgtgaagaaattaattcaaaattgtggacatgaaagctttttgcagtttgttgccgataccagtggacgtgaccaaaatgttctcgttttgagaagttcgattttaaaatctagccaagatctaatcattctcagcatactcaaatcgagatcaaaccattctcagattgcaaatgattttgctttcatttgtcttcctctcttttttcagactcttcgacaatcttacacccaatacttcttccgaaaaataaaaaatataaacgttgagatcattttcgtctcgaaaccaagaaggtttatttattcactgagtacgctgagcgcaaccgacctctatttttttgttctcaatttttccgagtgcaggaaatgcttacctccccgcccgtttcgtactttttatctagccgataatactcttttagtctacaagaaaagggtataaatatataaatacaaatctcgcactatttgtctgtattaaattataaattataaaaatgtttggatatatttcatacatatcgttcgagggatagctttttattattgactcattttatctaatgagtcatatccctttaggtttgcaatatattttttttagcatgcatagtgataggcttttaaaactttgttgcttaaattgcgttatttattaaagtaataatttgtaaattattgtggaaataaagcccgcttgttgtttttttaacttaatatctttagattagactcaccggccataagttcgctgttttgctgatcctgcagcattgggatcaccggctcgccgccaggtggcgcatctggcatatcatcggccgtatgatcgtgaccgtgggcggtgggggcgtggccctgggtgggcggtggctcggcaaagagcatctcgaagcgcagccgggtcttgattggacagaccctcagctgctgttgctgttgcacttgttcgagcgggccaccgatctccaggtgacgatatagagcataaatttcggttttatgctcgaaatggctccaagtgccgttatgggcggcgtatttaccgttggcgtgatggcagcctgcttctctgacgtcacagcagccggctgattcaacagcgacaatttcgctttcgacggcaccaaactggcgtaaataatctaaaaataagacgaggttttttttcctctgtacacggggaggctgatgccgcttcttcttcttgttatttgccctttgcttctgctgaagctgctgcttcttcttgctatgttccctttcctcttgctttttcttcttatcctcctcgcctgctagattctccttcttcttactactcttatcctttaccccttgcttgtgacagagctcctcctctttccgttccgcgtgcagttgttgttgttgttgctgctgctgcttgtttgaccttttcttttggccaaactttctgcccccgtcgacgtcacagctgatcgatttgctgcactcgctcggcgatttatccgcctcctggctttgcctgctttttcgattttcccaattcacattcgtcgtcggccgtgggaattctgctatcataatttgtatgccacttatgccataattatcacactcactctcactcacacgcacaaaaacgcgaaaagagaggcgggcgcgcgcttgtgttgttgttgatatattcttttttcaccgcttaaccaagctgaaaagttgaaaatctttacacacaccaaaaacacacacacacacagactcagaaaacttgggaaatcgaattttccgtactatgattttccggccataaatctgcacgggcgtaagtttcggaggaaactgctgcagaaaagctcctggtcgcaaaggaagaaaaatcggacgggcgaagcgttgccagacgatgacagcgatttcatttgttttgatttagttgccggagcgatgtcacctcaataagataccgaaaaataccaaaggtatttcgagctgccaatcttttttccgacatcaaacttttctagccatttgacttttttttcaaaagtatttataaatttttttatatttaaatgcacgaaataaatacatatatcaatgtctatataatatttggaaatataagtttccttcgttgtcattgggtctttcgacttctctttattgacgcatcgccttaaacaattccaactaaaaatttccaatcaacacagacagctacttcgctccgcttaggcaaacagacgcagttcatcgcgcgcctcgatgcacttgggcggcgagggagtctcgaactcgcccagctcggcgtcgtagtagagggcggcgcggtagggacgcagctcccatggcacctgctgctccattgtggtcagcgtgacgcccaaatcctcaagcgtggggacaccagtcagaaccttgtcggtgacagcctcgcgttcgatgcgagcgggatgcagaccgccaatcggggtgccggggcagatgaagctgttcagcttggctttcagcaggaaggtggggtcccagcgcatgtcgtagcgcatgtagccccagcgcttctggtccttgcgcatcaggcggtggaaccagtcgaccagctcgctcaactgatagcgtttaggtctgcagagaataaaggaaattaagaaaatgtacatggtacaaatacttggactcggagattgacttaccccacagcctggtagatgcggccagcgctgtccggatccttggcggcgttgatgatggcctgggccacgtccgaaacgtagacgggctgcttgacggtcttctctcccttgtgccacagcggcatcgagcggaactgacggcgccagatgtgggcgtagtagcgcaagaagcgatcctcggatccgtag

SEQ ID NO: 30599 - DNA, 1159 bp, DROSOPHILA
tccgatttttcttcctttgcgaccaggagcttttctgcagcagtttcctccgaaacttacgcccgtgcagatttatggccggaaaatcatagtacggaaaattcgatttcccaagttttctgagtctgtgtgtgtgtgtgtttttggtgtgtgtaaagattttcaacttttcagcttggttaagcggtgaaaaaagaatatatcaacaacaacacaagcgcgcgcccgcctctcttttcgcgtttttgtgcgtgtgagtgagagtgagtgtgataattatggcataagtggcatacaaattatgatagcagaattcccacggccgacgacgaatgtgaattgggaaaatcgaaaaagcaggcaaagccaggaggcggataaatcgccgagcgagtgcagcaaatcgatcagctgtgacgtcgacgggggcagaaagtttggccaaaagaaaaggtcaaacaagcagcagcagcaacaacaacaacaactgcacgcggaacggaaagaggaggagctctgtcacaagcaaggggtaaaggataagagtagtaagaagaaggagaatctagcaggcgaggaggataagaagaaaaagcaagaggaaagggaacatagcaagaagaagcagcagcttcagcagaagcaaagggcaaataacaagaagaagaagcggcatcagcctccccgtgtacagaggaaaaaaaacctcgtcttatttttagattatttacgccagtttggtgccgtcgaaagcgaaattgtcgctgttgaatcagccggctgctgtgacgtcagagaagcaggctgccatcacgccaacggtaaatacgccgcccataacggcacttggagccatttcgagcataaaaccgaaatttatgctctatatcgtcacctggagatcggtggcccgctcgaacaagtgcaacagcaacagcagctgagggtctgtccaatcaagacccggctgcgcttcgagatgctctttgccgagccaccgcccacccagggccacgcccccaccgcccacggtcacgatcatacggccgatgatatgccagatgcgccacctggcggcgagccggtgatcccaatgctgcaggatcagcaaaacagcgaacttatggccggtgagtctaatctaaagatattaagttaa

SEQ ID NO: 30600 - protein, 285 aa, DROSOPHILA
MIAEFPRPTTNVNWENRKSRQSQEADKSPSECSKSISCDVDGGRKFGQKKRSNKQQQQQQQQLHAERKEEELCHKQGVKDKSSKKKENLAGEEDKKKKQEEREHSKKKQQLQQKQRANNKKKKRHQPPRVQRKKNLVLFLDYLRQFGAVESEIVAVESAGCCDVREAGCHHANGKYAAHNGTWSHFEHKTEIYALYRHLEIGGPLEQVQQQQQLRVCPIKTRLRFEMLFAEPPPTQGHAPTAHGHDHTADDMPDAPPGGEPVIPMLQDQQNSELMAGESNLKILS

SEQ ID NO: 30601 - DNA, 3627 bp, DROSOPHILA
tatgcgatttcatttaatcgccagcatgtagagcaaataatcgttcgtcactccagatttgcccgctttccgcatagcagccaattaggagagttcacttcacttcacggttagcattagccattatccactgtcattagccattaacttggcttccttctgcttctaccattagatacatgccgcccaaggtttgtaaggtggccaactaatgtgttagttagttagttagtaatcgcgtaaacaaaacattttcgtacgctcgacgctttctattttttgactaacatattctgcgttttggtcccgtttaagccggcggcgacaggcgtagcaagccttatcttaattatagatcaattatgctagtggctcggtctgcccaccgaacgccagccaaatgtacatacatatattgtatatattcagccgcacatgattaattataagtgcaaactgaagtcggccatatgggaaagctgaaagccaaatgccaaatggagctccaaattaactaattcgctttcgttcgtttggacctttttgtatgacaagtaccactgtttatcgaatccaaagcagctggaatgcattttaataaatttataataaataacaaaaatgaacaagcagagcgatatagccccgacatcacactttcgtttcatatgcaaaatggaaacaaacgatggggctatggatgtcccgcggtgattatttcgcattattttgtacaaattgcacaattacaattaaattatacggactggcgtaaaatggctgattaatgtcagtaaaccacacccacccctcgacattcgaagcccccctttggacccacaaaaaaccaataatgctaaatgagagcgaacgaacagaacgaacagatgtgcgccgatattcaatttatatgtttcctatacaaaataataacaataattattcttaataattactgcactggggccgcaatgtgtgcctttcgatggccatcgttagtatgatgaccgacgcctttctgaggggattactaatattatgctgtctggttgtgccgattctatggcagccatcgctggcaaccgtacgtacagatgtgatttataatatatataaaaccggaattcatatatattaacgaagacaaacggctcataaaataagttttagtaatatttaacaaatgcagaagcgtaggcaactcggttttgtattttaaaatccaaatgaatgtgtagaaatcatgtaaaaatagaatcttacaaatgtttaggccattaaataggaatgcacactcaaagatatatccattttttaagcatgcataaataattttccattcaaacaatctacgtaaatggcaaagtatgtagacaaacagaaatgcactttccgtttttcctggccaaaagtagccggcgtgactaagtctctaggtttatggattccacatatgatgcgcatttgtttaatggctcctcacttgtagcgcgatttcgatatacgttggcgggacatcaactgctcggtcattgaccccactacggcggaaatctttaagtgcgacattgtggaaatgccaaagaagcagggcaattttttgaacaccttcctcctgctgcgccgatccgtcacgaaaatgtgggtggagcttagcgtgggacagatcgccaaccgaaaggatcgtcctgttcagcaactctttaagattcgagtggatggctgccacctgattgagtttcgcagcaaaagccgaatcctgaatgccgtgctccacaaactcttgcaatcgggaaactatccagatgcctgtcctctcctggcggtaagtggaaaaaatggttttgcttcatgcgcaattggcaaaccaagacaggttgcaatgccgaatgcaggaaagtcgtaaatctcatttacatttcgcaatggattcggtcgaacctatgtatatgtataaatatatttactttttaagaaatattattacccaaaaggagaggcaatagtagatcgctaaaaatagatttctgcgcaatgcatttttgttaagccataaaatttcaggagatgataagaaccacacttagcaaagtatcatttccaatattattcccaatatttctgtttgtagccattagtaacttaaacacctgattaaacaaacaccaagcgtttgctgacctactcaaagtcaaaatctgatgataatctcccataatcttcatctttacgagccgagcgcaaatagagcaacaaattagtcaaatgttcttgcaaataaacatagctatctatacggctgttcattaaaaaacggaatgtaaacaaaattaaataaacaaattcagtgcgcattagacaagaaaaccagagcggtttcgccgaatgaaatccaaatcgatagtgcccaatatcattttcattcgctaaccagcaggttgttatccatatcttatgttaatccgcagaatgtcaactatacgtccacgcgatttgcactcaatccggatcattttccggcctacatgccggacatgaagttcaacacgaaattggtctttcagctgagcaggaatatgggtctgatcagggccagtgtggatgccgaggtgatgagacgatcgtaagaagaaaatatttcaataaagcacgaaagaataacctatgtatgtgtgtataaggaaaatcatacaaaccggcggcaaatacctatactcgtatttgtgcgtttccatgactaactcgaatgactaatagcttcggcatgggatttattcgccggcacacattcagattagactcctatctgggccacttgattttggtttaaaggtggaaaagttatgacttgtggataataaatgaatatctatttttgccattgaacccggccgatttcactgtcatgacttttaggttttggatttgattgtgatccagttttctgcgaaatcccatgattcatggtcgaggaatgtggcatcaggctggctgactgatttctgcacttcactgttaattaaaaacaaataccatagcttcatccataatttacgagctttggttggtatagaaaatcaaatcaaattaaatatatatgtttatccaggggattcactgatttctgcactctatttatatcccttagtcgtagagtaaaatggtaaactagattccttgaaaagtatgtaaaaggtaggaggatgagtttccaacttataaattatatacatatatattcttgattaggatcaatagccgagtccatctgaccatgtccatctgtccgttggtctgtccgtttgactgtccgtccgtatgaacgtcgagatcttactaactatataagccagaatcttcctcacacttgcagctgagtaacgggtatctgatagtcggcaactcgaccgtagtattctcccttattttttatttggttgggctactatcaaaattctcgaaaagctcttagttgtagccaaaatccgataatcgaaaactatcaattaattggttttaattggttttaactggctctgtgatttctgcacctcgttaaaaacattaaatgttcaaagcagacagcatgatgtgtattaaaatgagatttaatattacataatttaa

SEQ ID NO: 30602 - DNA, 579 bp, DROSOPHILA
atgatgaccgacgcctttctgaggggattactaatattatgctgtctggttgtgccgattctatggcagccatcgctggcaacccgcgatttcgatatacgttggcgggacatcaactgctcggtcattgaccccactacggcggaaatctttaagtgcgacattgtggaaatgccaaagaagcagggcaattttttgaacaccttcctcctgctgcgccgatccgtcacgaaaatgtgggtggagcttagcgtgggacagatcgccaaccgaaaggatcgtcctgttcagcaactctttaagattcgagtggatggctgccacctgattgagtttcgcagcaaaagccgaatcctgaatgccgtgctccacaaactcttgcaatcgggaaactatccagatgcctgtcctctcctggcgaatgtcaactatacgtccacgcgatttgcactcaatccggatcattttccggcctacatgccggacatgaagttcaacacgaaattggtctttcagctgagcaggaatatgggtctgatcagggccagtgtggatgccgaggtgatgagacgatcgtaa

SEQ ID NO: 30603 - protein, 192 aa, DROSOPHILA
MMTDAFLRGLLILCCLVVPILWQPSLATRDFDIRWRDINCSVIDPTTAEIFKCDIVEMPKKQGNFLNTFLLLRRSVTKMWVELSVGQIANRKDRPVQQLFKIRVDGCHLIEFRSKSRILNAVLHKLLQSGNYPDACPLLANVNYTSTRFALNPDHFPAYMPDMKFNTKLVFQLSRNMGLIRASVDAEVMRRS

SEQ ID NO: 30604 - DNA, 2240 bp, DROSOPHILA
ctctgtgcaaatgtttccatctctcccctgctcgttctttatagccgcgacttatttttattttttattcgatttctgcaccgacttcgacttggtcttgtgcacttgtgcctccggttatagtggttgatatgaagtccgcccgatcggcgggacgggcggaggagctggcctagcccatgagttgttaaatgtttaacacgtgatatgacaaataaattacatatgatcaccagacgcgggctccgtagcaacttaaataaaatggcaaaaagggaaactgatcgcggctatgacttaataaaaccttttaagcgatcaatcagctcgtaatgcagtttggctgttgttctacattcatcatcatcatggggatcatcaagttggtacaacttgcaggatcgatcgagttggctcctcttctactttgattgcgcagtgcatcgtttatcattggtcgtttttgcccagagattgcacttgaataatgatctcattctggagtgatggtaattgattacgttgcactaagtgtctgtgagctaaagtatgtaagaaagaaatatttgagaattttttaaaatatatttctttattggcacccattcaaatgaaacatctaatcctgatctcgatttcacatgtgcctcttttactaccgtgtacgcataaacctttagtgctcctttcccaaattttttaatgcccatttttgtgtttccaatttgaatttatagagaagatcacttgatgctataaagcacttaagagtcgggggccatttggcccgtagtatggaaatggctgtacgagacggaaaatgcctgccaataagcgatgccttgcatgacgaatagaaaaactaacccaaaagtcacgctaatagtaaattgagccccattccgactccgactccgacttcaacagcaatggcaatagcaactcccagcacatggcaaccccaaattgcgaatttttcatatgcaacaattgacaccctctaggcacacgtcgtcgtcgtcgtcatcatgatcgtgttgctggtcaggaaagttcccaagatttggccagatcctctgctgcaccacttggcggtgctgatggtggtggtggcggtgttgttggtggcggcgatggtgatgatgatggtgatggtggtggtaaagtggattaatgtggcatgaaatgatttggtgaaataatgcaatgttgttggccagtggacaccggttcggttcatttcgggttagcttggggcacttagaaaaatcggtgctacctactatctaaatatatttttaaatattaaaatcaaaaaatttggaaccctatattctaaatctatagtccttaaaagaaggcttacatttttcctagagtattgctcttcattttattctatttgttgcaactttattctgagtgctccgcttcggtttcgtcttaggccgcatcttcaacttcgacttggactctggctctcacacgcagactctaacgagttttggttttcatccatttttccagcttttcctgccgttttcctccattgtgctgtgtttgtgttctacctgtacgaaaaatttgcacaattttctaggcccgtatggtggttcggctttgggctttgggcttcggttttggttttggttttggttttggttttggttttggtaggtgggtaagttggctggttgtcggtgggcatgcagggcgaattcccaggcttttgataacacaattttgtgccgcagacggcttcgtttaccgcaaagtgcatgtgggtctgggttcatcgtgccatcttctattcttttcccgattccgcgatgcgtttgcgctggaccatatgaattccgcccaaaggacgtcttgaggcactgaaaaaataaataagccctatgatcgatttaattgctaagcaatcctactgaaaatcataaagaaagtaaattaatgtcaaagaatgacatcatacatatataaatattttttgaaaacaaacaatactaaataaaaaaaagtaataaattaaataatattaggcgctacaagaaaattttaaattataatataatatttaagagtttttaattctgcattttacatctttttcatcgagtgagttttagtgtcccgtggttattaccttactaataacaaagccgttcagacttgtaaacttgtaacgggtcagtcgtagaacgtagaaatctccctgcgtcatgttgtcttacccg

SEQ ID NO: 30605 - DNA, 240 bp, DROSOPHILA
atgaaccgaaccggtgtccactggccaacaacattgcattatttcaccaaatcatttcatgccacattaatccactttaccaccaccatcaccatcatcatcaccatcgccgccaccaacaacaccgccaccaccaccatcagcaccgccaagtggtgcagcagaggatctggccaaatcttgggaactttcctgaccagcaacacgatcatgatgacgacgacgacgacgtgtgcctag

SEQ ID NO: 30606 - protein, 79 aa, DROSOPHILA
MNRTGVHWPTTLHYFTKSFHATLIHFTTTITIIITIAATNNTATTTISTAKWCSRGSGQILGTFLTSNTIMMTTTTTCA

SEQ ID NO: 30607 - DNA, 5566 bp, DROSOPHILA
tattttgaccatgggaaataaattctgtgagctcgggtaggttggtcgcccgctaatcgaatggtcagactggcatctgaaaatctggacaaggaaaagccaaccacgaaggacgatcgttctgcattttacacctacgccagcccgaaggttaaagattccgcctggtaacttgttgctatttccttatatgtgcggtaattgaactcacgcgtgtggggatagtccacccttgatggaaaatcgatagaccccaagccagaaattcagcctagccccgaaccttctgtcgacagagtcttccttgttttcttggttgtccttttaatttataccaacgaacagcaaatggagtgtgtatttttggaacagacatagggcacgcgatgatggcttcagtctttggcgccccaccacccacataacaagtttacccgactgcattaacccactgccaaaagcgagtgcaaggactcacaacccccccatacgatatcgaaaaaggaaggttaagcctgacttatcgactttgtaataccttacccttaaaaatttattcaatgcaagagggtgtgataaattggagtaaaggataggcgatatatgccagcatcattaagacccccataaattcaaagtgcaaactatgttcgaatcctttcggtaaccaaagtttatacttctcggctccacataaagataatatttagaatataatagtagacattatatattatttgtgataccttttcagttaggtacgaaaatcggctttgtttactgctttagtggggtttgctgttgccaggacaacccgtcgtcattccaatgcaaaacaaatcgaatttcggttgtcggagcccagggttcgaaggaatttcagtgaagctcctgcacagccttggtgtggtgcttcaccgagtgctaggactccagccgacctttgatatttcggctttttttatatctagtctgcgaattggaagtgcaatgaactgacatgattacgggaccggaggccaggcaaacgcacaggttgttggacttgaagaagcagcaatgggctaaggagaggggtgggtctgccaggatccataaaatgtatactcagtaattaaatattatattttacagaggaaatagcgcgcatggatgagatgtaccatcatcaccacacctcgcaccacaaaatcgaacgcacctccattcgcacatactactccaacctggatctcagtcaaacatcgacctccaatcaaacttcgagtcactcgcgacgagcgccaggtccggatatgcaattgatcctgcgccagccggagtatagccaggacaatcagggttatatgaatcagttggagcggtacatcgacgatttggatggggatgccgatgcggactttgaggacgaggatgagtccatgtatcgaagaaccaggagaggaagctatgcacccggaatgtcctctcgtcagatgcagaatcctgcccgctatgcggaactagtgcccacatctcttcaaactgccaagggaaggatgcagaactctcgccaggaggcgcagcaacatttgaagcatcaacaccagcaacttttgctgcagcaacagcaacatcagcagcagcaacagcaacgcctgcggagtcccagtttgccagcgattagacagagggtgagacaccaggacagcaggacgggaaaaccaactgacattgatcccggcaacgggccacatcgattaaacaatcccccgggaggcgctggtaacccgcctggtggaggtggtggagccccggggcctcctggttgccaggaggaggacacatccggctatctgagcgatacgcccaagaatccccataccccggacatttggttcaacgacggtgcgagtcaaatcgagagcattagtggcatgggaagtgccagtgtcctggatggcggaagtgtgggcgctgtgggagggggcgtggccgggtgccgacgcctccgccgatcgatacaggcgggcacatcaggtgcaccaattcctgcgccgattcctatgcccttgccccaccatcaaccacccccgggaaatccactgggtaagatatacaccatcaagggacgacgtgtgccagggcagggatacgaaccactcgccgccgatggatacatggccgatgggtgagtaaccaagtgacccaatctcatattaaacaaacaagctaactgtaattaaccatgaaacaatttaactgggtaaccagctttattagtttatttttcgttgcatgaggtttattgcctataatctttaatgcaaatttttcatatcttagttgatttctgtttgcggtacaaaacgttgatcataatatataacaacctcccttctaaataaaatacatttgttccatttctatagatactgctatatgcctgcaccgccaagctcatcgaacatgagcatgagtcgcgatgtctccacctcgaatacttatcaggtgcacattggcaatccggaccagaatgatttctttgtccatgagcagcacgagagggagagggctcgctgggccaactttaatggtggagctggccatcaggcagcccagcagccgccaggatggctaagtcgcggaatgcacgatctaaaggacagtgaggacgatgtacaatcaatgcagtcatcctcaacctacttaagagggcagaatgcccctctagatgctcatacactggccgagagaatggacaagagacgcaaggcagcggagtaccataatgccatcaaaaagcaacttcacgaacgggaattgataaggaaatgggaacatgaacgccatcgacaggaggagcagatcgaggaggagcgcatccgtagacagaagcaattggagcaggagcgtctggaatttgagagaagaactcttcaggaacgcgaagaggcccagcagaagaaacagcaagtaatgctggatgccatacagaaagctgaagtggcggccaaaatggaaagacaaaaaaggcgaatggttcgccagccatccaaagtttctcaagaaacagaagaggatgagtccgagctaattagagttcaatccgtggaggaggaagaagatgcggaggaaaaatctggggcagtagagccgccatcccaagaggaagagacatcgaatacaccacgtggtgcacctccagttatgtcagaggaaaaagttcttataggtacccccatcaaccttcggcgcaccatcacgaaacccattaagcaacccagggattccagaaaagaggacccgaaagaaccaacccaaaccaaagtacagaccactttcctgggggaagataaggagaatgtggcgctgctgatgcaaccagctacccttattccattgcccgttaccagcgatatttttgggctgcaaaatgccattggcaaccttcagatagccacttattttatgcaaccacccatgcagaagccaccagagacaccgggctcttattcgaaagccacgatgacccatcgtacggacacctccatctacaccgaggatggttaccaggcggaaaaggaggaggatccactgacaactgcacgatctgggagaacggatttggtgacagccagtgggtgcttctctccagattcactagaggtagatgtggctccagtcttaatagctgaaacagataaactggcattgatacctctgaagacacctctacaactgggcatctcgaatagttcagatgacagaggtgaacataatcatgaggtgggtcaccaagcggacgtggagacccaaacagagttacccctcaattgcgatctctgtttgttccacgataacttctacaaggtcttgcttaaacgggaggtttctaccactaccacaacacagacatcgaaatctcagacacaacccgcaaaggaatcaactgctgaaaaagatcatgagaccacaacgactacaaccaccaccacaacaaccacatttaaggctaaaagtaaggataaagacaaagaaaagaatttgaaaaggaacctaaataaggataaggacgctaataagatggacgatcgaccaaagtggggcgtcaatcgtccggttgtccagtatgtaaaagccagtgatcgggatcctttttgcctgagaaagaagaaaaaccacccgagcaccgccaagccaccgagatccttgtcaatggactctcgtttggacagtgtggctctccccgaagatcggctaataaatatcgccggaggacctccatctgcagcgggtgaactggaagaggagggcttccttctcaaagcccgtaatgtctgcaccgaaattttacccattaaaaccgacgacaagggacgaattttcctcaattttcgcgaggcaagtgccattatgaacgaggatgagattaaggacaagctgcggcagaaatacttcaattttggcaggatccttcccaggagaagttgggcatccgccactcagcatgctctaccctttagtgcggtcaccacggctcctccacaagccacagtgggtgtaggtgacttagcggatgattgagatcactttataataattttgcgaccagaaatcttttacaacattcattactagaacgactgtaaaccatttatgtaaaaccttaaaaatataaacatttgtattgcaagcaccgaaatttaattttctttctaaagaggtgatctaattgatacagtaaggcttaattattattattatttcattattatcaatagaaactggcaagtattgtataataataagtactgtattgtatatcaaaaaccttatgatcggttagagtgggcgtgaccatgttctgaaacaaactttaacttcggagacgacactagaatatctagattttatcgttgccaatatctcgacgttttacggatggacagacgaacaggatatggccagatcggctagtagtcctgatcaaggataaatctcctctctgcaaattccttctctatatttctgtgtttaaattatctttccatcttgttatttcacataagcagtcctgagattctgttagaggtgtaatgacttgtttaacatgctctaagcttagctacttgttctactgaagtccccaggccgtgagaaaggacttcatgtttgactgggatttttcggctgcctagatgcggattcctcgtcaggctttcgaccaggtctattagcaacattgttgccgggtcttaacgctctgaaagccacaaatcacgcaaatgctgccacattgttcacggcgagctgctgagctttgcgttgctgatttttggccagatctgtggctataagtatcttaagctgggggtcggagtctgttacactttcacagaactcaaaatgtcgtatttcacgtatttttacgagcgttcgcgtaaatttatgcgaaaaatcataaataatctgggcatagctgcctttctgggttcatcgagccctcggcaaacaaatttttatttgctgcgaggggcgttcatttcggtttctgccaatgttttcccttttcagcaagtgggca

SEQ ID NO: 30608 - DNA, 3267 bp, DROSOPHILA
atgattacgggaccggaggccaggcaaacgcacaggttgttggacttgaagaagcagcaatgggctaaggagagggaggaaatagcgcgcatggatgagatgtaccatcatcaccacacctcgcaccacaaaatcgaacgcacctccattcgcacatactactccaacctggatctcagtcaaacatcgacctccaatcaaacttcgagtcactcgcgacgagcgccaggtccggatatgcaattgatcctgcgccagccggagtatagccaggacaatcagggttatatgaatcagttggagcggtacatcgacgatttggatggggatgccgatgcggactttgaggacgaggatgagtccatgtatcgaagaaccaggagaggaagctatgcacccggaatgtcctctcgtcagatgcagaatcctgcccgctatgcggaactagtgcccacatctcttcaaactgccaagggaaggatgcagaactctcgccaggaggcgcagcaacatttgaagcatcaacaccagcaacttttgctgcagcaacagcaacatcagcagcagcaacagcaacgcctgcggagtcccagtttgccagcgattagacagagggtgagacaccaggacagcaggacgggaaaaccaactgacattgatcccggcaacgggccacatcgattaaacaatcccccgggaggcgctggtaacccgcctggtggaggtggtggagccccggggcctcctggttgccaggaggaggacacatccggctatctgagcgatacgcccaagaatccccataccccggacatttggttcaacgacggtgcgagtcaaatcgagagcattagtggcatgggaagtgccagtgtcctggatggcggaagtgtgggcgctgtgggagggggcgtggccgggtgccgacgcctccgccgatcgatacaggcgggcacatcaggtgcaccaattcctgcgccgattcctatgcccttgccccaccatcaaccacccccgggaaatccactgggtaagatatacaccatcaagggacgacgtgtgccagggcagggatacgaaccactcgccgccgatggatacatggccgatggatactgctatatgcctgcaccgccaagctcatcgaacatgagcatgagtcgcgatgtctccacctcgaatacttatcaggtgcacattggcaatccggaccagaatgatttctttgtccatgagcagcacgagagggagagggctcgctgggccaactttaatggtggagctggccatcaggcagcccagcagccgccaggatggctaagtcgcggaatgcacgatctaaaggacagtgaggacgatgtacaatcaatgcagtcatcctcaacctacttaagagggcagaatgcccctctagatgctcatacactggccgagagaatggacaagagacgcaaggcagcggagtaccataatgccatcaaaaagcaacttcacgaacgggaattgataaggaaatgggaacatgaacgccatcgacaggaggagcagatcgaggaggagcgcatccgtagacagaagcaattggagcaggagcgtctggaatttgagagaagaactcttcaggaacgcgaagaggcccagcagaagaaacagcaagtaatgctggatgccatacagaaagctgaagtggcggccaaaatggaaagacaaaaaaggcgaatggttcgccagccatccaaagtttctcaagaaacagaagaggatgagtccgagctaattagagttcaatccgtggaggaggaagaagatgcggaggaaaaatctggggcagtagagccgccatcccaagaggaagagacatcgaatacaccacgtggtgcacctccagttatgtcagaggaaaaagttcttataggtacccccatcaaccttcggcgcaccatcacgaaacccattaagcaacccagggattccagaaaagaggacccgaaagaaccaacccaaaccaaagtacagaccactttcctgggggaagataaggagaatgtggcgctgctgatgcaaccagctacccttattccattgcccgttaccagcgatatttttgggctgcaaaatgccattggcaaccttcagatagccacttattttatgcaaccacccatgcagaagccaccagagacaccgggctcttattcgaaagccacgatgacccatcgtacggacacctccatctacaccgaggatggttaccaggcggaaaaggaggaggatccactgacaactgcacgatctgggagaacggatttggtgacagccagtgggtgcttctctccagattcactagaggtagatgtggctccagtcttaatagctgaaacagataaactggcattgatacctctgaagacacctctacaactgggcatctcgaatagttcagatgacagaggtgaacataatcatgaggtgggtcaccaagcggacgtggagacccaaacagagttacccctcaattgcgatctctgtttgttccacgataacttctacaaggtcttgcttaaacgggaggtttctaccactaccacaacacagacatcgaaatctcagacacaacccgcaaaggaatcaactgctgaaaaagatcatgagaccacaacgactacaaccaccaccacaacaaccacatttaaggctaaaagtaaggataaagacaaagaaaagaatttgaaaaggaacctaaataaggataaggacgctaataagatggacgatcgaccaaagtggggcgtcaatcgtccggttgtccagtatgtaaaagccagtgatcgggatcctttttgcctgagaaagaagaaaaaccacccgagcaccgccaagccaccgagatccttgtcaatggactctcgtttggacagtgtggctctccccgaagatcggctaataaatatcgccggaggacctccatctgcagcgggtgaactggaagaggagggcttccttctcaaagcccgtaatgtctgcaccgaaattttacccattaaaaccgacgacaagggacgaattttcctcaattttcgcgaggcaagtgccattatgaacgaggatgagattaaggacaagctgcggcagaaatacttcaattttggcaggatccttcccaggagaagttgggcatccgccactcagcatgctctaccctttagtgcggtcaccacggctcctccacaagccacagtgggtgtaggtgacttagcggatgattga

SEQ ID NO: 30609 - protein, 1088 aa, DROSOPHILA
MITGPEARQTHRLLDLKKQQWAKEREEIARMDEMYHHHHTSHHKIERTSIRTYYSNLDLSQTSTSNQTSSHSRRAPGPDMQLILRQPEYSQDNQGYMNQLERYIDDLDGDADADFEDEDESMYRRTRRGSYAPGMSSRQMQNPARYAELVPTSLQTAKGRMQNSRQEAQQHLKHQHQQLLLQQQQHQQQQQQRLRSPSLPAIRQRVRHQDSRTGKPTDIDPGNGPHRLNNPPGGAGNPPGGGGGAPGPPGCQEEDTSGYLSDTPKNPHTPDIWFNDGASQIESISGMGSASVLDGGSVGAVGGGVAGCRRLRRSIQAGTSGAPIPAPIPMPLPHHQPPPGNPLGKIYTIKGRRVPGQGYEPLAADGYMADGYCYMPAPPSSSNMSMSRDVSTSNTYQVHIGNPDQNDFFVHEQHERERARWANFNGGAGHQAAQQPPGWLSRGMHDLKDSEDDVQSMQSSSTYLRGQNAPLDAHTLAERMDKRRKAAEYHNAIKKQLHERELIRKWEHERHRQEEQIEEERIRRQKQLEQERLEFERRTLQEREEAQQKKQQVMLDAIQKAEVAAKMERQKRRMVRQPSKVSQETEEDESELIRVQSVEEEEDAEEKSGAVEPPSQEEETSNTPRGAPPVMSEEKVLIGTPINLRRTITKPIKQPRDSRKEDPKEPTQTKVQTTFLGEDKENVALLMQPATLIPLPVTSDIFGLQNAIGNLQIATYFMQPPMQKPPETPGSYSKATMTHRTDTSIYTEDGYQAEKEEDPLTTARSGRTDLVTASGCFSPDSLEVDVAPVLIAETDKLALIPLKTPLQLGISNSSDDRGEHNHEVGHQADVETQTELPLNCDLCLFHDNFYKVLLKREVSTTTTTQTSKSQTQPAKESTAEKDHETTTTTTTTTTTTFKAKSKDKDKEKNLKRNLNKDKDANKMDDRPKWGVNRPVVQYVKASDRDPFCLRKKKNHPSTAKPPRSLSMDSRLDSVALPEDRLINIAGGPPSAAGELEEEGFLLKARNVCTEILPIKTDDKGRIFLNFREASAIMNEDEIKDKLRQKYFNFGRILPRRSWASATQHALPFSAVTTAPPQATVGVGDLADD

SEQ ID NO: 30610 - DNA, 15042 bp, DROSOPHILA
aaaacaatttttaagttaagtttgatggctaaaacaatgtaacgttaattgtatattttttgatccgttactccgttttattattattattatttttttgttgagtataattttaagtaatacttgttgttaatatcaaataatcgaatatttttttttatttttgtatgtcatactcatatatttctagtatagatctcagaatctcatctcttcaaggctttatataaggttaaaataatattattaaaacgagtgaaagcatattttcaagtgcatgagtgagtatatattttgcttgcatattttgcattttacattaatccgcagctcttcttattcgatgggcgtgagcgggtgttgtcgtgatattccatttcgcatttagcactttacatttaacattttgcatggcgcacacgccttggcctgaaaaagcggaatgatggcaacgatctttacgcttttcgccagattcttcggtttcccagataccaacccacatccaacccaccccaattaatatgcgtgtgatcgatcgtcgctgcagtttttgcgaatttgcgtatacgggaatttgtgcacgtgatgcactcgccaaaattccatctgctcacttgctctgaaaatttacgacctgttgtttttgacgttgatctatgcttttttcctccaatcaaacagctttgagagagagagaaagcttcttacggtgagcgtaagaaggcttgaagagcgaagaccacaagagaagactgatagaaaagaagccggctgccggccaaagatcaacaaaaaaaagatttaatgcatggcagcgaagaatgcgggccaaaagagagcgagctttttcttccgatcgtgaaataacgctccattctctctcccaaaaccgcgaacgctccccccttaagagagagtgcccaagcgataaccacaagctataaagtttttgtggatcgagcttggaaactcagttgaatttgagcagtgatcgcggaagcctcataagctaaaaaaaaaaaaacacacgaaattcatgcacccacaattaattttcgttttgtgaagtgaacagaaaccgtgctataaaaaagaaaaaaaaaaacaccagctaaccaagcccaataaaccgcagaaaaatacaaaataaatacaaaacaagtgtagtgcgaataactaaaagcaaaccatgtgagcaagtagaatttatgctcgagtgacaagaaaaaaaacacgaattttacgtggcaggtgtgtagaagcgcattccacagattgtacataatctatataatacaggcactggtggaatctgcgaccaagttgattttttcgttcccctcactctgctcgcattaccttctttataatttttttcctaccgccgccgacgattatataagccagcataaaagtagaagggtaatgacggtagcgttgttggcccatacaaacacccaatatggctatacaaacaaacaccgacacgcacattgggacacgttgagcgtacatagataagatagcatagctaataatataaccagggggaaaactgtacaataacgtcatttataaaatatttatggatttggcgtacgtttttttcaatttgtgcttcgtattttcgcttttaagcaacttccagatgctgctgccctagggtatatttaaacattattcgcacgcatttgctaaataataaacaaattataaataggtaacttaataaaaagcccaatagcgagaacagatgaaaacggaaaacaccagatgagtagaatacacagggacaaatagtcggcgcgactgacagatcgtcaaatgctgaaagcttttcgtactactctatgctcgatgaatgtatctttgtatctcggcatcgtttatcatgtgtctcactcccactcgctggctgccactcggcctgggtcgcgtttttatttgtatttaattttgttgtattttttccgattttttcacttttttgtttacactaagaaatcaaggttaaaagcgcaaagcggcgtgcgtaaatggacagaaattaggcagagttggtattgaatttatcgcaatgatcaaacaatttgatttcattagccatatcatgccatgaccatgcccatgcccagtacctatactatacaattccccctcccctgcgacacgcacagtccattaaagacttatttaagcttggcagccaactactcacaaccaaaaacaccaataaaaaaaaaaaagaaggaaagaagccggccaagctttaaagagccgaaagcgaaaaagcaacgccgaatccgaatgtatgaaaaccagagcaaataaataaaagccggaggggaagtgcttacgtgacggagtcgaagcttcaatgccctagggaaaatggtttaagatctgctcgacaagagttattactccatatttcagattttcaagacatgctttagggttaccatccaaaaatgtatcaacctacagtgcaaacttatcttttcacaataaatcaatcgaataaccaaattaaggggtgtatgaataatgagcggtgttcgaatttggtcaggttccatggtttaagaagtaattcaagaaatcagagagttacacttcatttattaaacaatcaagcagtgataatggaacttatttatgtttacaagaaacgtcaaaaataactctttaacaatcctgcggttccccgaaataaaaaacctaagtagacaaataagcaacgccgcaaaataagaaactagagtaaataaagcgatgtcggaatacgggaaaaaacttttcagatgtagctgaagtttagatactctagaaaaatggcaccaagaattaaaattttaatgaatattaaattttggcgttattttcgatatttattagacgaaaaagaatctatgtaaaactacatcagtttcaatctagaatctggaagttttacgattcttccaaggcaatgaacttcaaaccctttgaaccctttcaacagaccatcttttcatgctttaaacccgggaaaagcccgataaaagcccaatggcgttccggtcagggttcaaagcgattcccattagcaacccagcgaaatgcaaatggaagttcggcaatcgatgggcatgccaattgccgtggaaaactttacagactccacctcgaaagagtattctgggcaaaaatgcgaacggcatcgccatcgagcaaattcagaggtcagagcgaagcaaaagcgaccaaaagcataacaaagccgttgagtaacgagacgagacgactacactgcgatgaaatccgatatcgtgtagcgtcgattggaagccaattcgatacatcagaaaaaattgtatgtttctgtcaccgctgccaagttatatgcaaattttgaataatactttgcatacaatttgtaaacgttctgtcgaaaggaatccagtccatgaacttcagaaaatcatataatttgttaatcccaaaaataatactatatattagctactcgagatttgacacaaagtgggtgctaatatatcactattacaagacgattttaaatattttcggcttgcctctcgccctacaaacgaacctccaatgaagcattaaatacgtacaaataagcatattaatcccataatacgtatttttaattttattgcaccgggaaaaatgggaataaaacccgacctaacttttatgattcgagcaaaattcctacatgtaattaaattcatttaatatttttcgtatggtccgtaacgacgtatttgactcaagatgagactgtgacgtaaaaactataaatttcccaacaaattccacaactgaaagcagatttatttagcatttcgcataatcacttgacgtcatcgctatcaacattttgattgaccatttaagatctcacaagtgcaagataatatttgtaatcatagattttcagtagatacaatttttatttgtgctgtacattgattaagtgtggtactgacttttgataggggattttcacttaacgaagcgcattttaattcataaaggtatctgacttaacttgttagatttatatatggtaacttaatttgttcccaaatagttttcaatagttttcaggctttgaagcctgaactgattaatatgttggcactttttcgctgtaaaatgctttcaatttttatctacgagataagatatagataaataggtctgggttttgataacttttcgaaccgtgtattttcgctttaagtttcgccagacaacagtgccgagttgcagtgcgctgaaaagaggtgagaagaggagctttatggcagtagcggtggctatggcaaccgaaagagccaaactgccgcactgaggttcgctctcagcgctccccctaagcctccaaaaacccctctttcggcctcatggtgcccattgtaatcgccccgcccttccctccagttcccttaccacacaaaacgtacctttcaagtgcgggctgccgatgtgtgtagctgctgcgatgatgttgctgctgctgctgttgttgttgctgctgctgttgctgctggctcatcaaaaagccaaaagttgttgaacgtgaaattattgtacgcgaacacgagcaaataccaaggcagatgtgtgtgttcgcaagtatttatgcacacagagcccgtcgagttttgcatgtgttgccttgccgctccaagataaacagctgaaaagaaaaagctatagctagctagagccgaagctaaagccaaagctaaagccgaactggaagcatcgcatagatgcatcagatttcgcattcaagtgaaatttatggcaataataaagcttaactcgcgttcgaggtaaaaagatgatgaactatgcagaaccgagtacaaaggaaactggatgttgccattcgtcagcgtttcatacttcatttgccgttgccaactcacaatcaaccattcagccaaccagccaacaacctcccccacttttcaaaccccttgactttatgcgggaaaaagttacttagccgctatcacagtttagtcatctacacaaatatgcgattaccgcacaaagcgcaagatacagatacatagagtcaaataccgctatataagctatacaagatatgcagaagctcaaaagaatgcccgaaggtgatcgtacagttaagcgagtctatatatgtaagcacttctctctaaagtaaatattacttgggttccaaacattctgagcgcgatttgtatattcaatctttcacaaaagtagacaatttttgcttcaaaaaattatggactagcacataccagttagatcgatttatgtggaaagttctgatgattatcacatccgtgaagtaactatatcaacttatctgtggtacacaagtaatgcacttggaatgcattccacaaatttcaggagaaaatcaaaatatcatatttgttggtattgatgcagggaaagttctacccaaaatgaatgtcttggaggtgagagtgtagaaaagaaaacaagtgacaacaggaaactgagattaaaagatccgacaaaatgcgacccatataagataagatctgtttggtaaagccaacgagacgataattaaaattcctccagatataaacaatatctgagagctgattgttgtcgggccaacttctcggaatatcccattcagttcgccgccagtttgccatttaaatccaattttcggactacttgttcgctcgattttccttatatatatatatatcatttttcgtgagttcattaatctggaattgtttatggctccgcttagccaaatagatgatgtttggagcgtcagcacacttcgcaggttactgaacctgcaatacgcgtactctcgttcatatgaagctcgtccaaagcaaacaaattcctagaaatttcaatggtctccagcactctgttttcacatctacaatatcgcagttggatgtgtaatcagcgtggacttgtagacgaacttacttggtagatattcacatatatatggatatatatatgtacatacgcgcaacaggaaactgacatctcggttttatcggccaagtgaaaaacaacactgaatttaatgcgttttcctcgaattttgtctacctgagagagtaatgtgtgtgagtaatgcaaattgtgcaactgataagataaagccgaaaggctctcatttgcacatttgctctgaggacaagctgctatttccagtcatcggaaattcgatgaaaggaagttcagtttccccagaaattaaacggagcttctgtgaacgggcacacagctcgtatcttatagatcttcggcctcgtttaaaggagactgtatggatacgtttagaatttgattgaatggatatgaaaagcaaatcatcgtccggcattcaatgccaataaagcactgggagaaaagaggacgatgttgaacagtatgcattccggaggtatttcatttttaagagtttataaagtattttctgcttaccatagcaacttatatatttccagtatggttctaatacacccaactgtaaaatttgtcggtttaatcatattggttttttccacaactagctagtacattttttaaattcctaactctacgagcattatttaagtccttctgtaagtgtaatgtgtaaatgtgtaataaatgtgttattattttgctcagtgagcacatgcaaaatttgttcgatttggacacgtaggcggacctggacaggtcttttatggacaagccagcagtgactggcccccatttcccatttcccccctcccgacgatgtgggactgtatgcctttatcagtaccttttcagtggcgggcccattcagcaaagccagaaaacatgcacaaacattttcagttgccggggaaatggtgaccccgaccctcgctgataccccgcacatacccatacgtcccaaaaatgagagactggcacttggtcattaaaactactcgcagagccaaaaaaaaaataggctgctatttttagcagtgacgaaccggcaaaacaaagcaaaccaaaccaaaaccaatccgaaaccccgaaagaatgagagggcatttggctgtagactctagaggcaccttcttattaactcttcgagtgtttactgcctttctggcctgctttcgaatgcaattaaattagaactcgcatttcatcagctgttaaaaataacaaataaaatcggtagaccatttgtagcggaggtaatgaatttataaaatgggaacaccctttataatggcattccgaatgcttagtctctggcttaatacttaccattcttttgaggtgacaactaaagggagtatttcaaattcgattaagcagaccactttaaatggtcattagtaattatcaaagtctgtaatattggtaagaaaagtaataatacgcatcaatcttaacttaagacaaatacttaacaacaaatatttctgaatactacagtgtagtcttattattctcttttcagtcggtttgccgagaagatgccaattgattttgattttcgcaaattataacgagacatttatatgatttgatagctggccagaaattcgcaaacaattcccggcgaccaggcaaggtcatatcgattgtcatcagctgctgtcgctgccccaccacccaccgcccatcactcgccaccaacggcccaccgcccaccgcccaccgactgacaccacccaacaacccactgaagagcaaacagagcaaatatgccatactcgcatacgccaaggaggtgcttgcaccagatgctaataatatatgtgctaatatttgtttccagtgcaacgacacgtaagtaaagtcacccctttcatgggattctgtatgctatcactacatacatatgtacatatatatacatatatttacccaaccttaacaagggaacaaattaatttatatttatttatggccactgtctggggagtttgtcagctatttgtttaggactttatcaaactgtatcagtatcataaggtattctagtattgcacccacgatgcaaaagagtatcgcattgttcagcttaaacagtccacaggcgctgacggcaaatacatgctccacattcttcagatacaggccgtagaagtgcatctggggaataagatacattatttaaagcctggctaatgataaaaatatgacttgcacacaagctgtttatcatatgctaacaaaaaaaccgataagctataatttctacttttccaccgacaatgagtggtgaaaaaattatagaaatccagcttattgtattcataaacttgaatgagtaatacgtaacgacgtcggtatttccctttgatgattactgtttgtttcgatcacagtcggagttatttaggtattccaatcactttcgataactattttatgaagtgcgatttacaatcaacacctgctgaatataaatggcacttattaaataaaaccaaattgttctatacattgatctattagcatataataatgacaacttgctgctacaaaaagtagatatttttcacagagcaccatttagagtgaagtaacttaaaaaataatacacatttgaacttacagtgtgcctgagttgcttaacagtgatcctggatggaaaggccaatcctccgcctttgatgatttccctggtacagttgaatcttctttctgagtagtaggtgggtaaaatgaccagcaaaaggttggtgaagagccccaccaaaaaggcgatggcgaagtagttcaacggaaacgatcttccatattttcgcaaaataaacttgctgtacttcatgaagtatgtgaagaacaggtgaatcgtgcactccaagggcacaaatcccaaaaagcagacggcctgaactgcgcacaacgagcatatggaccgatggagcttcaacaattgatgatgtacatgaagtaatctccacaattcgagggccaaccacttttgttggcctttgtacagctcctggcggttgggccaaaatccggccttctgggaactttcaaaaatatgctcggcatccgccagaattttggccagcagcagattggagtgacgaacgaggtgacccagaaatagtatggccattgtgtacatccccagggaaagctgcaggatggcctggcatacggatacgaaaaccaaagagcaggcgtacatgaagttccttcgcacttccggatcatccttgagtatctgaatgggctgagccatggagagcagataggaactgagtagcaccaccacttctagcaggtgtcccttagtggccagacaatccatggaatccttcagcttccgagtgtgcatgagtcttcttaaccgccttcgacacttcagcaatcgattgagacacccaataatctccgcctgcttgaagcagtgtatccacagagtcataaaagcacagaccagcagcaggacatatcgattaaagccaatcattagcagaattcggttttggcgcagaaaggccatcctttggaaaatgcaccagaaggcgaagggcgagaaacagcccacaaagatcagcatcacgcagccgtggatgcgaagatagaggctctgtctgaccctcttaatgcctcgaggactccaattggcggtggccattaggccaaacaccctggtcagactgtacagtatacccagggccgacatacccgggagttgaagccaacgcggcatcgctgtgattcgaatgtatccgagctgaggcgaaactgctagtgctagtgggtcgcccaaaggcaatggcataatcgaatcacagccagaggcagcactcaaggcaatgcactcggaaaaaatgtgtgcaattttaggggtagtttaaataattaaaaaaatatatataattttatttttggaaattgaagcttggattaaagcttttcgcactaaatagcacaaaaagcacctgagaaataaagaagtaactatataactaatactacttacatatagtaagaacaggaaaaatgttaaatggctaaagtgtttacttgctttaagctaagctcttacattacatctgcaaatgtgttccagttgtttctttcaaattctcacaaaattgtgaagtcgtatggtaagggccaacttccatttatgaacgatttgtttccgagtgtggttacgccagctattagcctgattgaatttcgtttagccaaggcgttcactcagccagataatctgtccagataacacactcagtgagcagcccaatagtgccacaacaaaagggtttcgccgatacatggatgcatggacggatggctggatggctgattggccaacaagacaggggaaaatcacattggaatactcggatggaaattaggcaaaaactgagagtttatggtctgtccctcactttccaccgttgtatggatacagaatgtatctcacaaaagccagccttcggaatcagtcaattttcaagtggcttcatgtgcttgcaccttccacctgccggttcgcacctgtaaatggggttaaactggatttgcaatcagtgccgaacgcagataaagctaacaatttaaattcctgaaacagttggcccagtctctctctctctctctctttcgctcgctgtcgactgaagatctcgtatcttcgcatttgtatctgtatctgcaggccacaaagtcaggacgttgtcgctggattattaaaaaagtttttcgcttttaaagagtttttccccctcttgactgttttttccccatttttttttttttttttttttttttgcattcatgctacataaaatgcaaaacactcgagtgtctatatgtgagaaagtgtgagtgtgcgagtgtgtttttgtacttccatcctttatgaaaactttccacggctgtttataagtttctcaccgaagagccaaagtggcagcagtagtaagggggggcgttgagggaaatatatagaaaaatagccaaccatgtatgcatgtatgtatgtacaagtctgtgtgcgcttttgtcctcctgctcggatcttgtacatggctgtaaccctggttccagattctatagcttctggttttggctccgtcgcctgctccgactttatctgaataggcagccaagtgtgcggtttggttttatctgggttaggtggccggctagtctgacagtttgctccgcagctcgctgtaaattgctgtgcaatgtcctcgtctgacggctaattcattcacatttttttgagttctctacaacagcgctagaggtataccagcaattcgaaacataagtatatatatacatatacagaagtagtatcactttttctatacgactagtttcgattagtaacataagcttattgtttaattaggaaacaacagatttgaagttgttctagttaggcgacataaaatcctttttgcttctggaaaattgtacacagctttaagtactttgttgaaaaaagaatgaagtgggttatataagttaaatatgataaacttgatcattgggaccataataaatacggaagcaattaagagcacatgcaaaaaagagcataagatatcctcctaatcccgagtatttgcacatttttgcaacgacatcaagttgagtagcatttaaattatttctattttttggacatgcctcgtttaaatctaacctcccgccgccaaatttcaaagtcgaactgcggatacgagggcggctgacaactgtcccagctgtcccactgataacacgacagcgtcagcgaacaaatgcgaaaaacaacgaacaagtaaactttaattaaataaagtgtaagaagtttgttgagctccttcaaagcaggcgccgtcgacccaccaaaaatccagcgacccaccaaacaatccccagcccaaaaagcattctgctcccccgacatcaaagtgcaggtcccaaagaaaacccgaaaaagtttagtttttaatattcgacaggctgcgaaggttcttgtgcttaaaatcaagtagatttttccagccagatatttacttttgtcccgaccagatcctgattgtttacccgaaaaagggaaaagccgaggaccaaaaagtcaaagggcacggaacagagagagaaagatggaaaattcccattatatggccgagtgaaaatgacaaattaacttgaacaatgagagtgaacacatttcgcagaagggagaaatctccaaagcaaggaacaaaataaaataaaacggagatttagtctcaggtatagaatataaaattaatggaactcaaacaggcagggctcaacaatcaatggcaagtggaaaaactttaattggtataagtttactacattacttcgccactcggtagttcggggccaatgaatcacctagataagcaatggacattcgatccgataagttgaccttaatgcattacgctgttcattttcattttttccgttggccctttaaaaaagagggtgtataattaaaacacagaagtgggtggtgaagcattctgctaggtgagaggataataagttggttgtagtactcagttgcaaagacttttagctattgtttcaaaaaagaagaataatatatgaggatggggtttctttgggtttcttctttaaactaaactaaataaattaaatataattcctttaaagtttaactacttacaagaggtacacctttacgcatggcatacctttttgtacttttgaaatcagcttacgaaccgagcattttgttattttctagttggtaaatttaagcaccgcactctgctataaataagacagcacctcttgaggtgacctccattgcccacccacgcattgcgcccacttctacttaagtatacctaagctgcaactgagaccttcatgttttattgaccaccactaacggctgcactttctccacccataatttcgttacagttgaccaggagcccttgccggatttgtgtcagtcggttaaatgccctccggatgccgaaatgcaatgcccggcggacagttccatacgccataacctacttgcggtggacctgattaaatcgaatgcggtggagttgcccaacgcgagtgagatggcgtcagccgccgacggggtatcctacaatagaggtctgatctccgatgaggattacgtccagtgctgcttgaaccggaagtgcgtatgcaagacctgttacattccggactgtccctcggatgcggacgaggacgtggtggtggttgaactggtgccggagaataatcaaacgcccggagaatgttgcggcacctacgagtgccaggcggagccaaattgcaccgtggtgcgggacactgacttccactggctgaagcaatgcaggcgatgcaagtgcgagtccggactgaagatatgccacaagacttgcgatgagagggccgaaggtgtgtgccagtcgaagatttcgggcatgttctacaaggatggggagaactggacagagaactgcaagacgtgcgaatgcgaaaagggggagccgaagtgcacgatgtccttctgcggcaacctcaactgtcccagtgaacagcaggtgatgctcaaggacacctgttgtccggtttgctggcccaagtgtgcgccgatgccgcacgagaagcaggacgatgggtcctacgaggattatgtcgatgagtccgagacgccggaggaggattccttgccgccactgttgcctgatccacttaccacgcagcaaagtgccgagctagtagccactagcaccaccacaagcagcaatggcacgacctcaaccacagtggtgccactcgccgccaccgtaaattgcaacaacgcctttgaccaaccgaaagtcgtagaggtggtaaaccagaccaactattatttctactggcttgtgccctattcggttatagcttcaattgcgattgtggtaatgagcttctatatttaccagcagcgtgccaagaaacgttcctacgatccggtctctattctagaccacagcatctaagcaagagacctttcgaaatactaaaaatactactaaaattgaaactaatttagtcctaagtattcccgtcttttccaattgtacgttgctagctttttgagtgtgaccagatgagctgggaacgtaactgtgctttagtttcaggcctctggccactctaaattaatcagtttaaccgcatagataggaataccaaatacccaagcctttctaatgcctttgcctttatttgtttggtattgatctcatttaaacttttcactcttcacttgcaacgaaaacaaaaattaatcgaatgaaaactacacgaaaatataagcaacgaacttaagcagcaactaaatcaaagtattcttatgaaattacgcaaaaatatttaattacaaacgaaacaagagttactatttctaaacacacgcaaatgatgtatgtacatactgtatgccttcctctttccatcggaagtcgactttttaaacttaaagtttgatttaagagaaatataataccaaatcatacttagcagcgagtaagcaaaactcgaaactaatcgagacacgtcttagattttagtgttagcttctaatttaggaagtatgtgatatatatgctaattagcctatgtaatttgtcaaccaaggcgtgcagctgtttaaaaacatggaaaacagtatttgcaacacaagacccgaaagcccctaaacgaaatgtaacgcatcgcaatcgctaaaggaggttctactttagctaacgtcataacgttgccacttaaatgtatactataaaatcaatatttaaatttatgtttaaaaataaaccaaaattggtatgcaaagcgatgaaaccaattaaattaaatgttgttaattataaaagggatcgtaatttatgtgttcattacatggctggtgtgctgagaagcgcgtaatggagactagacattatacttcatactatattttacccgcattaccaaattattaattgataaagggtcgac

SEQ ID NO: 30611 - DNA, 1656 bp, DROSOPHILA
aagcctcataagctaaaaaaaaaaaaacacacgaaattcatgcacccacaattaattttcgttttgtgaagtgaacagaaaccgtgctataaaaaagaaaaaaaaaaacaccagctaaccaagcccaataaaccgcagaaaaatacaaaataaatacaaaacaagtgtagtgcgaataactaaaagcaaaccatgtgagcaagtagaatttatgctcgagtgacaagaaaaaaaacacgaattttacgtggcagtcggtttgccgagaagatgccaattgattttgattttcgcaaattataacgagacatttatatgatttgatagctggccagaaattcgcaaacaattcccggcgaccaggcaaggtcatatcgattgtcatcagctgctgtcgctgccccaccacccaccgcccatcactcgccaccaacggcccaccgcccaccgcccaccgactgacaccacccaacaacccactgaagagcaaacagagcaaatatgccatactcgcatacgccaaggaggtgcttgcaccagatgctaataatatatgtgctaatatttgtttccagtgcaacgacacttgaccaggagcccttgccggatttgtgtcagtcggttaaatgccctccggatgccgaaatgcaatgcccggcggacagttccatacgccataacctacttgcggtggacctgattaaatcgaatgcggtggagttgcccaacgcgagtgagatggcgtcagccgccgacggggtatcctacaatagaggtctgatctccgatgaggattacgtccagtgctgcttgaaccggaagtgcgtatgcaagacctgttacattccggactgtccctcggatgcggacgaggacgtggtggtggttgaactggtgccggagaataatcaaacgcccggagaatgttgcggcacctacgagtgccaggcggagccaaattgcaccgtggtgcgggacactgacttccactggctgaagcaatgcaggcgatgcaagtgcgagtccggactgaagatatgccacaagacttgcgatgagagggccgaaggtgtgtgccagtcgaagatttcgggcatgttctacaaggatggggagaactggacagagaactgcaagacgtgcgaatgcgaaaagggggagccgaagtgcacgatgtccttctgcggcaacctcaactgtcccagtgaacagcaggtgatgctcaaggacacctgttgtccggtttgctggcccaagtgtgcgccgatgccgcacgagaagcaggacgatgggtcctacgaggattatgtcgatgagtccgagacgccggaggaggattccttgccgccactgttgcctgatccacttaccacgcagcaaagtgccgagctagtagccactagcaccaccacaagcagcaatggcacgacctcaaccacagtggtgccactcgccgccaccgtaaattgcaacaacgcctttgaccaaccgaaagtcgtagaggtggtaaaccagaccaactattatttctactggcttgtgccctattcggttatagcttcaattgcgattgtggtaatgagcttctatatttaccagcagcgtgccaagaaacgttcctacgatccggtctctattctagaccacagcatctaa

SEQ ID NO: 30612 - protein, 336 aa, DROSOPHILA
MQCPADSSIRHNLLAVDLIKSNAVELPNASEMASAADGVSYNRGLISDEDYVQCCLNRKCVCKTCYIPDCPSDADEDVVVVELVPENNQTPGECCGTYECQAEPNCTVVRDTDFHWLKQCRRCKCESGLKICHKTCDERAEGVCQSKISGMFYKDGENWTENCKTCECEKGEPKCTMSFCGNLNCPSEQQVMLKDTCCPVCWPKCAPMPHEKQDDGSYEDYVDESETPEEDSLPPLLPDPLTTQQSAELVATSTTTSSNGTTSTTVVPLAATVNCNNAFDQPKVVEVVNQTNYYFYWLVPYSVIASIAIVVMSFYIYQQRAKKRSYDPVSILDHSI

SEQ ID NO: 30613 - DNA, 2351 bp, DROSOPHILA
tcttcgattcgataaacgttaacaattagttaacactctctactcggagtgagatgaggagaacgatgcctgatgtgaattccaatcagtccattagtccaatcagtcactcacgatgcgaattgggttggaattcgaaggagacactctgatgtctgacgctcttaattatatcaatgccaattattaagatcgtggtgagcttatgaatttgtgaccatttcatgcttagttaggaaatagttagtaaaaacgtctctgcgaatcatttaaaccaaacaatttataataggttaacgataaatgaggtacgattcaaaacaatatccatatcaaacacggatctaatatggaatgttataattaaaattatcgctgtagtttcctattaacatgtaaacaattaataagtttaatcaatcataaaatcatgggagtttaacacaagtataatttgatatatacatgtatacatgtaatagaaacgttgataatcctgtgggtaatcatcaaagcatcaggatgacacactattaaattgttttctattgttttgaccaccattgttcaaccaacgttaatataaggaaattaaagcccgttcgtgtgttaggcaatcaaaacaacaaagctttgtgcacctaataaacctaatttagagtgtgccaatttatgttggaaacaaaaatattggtaaaggtacaaaccgaaatttaaaattaatttaattggtttgataacaagactatttctcgaaacaaaatggaacactttataaataattaaatcatagaatgattttatgattactaccgtacagaaaattctattccattataccaaaagtcaaaagattaccaaatcgaaatgaaaatttcaaacagagttctgaccgctggaataaatcctaatatcaatttcttcgtttgattcgcatacaaaatggatggcatgtacaggccggaaaatatcattttaattggagctctgggagcgggacttacttgcatggatcccacagcataagtccttttccggggcagtcgggtgagcggatcacgtcgcactccttcggattgcaatagcatttgaggccatttaccacgtggttgctgccgccagatgctgccataaccagtagcagatagcaccacaagtagatgagcagcgcgctcacgttcaggcggccaaaataacttccgttcgagcgcatcctaagcggaagcttggcattgttgtgctgctgtttgccagcgagccccctctttcgctccccctgcgacgaccttgtgcgtacatcctgctccaggaccacgcccctccgccccacgcctctggcacttccgcccatttatcgaaaggcaatttttattgcgccctgttggctggctctacggtgcgtttgcgttccactgcctccaatgatgatgatgctgctgctgatgatgaggatgcctggcaaggattctggccctggattcgactgcgggtccggcgcaggcaatttgcatgttgactgcaaagagcaagagcgttcttagatgattaaaatgccataaactgcggacaggacctctgtgacccatccccaaatagctccagaattggcgttttacaattgaaaattgtaaaattgcggaaatcgcttgccggtctaatttcattaaaatttcattgacgcctgcctactttcgatggtcataaatttgtaaaatggttccgcaatgtgtttcgctaaattgaaatatcccaaaacggtgacactttatgcgccaatcaaattattcattaataactctgatgagcaacattttatttaaaacccaatttattccatttcttttttttagttataaaaaaatgtaatttttcacaaaggagtttgtatttaagttttcgagcgttggaataaataaaatattaaattaagttcatagctttctaccaatttcgtgttgggccataaattagcaattagtggcttacaaaactttcagatgaaataaagcgaaagtggagttttgacagacacaatgtacatgtataaaaaaacatatctaatattaaactttttaaggcattgaattaaataaaaaatattaactaattaattaaccttagtggttgcgagataatccttattgcatttttatcgcattgtaacttatttaaattaaaacggattcgcagaagcaaattaattgacttttacatacaaacagcatttagccatctcttagattagtgaattaaagcctttttgatgtcagaaaaacattgttcatcaaaaaatatgtaaaggtcaatgtattgcttcctttccacagaaaatgtattttaattgactgtga

SEQ ID NO: 30614 - DNA, 351 bp, DROSOPHILA
atgggcggaagtgccagaggcgtggggcggaggggcgtggtcctggagcaggatgtacgcacaaggtcgtcgcagggggagcgaaagagggggctcgctggcaaacagcagcacaacaatgccaagcttccgcttaggatgcgctcgaacggaagttattttggccgcctgaacgtgagcgcgctgctcatctacttgtggtgctatctgctactggttatggcagcatctggcggcagcaaccacgtggtaaatggcctcaaatgctattgcaatccgaaggagtgcgacgtgatccgctcacccgactgccccggaaaaggacttatgctgtgggatccatgcaagtaa

SEQ ID NO: 30615 - protein, 116 aa, DROSOPHILA
MGGSARGVGRRGVVLEQDVRTRSSQGERKRGLAGKQQHNNAKLPLRMRSNGSYFGRLNVSALLIYLWCYLLLVMAASGGSNHVVNGLKCYCNPKECDVIRSPDCPGKGLMLWDPCK

SEQ ID NO: 30616 - DNA, 2492 bp, DROSOPHILA
tgctggcttcagcgtggagacctggaaattggatttgaatgaaggctcaattctactatgatcaagaaaaagttccttttttcaaaccaagttggctgttttcaaagtacatttcgcagatcggcgccatatttccatggttatttttgtatactatattcgttcaagatattgtaggagaaaatgtttaatgtttcttgatcagtatcagtcgagctggccatattcgtccgtccgtgtgtcttgaaaaaggttttaatattctgtttgcaatccgactagctgagtaacgcgtatctgatattcacgaaatagaatagcgtacttccttgttttcaatgaaatgaaatgaacaaatattttacaaaagcaatactaaatgttatattataatctgaacaaaatatgtaagaaataccagaaatgtcgttggtgagggaaggtgtttaaattatcctgtgcgactacgttcctttccggggtttcaaccacttggtaagcaacaagcggcattttgctggttaatgctgccgcttaaacgaaaatcaatacaacttgcggtctattttcgagcggattgttaaaaaaaaaacccatccataggtggatttcccagcacggatgctttattttcggcttcctgcttcggagaactgtattccctctgttcattgtgaagctttaaagtttattttgtgagacaggctgcagcaaaagcttgcaatgctgcaatgtaaatagagcagcgcacctgtggaggtcctttccacatcgtcctgttccccctctcacttgccaagcgactttccttacccctttttctcccaactttgattttgagtacgcctgtgtgtgtgcgccggactctctggggcaagttgcctgttgaatgccggacccgctgtcagttggattagcatcctgacgccgtgcagaagcatcctgcttccacctagttcactccgttcgtttgctttttatttgtttgcctccgcgcgccatgggcaaccagttgagtgtgaacagcatccaggatgcggtcatcgatcgcttccgctcggtggctttgaccaccgatgccaacggcgccatgcgcatccgttcgttttcggagggcgtggtggccaccacccaccatcatcatcagcatcagcagaatcagcagcagagtccccattgcagtggacgcggcggacgcatcctgcgcgaaagtagcatcgatggcggggtggccatgttcgatgctctgctccgcgatgatcacgaacatcggctgagcttggatgcagtgcatcgcatgcggcatgttcgcacctcctgcaccacaattcccgaggaggatgccgtcagcgatcgcagcctgcagattcatctctccactctggcccgcgaacgtgaacaggaacttgagcttgagcgccagcgggaacgcgaagtaagttggaaagtcggaaaagtttccaatttccggaaaacagtaggaaatcactaggaatttgtgctgaaaagcttttggcggaaaaaagatttaaagtgtgggagtgtgcgcatactagaaagctttgaatcgtttgaaattggtgtcttgttgattcgatttgtgactacaaatcacgatgtcgttagttctaacacaaataaaaacatgcaaaaaaatgtttaccttattccgcgagcacctaataccctacttagaatataaaaatttaataaaatatgaaaaagtttgctatgttttacgttaaggccttttaattctttcaaaatatctttcgtatctgaagaaaaagaacgaacaggaagaaaatgttcacattttatttaaacattataaatttattttttgcaaaaaggtaaatggaaaggggttaatttttgggatacagtagaatatagtaacctaaactatatactaatttaaagaaagtgcatttcataatgccccacgagctgctttttgcgacaaaatgtcgagtttgcacttgaaactcgaagggaattctaacgaaatcaaagcgctcccttcgctttccctttagcacttctggcccttttctcccgtaaaagcttttccctttgccaggacttgcgtcacaagtgcgagtgtatgtgtgtgaggtggtgggcgggtgtgcgaaaaactttactttttggccagtcgtatttgtatgtatatatttgtgtatatatagaaaggttgccttcgctgggcgtgttggtgaaggtcatcctgtcgtcgtcgagattgtgtttgtgtctggctgctagagtttgctttcgtcctttcgtttgtctcagtcactttttggccaccgtcagttgcccatcgttgttcccaattttagttttttcgccaacttaactgctcaatttactagttaccattcaccttttgcggtcgttacttttcgactttcttgcctgattgatggccacgcgaattccgctgctccgatcatcgaattgtccggtttaacggtcgtgttaatgcc

SEQ ID NO: 30617 - DNA, 492 bp, DROSOPHILA
atgggcaaccagttgagtgtgaacagcatccaggatgcggtcatcgatcgcttccgctcggtggctttgaccaccgatgccaacggcgccatgcgcatccgttcgttttcggagggcgtggtggccaccacccaccatcatcatcagcatcagcagaatcagcagcagagtccccattgcagtggacgcggcggacgcatcctgcgcgaaagtagcatcgatggcggggtggccatgttcgatgctctgctccgcgatgatcacgaacatcggctgagcttggatgcagtgcatcgcatgcggcatgttcgcacctcctgcaccacaattcccgaggaggatgccgtcagcgatcgcagcctgcagattcatctctccactctggcccgcgaacgtgaacaggaacttgagcttgagcgccagcgggaacgcgaagtaagttggaaagtcggaaaagtttccaatttccggaaaacagtaggaaatcactag

SEQ ID NO: 30618 - protein, 163 aa, DROSOPHILA
MGNQLSVNSIQDAVIDRFRSVALTTDANGAMRIRSFSEGVVATTHHHHQHQQNQQQSPHCSGRGGRILRESSIDGGVAMFDALLRDDHEHRLSLDAVHRMRHVRTSCTTIPEEDAVSDRSLQIHLSTLAREREQELELERQREREVSWKVGKVSNFRKTVGNH

SEQ ID NO: 30619 - DNA, 2686 bp, DROSOPHILA
acgccgccgcctgccgacctggttcctcaaggcggaactcccggataccggattaaaggataggggggtatacgtcgtctgttctgggctgcttggtcgcggtataactagttttattaaattgtatacaaagatcaatgagctggaggctccagggtcgacggctggttcagtgggtcgggcactgagctcacgctagtttacgataatcgcgtgacaacgaaggtgaaagccagcggaacagaggcgcacacatgtgtgttcttatagggggtgttaattaagcttccttttttgggtaaatatatttaccagctactcgatctaggaaatttaaattttcagccctattttcccattaataaattccataacaatttcgattttccattccctatgtataaactgaattccgcatttaatgacctatttaagaaaacaaaacatactttgaattctttcaacgctgaacaaatcaaaagtttacagctcgttaggtaattttccacatacagaagtttgtcacgttacattaatatgtttggtgtttgatttaaaaaaggctgagtggggagtcttcaaaaatatatttataggactataaggtgatactttaatataagctccaagtttaatttctaacaattggattttcctactcccatggcacgcaaccttaacttgtggggttcgcgggtctttgggtcttatcattgtgactgtgaaattcgttatcagtagataaaaagcttttcaggccgagtcgatagcctggctatcatgcctaattgccgaaatcactacccccaaccagatctcgccacctccacgagacgagggaccccaagcatttgtttgacgccatttcattctttattgacgcggccaattaagaaggcagcgttgttgatttgattgcgaggcgaatatgaatgcgactggaattcctccatgagttctaaataaagctggagtccgaaaagttgccagatgtaaagagcggcggctctcagtcgctgggaactccaagaagtggaggcgattttctaatcttggcccaagttacagactctattgcacaaggggcttatcagaaccaagccaaaaacttaaaactggacgcacaacatacagcaagatctacagcggcaacagtctggcaacgaagcgtatacgtaatgccaagcaaagttccatccatttaacgctctcggctcgtttcagttctcgggcaggtgtcaagcgacgtacacacgaaacgccgacgcggtcacaattccagaatatcatatacatgctatatatgtgtatgctcaagtggctaatttacatacgcgttgcgacccgtctatttacctgaacctgagctgtctggactacactctttaacatttccttacggaaagcgagtgtacaaagtcacaacaaattttcaagacatattctcggtatatatatatttctgtattcaaacatatcgccatgctggaccccatttcggacgcaccgctggtcttggcctacgtctttatgtcgctgctggtgctcattgtgtgcttcatactggtcaatgtggtccacaagctgtatcgcagtctcaacggcgaggtatcaacggggctggtttctccggcacagcagctgaagacctccatcatggagctagacgccatgaagaccggttaggatgggtgcagcgcagctggctatgagaggcgcgagaatctcaagtctcagtctccgatgtcagagctccggttttaattcgggcgattggagcgatgtacgacgaacgacagctgctgaccacccacacgcacgaaccacacaacctagacgcctgttgatatgttaagctatgcaactagactagacgtaaataaatacacgaaactaggcttacgagtagaaattaactacattaaacgcgctggtcctctagtcacttaattgtttgtttttgccctaaggttaggttacatgtacattgatattgtaaataaaataacgtgaacgataactgaactgcaattaaggtagattgggggcaagtacaaagcacttaaccgatccgtccagacagtaaaacgtcgcctgatcgaacgatgcgtagaaaaggcacaacagccttatcgttgcagtatcgagacgtataatttgtgagtcaatcaaatgcgtgataaggatccctgacttagtcatagatttatacatagtttatttaaaatagcatgttcatctttaaatttgcaataagagcgcagtttgttgttgtggtagctgaatgagtacggactgcaagagacgtcagctttcgggcccagggcctcgcggcttcgacaagttctggtaaacggtgttggggattggatgagcgtagaaatgatagcagcaggctgctggtggttctgtggcagtggtatcatcaatctgtgggatcactgtaacaaaggaaacattactaacaattctcggttcgtttttattccaaatctcaccccgagaaagtctttgggtgctgcgacgttaggtcatcatcctggctgccaagagcctttttcacatactgccaaatggaatttaaacaaataacatataaccaataacctcacaatagaacctaccattggatttaaaatgatctcctcctccattttgttgatctgcctaacttgatccagaacgt

SEQ ID NO: 30620 - DNA, 686 bp, DROSOPHILA
cggcggctctcagtcgctgggaactccaagaagtggaggcgattttctaatcttggcccaagttacagactctattgcacaaggggcttatcagaaccaagccaaaaacttaaaactggacgcacaacatacagcaagatctacagcggcaacagtctggcaacgaagcgtatacgtaatgccaagcaaagttccatccatttaacgctctcggctcgtttcagttctcgggcaggtgtcaagcgacgtacacacgaaacgccgacgcggtcacaattccagaatatcatatacatgctatatatgtgtatgctcaagtggctaatttacatacgcgttgcgacccgtctatttacctgaacctgagctgtctggactacactctttaacatttccttacggaaagcgagtgtacaaagtcacaacaaattttcaagacatattctcggtatatatatatttctgtattcaaacatatcgccatgctggaccccatttcggacgcaccgctggtcttggcctacgtctttatgtcgctgctggtgctcattgtgtgcttcatactggtcaatgtggtccacaagctgtatcgcagtctcaacggcgaggtatcaacggggctggtttctccggcacagcagctgaagacctccatcatggagctagacgccatgaagaccggttag

SEQ ID NO: 30621 - protein, 67 aa, DROSOPHILA
MLDPISDAPLVLAYVFMSLLVLIVCFILVNVVHKLYRSLNGEVSTGLVSPAQQLKTSIMELDAMKTG

SEQ ID NO: 30622 - DNA, 4537 bp, DROSOPHILA
ggatactatattcgttgactggtatgtaacagtttccgaccatataaagtatataacaacatatagttttaatcaggatcaatagaagagtcgatttgtgcatgcccgtctgtccgtttgtatataaaagctaaagtgctgagattaaggaaaattttttggatatattttagttttgctattttttttgcttatttaattttaattgaattttttgtttgcaatcccactagcagagtaacgggtactgttttaattttctattgttttaatttcaaagcagaacgcagaaatgcttaatctgtgctgtaggaaacctttttaattcattttatgcatattttttttcttattatagatgcttaaatgcggacatttatttttaatctttctgtagagcataacattttgtttttattatattgcaacctgtttgtaaaggctcatttataagctactttaataaaacctcaaaagctgagttattttttttatacgccaatttcgcccatgatgttgatctacgtgacttccaaatgtatccgcattaagttcaatgacacaaaggcaggagagccagtaaacaatttgtatttttaaaaggacatccacagtatgtgagacctttaacagttgattgccaatggcaacgagtcgtcctgccaggaggattcccgacgaacaggagcagacatattaaaaatgccaaagaggctgggaacgcttcagacggcagtctctgctcctccagttaattataataaaagcccattctattttggaatgtaaattgccatttaatttttttgccttgcccccttatttttgaactttgttgtggcatgaataaaaataaggcagggtgtatttctatgacccaggagaaagaatccagtccgcaaagtcctgtgttggtaggaggtgcctaacctttttggcctggcacggcttgtagcccctgaacattggactgcctggcaggagtttaatttcgttttaattattctctgctcacctgtcgcactgcatagtagcaggtgaggttgcgcggatagatgcccggaaagttgggcgactgcaggcgacacggcttcttgtcgcagtcgctgaagatcctggagcagtacgttccgggtatgaggtcacctggaaagcggaaggcagatgtcacagtcagaaataatattcaattaaccattaaggacattctactgtggggacatgcccagtgcatactcatgcggaggaaatggattttttttattaggtaagtgatttaatggataacatattattttaataatattaataaaaatatgaaaaatataataataatagttctaagaaacttaataaatattttaaaacgaaacatttattagtagtactttgaaatgcaggtttctttgaaagatatccgttccaaagcaacatcctttatatatagttaggacttacaaactacatatgtactagttcatccactgattgaatgtcattccttttaatcagtcttaaaataaaaaatccaaaggtcatttaagcctttctcccccaactcacccaggtagtacttgggctccgtgtagttctgctcgtccttggccaaggatttctccagtgaggccatgaaggtcttgttgttggcataagcgctgaaaaggctaaagtcctggccatagcggtccgaacgggctacactggagttggtaaaatcctccaggataccgggagcgccttgttgttgctgctgctgctgttgctgttgctgttgctgttgctgttgctgattgagaaagctactgcggttgtgccactgggccagctctgggaagagaaacgggaggattagggctggatttggaatagactccaatccctgcggtcgcacgcacctgccagcttaatgcccccgtagcgggtcaccgaactgtccctggacaaaaccttgtatctgatgcgaaagtcgaagttgtagccactctgatccctcgccagtctgtggatggtatttgtagacatgaatcgggtcagttaattatgtaccggactcgggacgcacctgttcagccggatggtgaatatcagggagcgggtctcgctgtagaagagcactggtccccaggagctgccgcaccacatgccaccgatcggagtccgtgccgactccgctatctgcatgtatccatccggacaaccctcatggacgtacgaggtgaacctgccaatcgtgaagctgtccagggtgacctagggcgattcgcacaataaacgtgagagccgtgttgtggggtgggtctctactttgtggtgcccaaatgaccatttgggtaaaggtactaactgacttgcttgattataataacagttataacagttaatcacagtgtcaacaccaaatgatgaacatatacgagacatgcagccagatttatcatgtaaattattatgatttatactttttggaatggtttcatataaaataacaaactattgatattgatttttaggttttctggtgaagaaaaaacttgggaagaagaacgtttccagaacttcctatagcatacagtcatccgaatctagtctatatagtcgctctgctgggcataaaatattcgcccggtgtgccgaagggagggtgtaagtaataaagtttcggtcagtgctcgtagctcagtcgatatcagtgccgaatgctcttgggacgcactcgagcatgccaaaggctttggctggatgccgggtgcttctcttcgttgccttcgctgctcctcccactccatcggctcctgcagcatccttcattccaattggaggtgtgaagtggcgtaataactaacaggcaccggcacttgctctccaccgccgccccctgctcccaaatagggatgttgtgccggatttgctacgctccggcgagtggctttgaaatcaatattgcctctgcaacccactgcccaacacccaattgtaggccccatccaaaccaacccactcctacaagcgcctttgttagtgcttatcttttaatggcgtagtttatcccgttacaaaatgaaatgtgaaaggcaatggcgaatgcagaagagccttcccctttacctcagcaaccctcgatgcactgagagaaattcaaataacattaaatttatcatgattttgtttatgtgtgacgacaaagtgtggttgctttttcgatcgaataatcaaaatattttcaatactttcaaagttatgtgatattttcatattaaacgatttataagcatgcatcgacacatattcactagtaacaaggaaagctttaagaactgttccatatgacctattgattaaaagtatttatgggtcactttgaagccatagtgggatctgactcacctgcaccacatcgccgtgttgtccacctgccgccgtgaaggtgagcacgcacacgaagggcacgcgatcctgtttggggcggtgcagctccagggcgtaggtctgtccaatgtctccgtagtaggtgcgattgcagcctgcaagtatatacatgtatatatatatatatattaaatgcaattagcgatggttcggcaattagtttgtttgccccacgcgctgccaggcaaccgcaactgactttcctccccaaaaacaccaaaaagaggagcagggtggggtgggggtatgcctcgattatcacccaggacgtggccgtcgggaatggcatttgtcacaccataaattatcggcagaccaaagcagatgctaacacaaagtatcaaattaacatagcattgacttcatatgcaaactgattgaaacgcaaagtaaactaatccatttatgtgaataatttaaggtactcagcttttaatgtattcacattttggaggagggtggaaaatgttcgccacacaatttgtggtaaatttattcaactttaacattcgaacttcgggttacttcattgcatatatatgccacattcaaatatttttaaataaatttagttagctctaatagactgttgttgaataatggtttacttaagttttctatattctattctattcattggaatgtagttcttcagtatattccttatattaaaactctatgcacaaatgaagttgattgagcttaaagactgtcaagcaaactatcttaaattacatttttatttgaattgtttgaatttttgtttgcattgctttcttttgcttttattctgagaatttttcaattgaattgtttacgccttgcgaatggcatatacagcaacttttttttcccagctttcactcgattacgtattcgaattcggaaatccttttcataattgaataaccacaaactggaatgatttatgcttgtgcgatttgcatatatggcattaagtcctgccctttgtcgttgtctccaaaaataaagtgagagtcatagtaaaagtagtttgcatagaaattggcaatttcttttggttccattcagaatgattctcttctcctctggcgtttcaattagttttattaaaaatgcatatgaatca

SEQ ID NO: 30623 - DNA, 1017 bp, DROSOPHILA
atgtatatacttgcaggctgcaatcgcacctactacggagacattggacagacctacgccctggagctgcaccgccccaaacaggatcgcgtgcccttcgtgtgcgtgctcaccttcacggcggcaggtggacaacacggcgatgtggtgcagggggcggcggtggagagcaagtgccggtgcctgttagttattacgccacttcacacctccaattggaatgaaggatgctgcaggagccgatggagtgggaggagcagcgaaggcaacgaagagaagcacccggcatccagccaaagcctttggcatgctcgagtcaccctggacagcttcacgattggcaggttcacctcgtacgtccatgagggttgtccggatggatacatgcagatagcggagtcggcacggactccgatcggtggcatgtggtgcggcagctcctggggaccagtgctcttctacagcgagacccgctccctgatattcaccatccggctgaacagactggcgagggatcagagtggctacaacttcgactttcgcatcagatacaaggttttgtccagggacagttcggtgacccgctacgggggcattaagctggcagagctggcccagtggcacaaccgcagtagctttctcaatcagcaacagcaacagcaacagcaacagcaacagcagcagcagcaacaacaaggcgctcccggtatcctggaggattttaccaactccagtgtagcccgttcggaccgctatggccaggactttagccttttcagcgcttatgccaacaacaagaccttcatggcctcactggagaaatccttggccaaggacgagcagaactacacggagcccaagtactacctgggtgacctcatacccggaacgtactgctccaggatcttcagcgactgcgacaagaagccgtgtcgcctgcagtcgcccaactttccgggcatctatccgcgcaacctcacctgctactatgcagtgcgacaggtgagcagagaataa

SEQ ID NO: 30624 - protein, 338 aa, DROSOPHILA
MYILAGCNRTYYGDIGQTYALELHRPKQDRVPFVCVLTFTAAGGQHGDVVQGAAVESKCRCLLVITPLHTSNWNEGCCRSRWSGRSSEGNEEKHPASSQSLWHARVTLDSFTIGRFTSYVHEGCPDGYMQIAESARTPIGGMWCGSSWGPVLFYSETRSLIFTIRLNRLARDQSGYNFDFRIRYKVLSRDSSVTRYGGIKLAELAQWHNRSSFLNQQQQQQQQQQQQQQQQQGAPGILEDFTNSSVARSDRYGQDFSLFSAYANNKTFMASLEKSLAKDEQNYTEPKYYLGDLIPGTYCSRIFSDCDKKPCRLQSPNFPGIYPRNLTCYYAVRQVSRE

SEQ ID NO: 30625 - DNA, 2453 bp, DROSOPHILA
caggagcaggagcaggacaaaccggaagaagcaggaggatgaaaatgatggggcttgctggcagccaattggcaaaagtgagaagttcacttcgccgccattatgagggccaatggggagtagagtgggtggctcatcgggacggtttccaatcagtgtggtgctccatgtgcgagtggggagtgcttaattacatttacacatgaaggccgtgtttacaagagcggccagtgaatggatgcagtggagggagatgattgccggacggtcatggggtttgacaagcctgaatgctttcaggctcgtacctggctctcctccataaggatagcgggcggaagccattgtgagggccacaccaatcgatttggcggtggatcccagaccttatacgcttaatactgcacggtgtgagggtattctcatgatactttcagccttgagctccaaatacgcatggaaacaattgacaatggtgcgtatacgcaataaaacgagaagggggagtataagaaacgaaatggtcggcatacttattaaaacgcatgataaattaagtggatactgctttgctaaaagtaaaaatataaactttaatgtctgtgattttacctaaatttaaacctagcaagaaagtatgtaagcctcattccatagttgatgtacccgactcttttaattatgcactcttcagccatcgattgcctggttaattgaacaaacaatactttcgcaggccgtttcgggttgcctctcattatgcttcgctttacataattaccttcgacacattgttatggtgccttcgcatcattactaaacttttcacccctgctacactgccaaaaaatatgcttaactatattgaaaatattcgttcaacatttcttgtaggaaaatattatatgaaaatctatatgttgcaatttaatgttcgctcaaaggagggaataccttatgcctatgccaataatttttttctatgattaacgatttggtgctacttacgtgtacaaaatcgcggctcgtcactaccgtcgccgcagtcgtttagattgttgcagtacttgctgagtggcacgcatcttccattggagcagctgaattcggcgagggaacagcccgtcgaggaggagccgggtgccagttgcaaattgacaggtttgcccggccccaaggagctcgagatggagctagagctggatgggaagccagctgctccggatccggaaacgggtgcagctccgcctccgccacctcctcctccgccggcggctgctgctgtggcagccatgcccaaactgattcccaggcagaggagcagcgtcagcgtcgccggaagtggatgtcgccgctgttgatgttgcgactgctgatgctgctgctgcaactggtgctgctgttgctgctgttgctgttgcgactgacaatggccgctgcagctggaagtcattttggatgttgctggtgtttctgttgctttaattgcgcgacattgtgttgcacttgtcgacactttcagccgcattttagctacatttctgtgttgttcacttggcagacatttattgtgcctcctcagtttgcatcttgtttctctcagtctgctggttgcttttgttgttgctttatggtttggtgttgttgttgcttttgctggggcagtgtttgttgcaaatattcgttgtcttagtttctttggcctttttctgcttttgtatttctggcgccatttcaatgtcattactgttgtgtctgcaaaaaaatcaagaaatgcaagatatacttagtattgtatatattaccttaaattttagttaaatattatgtacgattaaaatattttcaagttttgggacatggatcataatatttgtgtaataattattgaaatttacattgtacaccgcagtaatgcaaagatttttacaagttttgattctttacatttaagagagcgacaatactgttcgctgctatttggctgctattctttataactgtactagagtacagtgacctttacatataagcagccgctgtcattacaacatattcttttccttatatctgcaattggttgttcacaaatgaagctttatttaacaatcacaacttatttgcacacaaattgataattacttgtcatgatctagtatccttttggaacagtttaatatttaattaaattcgccgcatgggagattaaaaatcaaggtgattcagtgaaataatttaaaatattcaaatgcctgcggcaaacgaatttccacacgcctcgctgcccgattacacgccaaatttatgggcaaatatttatcgctgcgcaaacgagtatacgagtttatactatatggtagtcgtattcgaacattggaataaattctcgcgctgtggccaatccttcgaccagtgaaaatcataaatatttgcagcgtaaacaatttatcctc

SEQ ID NO: 30626 - DNA, 453 bp, DROSOPHILA
atgacttccagctgcagcggccattgtcagtcgcaacagcaacagcagcaacagcagcaccagttgcagcagcagcatcagcagtcgcaacatcaacagcggcgacatccacttccggcgacgctgacgctgctcctctgcctgggaatcagtttgggcatggctgccacagcagcagccgccggcggaggaggaggtggcggaggcggagctgcacccgtttccggatccggagcagctggcttcccatccagctctagctccatctcgagctccttggggccgggcaaacctgtcaatttgcaactggcacccggctcctcctcgacgggctgttccctcgccgaattcagctgctccaatggaagatgcgtgccactcagcaagtactgcaacaatctaaacgactgcggcgacggtagtgacgagccgcgattttgtacacgtaagtag

SEQ ID NO: 30627 - protein, 150 aa, DROSOPHILA
MTSSCSGHCQSQQQQQQQQHQLQQQHQQSQHQQRRHPLPATLTLLLCLGISLGMAATAAAAGGGGGGGGGAAPVSGSGAAGFPSSSSSISSSLGPGKPVNLQLAPGSSSTGCSLAEFSCSNGRCVPLSKYCNNLNDCGDGSDEPRFCTRK

SEQ ID NO: 30628 - DNA, 8042 bp, DROSOPHILA
gtttggtgtgcacacgtgcacgtgtgtggtacatcttatcattaggttccttgtttccttgtttagttatcatagtaatcaatgtgcccagtttggggcttcttgtccagcttggtcgtaggtggtctccgagggcaacagcagttgcatcagtagtcatgtttcatcttctttgcgcgcgcgtaaatcactcgtctatctttcactccgtcgtttcatcgattcttagcctaaatctaagcagcttctttggggggcatcctctgggggcatctcctcgtttctcctcatcctattgctccacattgaccttgggcgtggaggtcagagtgggcgtatcgttgggcggtattatatgtggggggctggtgggcgtgttgggcatgtgatcgtaaatggcctcggcctggatatccggttcggcttcggacatgtgcagtcgatcctcctcgtcctcggactccgaaagcacctcgatcttgggctccactacaacgagctcagatcctggctgtggctccggtggctggtcctcgtccacttccatgggtcgatcgctaccatcgctggcctccgcgtcactgcaaccatcactggtggcgccagtggtgttcgttgtggttgtggtcgtcgtggtggtgttgaccgtggtgttcatggtcgaatccatcgcctcggcggcctgttccgccgccatggccgccctgatctgctgcgtcagctcctggtgcattcgctgctgctgctgctcgtaggtgagcggttcagtgccctctgaaccggctccctcttccgatcctgccccgtcgactgcctcgcccgactcccctcctgcctctgccccatctcctcctgcccccgtggtggtctccgccaccattgcgtcccgtcgctgcatgcacttctccagtgccatcttgagtgttttacgtttgcgctgctttgccgcctccttgttggcgttcatgactactgatgccgctgctgttgcggctgcttcctatggtgaatgattgctggctgccgctgtagccgctgctgatgctgcagctgccgctgccaagtgtgctggagcaattgttgcacccgccgccaatccgatttcctgcttgtgctccctggcaatgtgacggcgcaccgtgttgtttcgcgtgaaggtccgctcgcagaagggacatggcactcggatgccctgatgacgctgccggatatgcgcccgcagattcgtctcgtatccgtacagacgatcgcagtagagacacttcagcttcttaccgtcggccgtgttcacgctgttcttgttgttcatcttggtggcgttccatacgttcaacatgtccgccggcgcaatcgacgcggccaggttactggacagcgttccgtccgccttcaggttctccagcagcgtattcggtgtggtcgacgaggtgttcgagtttggcggcggtggcggtgagtacttcaagttctccagcttcacgcgcagatcctcggctccgttctgtttcgtttttaagcgatgtaaatatcattgttctcaccaatttcgttttaactacttacatctgtagactcatccataagctcgcggtcgtcgtcattagcctcattggcactgccattgtttcgctccgatttcacaatgcgctccaggctactggtggcatttccatttcccgctgtggtgctgggactatggttctcgtagcgactgggaaaaaaaatactcgaattagtttaaacacttcggggaaaaggatttggtgaacccacctggactgtggcgatgcgcgttcggagtgcatggtgtcggcctcggtgggcgccgtggaggaggcgctggacgagggacggtggtacggcggcttgttgatggggctgggacactcggaggacttggagccatctcgcaggacggaaccgcgctgttcctgctcggaatacggactgcggactatagccctcttgcgcggaggttcgtagttaataggccggtagatgggcggcacatgggtgtagcccattccggaagaggaactactgccacccggatgcatcagggagtcgcattcctgcttcaagatgccagtggatccgcccagatggtgagcagcgcccgcgccgcttcccaggctaatgggtccattgttgccgccaccactgccgactccgttgccaccgattccaactgtgccgctgccattacccgctcccccgctatgggagccgccaatccctgcagccgatccgctgattatgttggcgccagcactgccgcatctgtcaacgatattcgcgctggccgctagggtgctcaggctactggccgccgcatttgcagccgccgccattcctccgccagctgccataccggccaagctcaacccgttgccaatgcccatgccggacatagagttggctcccgttgcgcctcctcccagaccgattccgactccgccgggaacgatgctgctgctaccgccgctcaggctgttccttacgctccgcctgcccgtcggcgagtcaagtggcgacaggtcgcccatgtgttgttgtgcctgctgtgccgccagacgtcccgtttccgtggacagacctttgacctgcacataggtgaaaggacgaattattagttagttccaaagtacccaacccaagcacggcgagctttttccggttaccccaactcatttaaatgcattacccacctgcaaactctcggcggacttgaggaaactgttgagcgcctcctgggagacgtggacctcgcctttgtacatgaactccagcagagcggccatgttgtccggcgtggtcgcctccagtatgatgacgcactggccatttgtgggcgtgttctcaaacagatcggcgaacttctttgagcaggccgccaatataagtttgtgggctttgaatactacgcctgaaatgggagagaaaggtcacatgcgttagaatatgaatattaacgatatttttagactcattctattcctattctaagcaagaagtctacttcccatttcccacactggttccgattaaagcatcttactttgggacacaccacaacccacaaaaggttgccaacaggtggcgccgaaccgccaaccgagaccttgaactcataaaaaatcatgtcaaatatatacgggcactcgcacataaacacgtacacggaggacaataaaagccgcagcaaggaaatcatttcctcgctcttgactacacagacacaaaagggagcttttcatcggcaacaaaactcgctctcattttggcatttagctatatgtgtgctctgtctgagttattattcaacatcaatgtcgtcttggcttggtcttggtcttggttttggtctggcagtcttttgtgtcctgactggtagtacctgacacacaaaaacccacccggcgtatacgcaatcagcgaaaaagtgggtggcactccgaaacttagtgtatgtacttcgatgtgctctttggtgtacatatatatatatatattcgtttggctacaatttttcacggctttcttgtctctcttttgggttttcctttcctttccccttcaccatttttttggtgggtgtggggagtggcacagaagttatgtctctccttttatggggcacttgttgtgttagctgcgagcattacttaagccaaattgaaacgacactcgcacagcggtgttttgagataaatacgaaaaatatagagcgcgaaagagcgaacgagggagggctaaatatttaccgtcgacattgttcataaatacatttcaagtttgacactttttcccggtggcactttgtgaaatttctgtagcagctgaagcgttagcaaatgcattaagccactgccacagaccaaattctccttttctttttcggcgcccttatcgcgcactgcagtccatttcgatggaattcaaccgaattgtgtcaattcttgcctcagcgcttgccagctgataagcggcgataagaaaaacgcagtttgtggggcaagacgggcgagtaaacgaaaacgaaaacggaatcaaggtcaaaatcaaacgcattgcacgagccccgaaaagccaatcaaaacaagcactctcggaagtgattcaggcgtacgcggcgtatgcgcgatttgcgtcgtcactgattagctcttgccaaagaggaattatataatcgcttgattaatacagcacagactacgcaaattgcatttaacatatgccacacacacacacacacacactttgtttacccgaatgttagaaaacagaaaaaaaaacacttttattcgttcttgcgattatgtatcaagcgtattttttgagatatttcgctgtttggattttctaacacttgatacaacagaaattgggtcacaattaccacaataaaagcgcaaaaaagccacacacacacacacatattactatagaaattcactttgatatgtctgtatgggactggccttgataaagaaatgatatgtgtgcgtataatatatatatatttttctaccgctccgcttgtttacgttctgcgttcgttatttcatttactccgcaatttgttttgatttgggtctacttttgggatatttccaccattatgcagtttggcaataacatcggctcaagtacacattgtttttacggtcaacaattagtgatccaatctaatcaaatcaaacaaatcatgtacgtcgattagtggaaaatgtcgtctgattttacatttctttctatagataaaaatccctctgaacaaagtgttttcttcatcaagtcaaccccaaaagatccaagtctcttctcttttataaatcctacatgttatttttcatgtaaaaaaaaaaaatagcccaaggcgaggcaaatgttcatttgggtaaaatgctcatttctcaagtgttaaatatgccccgaaacctaaggcaaaactcaatgaatgcatccctttcaattacaataaggaaaaataggaaattgtataaaaaaaaaacgcaatttgaaatatccacatgaatattaaaaacaataaaaaacatacgttgtttgcctttgttttcgcagacgggcaaatatttaatgcttcattgccaaatggacaaaagagcccggtgcggagccaaatcaaacataacaaatgcagaatttggatgtggagtccatctaaaaagctgctatccccaaagaaatattaaaaaccacaattaaaaacagtcaaagccgagggttagaagaggaaaggctgtgtgtgctactagggggtgtgtgtaacgttcaaaattttaatcaaaagtagtaccacttcgattgatatgagtgacaacggcaaccgaggaaccggaagccgaaagggtttcaggatttgtctagggctttttcatttttttggggatgtgggaactgtctgcgtatgaacccccagccattccaggccccactccctaataatcccagtcagctctgcttttcccactcattcaatcaatgaaaaacaaaaatccatacttacgcacacatggcgtttggaaatgcttaaagttcgctggaaattattgttgaatttaaagcagaaaacaagcggctaactgggtggtttaagccaaggttaagctcgaagaaagaaatacatacatacataagaacccataaagtgccatacatactctacataataatcataaaaataagccaagatgctccgacttcccaaagaagcggcgacgaaaaatatttaagcccaaatcaaaagggaaagaaaataaggttaacaagggacccaaaacagacacacacacacacacacacacaaatttggcgaaaagatgctcccaaataactgacctcagtcaaaagcccaaataaatatatacgaaacgtgcaaataaaagtatctacattgtacatgaaaagctgtataaagctatataggtttgcccgcatttattcgccatttaataagccagcataaaaactgtagtaaaaggccgtaaatgaactagcagacaacatctgagggttggattggattggattggatggcatgggatggtatatgatgggtggtgcgatgggatgtggctgacagacaaggacgagacaggccataaaagccacttccacttcgcgtctccatcaaacagaaccggcaaggcaaaaagaaatcaatgtctgattccctggcgcatcggcttattagccggtataaataaaaaacataaacataaggtgggaaaatgaaaggaagcgagtcgtaggtaagcagtcgatcgtactatctcatttgattttgattaagtaagcaccctttgtagcctagacttatctttcatttaaataaaaatcaatgtgtcagtatataaaaactagcactcaccatcgcaggataatatgacatcggccagtagatccgatttgaacagattggagaatgttattgccaagttagacgagaaactgttccatttgaggcagaactgctgctgcggatccatggtgccagcagtgatgctatagccttgtcccgatccgtggccgtatctttgtccgtatctctgtccgtatcggtgtccttagctctcaggatccaagctgttcgaagggcgccagaacggcgacaacgacgacgctgctttcgatattttccaattattttcgaattttggtaatggggctgctgatgctgctgatgctgctgctgtttttcagcggctctgcaaattgatttgtttgtcttcggtttgccaaaatggaatttcgtggaattttgtagctgccagcagagcataaaagcaatacggccgctgcaaatccttagccaaagggaattttgcaattgtttagttaatttcttgtgcgtcgccgatttcggtgcgaatcgttccggttctctaatcacttccgctgctttaatcgtagctgataagttttgtgtcggcgttggcatagaaacttaaccagagactgtgagagcaccgaatctcaaaactgaatccgactccgaacacgccaaatgctgcaacgagaatgacgaaaattatattgagcgattagttttgctttcgatgcgtttgacaggggcccgattgcaaatccagtgcctgctttctgccccgaaaattccgaagggatgcaggttgcaaaaaaaggtcaatgtctatgtctatatctaaaatctatattgtatatgtgcctccctccctctctcaaatcgagtagttccgagaaatacgttcccaaacaaactcaaatttcaaaagtcatgcgaggcatgtggctttcttggccaaaagctcaaactgcatcgcatttgtgttggtaactctatctttggcctgcagcatttccgaccaatttattagaaattaatcgagcatttagaaataagcgaaaacagccctgcaaaaaggcaacaaaatcaaaaaaaaaaaaaaaacgcacaagatatacgattcaattctgggaattctgggctggccaagtcaaaaatgccgccgcttccaaaggttttgatgcaacgcgcgtgaacacacaactttctgattcctgcctcctgccgcctctgattttggcctcgtctacggtttctgcccccccaccaccatcatcatcatcctttctcgattcctggaaactgcaggtgaggctgcctttcgtcgttgcatgggatgcgtttgttttcttcgaatttgtttaatcgttagaaaaatgcggcccgcaacttttgtggaagctgccacgagcagccgacttccccccgtctctaattcatttctttttttctcttgaccatcaaaatcaacggtttcgtttcaagcggagaaaaaaaggaggataaaaaagatatcggtaaaaagctattaagaaattcctgggaagtttgcagttttcgagtccggcaactggaattcattcgccggcgtgcaggggaaagtccaaaaaggatgcccttgggggataagaatgatttaaagattgggtgaaattgatcgacatgatttgcggtttatggggcaatgcagaaa

SEQ ID NO: 30629 - DNA, 2345 bp, DROSOPHILA
tcgttgcagcatttggcgtgttcggagtcggattcagttttgagattcggtgctctcacagtctctggttaagtttctatgccaacgccgacacaaaacttatcagctacgattaaagcagcggaagtgattagagaaccggaacgattcgcaccgaaatcggcgacgcacaagaaattaactaaacaattgcaaaattccctttggctaaggatttgcagcggccgtattgcttttatgctctgctggcagctacaaaattccacgaaattccattttggcaaaccgaagacaaacaaatcaatttgcagagccgctgaaaaacagcagcagcatcagcagcatcagcagccccattaccaaaattcgaaaataattggaaaatatcgaaagcagcgtcgtcgttgtcgccgttctggcgcccttcgaacagcttggatcctgagagctaaggacaccgatacggacagagatacggacaaagatacggccacggatcgggacaaggctatagcatcactgctggcaccatggatccgcagcagcagttctgcctcaaatggaacagtttctcgtctaacttggcaataacattctccaatctgttcaaatcggatctactggccgatgtcatattatcctgcgatggcgtagtattcaaagcccacaaacttatattggcggcctgctcaaagaagttcgccgatctgtttgagaacacgcccacaaatggccagtgcgtcatcatactggaggcgaccacgccggacaacatggccgctctgctggagttcatgtacaaaggcgaggtccacgtctcccaggaggcgctcaacagtttcctcaagtccgccgagagtttgcaggtcaaaggtctgtccacggaaacgggacgtctggcggcacagcaggcacaacaacacatgggcgacctgtcgccacttgactcgccgacgggcaggcggagcgtaaggaacagcctgagcggcggtagcagcagcatcgttcccggcggagtcggaatcggtctgggaggaggcgcaacgggagccaactctatgtccggcatgggcattggcaacgggttgagcttggccggtatggcagctggcggaggaatggcggcggctgcaaatgcggcggccagtagcctgagcaccctagcggccagcgcgaatatcgttgacagatgcggcagtgctggcgccaacataatcagcggatcggctgcagggattggcggctcccatagcgggggagcgggtaatggcagcggcacagttggaatcggtggcaacggagtcggcagtggtggcggcaacaatggacccattagcctgggaagcggcgcgggcgctgctcaccatctgggcggatccactggcatcttgaagcaggaatgcgactccctgatgcatccgggtggcagtagttcctcttccggaatgggctacacccatgtgccgcccatctaccggcctattaactacgaacctccgcgcaagagggctatagtccgcagtccgtattccgagcaggaacagcgcggttccgtcctgcgagatggctccaagtcctccgagtgtcccagccccatcaacaagccgccgtaccaccgtccctcgtccagcgcctcctccacggcgcccaccgaggccgacaccatgcactccgaacgcgcatcgccacagtccagtcgctacgagaaccatagtcccagcaccacagcgggaaatggaaatgccaccagtagcctggagcgcattgtgaaatcggagcgaaacaatggcagtgccaatgaggctaatgacgacgaccgcgagcttatggatgagtctacagataacggagccgaggatctgcgcgtgaagctggagaacttgaagtactcaccgccaccgccgccaaactcgaacacctcgtcgaccacaccgaatacgctgctggagaacctgaaggcggacggaacgctgtccagtaacctggccgcgtcgattgcgccggcggacatgttgaacgtatggaacgccaccaagatgaacaacaagaacagcgtgaacacggccgacggtaagaagctgaagtgtctctactgcgatcgtctgtacggatacgagacgaatctgcgggcgcatatccggcagcgtcatcagggcatccgagtgccatgtcccttctgcgagcggaccttcacgcgaaacaacacggtgcgccgtcacattgccagggagcacaagcaggaaatcggattggcggcgggtgcaacaattgctccagcacacttggcagcggcagctgcagcatcagcagcggctacagcggcagccagcaatcattcaccatag

SEQ ID NO: 30630 - protein, 604 aa, DROSOPHILA
MDPQQQFCLKWNSFSSNLAITFSNLFKSDLLADVILSCDGVVFKAHKLILAACSKKFADLFENTPTNGQCVIILEATTPDNMAALLEFMYKGEVHVSQEALNSFLKSAESLQVKGLSTETGRLAAQQAQQHMGDLSPLDSPTGRRSVRNSLSGGSSSIVPGGVGIGLGGGATGANSMSGMGIGNGLSLAGMAAGGGMAAAANAAASSLSTLAASANIVDRCGSAGANIISGSAAGIGGSHSGGAGNGSGTVGIGGNGVGSGGGNNGPISLGSGAGAAHHLGGSTGILKQECDSLMHPGGSSSSSGMGYTHVPPIYRPINYEPPRKRAIVRSPYSEQEQRGSVLRDGSKSSECPSPINKPPYHRPSSSASSTAPTEADTMHSERASPQSSRYENHSPSTTAGNGNATSSLERIVKSERNNGSANEANDDDRELMDESTDNGAEDLRVKLENLKYSPPPPPNSNTSSTTPNTLLENLKADGTLSSNLAASIAPADMLNVWNATKMNNKNSVNTADGKKLKCLYCDRLYGYETNLRAHIRQRHQGIRVPCPFCERTFTRNNTVRRHIAREHKQEIGLAAGATIAPAHLAAAAAASAAATAAASNHSP

SEQ ID NO: 30631 - DNA, 4040 bp, DROSOPHILA
aaatgcgcggccagaatggaacgccgaaaacgtcgacgacttcacgaaatgccacgaccaccgaggaagacgacctgcgctgggtggaggagaacataccgtcttcgatggcggactcggcgttgcccatcctggactccgatgaggaaatcatcaacaccaagttcgaggtgtcgaaaatgcaataagctgtgactttcgctggaccgaagagactttttacgcatatttttgcacattttcacgcaaccgtgtctcccgccagcagctatgtattttttagttctatccgccattgaggaggaaaaccccttattgctgcgctgcgctgacactgatcttccaatttcgagaaccgtctgtccggccacgccttctgagcccgtgtaaaataatgtatgtaatcgtagttccttctacgcgcacgtcctccccccctctaaataaacctaacttattcataatacctagcctaagttgtagatacctatgcgacgatccgagaacttaatttaaaaacttcgacttgaattcttgtgctgctgcccctaactacactcgcaaaggtgtatgagtgagctgttggtggtcgcctcattgtatgtatatagctggtaacacaagacgaaacgatctatataaatctacgagtatattctgtaataactatgataaaacgcgactatgcaaagattaaaagtaattgtctaagtaagcacacaatcgtttgcgtcacacacctcaaggtatttaattacatatttttaatcaaacggtctccgattttcataaataaatgcaaacgtatcttaaaggtagccatgaaccaaactcgccatgtttttctttagtccttatctaactagcttatgatatgatatgtcgtgactaaaagtagaatatggtatacatcgatggagtgatgtgtagtagtttattttatatatcttatcttttgcgataatatgatgttttcccccaatgaaaccacttctagttgtaattcaatatttattagtttctttgtataaaatttctcttgccttccaaatttcagttaaaaaatattaagtaaagaagaaaggtaatgtgcatttcctcagataatacaatcacaaagcgatttcagttaatattttgcttcgagcgccttactgttagattacacacaaacacaaagttacaattaataaacacaatatttattcgcggaaggattaagaacgaaacgcaagtgcctcgacttcggtgcaaatatgcattattacaaataagatacaaatacttatggatactgtcttgagggcggcgaagttggcattttcggctgaactctggatgaagcgcgactccaaacggcaacaatgtgggaggacagttgaaacgggcgggcaaaatttacattaatgtgcttctcgtggtgtaacaattttctcatgtaacaaatttactgcctagaaatgcgtatttaatattttttagtcagctctttagtccagtccaagcggagtcctccacggagctgctcaacacaattgggcgagtaacagcgaattgggtgggtgcagccgaaatattatgaaaattatttatatttatgacaatatttagtggtgacaacagtgccttgcaattcgaatattgctgcgctcttcttgggagcagccagcttgtgggacgcccctggactggattggtttatgtggaaattcagccttcagccgctcagtactcagttcgattcgggcttgacattgcgtcgcaggattgccgctgcgaggtcctgcttcatggccgcctgctggcgctgatcggccagtgattgtgtgctccttagtccgttcacgatgtccttggtcttgccaaagtagatctcgttcagggtgttcctgatcttgttctccatctcctcgaccatcttgccaatgttggcgatgtgcggcgacgactcgctgacgttggcgtcctgctcctgctgccgggtgagggatccgcccagattcatggttcccgaaccctgtttgttggtctgcagccagagcattgccgtggaggtgagcttgtagtgggccgtcctgccggtggtcttctcctgtacctcgaccacatggatggagtcccagcagccgcggatcatcttgctgccatctcccgcctttttgatcagtataacggcggcaaacccgtgatccagatcccataggtagacggaggagacgcctccctcgtagtacatctccctgtactgatcgaaggcatagttcgcctcgatttccagtttgcgcagtcgttccgagggcatttggccatcctccagcggcggatagtaggagttcgaccagggcgatctgtaggagtccccatcccggttatagtcgcacagcagatagtccttgccgtgctccttgtccttggcgatcttcagcggctggtccacggaggagagcaagtcctcgcagagatccggtgccaagtctatcagatcaataaggttcttctcgatctgctggggcggcagcctccgcatcagatccaaagcacagtccatctgcatttccgactgagaagagaggagaagagacaccagtgaaattgaatttgagtcactgcaccaccgccgataagagagcccaaaaaatccctccgctttccactgccacccggcaaaccagggattaccatatatgggcattatttgaggccacaggccgccgcccctctggaggttttctcggtggattaggtgattgccaagaatatttggcttgcagaatgggcggttccgaccaaaaacaccgtttgttggcctgcttttttttcttgttactattgtagtattactcaccattttggtactttctgctttcccttgtttcgatagttttacactgtttatgttaggggcctgcgttcgctgagcagggccgatcttaaactctagctaggatttcgggcttatattgcaagtgattgcactaaattgactctttttccttattattaggattttttatttttgctatggtgtgctagagctggaacacagcccgattattatgcgatatcgttcattttggtggagcatcgattgctcgctcgatttggtatatcgatttcttacccgctaactatctagcggaaatatttgaaaattaacataacgaatggcagttacttacttacaaaaggcaataatttgcagtacactttataaaaataaactctggcactcaatccgcccgaaataaaaccatggtcttacttttattatattttagcaacaagtttattgaatttagttttcgttcatatacttttatgcttaattccattctggttgcccatttcctctccgtgttttgtgagtttctgttacaatgcgtttggtttgtgtgtgactgtgggtttagcttactcgtagtttttaatatgttacacaaaaatgtatggcataatcgtaaatttttatccgagttcgtgtttaaaatatatttaagctgcttcgctttcgcactcttcagacatacatacatacttatttagaaatcatatgcgtgctccgaaaacgtatccttctgaatcgatccttggatttcttgatttttacattaattttagccaaatacgtagcgtgtgggattttgcctcgttagtagtagtaggttcaataaacttaattaaccgctttgggcttagactcgcgcttcaagtgcgctctttaggtgtatacttcgaccatatacgataaatgtaaaatctcagactttaatttttaactaaggtgcactacatacagaaatcgttcagagaaatgtgaactaaatcgagggattttttttcgcagctctggatttttagccaggataaaaactgttacaggtgacttgtaaaattagggcaggtttcactaatctcgaataacttagataattataatttgtatttcttagtcgttcttttgaagtttaatatttcggctaattaatattgatttatttacttatgctctgtcgcatgctagacactgtgccaatattcga

SEQ ID NO: 30632 - DNA, 1755 bp, DROSOPHILA
tccagctctagcacaccatagcaaaaataaaaaatcctaataataaggaaaaagagtcaatttagtgcaatcacttgcaatataagcccgaaatcctagctagagtttaagatcggccctgctcagcgaacgcaggcccctaacataaacagtgtaaaactatcgaaacaagggaaagcagaaagtaccaaaatgtcggaaatgcagatggactgtgctttggatctgatgcggaggctgccgccccagcagatcgagaagaaccttattgatctgatagacttggcaccggatctctgcgaggacttgctctcctccgtggaccagccgctgaagatcgccaaggacaaggagcacggcaaggactatctgctgtgcgactataaccgggatggggactcctacagatcgccctggtcgaactcctactatccgccgctggaggatggccaaatgccctcggaacgactgcgcaaactggaaatcgaggcgaactatgccttcgatcagtacagggagatgtactacgagggaggcgtctcctccgtctacctatgggatctggatcacgggtttgccgccgttatactgatcaaaaaggcgggagatggcagcaagatgatccgcggctgctgggactccatccatgtggtcgaggtacaggagaagaccaccggcaggacggcccactacaagctcacctccacggcaatgctctggctgcagaccaacaaacagggttcgggaaccatgaatctgggcggatccctcacccggcagcaggagcaggacgccaacgtcagcgagtcgtcgccgcacatcgccaacattggcaagatggtcgaggagatggagaacaagatcaggaacaccctgaacgagatctactttggcaagaccaaggacatcgtgaacggactaaggagcacacaatcactggccgatcagcgccagcaggcggccatgaagcaggacctcgcagcggcaatcctgcgacgcaatgtcaagcccgaatcgaactgagtactgagcggctgaaggctgaatttccacataaaccaatccagtccaggggcgtcccacaagctggctgctcccaagaagagcgcagcaatattcgaattgcaaggcactgttgtcaccactaaatattgtcataaatataaataattttcataatatttcggctgcacccacccaattcgctgttactcgcccaattgtgttgagcagctccgtggaggactccgcttggactggactaaagagctgactaaaaaatattaaatacgcatttctaggcagtaaatttgttacatgagaaaattgttacaccacgagaagcacattaatgtaaattttgcccgcccgtttcaactgtcctcccacattgttgccgtttggagtcgcgcttcatccagagttcagccgaaaatgccaacttcgccgccctcaagacagtatccataagtatttgtatcttatttgtaataatgcatatttgcaccgaagtcgaggcacttgcgtttcgttcttaatccttccgcgaataaatattgtgtttattaattgtaactttgtgtttgtgtgtaatctaacagtaaggcgctcgaagcaaaatattaactgaaatcgctttgtgattgtattatctgaggaaatgcacattacctttcttctttacttaatattttttaactgaaatttggaaggcaagagaaattttatacaaagaaactaataaatattgaatta

SEQ ID NO: 30633 - protein, 276 aa, DROSOPHILA
MSEMQMDCALDLMRRLPPQQIEKNLIDLIDLAPDLCEDLLSSVDQPLKIAKDKEHGKDYLLCDYNRDGDSYRSPWSNSYYPPLEDGQMPSERLRKLEIEANYAFDQYREMYYEGGVSSVYLWDLDHGFAAVILIKKAGDGSKMIRGCWDSIHVVEVQEKTTGRTAHYKLTSTAMLWLQTNKQGSGTMNLGGSLTRQQEQDANVSESSPHIANIGKMVEEMENKIRNTLNEIYFGKTKDIVNGLRSTQSLADQRQQAAMKQDLAAAILRRNVKPESN

SEQ ID NO: 30634 - DNA, 2857 bp, DROSOPHILA
caacatccgcttgtctctggcaatattcccgccatgctgccatcgctcaccagcgaggactaccagaagcgcctgctgcaaaagaaacccaccgcatccatattgtccaacccggcgaatccagcacccaccaacggagaagcacccgccacgcccgcaaagtcacaaacggccgaaaagaacaaagtcaagttctcggatacaattcaagtggcggtggtgccagtgagttaacaaatcaatcgatgatgtgacagtttactaatgctcttactcgaacaggaaattcctcgcaaggaaaagccaatgccacccaagagaaatggttactccaggcccgctgcgcgacatctgacaaatcctaaaaaggagctcgcagacagcctgccgctctgtcatccgaacgacgagtatctaaaggatttcaaccccattacgaccagtgggtatttgttgagttcaccaataaccttgccccattgaccgtgtcatttcttcgcagatgtgactaagccgcccatccgacgacgcgaggaagaacccaagagcagcagcaagggcggcaactcctcctcctcctcgtcgtccatcaaggtggtccacttcggcgtggtctaataattcatagtgcaattcccaggcgtacaccacacaacggttaagcgctgcgtcttccaatcgtttgtaactattgtagtaggctgctccttctaccctcttcctttactcttagtcatacatacctaattatacatagccaatctagtcataagcttatacactcatacacccatccttaacatacaaatattatcgagaaacttatcgactaatcgactcgccactctgcagagagcgcggcagtcagtcgctgttgaaccaagctaaaggacagatcaaaaataaaagagacacgtgaaattgtattagaatattaacttctgtaaacggcggctaaactattgccgtcccagttagtgcaaagctttaaataggaaagttttactcataggttctctatactctttacacaggttactcattaaagctaagcattaaatgtttgccaaatcggaggcgccgcctacttcttcctggtggtggtgggtccgcccatgcgctccagctcgtccttcaggtcgagcagctccttgtcgggcacgtagcgccgctcctcgcagtcgtcggtgtactcctgcacctgcaagctcacaccctcgggcagcgccgcctgggccaggcgcaagaactgcggatagactggcgcatccacattgttcagctgcaggttgcgctcgtaggtggtcagcttgtactccgattcgatgaccgtggagttgggccgcagtcgctgcaccgtggtcttttgcggagggagggcgtagcagtcggagacgtccaagtccaggtactcggccaatccgtgcagaaacctctggtagctctccagctgcgggtagtcgtagcccttgatctgcacattcaggctctcgtactgcgggaatttcggcttgagggactgcaaacggagaacaatggttactgaccaccaaaataattgctcatctagtctgatctgattgaaatctgtctacaagattatgctactatgctcaaagcaagtaatatttaaaaaggggttaagatccttccttctcagttgaggacccacctccaggtaatccggttcgtaaacacttccactggtgctcctcacggctgttgtggttgctttgggcacctgcagcgccagccgcacacttggcagtatctagcacagtgggaaaatgaaattgtaatagataatttaatagatattttcagctatttaccctgcgtagcattttgctgtttttaattctccaattcaggttatatcaccagctgatggcgtgcagccacactgttgccggctccatggtcacactggctcaagcgtcagataggctcggcaagtgttatcgaagaacgataggcccgataagttcggacgagtagaagaggaaataatatttgtatttacttaagcccattgtacgcacacacaactcgaaatgcagggatcggccacgctgttggtggttgcgttggccttgctacttggcccggcgagcacggccgggaaatcggatccgggcatggtggacgtgctggtgaccacggtaaatatgtgcaccaccaccacagccccaaacaaataggggaattagaattaatccttttccggctacgtaacaactggtttgtcctcttctctcccacacaggacttgcccagcatccgggagcagcgtccgctgctggccaacacaaaaatctacgcgcagagtaagtacaggcggcggaaaacgcgtgacgaatgcctccgacttacccctttcttccacacctgtttcaatggttccagttaagggctgcacttccaatgtggaatcgaacctgaccattacgttccggctgacggagcacccctgcatctttgatgaccgcacggtgagtacaacgtttccatatggctcagtgaccatttaatcccatcaatcttgtatccccaaacagctgcaggccatcgcccagaatgctaccctgcagaagaacgccaccatcaataacgtcatcaccgagatcaccaggacatatccctgcaacggactcatcgtcctggcgataaacaaggacaaggtggtcgaaggatcagcgatcccaacaccggagccaaagcatccaatgctggagcacaagcacccactttcggtaaatgcgacatatatcaacgataagtagaagcacagcaattaccacgggccagcaaagcattttcggctttttccttatcagcttatcgtttctctttaaac

SEQ ID NO: 30635 - DNA, 643 bp, DROSOPHILA
taaaaacagcaaaatgctacgcaggatactgccaagtgtgcggctggcgctgcaggtgcccaaagcaaccacaacagccgtgaggagcaccagtggaagtgtttacgaaccggattacctggagtccctcaagccgaaattcccgcagtacgagagcctgaatgtgcagatcaagggctacgactacccgcagctggagagctaccagaggtttctgcacggattggccgagtacctggacttggacgtctccgactgctacgccctccctccgcaaaagaccacggtgcagcgactgcggcccaactccacggtcatcgaatcggagtacaagctgaccacctacgagcgcaacctgcagctgaacaatgtggatgcgccagtctatccgcagttcttgcgcctggcccaggcggcgctgcccgagggtgtgagcttgcaggtgcaggagtacaccgacgactgcgaggagcggcgctacgtgcccgacaaggagctgctcgacctgaaggacgagctggagcgcatgggcggacccaccaccaccaggaagaagtaggcggcgcctccgatttggcaaacatttaatgcttagctttaatgagtaacctgtgtaaagagtatagagaacctatgagtaaaa

SEQ ID NO: 30636 - protein, 181 aa, DROSOPHILA
MLRRILPSVRLALQVPKATTTAVRSTSGSVYEPDYLESLKPKFPQYESLNVQIKGYDYPQLESYQRFLHGLAEYLDLDVSDCYALPPQKTTVQRLRPNSTVIESEYKLTTYERNLQLNNVDAPVYPQFLRLAQAALPEGVSLQVQEYTDDCEERRYVPDKELLDLKDELERMGGPTTTRKK

SEQ ID NO: 30637 - DNA, 10386 bp, DROSOPHILA
gctctgaaggaagccttcggcagcaaggagtcctcctgggttaaggctccagtttccacagcggccacctttgaggacggcctctacgttcaggctgtggttgaggccatccggaaatcgaacgagaccaggcagtggcaaagggttcagctgtccaccgacagccccctgaatcacgaccagataattcgatatgcacgcatgtccacaatgtgagggagtctgtattacataggtgcaatatatgaatgattccactatatattttttatataatgtacgtgtttagtctttaagcgttcaaaagattcaggctttccagccggcgtcatcttcatcaatgtatttaacttatttgtacggcatcagcattttgcaactaataaaattgatttgttagacatgagactttatatttatattagctagaaaacatttcatgatagttaatagcaaggaacgagaagaagtcatcaaatgtaccaaacgttttattttaaaaacaaaattgtctacacaaactaaacgaaatatgtcatatacaagtaattcgaacttagggctaaaactaaagctaatcactaaagagacgaaacaaattattgatcacaaaagtatctttgtagcggaccttatagaagtagatgaatattcaagacttggcatagctggagtcttcgcggagatccagctcagtggatgaagtattgtgtttacagggcaagatggaaacggggttatagagattgtgttgcagttgatcttcctttttggtatatcagcacttaaactggatttaagctaccctaaagccttcttgcgtacaatatttcagagaatatttaaataaatacctaagctaacatcgaatcggtcgatcaattgtaaaaacacaaaaagggtagtttcgaatttggaacttaaaacgaggagagatggaaagacacccgactatgtacaaaaggattgcagccatggaccaaacattggccatggtatcttatcgcttgttgagcttgtgccacagcgtgatgagggtcagcacatgcatgactccaatcacgatgcccatgaggatcaggcagtcggacatgtgcacatccgatatcatcatgtacttgagaaagaccttcgggctgcggaagtggcaatacatcgcagtctcggggcactccagaaagggtcgatccatgccgtaaatggcgttcaacgccccgtggaatccggcccggaagtaactcaggtgccacatccatcggaagaggggcgtgatgtcgatgtagcgcgtgcagaatccaaaaacggagaacatcaccgccagaatgggtcccagaaacacggcaagctgaggcggaaagattagttattaccaattcgattctcagttagctggtcgagtgttgaacccaccttggttggcaacgtggctcccacgaagaagccccaggcttgggcactcaaagaggccattatgcccagcagcatgaagtagtagatccggaatgagtccgtggcatcgtttccagtcagatgcacgctgatgataatgtacatggcggtgcagaggctctgaaatggggaaactcaaatattagtaagccgttcgcaaaggaagagattattaattggctgatttgcatttgatattaatattgatttgtgtgtcatttaacatttatgataatattataattcattgcattgatatgggccgtgataagtgattaatagtagctagattagataaaaccagtataactctatatgtagaacttgtgtgactggcacaatgaaatgaaaaagcagccacgagaatgttgcccctaattaccaaaaatgtttgcctttcgaatcgtgaaacagtacggcaaacaaaagcgtttctttcattgccaatttcactacatggccaacacacttatatatatatatatatataagtatatatagcccggcatatcggaacaatcactgcaaaattacaggtagtcgggcttacgcgattctgtcacgcaaatgaaacgcaaactcgaacatcgccgatttcacatcgttaatttgacttaatgaccgagcggcaattcattagaccactgccacctatggaagcttagctctaaatgatgattaatgaccaccaccgacaccgttggggttgggttctgatcgccgtggcgatctgtagtaggagctattctatggcggtgctcacctggaagggtatttcgaaggagatcaacgagaggaagtagggacccagtttgtaccagcggttgaagtgctcccgtgtcaacatgtcaatttccagcggaactgcggacaaaattaattgataaacgagattgcgattaaattcgttaggttcaatgtgatgcgatgcgatgcgaagtgtgcgcacgaaggtgagggcattatacatatgtaggtcaggtcagtaaaccgaaaccggtaaagatcggatacccagctcccccagctccaccagctcctccaatgcctcctgtctgcagcaatttattgtaaaaagagtcgagaatcgctggccaaccggttttattatacaataatcgcagctggtgtctcttgtattttataattatttacttagcgggcttcaggatcgcatttttcggggcgagaagtgcacttttggcaatttacatggaaattatagatgacaaagtggatcgacagagatcttttatcgctaatcagatctggcctcgcctcgagggttaatgttccaatcaatatattttaatcaagtttactatggcgtatttggaacgctgataatttattatttgtggctatactagattcttattctttggctaatgatccactatctaagctcagaatcttggttctttttttttgccaattaagaaccacgaaacttctgtgcaaatgccaatatattattggctaatccgcattccgcgataaataagtatcttgacaaaatatcatagaatgcggcagctaaagacaaagcaaagttgccaaaattgcgcaagaacagctgcagtttttttcttttggtcaaatctggcgacaaatttttgcataaattggctatccgaggaaaccagtgactggaaactgggagaggccaagtccactcgatagcactcgagaaccacttggacaaatgcatttgggtggtggttagatgtgggcaaggtgaagtgaggcgattatctcggcgattgcagctacttacatgtcaagaccacagccattttaccggtgtagaccaagagcagcgtggagccgtacagatacacgtagtttcccagcacactctgggcattgttgcccacgttcatgtacagatacccgaagacgactccgatgaaaatgtgcgagaagatgcgggccagcagcagaaactgaaagagatacggagtattaggtatgtatgtggcacacaggttgataaagatgcaaatcaagcaactcaggcaaactggaaattgagatactttacgttagcacactttgcttaactttctcatgcgaatgcaaagaactctttaatgtccttgcaaatatgctcattgctagtttgttgttagtttttttgttcacagctggtttcttcactcgaagtgacacatttatgggcagttttctcatatgtcatgtctataacagcactaagcttttaactatctggcgggaaagtgggtctaaactatgacatattgcgtataccataacttaaaaaaacgttttttttttttcaggtagctggtaataagacaagactccccaatttaatggcattgaccgcagttgtaccttttggcaactaatagccagtaaatgatcgtgccgtggatgttggtcattagaaccgtctaaagccgaaatctatgtgaaggctgagtgctggctggcattacttttgagttacgagccgctcgagtgggcccgagattctcggagtcaccgtttggccgcttggccgcttggccggttgacaagtcaatatcagcggaactggaggtgctaacgaagctatgttcacactccactatttgagtggccgagtgcagtgtgtatgcagatccatcgcagattgatcgtgtgcagtcacataaaagtgagttagctcgctaagtggtcatcacacaagctgttcaatttcacattcaaacatacgccaagtgctaattggacacattcggatgataaacgccggccatcaatctcgatggcatttctgattccgcagcttcatatttattgtatttatctcttttttatggtaagtgcttgagccttttgccctgagtcatttgtttttacgtagtgcccagtgccaacgaactgaaaatcgttgttaagtgtagaatatatgttacatagctatgagaaattcaattgcacaattgagttgtgtgcatgaattacttacttatgagcccaccacaagtcgctctattaaaaagtagcttaatgccctgattatatgcttaagcataatgtataaaaaaattcagctagtgccctattatattccgcatgcatgatcttatatcaccattaagagcatgcataagtcccattttcgtatgattttttagcaaaatccgaaagcgtggcgaagtgttcaaccttcccaaaaaaaaaaacgtataacgtatagtacttaatgtacggccactaaatggtaatgtgcaactgggctgtaattgccgagggaaatataaaaataaagtaaaaagcggctatttaaaagattagccattaagaattacgcagaaacgagattagccgaaactggattcacttttcgaggacgccgcaccaattaccaaatcaactcgacaggccatcaactcttaaagccgctgccctaaaccggctttcaactaattgttacccaagttactttgtgcattaaagttattgcagtcgagtcttaaaaagctaaacttaagatttttaaaaagctggcaaatatatataacaaatatatttgccataattcaagccttgaactttgctggttgaatttagttcgtgatatggaggtttctactcacgtagtttcgcttggcgcaaatcaagatgcgctgcatcaggagcacatactgcatgaggaacgaggccgatcgaatggcattcggcggcctggcaagctcaccggctttggcaagcggctgtggctgtggcctcagatttttctcgaggagatcgggatccgcgctctcggggccgccgctcagtgccttgatctcctccagagccagctcctgcggcgagggctttacatagtcgaagctggagaattgcgccgccgcaaatgctgccagcgcttcactggtttttaccactgccttgccgcccatgttttctgcaatttggagaaagttcaagttagtaagtggcagctctagtgggggaaatttctgcaccatgcgccaataattggcagttttccttaaaaaaaaaaaaaaaagctttgcttgtatacatgtgtatacatgtatgttcgaaattgcttgacagatttaatagctaacgcatttataacaccgaaactagtagcacacctcctctactttaacgactcaactttaaaacgtggacaaataaagatcgttatcactggaccgtaacaatattcgcataaaacttcattcaaacttttatatttagaataatttaatacccgaaacatgacaacagatctgatcagtatagaactcacctttaatgctttccacgaggcgtgccatatcatcactgctcatatacctatggcgatccacatcctcgtaatactttttattggccgcatggattagctcattcaggtcacgttgatgctcgcccacggccacttccagtactgaaatccatacgatatgatatgtaatgtggcatgtggcatgaaagtggtgcacttacgatagtcagctgggttgtggtaactcgggcagacgagctgctggtcggccaggaagggcaccagttcgcgcacaggtccttggtacatgcagtggccatcgacgacggtgtagagcttgtcgaacatctcgaagatgagggcacttggctgatggatggtgcagactatcgtgtggccctgcgacgccagtttcttcagcagagccacgcaggagctgcacgaggagctgtccaggccactggaatccgaacaaacgagcagaaatacaactttcggtgtgactcaactttgtttaattgctgcctaacctttgaagatctaacgaataacaaccccattaaactaaaccgctgtctaactgacagcaaagaacatcaagcaacagggcaactgaaactttaatggtaggtgagagattgcggcttgaacttgtacttgtagcgaagtcaaatgaaaacgagaaacaagtttgttcccaaaatccatttgccgatgcaagtcgggcggcattgcaaagatttgatcgacttgcagtcggcattttatttgacactttgaaaaacgagttctttcaagtgttattaactgcctgaaatcgagacatacgtattatttgaattactcgtatccatatatatcaaattcaagtatacactttgcctaatacccttctttaaatgaatctcacgacttcgagtttactaattgccaatgaatgatgaaaagtgaggtctaagaagaaaagcatatgattttaaagcaagtcttaaaaataaagcttgagatatttctggaactggcaactccctttgtttgcgaagtatccagtcatgattttcactttgagattgttgtctgaatcaacttatacttagtcatgccacatgaaaaggagggactcatactcataatccccagccagacgactcaaaatagctggccctttattgctgcataaatccgattttgtaggttcatataaccacagcagactcatcaatccctattaaagtaatctacaactaatgaacaatttaattaattacgggattatctgccagatagcgcagtaattaaatgaataatcaataaaaaaaatttaaataataaactgtttacagctcaccgaacaccactaatcaaaacaagtcgaaactattaaacagactatctggacaattgataagctctaagtcatatagacatatagatggggacaaacttgacttgtgggtcagttggtgttttttttttttttgctgaacttccgccaggcaaagtttgctcatcatcgccatgagcatcagaatgctggagatgatcactatcatggctactctaaatacataagtgtgcttttacaatatatagtgtcactcacgtcgtcggctcatccagatatagcacgggaggattacttatcagctccagggcgattgcgagtcgcttcttctggccacccgaaagcttcccagtgggcacattgtagcgatggtccagacccagcagcgataagatgtgcttgatctgggaaggagtgcagaagtatttcggataagatatcgtatcgttgccctgagatgttcacaatctttttacacttctgagatgattacttaccagatccatcttgtacgccttggtgaccttgaagcccagcttcagatgtgccgccagcagcattatctcgccgaccaacagctgtggacgcagcagatcgtcctggtggatgtagcacagcatttggcggaacctctcggagctgggagccatgggctttctattaacccggatatcgcccgacacgccagtggagctgcagaaaaagaggcgtggtcgagtaccgagtgaaaatgtgtcgaacaaaaatcacaatatataatcgggcgaagcggttaatttaggtacaataacgtacatgggttcaacaagggctggactgaatgaaaaatagcttcaatcacaagcgtctagttcggggaagtgagtcgagctacatatgtgtgtatattatgctcatgcgccactttcaagttcatagtttactgaccgataacgtttagcaatgaaaacccgtgtaccgcctggggcatcgtctttaccaccacgtccattactaaaatcatgataattaaggcagcagcctgcagttaatagctccactggccagactcacagttcatccctctgcacgttcggtgcatgtataaattgctgtttatttactaaaaatgctgtaatagctgtcagttggccatcaaaagagggctgcgattaaacggcgatttcctgcgagatacgtcaattggcgggcttgtgactcagagagattgcctcccattcgcgactgaagtcctaattatgcaatggctgagaacttgaaccgagctgccggaggaagtgatgagattatgtccgggatggaacggcaatcgcaagtgcactgccttccagacgtcaaacgaaacgcgcgattgtgattcatgtgtatttcgcacattcagttagttcagctatcagtttagacatttagcggagtgcagaggaaatctaaatgcaattcctacaccttacaatcaaatgctttctaagctgcatgggcagatactagaactaggtgaaattccacaagacccttcgatctctaacccagccatgtgaaaatttaattatatagctagccaaatgcagctgtcttactgtattgccgacactcaaacaatgtgctgattgattgaacgactgcgacgtctgcactttatatgcacagccgatgtgtccaatgtgtaattaaatggcacgaaacagattgcatattcagcgatataaccataaattaaaagcgaagctgcccgcaacgtgcatgtcgactttcaagttcagccgagcggaggactcaccaaaatccggacatcacattcagcagcgtgctcttgccggcgcccgaaggacccatgatggctgtgagttcgccagaccggaagctgccgttcaggccatgaaggatctccttggtgactgcggcacaataaggaaatattttaatatagaacattcagagtgatcagaggcagaggtacccaccgaacttccgctccgggaaggagaacttcttcactgtgtagcgcacgtcggcgaactggatgtccacgggatcgcagtggtcgaagttggcgtgcgccaccgcctggtggtagttcggactctggaatccgttcaggtcgttggtcaccttgctggtcaactcgcaggagcctctggacgaggtcgatgacgtctcgtcgatggacagctccgagctggccgccgtggtgcaacagttgatgcccaggcaaccgctgtcggggtcaccatggtgacccttgaggctgcagacgccggaactgctgctggcatcgctgttcgcacctcccacgcagcaggcggcatccgatgccttgatgtctggcaagagggtcatgtttgcacggaatcctcaatgtttctagtcagaaggggtatctgaaatgtcacacggaggaatgaactctttagatgcgttgcaagatggtcgaaggttcaagaaacagcgaagattagtcttatcaacgcagacgtgtttgaatacaatcaataaatgttttgcagtaatctacttttgaaagccaaggcggcacaaactccgcctaatagtgctatataattaaatatggtttataaattaggttcattttcatgttgactctaatgatgtgatatatccgtgatctaaaatcagaattaatggcctctcaacagtttttcgcccgagtgtagaattatagaagccgctttcgaattaacgacctgtttgctcgctggggcgttaacttcattttatgttgatatttgactacaaattatttacttgttgcaagcaaattaatttttttgggggcgtttcactgtccatttgcaatttagcaagacaccttatgggcgcacttgcatctcgcaaacttagcagatgcgtcattaaatatttcatatataaatacacacagtttgttttgttttctgggcttttgtttaagcctgtctcgaacaaagaaagttattgagatgtaaaaggcatttattgtagatggcagatggcggcacttcgctaagtgagctccaactgactgatggatagacagtctgaagatcccttatctgggaagaattcctctcggagtccaataaactttaggtttatttacagactacgtttctatggaatcgggtttcaaaaagcatggcatgtaaccaaaaaatcgtttggccagtcatcttttgtcgaatttctcctgtgttattcgatgactcgacattatgcaaaaatagactgtcaaagaacgaataaaatcgaaggcttagttgtgaattaaattcaatttgaagaaacggtgtcaatagcaaatattgatgttctaatgaaattagaattgatttatagttga

SEQ ID NO: 30638 - DNA, 2367 bp, DROSOPHILA
atgaccctcttgccagacatcaaggcatcggatgccgcctgctgcgtgggaggtgcgaacagcgatgccagcagcagttccggcgtctgcagcctcaagggtcaccatggtgaccccgacagcggttgcctgggcatcaactgttgcaccacggcggccagctcggagctgtccatcgacgagacgtcatcgacctcgtccagaggctcctgcgagttgaccagcaaggtgaccaacgacctgaacggattccagagtccgaactaccaccaggcggtggcgcacgccaacttcgaccactgcgatcccgtggacatccagttcgccgacgtgcgctacacagtgaagaagttctccttcccggagcggaagttcgtcaccaaggagatccttcatggcctgaacggcagcttccggtctggcgaactcacagccatcatgggtccttcgggcgccggcaagagcacgctgctgaatgtgatgtccggattttgtaatggacgtggtggtaaagacgatgccccaggcggtacacgggttttcattgctaaacgttatcgctccactggcgtgtcgggcgatatccgggttaatagaaagcccatggctcccagctccgagaggttccgccaaatgctgtgctacatccaccaggacgatctgctgcgtccacagctgttggtcggcgagataatgctgctggcggcacatctgaagctgggcttcaaggtcaccaaggcgtacaagatggatctgatcaagcacatcttatcgctgctgggtctggaccatcgctacaatgtgcccactgggaagctttcgggtggccagaagaagcgactcgcaatcgccctggagctgataagtaatcctcccgtgctatatctggatgagccgacgactggcctggacagctcctcgtgcagctcctgcgtggctctgctgaagaaactggcgtcgcagggccacacgatagtctgcaccatccatcagccaagtgccctcatcttcgagatgttcgacaagctctacaccgtcgtcgatggccactgcatgtaccaaggacctgtgcgcgaactggtgcccttcctggccgaccagcagctcgtctgcccgagttaccacaacccagctgactatctactggaagtggccgtgggcgagcatcaacgtgacctgaatgagctaatccatgcggccaataaaaagtattacgaggatgtggatcgccataggtatatgagcagtgatgatatggcacgcctcgtggaaagcattaaagaaaacatgggcggcaaggcagtggtaaaaaccagtgaagcgctggcagcatttgcggcggcgcaattctccagcttcgactatgtaaagccctcgccgcaggagctggctctggaggagatcaaggcactgagcggcggccccgagagcgcggatcccgatctcctcgagaaaaatctgaggccacagccacagccgcttgccaaagccggtgagcttgccaggccgccgaatgccattcgatcggcctcgttcctcatgcagtatgtgctcctgatgcagcgcatcttgatttgcgccaagcgaaactactttctgctgctggcccgcatcttctcgcacattttcatcggagtcgtcttcgggtatctgtacatgaacgtgggcaacaatgcccagagtgtgctgggaaactacgtgtatctgtacggctccacgctgctcttggtctacaccggtaaaatggctgtggtcttgacatttccgctggaaattgacatgttgacacgggagcacttcaaccgctggtacaaactgggtccctacttcctctcgttgatctccttcgaaatacccttccagagcctctgcaccgccatgtacattatcatcagcgtgcatctgactggaaacgatgccacggactcattccggatctactacttcatgctgctgggcataatggcctctttgagtgcccaagcctggggcttcttcgtgggagccacgttgccaaccaagcttgccgtgtttctgggacccattctggcggtgatgttctccgtttttggattctgcacgcgctacatcgacatcacgcccctcttccgatggatgtggcacctgagttacttccgggccggattccacggggcgttgaacgccatttacggcatggatcgaccctttctggagtgccccgagactgcgatgtattgccacttccgcagcccgaaggtctttctcaagtacatgatgatatcggatgtgcacatgtccgactgcctgatcctcatgggcatcgtgattggagtcatgcatgtgctgaccctcatcacgctgtggcacaagctcaacaagcgataa

SEQ ID NO: 30639 - protein, 788 aa, DROSOPHILA
MTLLPDIKASDAACCVGGANSDASSSSGVCSLKGHHGDPDSGCLGINCCTTAASSELSIDETSSTSSRGSCELTSKVTNDLNGFQSPNYHQAVAHANFDHCDPVDIQFADVRYTVKKFSFPERKFVTKEILHGLNGSFRSGELTAIMGPSGAGKSTLLNVMSGFCNGRGGKDDAPGGTRVFIAKRYRSTGVSGDIRVNRKPMAPSSERFRQMLCYIHQDDLLRPQLLVGEIMLLAAHLKLGFKVTKAYKMDLIKHILSLLGLDHRYNVPTGKLSGGQKKRLAIALELISNPPVLYLDEPTTGLDSSSCSSCVALLKKLASQGHTIVCTIHQPSALIFEMFDKLYTVVDGHCMYQGPVRELVPFLADQQLVCPSYHNPADYLLEVAVGEHQRDLNELIHAANKKYYEDVDRHRYMSSDDMARLVESIKENMGGKAVVKTSEALAAFAAAQFSSFDYVKPSPQELALEEIKALSGGPESADPDLLEKNLRPQPQPLAKAGELARPPNAIRSASFLMQYVLLMQRILICAKRNYFLLLARIFSHIFIGVVFGYLYMNVGNNAQSVLGNYVYLYGSTLLLVYTGKMAVVLTFPLEIDMLTREHFNRWYKLGPYFLSLISFEIPFQSLCTAMYIIISVHLTGNDATDSFRIYYFMLLGIMASLSAQAWGFFVGATLPTKLAVFLGPILAVMFSVFGFCTRYIDITPLFRWMWHLSYFRAGFHGALNAIYGMDRPFLECPETAMYCHFRSPKVFLKYMMISDVHMSDCLILMGIVIGVMHVLTLITLWHKLNKR

SEQ ID NO: 30640 - DNA, 5805 bp, DROSOPHILA
gctaaatatatatatatatagatataaagccgaccgatccgattcgtaaactgtaaaagtttccgttaagtttcctcaaatgcgatatacgatttagttatcattactctactatattactttaactatattgatacaatttttgctgtttatttagtccattagttagctagttagttagttatcccccccccctccacgcaaaacgtatttcactgataatgagcaaagaactaaggaaaccactgtgaataattgattgcaatccgatttgatggtgaaatcaataaatacaacaattttgtttaaaaataacccactcgtttcccatttaatatatatgtacattatcttatcttaacaatcgtctgcagtcgaacatagttcatcttggctaaccagactgccgcccataaaagtgagatgagataagccgatttggccaagataatacgatttcgcacaactaaattaaagtgatttattggctagctactacactgcgaaagtagtggtagcttattgtaaatattttatttttctgaatttcaaaaatttagatcctggttcgggtacgtgctaaaaacatagcatagcctggttcacaacctatgtgctccatcgaagatctccaccacgtgagcgatcgcagttgtagtccatctatatcacgccaccaccacgctcagcgacgtaacaaagtgccgtctctagtaacgtaagcagtgtttcgagcaacaagtttattttattttcataaacaaagtttgtttaaagcgaaaaatcctggccaaagtgctaattcgttggctattccgcgagcaaccttgataacgagtcgcagagcagtcatagagcagcgcaattaaccccgatacaaagcaatcagtgcaattggagcagcttgaaaggcacacgccaacaaatcgagatcgagctgatcgagtcgcgttgacacccatcattccgccatgcaaatcgatgcactggaggcctgaatatgctgctcagcgagacccatttctggaccacgttgcgcgaggatgtggtgcggatcaagagccaggacctgggcgcctttcgctacctcaggcagcgcgacaaggagcaggagcagcaggacctcgcctgcctggccaagcgagactatacggagcgtcgcaatggactggccgtgctgaagaactctggtcgcaagtccaccggccgcttgaaggacaacctcaagaagctggaggacctgctgcgccagcacaggatcatccactccgagtggcaggacgcggcgcaggtgctgctcctcttctcacacggcctgatcgcccacatctgcgtggacatctacacgggcgacattctgcgcatggtcttcgagaagtacctggtgggcaagctcgcctccgaggtcattacggatggtatgtgcgattctctcctttcacccgctccagcccgccctccatcgcattagagccatccatcaatcagcttgggcattgcatttctgcatgtgcagctcgactggcagacatctcaacttgcagcgttcgaaaatcagttaatatgcgttaacatcacgcaatacataatggctatttcaggcgtaattaaaggttcctcatcattagaacgaattaccaagacagcttgctagaaacacatgcatgccatttaattattcactaagctctcagctataaaagctgtcctgcatttagttctttgtgctgtttgccgcttgtcatccagggtatcagtcattcgatagagtgcagtccgcatttggccttgctccgcggagtgctgcttgtgcagttatggagaaatttgcattggcaacaagtgcgacttgatttgcactttcccacaccaacacagccgcacgcacacatgcagggcatgcaattattgtaatttttaattaatctgctggcttgttttgttgcctgtaaatatgcgaacccccaacccctttcccccatccaccatcctccggctttccatgttttgttcgagccactcattcagctttgtcgcttgtgtctcttttctcgtcgtgcgcccgcatccgttgtctcgccagcttttttcacccgttcccacatcgtcttggcctacaataccaaccagctgacggtggtgcatctgcagaggcctaatgctcgctcccagggaccggagaagatcgccaatatggatccgcgcatcttccacgtgatcataccgggcgccacagagcgcaaactatcccgccacctcacagttaacgccagcttcgatctgttcgtggtttggacgcagtcctcgcagaacgaggtgtatccctggaggccaacgataagggaccaagatcgtgccaacatacatgtgttcaagatcaaggggtaagttgcacagtacaactcccactccatggcccagtctaatcgctttgctcagcttgcagctggaatcgattgcctattgctggtcggagaacgatccgctgtgcgtggacttcctgcgaagcagcgagagccagatcatcaccctggagcagaaggtttcccgcaagggcgacataagcgcagaaatctgctcctacgaactggccgccggcaagatgcagcgcaccgccattacctccattccaatgggcgcccagatctgctcctttgccttcagccccgaccaggagaagctcttcctgggcagcgtcgatcgcaatatctgcctgcacgacctggtccagcagtcgacaaagtacgccaaccagattgagatcgtgcccaatcagtgcgcctggcactgcgactccgccatgctttgcgtggccaacgagcgatcggtgctgcagtgcttcgacctggcgctggccaccattggccatcagctggttagcgagaatgtgacgccgtccagcttgctggatctgtcgcactacttcgtggcccagccaacgctgctgagtgtcgccttcagccgaaagccagatttgtccacttttaagcacacctacgcccagacggattgcctgctgctgctggtgtacgaacagggacctttggcctgcatgcgcatctttggcggcaccggaatgcgcggcgacatccacaattccggactcactgcggacgtcattgcggacaagtatctgcggctgcagcagccggacagagcggtcaatgtcctggccgccctcaactgggagacctacggagccatgtgcctgattacgctgcacaagatagccaactatgtgttcttcggcggtgaccagcgacgacctcgcatcgagctgatggccagagcgttgaagacattcgcccacacgctttccgaggagacgaaggacgagttcagcgatcaggtgtacgatctgaagcgccgcttctgcttctatctgctgcggtgagttgagctcgtgtgaacatgccacttttatgctcaatcctttcgttgcttgcagcaaaaacctcttcgctgaggccttcgaaatcgcccaggatgtggccgactatgacatcttcatggacctgtacaacctaaccaagtgcatctcaagcctgagtgagttcgcccaggtggccttcagtcaggcagctgccataatccacgaggaagatcgcgccaacggcaatctcagcctgacctgtgacctgcgctcggagtcggcctgttcgctgtccacctgctcggacatgttgcgcggtcagggagcaggaactgcccccgaaaccggactaggcgcaagtcagccacaaagccagcaggtcctgaagaactatgtgccaccgctgccctcgttcaagtcgaaggtattcaacgctgagatgatcaagatcaacataccgaaaccggaactgaggccgcccttgccgaaggtttcaatagcgccgccaacatcttcgctggcgagtctaaccctgaagtccaacagtagtctgcagcaggcgcccgcaaagagtctgcatccaaatggttcgtgtgaagaaaattcccttcataacttaaataatttatccattatttcaggcaatttgtggtcccaggacgtgccggatcagacggtgggtctgcctatggctagtagtccacttcctcgtcttccgccttcaaacattccagatcagagcgcccagctgggtcagttcagcacgatgccagcttcgcctccgccgacagggtcctatcagcccaagttttatcaacatccgcttgtctctggcaatattcccgccatgctgccatcgctcaccagcgaggactaccagaagcgcctgctgcaaaagaaacccaccgcatccatattgtccaacccggcgaatccagcacccaccaacggagaagcacccgccacgcccgcaaagtcacaaacggccgaaaagaacaaagtcaagttctcggatacaattcaagtggcggtggtgccagtgagttaacaaatcaatcgatgatgtgacagtttactaatgctcttactcgaacaggaaattcctcgcaaggaaaagccaatgccacccaagagaaatggttactccaggcccgctgcgcgacatctgacaaatcctaaaaaggagctcgcagacagcctgccgctctgtcatccgaacgacgagtatctaaaggatttcaaccccattacgaccagtgggtatttgttgagttcaccaataaccttgccccattgaccgtgtcatttcttcgcagatgtgactaagccgcccatccgacgacgcgaggaagaacccaagagcagcagcaagggcggcaactcctcctcctcctcgtcgtccatcaaggtggtccacttcggcgtggtctaataattcatagtgcaattcccaggcgtacaccacacaacggttaagcgctgcgtcttccaatcgtttgtaactattgtagtaggctgctccttctaccctcttcctttactcttagtcatacatacctaattatacatagccaatctagtcataagcttatacactcatacacccatccttaacatacaaatattatcgagaaacttatcgactaatcgactcgccactctgcagagagcgcggcagtcagtcgctgttgaaccaagctaaaggacagatcaaaaataaaagagacacgtgaaattgtattagaatattaacttctgtaaacggcggctaaactattgccgtcccagttagtgcaaagctttaaataggaaagttttactcataggttctctatactctttacacaggttactcattaaagctaagcattaaatgtttgccaaatcggaggcgccgcctacttcttcctggtggtggtgggtccgcccatgcgctccagctcgtccttcaggtcgagcagctccttgtcgggcacgtagcgccgctcctcgcagtcgtcggtgtactcctgcacctgcaagctcacaccctcgggcagcgccgcctgggccaggcgcaagaactgcggatagactggcgcatccacattgttcagctgcaggttgcgctcgtaggtggtcagcttgtactccgattcgatgaccgtggagttgggccgcagtcgctgcaccgtggtcttttgcggagggagggcgtagcagtcggagacgtccaagtccaggtactcggccaatccgtgcagaaacctctggtagctctccagctgcgggtagtcgtagcccttgatctgcacattcaggctctcgtactgcgggaatttcggcttgagggactgcaaacggagaacaatggttactgaccaccaaaataattgctcatctagtctgatctgattgaaatctgtctacaagattatgctactatgctcaaa

SEQ ID NO: 30641 - DNA, 2856 bp, DROSOPHILA
atgctgctcagcgagacccatttctggaccacgttgcgcgaggatgtggtgcggatcaagagccaggacctgggcgcctttcgctacctcaggcagcgcgacaaggagcaggagcagcaggacctcgcctgcctggccaagcgagactatacggagcgtcgcaatggactggccgtgctgaagaactctggtcgcaagtccaccggccgcttgaaggacaacctcaagaagctggaggacctgctgcgccagcacaggatcatccactccgagtggcaggacgcggcgcaggtgctgctcctcttctcacacggcctgatcgcccacatctgcgtggacatctacacgggcgacattctgcgcatggtcttcgagaagtacctggtgggcaagctcgcctccgaggtcattacggatgcttttttcacccgttcccacatcgtcttggcctacaataccaaccagctgacggtggtgcatctgcagaggcctaatgctcgctcccagggaccggagaagatcgccaatatggatccgcgcatcttccacgtgatcataccgggcgccacagagcgcaaactatcccgccacctcacagttaacgccagcttcgatctgttcgtggtttggacgcagtcctcgcagaacgaggtgtatccctggaggccaacgataagggaccaagatcgtgccaacatacatgtgttcaagatcaagggcttgcagctggaatcgattgcctattgctggtcggagaacgatccgctgtgcgtggacttcctgcgaagcagcgagagccagatcatcaccctggagcagaaggtttcccgcaagggcgacataagcgcagaaatctgctcctacgaactggccgccggcaagatgcagcgcaccgccattacctccattccaatgggcgcccagatctgctcctttgccttcagccccgaccaggagaagctcttcctgggcagcgtcgatcgcaatatctgcctgcacgacctggtccagcagtcgacaaagtacgccaaccagattgagatcgtgcccaatcagtgcgcctggcactgcgactccgccatgctttgcgtggccaacgagcgatcggtgctgcagtgcttcgacctggcgctggccaccattggccatcagctggttagcgagaatgtgacgccgtccagcttgctggatctgtcgcactacttcgtggcccagccaacgctgctgagtgtcgccttcagccgaaagccagatttgtccacttttaagcacacctacgcccagacggattgcctgctgctgctggtgtacgaacagggacctttggcctgcatgcgcatctttggcggcaccggaatgcgcggcgacatccacaattccggactcactgcggacgtcattgcggacaagtatctgcggctgcagcagccggacagagcggtcaatgtcctggccgccctcaactgggagacctacggagccatgtgcctgattacgctgcacaagatagccaactatgtgttcttcggcggtgaccagcgacgacctcgcatcgagctgatggccagagcgttgaagacattcgcccacacgctttccgaggagacgaaggacgagttcagcgatcaggtgtacgatctgaagcgccgcttctgcttctatctgctgcgcaaaaacctcttcgctgaggccttcgaaatcgcccaggatgtggccgactatgacatcttcatggacctgtacaacctaaccaagtgcatctcaagcctgagtgagttcgcccaggtggccttcagtcaggcagctgccataatccacgaggaagatcgcgccaacggcaatctcagcctgacctgtgacctgcgctcggagtcggcctgttcgctgtccacctgctcggacatgttgcgcggtcagggagcaggaactgcccccgaaaccggactaggcgcaagtcagccacaaagccagcaggtcctgaagaactatgtgccaccgctgccctcgttcaagtcgaaggtattcaacgctgagatgatcaagatcaacataccgaaaccggaactgaggccgcccttgccgaaggtttcaatagcgccgccaacatcttcgctggcgagtctaaccctgaagtccaacagtagtctgcagcaggcgcccgcaaagagtctgcatccaaatggcaatttgtggtcccaggacgtgccggatcagacggtgggtctgcctatggctagtagtccacttcctcgtcttccgccttcaaacattccagatcagagcgcccagctgggtcagttcagcacgatgccagcttcgcctccgccgacagggtcctatcagcccaagttttatcaacatccgcttgtctctggcaatattcccgccatgctgccatcgctcaccagcgaggactaccagaagcgcctgctgcaaaagaaacccaccgcatccatattgtccaacccggcgaatccagcacccaccaacggagaagcacccgccacgcccgcaaagtcacaaacggccgaaaagaacaaagtcaagttctcggatacaattcaagtggcggtggtgccagaaattcctcgcaaggaaaagccaatgccacccaagagaaatggttactccaggcccgctgcgcgacatctgacaaatcctaaaaaggagctcgcagacagcctgccgctctgtcatccgaacgacgagtatctaaaggatttcaaccccattacgaccaatgtgactaagccgcccatccgacgacgcgaggaagaacccaagagcagcagcaagggcggcaactcctcctcctcctcgtcgtccatcaaggtggtccacttcggcgtggtctaa

SEQ ID NO: 30642 - protein, 951 aa, DROSOPHILA
MLLSETHFWTTLREDVVRIKSQDLGAFRYLRQRDKEQEQQDLACLAKRDYTERRNGLAVLKNSGRKSTGRLKDNLKKLEDLLRQHRIIHSEWQDAAQVLLLFSHGLIAHICVDIYTGDILRMVFEKYLVGKLASEVITDAFFTRSHIVLAYNTNQLTVVHLQRPNARSQGPEKIANMDPRIFHVIIPGATERKLSRHLTVNASFDLFVVWTQSSQNEVYPWRPTIRDQDRANIHVFKIKGLQLESIAYCWSENDPLCVDFLRSSESQIITLEQKVSRKGDISAEICSYELAAGKMQRTAITSIPMGAQICSFAFSPDQEKLFLGSVDRNICLHDLVQQSTKYANQIEIVPNQCAWHCDSAMLCVANERSVLQCFDLALATIGHQLVSENVTPSSLLDLSHYFVAQPTLLSVAFSRKPDLSTFKHTYAQTDCLLLLVYEQGPLACMRIFGGTGMRGDIHNSGLTADVIADKYLRLQQPDRAVNVLAALNWETYGAMCLITLHKIANYVFFGGDQRRPRIELMARALKTFAHTLSEETKDEFSDQVYDLKRRFCFYLLRKNLFAEAFEIAQDVADYDIFMDLYNLTKCISSLSEFAQVAFSQAAAIIHEEDRANGNLSLTCDLRSESACSLSTCSDMLRGQGAGTAPETGLGASQPQSQQVLKNYVPPLPSFKSKVFNAEMIKINIPKPELRPPLPKVSIAPPTSSLASLTLKSNSSLQQAPAKSLHPNGNLWSQDVPDQTVGLPMASSPLPRLPPSNIPDQSAQLGQFSTMPASPPPTGSYQPKFYQHPLVSGNIPAMLPSLTSEDYQKRLLQKKPTASILSNPANPAPTNGEAPATPAKSQTAEKNKVKFSDTIQVAVVPEIPRKEKPMPPKRNGYSRPAARHLTNPKKELADSLPLCHPNDEYLKDFNPITTNVTKPPIRRREEEPKSSSKGGNSSSSSSSIKVVHFGVV

SEQ ID NO: 30643 - DNA, 6800 bp, DROSOPHILA
atggcactggactgaagccggcgatgctggaggtggcagcgatgtgtcctctaccgccgttctgctccacgaaatagcgcaccaccaggcggctgaggtggaccaccgcaaagacatccagttcgaacagctcccggtccacctcgatctcgacttcggtccaactggctcgctgggatcggccagcattattgacaaggacatccagtcgatgaaagtgattgagcaccgtgttgagatgcgtcttatgctcgtcgagatcgagcatgtccatttgaatgaccagcacgtccttggtggccagcagtccgcgagctgcagctaggcattcctcttgcacttgctccaattgctccagtcgccgggcacttagcaccaatttcactccatgcctggccaagctgagcgccaaagcgcggccaattccgctcgaggcaccagttatccaaaccacctgtccgcgcatcgacgacagcgagactccgaaacgggacttgtaccacagggccacattgcagtcgagcaggatccagaggagcacgtacacgacatagtacagcacgagcaggagcagcagaaactccaggaagctcatctcgttggctctgtatggcacggctgggtcggagaaacctttgtcctctgccgcaacggaaggcactgaaacctgttcttggccacacagaaatcactgcgagcgggtctgatcgatcagctgttggtgggcaccagaggtgacgcagtgactgcggaaagtagtcaccttatctgacataaaacccttatacttggtttttgaatgatgctatattatttaaataccttttggtagctaggtaagggtagtactatctttcttgagagaacatgtagagcataatccaagatacgaaaaacgcttccatctgctcatctctgatagtttttttacgtaaacgaatcagggcttccaacacactgcctttgcgccaacattcacatcaaaattcaaccccatcagtttggctaaccatttctttttatataaaagtaagtaaactaagaactaatcctaggcctgcaggaagtctccgagattgccacatattttgtcgatttccgcacatcccgattgctccagcgctgaaatggcattggcgagggccacggtttctttcagggaatgggccttcaaccatatcctgccgttgactcccacagcgatctcgtagggcagttcccgggtaagagcggcgagaacagggcagttttcccgcagcagcatccttcccagattcaggctgcacttgaagaagaatccatcggtgaggacgcccagtttgccacttttgcccaccgagttgacgcagaccagctccggttcaatgtccgcgcttgcattcaggactctcgcgtaaatcagatcaccggggatcagatccgggcgattcttcttgctggccgcctcaaaggcgagatacgatatggaggctgtgtccgttgctccgatgtccacgcggtacagatcgcccgccttggctcgcacaatgcccagaatgagatccccgcgtgccgggatgtaccttctctggtagttgtccacccagaaggtgccgggttccttgtgtcgaagtgggcccgccttgctagccaccaccgtgtcatccagacgccgcagtcccggtccgagtatcacccgcttgctcttggccagctcctcaatggccgcaattcgctcaccgggcataactattgtgctggtcgcgctcattttaatgttgcttttacgatttgaaaactccaaacaaaaaatccgcgtgtgtctttcaaaacatatggtcaagtcgaggactttccaacactgccattgtcagccctggtcttaaagttaaatttaacagtagttgtaaagaacataaatattcaaattatttttgccccttcttattttattattttcaaaatgcttacgattttaattattaagatgaacttaaaaaagtaacagaaaaattatatttagtcaaattgtaattgttctatattactgaatgatcttaaaaatgcaaagaaagttttaaagagctaacagcgtgtgggcggcaatgttaaccaacacatatgcaattttttcccgatcagctgtgctgctataagcataatcgtacgatttgttaaaatccgctttgcatttatttgttctaatttatggcagctaaaaagcgtgactaaccacaagtatgtgactttgaatgacccgattgtccagaaaccacgggaacatttcattatcattggttgttacacttctcttgacgccatttgattgtttatgctttattaacgagagcatttattattatgtagatagacatgcaatccacagctacgtgtggatcccgattactctaaccttgtgcgaaggtcaattttccccaaaaaatataggaaacgtaccagggaaaacaacaaaaaagggaaagcgcacccccacactgaaaaccggcgagcacctggaaacgcatacatataaaaggagagtaaatgtaagtgtccctctcttttccacacttagagatgggcaaaaatacatcgcctaagctgagcttttaaaatttatgaatattaaatttatcatatagcttgcaacagagctatagtttcatgtaaggtaactaaaatatatattttaaatgatattttttactcctttatcaagatacaaattggtagcactttcgccgccgtcttttacacattcaagccatgtcttggaccgcttcagttttcttgaggacttccaccactagcatgaagtttctgcgtctgcgctggcctctccccagaattccccagaataaatcggcaaacgttgcgccgcgtttcagaagcaaatcagcagtcagccagctctcatctggatttaaatttgtgcagatccgcaaaagtacttggtatgtatattgctagactcttggtgtgtgcttgtgcatccagcttagggaaaatatttaattgttttatctgcgaacttcacaaagatcaccccaatcgaaagggcttgaaaatcgagcgttttttgcgagcgatatccgcgcgattatctaacaaatggtgctgtgcaaattttcaagtgtctcgtttacgtatatttccaatcgatttaattgcacaaatctaataatttcaattgacaggcatttgttgtatcgctgtagggagatacttccgtttttcgcaacttttccacgtactgcggcttcgctggacgcctcactttgggtctgacctttaaaagtagcttagaggtcattcggttgttcggcgagagcaaactgaaaactctcccactgagataagcggaaaagcgggaaatgccgccagtgtcagtgactctaaattattatagaaatatttaactgaaatttgaagacaaattaaatatagaaaactcaggaggggcatttcgagattataccgtggagaaagtcacacccgaatggggatatatgtataagtttacaccactcacagctcaaattgcaagtgacttacatgctcacagctacaattctttgcaaaaaaaaataattttttattaatatctaaccatattttgagaaccaagtccaaaagtatgtcaaaggtgtatctcccatttcctttctagttcgtatttctttttcgacatatttccgaatatttcactgcatcacgaaacatatcatttaactgtccatttggaacaattttaaatataaataagcccaactatttaagtaatggcggggatttcgcaaatattgtggagcacatccgccataaaatctgaatggcttcatctgcggtcagctatttaatagaacaccatgcctagatttaaagtcctgataacagacactaattcgccctcgtggactttgttttttgttttttgatttcagtgacagcaacgagatgaccatcaaagcgatcaaggcccgtcaaatctacgactcccgtggcaaccccaccgtggaggtcgacctgaccaccgagctgggactcttccgagccgccgtgccctccggcgcctccactggcgtccacgaggccctggagctgcgcgacaacgacaaggccaactaccatggcaagtcggtgctgaaggccgtgggccatgtgaacgacaccctgggacccgagctgatcaaggccaatctggatgtggttgaccaggcgtccattgacaacttcatgatcaagttggacggcaccgagaacaagagcaagttcggagccaacgccatcctgggcgtttccctggccgtggccaaggctggagccgccaagaagggcgtgccgctgtacaaacacattgccgatctggctggcaacaaggagatcatcctgccggtgcccgctttcaacgtgatcaacggcggcagccacgccggcaacaagctggccatgcaggagttcatgatcctgcccaccggcgccaccagcttcacagaggccatgaagatgggctccgaggtgtaccaccacctgaagaatgtgatcaaggccaagttcggtctggacgccaccgctgtgggcgatgagggcggcttcgcccccaacatccagtccaacaaggaggctctgaacctgatcagcgatgccatcgccaaggccggatacaccggcaagatcgagatcggcatggacgtggccgcctccgagttctacaaggatggccagtacgatctggacttcaagaacgagaagagcgacaagtcgcagtggctgcccgccgacaagctggccaacctgtaccaggagtttattaaggacttccccatcgtctcgattgaggatccctttgaccaggaccactgggaggcctggtccaacctgaccggctgcaccgacatccagatcgtgggcgatgatctgaccgtgaccaaccccaagcgtattgccaccgccgtggagaagaaggcctgcaactgcctgctcctgaaggtcaaccagatcggcaccgtcaccgagtccattgccgcccatctgctggccaagaagaacggctggggcaccatggtctcccaccgttccggtgagaccgaggactcgttcatcggtgacctggtcgtcggtctgtccaccggccagatcaagaccggagctccatgccgctcggagcgtctggccaagtacaaccagatcctgcgcatcgaggaggagatcggcgctggcgtcaagttcgccggcaagtcgttcaggaagccgcagtaagcgcagggcacttcgaaattccaaccacaccagccccatcgaatgagatctggatcttggagagggagctggacgcagtagatccatggaaaggcggcggtgcacgtgttcgtcaaccttttacgttcggaacttgtgtctggcgcacaaatacatcagaattaaactaccaaacccatttgctgtctctatgcttcgttcttagacattattaattaatgctaaaccttgatctaatcattatttataaacaaaagaataaaaaacactatgtgcaagatattcgttcagttgccgagagctttgaatatcttcaatgtaatcgctgtaatcgttatgaaattataaattgatctacacaaacaccaaatccacaaacagacaagttattcacttcaaaaacggttatgaaacaattgttgagacatagaatttaagcgaaagctgttggaatattcttatcgaatatacacggtgttcaatagagatcttaatcagatggaatagtacaccaaatattaaacatattcagatttgttagttgatgtgaaataaaaagtataaaagttactgaattcttttcttcgatcacttgtggcgttgccagataatcaagtaaactcaagtaagggcaactaaagtaaaggcaactatcttaaaacattttctggatttggattaagattgaatggatctgaattattcattatctctgaactgatgaatgaagttattaaactttgaatacgatcttttttctatctttatctttgctttccaccaattagtcgagtatttcaataagctttttcaactttctgtgaataaaattgaatttctagggtggaccaaaatggcgctcaaagtttcgcacagaaccgttgaattccccagtttgttggtattttttaggtcgtttcttggcgcctcgcagcggcggtatgcttccacagtcgcagtgcggtcactctcacggacgtgtttttttacatcggatcgaaaataaattaatgcaaagctaaatcacaaacgctagggatcggcgagctcgaaatcgaatcagtgcaccggccgaccgacggactttaactgcgcgcaagctaaccgtaggttaagttaacgctcagcactgcaaccactgcagttgcataaccgttgccgaaaatcaagtcgaaaagtcggagaatcgcggccaagcgaaagccccaaaagttcaaaggacaatagaaagtggcaagaggaagagaggagagcgtgctaagagcccctccccctggggccccgccccccacacctccgcccacaaagtgccttaacaatatagtgcgttttgccaaagttaaaaccaagtgcgcgtccaagtagccgcccatttcggtggagcctattccggaactgggaagacaacgaagatggcccagaacacggccgacactctcatccacctgatcgccggcgggtaagtctgcctgcctgacattctccctactgcgtcttatcgcaggtcaggccatcagcgtagaacgaaaccggtttgctcccggcctctaattgtaattgct

SEQ ID NO: 30644 - DNA, 2595 bp, DROSOPHILA
tttggctaaccatttctttttatataaaagtaagtaaactaagaactaatcctaggcctgcaggaagtctccgagattgccacatattttgtcgatttccgcacatcccgattgctccagcgctgaaatggcattggcgagggccacggtttctttcagggaatgggccttcaaccatatcctgccgttgactcccacagcgatctcgtagggcagttcccgggtaagagcggcgagaacagggcagttttcccgcagcagcatccttcccagattcaggctgcacttgaagaagaatccatcgatagacatgcaatccacagctacgtgtggatcccgattactctaaccttgtgcgaaggtcaattttccccaaaaaatataggaaacgtaccagggaaaacaacaaaaaagggaaagcgcacccccacactgaaaaccggcgagcacctggaaacgcatacatataaaaggagagtaaatatacaaattggtagcactttcgccgccgtcttttacacattcaagccatgtcttggaccgcttcagttttcttgaggacttccaccactagcatgaagtttctgcgtctgcgctggcctctccccagaattccccagaataaatcggcaaacgttgcgccgcgtttcagaagcaaatcagcagtcagccagctctcatctggatttaaatttgtgcagatccgcaaaagtacttgtgacagcaacgagatgaccatcaaagcgatcaaggcccgtcaaatctacgactcccgtggcaaccccaccgtggaggtcgacctgaccaccgagctgggactcttccgagccgccgtgccctccggcgcctccactggcgtccacgaggccctggagctgcgcgacaacgacaaggccaactaccatggcaagtcggtgctgaaggccgtgggccatgtgaacgacaccctgggacccgagctgatcaaggccaatctggatgtggttgaccaggcgtccattgacaacttcatgatcaagttggacggcaccgagaacaagagcaagttcggagccaacgccatcctgggcgtttccctggccgtggccaaggctggagccgccaagaagggcgtgccgctgtacaaacacattgccgatctggctggcaacaaggagatcatcctgccggtgcccgctttcaacgtgatcaacggcggcagccacgccggcaacaagctggccatgcaggagttcatgatcctgcccaccggcgccaccagcttcacagaggccatgaagatgggctccgaggtgtaccaccacctgaagaatgtgatcaaggccaagttcggtctggacgccaccgctgtgggcgatgagggcggcttcgcccccaacatccagtccaacaaggaggctctgaacctgatcagcgatgccatcgccaaggccggatacaccggcaagatcgagatcggcatggacgtggccgcctccgagttctacaaggatggccagtacgatctggacttcaagaacgagaagagcgacaagtcgcagtggctgcccgccgacaagctggccaacctgtaccaggagtttattaaggacttccccatcgtctcgattgaggatccctttgaccaggaccactgggaggcctggtccaacctgaccggctgcaccgacatccagatcgtgggcgatgatctgaccgtgaccaaccccaagcgtattgccaccgccgtggagaagaaggcctgcaactgcctgctcctgaaggtcaaccagatcggcaccgtcaccgagtccattgccgcccatctgctggccaagaagaacggctggggcaccatggtctcccaccgttccggtgagaccgaggactcgttcatcggtgacctggtcgtcggtctgtccaccggccagatcaagaccggagctccatgccgctcggagcgtctggccaagtacaaccagatcctgcgcatcgaggaggagatcggcgctggcgtcaagttcgccggcaagtcgttcaggaagccgcagtaagcgcagggcacttcgaaattccaaccacaccagccccatcgaatgagatctggatcttggagagggagctggacgcagtagatccatggaaaggcggcggtgcacgtgttcgtcaaccttttacgttcggaacttgtgtctggcgcacaaatacatcagaattaaactaccaaacccatttgctgtctctatgcttcgttcttagacattattaattaatgctaaaccttgatctaatcattatttataaacaaaagaataaaaaacactatgtgcaagatattcgttcagttgccgagagctttgaatatcttcaatgtaatcgctgtaatcgttatgaaattataaattgatctacacaaacaccaaatccacaaacagacaagttattcacttcaaaaacggttatgaaacaattgttgagacatagaatttaagcgaaagctgttggaatattcttatcgaatatacacggtgttcaatagagatcttaatcagatggaatagtacaccaaatattaaacatattcagatttgttagttgatgtgaaataaaaagtat

SEQ ID NO: 30645 - protein, 433 aa, DROSOPHILA
MTIKAIKARQIYDSRGNPTVEVDLTTELGLFRAAVPSGASTGVHEALELRDNDKANYHGKSVLKAVGHVNDTLGPELIKANLDVVDQASIDNFMIKLDGTENKSKFGANAILGVSLAVAKAGAAKKGVPLYKHIADLAGNKEIILPVPAFNVINGGSHAGNKLAMQEFMILPTGATSFTEAMKMGSEVYHHLKNVIKAKFGLDATAVGDEGGFAPNIQSNKEALNLISDAIAKAGYTGKIEIGMDVAASEFYKDGQYDLDFKNEKSDKSQWLPADKLANLYQEFIKDFPIVSIEDPFDQDHWEAWSNLTGCTDIQIVGDDLTVTNPKRIATAVEKKACNCLLLKVNQIGTVTESIAAHLLAKKNGWGTMVSHRSGETEDSFIGDLVVGLSTGQIKTGAPCRSERLAKYNQILRIEEEIGAGVKFAGKSFRKPQ

SEQ ID NO: 30646 - DNA, 2861 bp, DROSOPHILA
acatggcattataggcaaacttgaccaatattctttatcgttcacggaaaaaaactgcgcgaacattgtatccattcgcaaatcgaactatgtatctagaggttatggcaaaacttaattatgatgattaaatataaatataattaaataatatttgatatttggtttatttttctatatgtactataaaaaagatagaatagttgagcaagaagaccttggttaaatccaatcagcatgattagcaagaaatccatcaattgtatgtcaattgagcagattaagaaaaaacaagaaaatgaccaaagaggaaaacccatcacgggtgagcggccagggggaggatatagaaacgcaatagagggttagaggtaaccggaggtcggaaaacttgatgtacgccgtaaacaaagcagagaactgaagaaccgaagtatgaaaattgtaagcggcacaaatgtgatatatgcgcagtttaacgacctggcatctcaaactattactgcgtttcacaggactcaaaagtcctcgcacacagtttttatctaaacatttcattaactgactctttagttgctaaacacttttcactttaacttttaaacttactgtataaattggcactttgaaattgaaggctctgtcattaaaatttgaattttatttatgcgctgtttgctgcgcctgcaactgcaatggaaaaccaactgactacgcgaagggaaatgaaaacaaagcgcttaatagctgcggaaaagagaaagggagggaaattgcttgaagagggttgaaaatgcattctctgttgcttccggtttggcgccaaatgtaaaacatttcgaattcaaataacagcaggctataaattacaacagagctgctgtgcgcacacagtctgttaggcgagaacagctgagcttgaacgctgttcaacactgtacttgcacgctgtttttgtttttacttgataaaacttggtgactacccacccgcaaatatcatgaaaatatctcgttttaagaagtcgcacaaaactctggtgttttttgccagcaatttcgactaccgggaaccctaccaagtgctaattgatgccaccttttgccaagcagcccttcaggtgggttattgcttatatcatctctagcacttgttgatatccatagttaatttttacttttagcaaaagattggcatagatgagcagattaaaaagtacttccagtgcggcgttaagctactgaccacccagtgtgttattctggagtcggaatccctgggtgctcctctcactggagccacatccatcgtcaagcgattccatgtccacaaatgcggacacgaaggaaaaccagtccccgcttccgaatgcatcaaatcgatggtaaattgagagttacttgatttcaagtatgctatagccataaaatgattacttgcctttcagaccaaagacaatcgctatgtggttgcctcgcaagatcgtctgctgcaggagagtcttcgcaagattcccggacgttgtctgctctatctgcacaaagccactcccgtcttggaagcaccatctaaagcctccaagaagtgggtgcaacgacgggccaaaaacctaatgctgggcaaacaggtcgagaaaatcgactacatgaaggagaagcagggactgaagccagctgaaactgcagtcaaacccaagaagcacaaagggcccaagaaccccaatccattgtcctgcaagaagagcaaaaaggacaaggcgaagcaacagctcaaaggagttgagcagaccgcaataaccaaggcgaaacgaaaacgagtcaagatcccagcgcacgtcaaggcagcgctaggaaaagattagattagaatggttgatcaagtagataaatataagataatgcaaggtaatctgcagtcttgacaaatcattataatgtgggaggagctgctttaactagccacctgagtgtaatatgccctcttctataatggcaaaaaaatctatgcatctgaaccagatgatagattactaaattactggttaatgacttaagttaactagaatattttagaattcataaatcttaattgattattagcttaccacaatattgctcaccaattgaatgggaggaactgtagaatcccactgtgcctgtgaagattatcgcgattgaaacgcacactcaacttaatcttgtgcacatatttatatattttagtatatagttaagaattatacaacagtataaaagatgactgagagccgtttggagcaggaatagggaaggggcgaggcacaccggggttgttctcacagtttgccctcgcgaatcttgttcagcgtcttctcggtcatcaattgagccagaatcttgctcagcgtgggattccgggcgcagtaggccaagaggttgacgggaaagaggccgcaccaggtgagatccatcttattggccaaggcaacggcgaacagatcgccacatctctgggccgtcatccgtttctgattggccgtactcagacccacctttccgccctgcgagccagtgaaggcctcctgcaggaaatcggtggctatgggtcccggtgcgaagagcgacacatccagcttgcgcatctccactttcagggagagcaagtaggcgttaagggcgtgcttggcggcacagtaggtgggtgaaaatggcactggactgaagccggcgatgctggaggtggcagcgatgtgtcctctaccgccgttctgctccacgaaatagcgcaccaccaggcggctgaggtggaccaccgcaaagacatccagttcgaacagctcccggtccacctcgatctcgacttcggtccaactggctcgctgg

SEQ ID NO: 30647 - DNA, 735 bp, DROSOPHILA
atgaaaatatctcgttttaagaagtcgcacaaaactctggtgttttttgccagcaatttcgactaccgggaaccctaccaagtgctaattgatgccaccttttgccaagcagcccttcagcaaaagattggcatagatgagcagattaaaaagtacttccagtgcggcgttaagctactgaccacccagtgtgttattctggagtcggaatccctgggtgctcctctcactggagccacatccatcgtcaagcgattccatgtccacaaatgcggacacgaaggaaaaccagtccccgcttccgaatgcatcaaatcgatgaccaaagacaatcgctatgtggttgcctcgcaagatcgtctgctgcaggagagtcttcgcaagattcccggacgttgtctgctctatctgcacaaagccactcccgtcttggaagcaccatctaaagcctccaagaagtgggtgcaacgacgggccaaaaacctaatgctgggcaaacaggtcgagaaaatcgactacatgaaggagaagcagggactgaagccagctgaaactgcagtcaaacccaagaagcacaaagggcccaagaaccccaatccattgtcctgcaagaagagcaaaaaggacaaggcgaagcaacagctcaaaggagttgagcagaccgcaataaccaaggcgaaacgaaaacgagtcaagatcccagcgcacgtcaaggcagcgctaggaaaagattag

SEQ ID NO: 30648 - protein, 244 aa, DROSOPHILA
MKISRFKKSHKTLVFFASNFDYREPYQVLIDATFCQAALQQKIGIDEQIKKYFQCGVKLLTTQCVILESESLGAPLTGATSIVKRFHVHKCGHEGKPVPASECIKSMTKDNRYVVASQDRLLQESLRKIPGRCLLYLHKATPVLEAPSKASKKWVQRRAKNLMLGKQVEKIDYMKEKQGLKPAETAVKPKKHKGPKNPNPLSCKKSKKDKAKQQLKGVEQTAITKAKRKRVKIPAHVKAALGKD

SEQ ID NO: 30649 - DNA, 2486 bp, DROSOPHILA
ttcgacagatccaattggtgtgcgatgttattttacgattaacaggtgatgaataacaactacctttaacacctgccccttccgactcaagagctatctgaagagctagtccaccgccttgggtgggggtttccctttaggggtcacccacttccattgcacctttgatggcgccataacttgtggcaatatctggtgccccgaggtcgaaagcagcagcattcattagctgtttgccggagccgctgggtttgctttaaatttaattgtttgcccgctgccgctgtgcactttgtggtttaattaagacgggatcgagcgtatatggtatatggcatgtggtgtacatggatgtgggtggggcagacagacggcagctgccttaaaccaaattacactaattgggttaccatatgacagggcaatgcgtcgactgtgacatttgtttgccatggcttgccaatgcttgcattatgtccgcccgtccacatccttcgcccgcacaaacacagccccccacacgaatgtgtggtgtacactgagagaaaaagctcactcagtacgcaaattcttcagaagggctaccttccaaaagtaaagccaaactggagtctctaatcccgtaatattgatagttgttcggaagtctgaacccctaattgtgctcagtgcatcataagcccagtcgtcagtaagtccttcactccaccgccgtttgcactcgcagttgccagcttgtaataagctgcagaatcattttccgcatgccggctgctttgacagctgcaataccgcacatggctcaaagggtcgaaaagcgggccacatgtggtggtatatggtggaaaagggggaaaacggggcaacgggcaaaggatatggggagttggagaccgcactcgaaatggaagccaaaggactctggcttagttaattgagtggacagcaaggaggtctttaaactgagattggcacggataagaagataagcattatagactttgttggcctaatctcacaggttcatttgattctaagcagagaaaaaagaaagtattttttaaaaatagttttagaaacttctaggcttcgacggcgggttccatggacaaggacctgctgctcacactcccggcgggggtcatgatgtcctccagcatttggttgagcgactcggagcccagagcgtactcctgcttattggcacttcggttgtgcatggcgtccaagtagacgccactcgcattgcgctcgctgctcagaatgtgctgcatgacattgctgatctgttcggagcccaggatcttcggttgctcggtggccagtccatcgatgaccgcagtttccagctggcttgaaattttggccggcgactcctcctcgttggcagtttttagaaaacgaatcgcctgtgcagaggccaaggctccggccgtaaaagaggtcagcaactgagcaatcgaaatcatttgaaatttgatatttttaaatgattcgaaagcgaatttagatcatgctttgaaagttcgttacgattgctatgaattgagtttaaatatttcaaggctacataaattagtaattaactcaatagccaccactgatttggcttacaaactcttttgtttaatattatttttaaaagctttaaatattttaaatagatttagctagaaaatagctgacagacacatatcgatatatcgctgcgatagccacagctgttcacgcccgcagtttaagcgatgtggcagccctggtcggccaccaaaaaataaacattggaattttcccttaactttatagagttttatccaatttgagcgatgctgccgggcgttggagtgttcggaacgggagagatagccaatgtgctggtgccgctgctgcgggagaaaggattcgaggtgcgggccatttggggcaggaccctgaaagaggcgaaagagactgcgaccacgcagaatgtacaattccatacgaacgtaatcgacgatgtcctgctgcggaaggatgtggatctggtgttcatcgtgtgccagccctttctgcacgcggagatctcggtgaaggccttgggcatcgggaagcatgtggtgtgcgacaagccagcaggattgcaccagcaggacgcactcaaaatggttcgggcttctcagtactatcccactctgatttccctggtcaatcacccgctgaggttcctgcccgcctttacacatatgcgtcgttgtctgcaggaggagctaattggctctattggcgacgtggtactcatggatgtgcgcgtccagatgggaacgctctttcccgagaagtacaactggatgtgcgatgcgcaaatgggcggcggtgccctgaatctcgtgggatccgtggtggacttggtcacctttctgctgcaacagcaggcaataagagtgcatggagtcctacgatcctacacgaaaaccacaccggccatcaatggcattcgacaaattacg

SEQ ID NO: 30650 - DNA, 486 bp, DROSOPHILA
aaaatatcaaatttcaaatgatttcgattgctcagttgctgacctcttttacggccggagccttggcctctgcacaggcgattcgttttctaaaaactgccaacgaggaggagtcgccggccaaaatttcaagccagctggaaactgcggtcatcgatggactggccaccgagcaaccgaagatcctgggctccgaacagatcagcaatgtcatgcagcacattctgagcagcgagcgcaatgcgagtggcgtctacttggacgccatgcacaaccgaagtgccaataagcaggagtacgctctgggctccgagtcgctcaaccaaatgctggaggacatcatgacccccgccgggagtgtgagcagcaggtccttgtccatggaacccgccgtcgaagcctagaagtttctaaaactatttttaaaaaatactttcttttttctctgcttagaatcaaatgaacctgtgagattaggccaacaaa

SEQ ID NO: 30651 - protein, 128 aa, DROSOPHILA
MISIAQLLTSFTAGALASAQAIRFLKTANEEESPAKISSQLETAVIDGLATEQPKILGSEQISNVMQHILSSERNASGVYLDAMHNRSANKQEYALGSESLNQMLEDIMTPAGSVSSRSLSMEPAVEA

SEQ ID NO: 30652 - DNA, 2793 bp, DROSOPHILA
aatcctttattcgcatgtccccttattttgccaccgcaattcaagctgacttctccgacttgcaggacatgctggtgtcgtttcattgtgacaaataaacttacgcaccggaaatggcaggaaaaccaggcagggcggcaataaaatgccaaggaggtgcaaaataaaataagaaaaaaacatcaaccaacttggtcagcctgtaaaaacggctcgcatatcagctggtttacagccattgtttatttatgttgttgttgggtgtggaagtttggtggggggggggggggggagtacggtaccactccgtgcagcactcaaattaaaggacccgaaaaaaatgtgatttcgaaacaacattccccggctgacaggaaaggctttcagctgcaattcacccgactgcacttgccataaagcgaaaatttcattaggcctacccgaaaatggcaaaatggcaaaaaagagcagtccctcacgacgattagggttgccgcccttcgcattttttatagtacttgctggccgagtatttggccgtaaattccaaaccatttccattttgcacaaaacgtgactgagttttcccaaacgcgcccccactgcaaaatccccgcccactagcttccgtttttcgacatcctccggcaagggaaactgtaaataaattttatttttcggtccgccagcaaagtgcatagaaaggttcgcagtccgtagtctgtagtccgtagtccgtagtccgcagtccggattcccgcatagaagcctttaaaacggaactttatctgcatttagtacgtaaataatcgagtgcctcggtccgaggatttcgtcaggtgaaaaggcttttagctgaatttgggatgagtgggcagtgctaatttgttttggattgatggacatgcattttgcacgaatgagctggtagccctggttaatcgaagcctctcagcaggcccttgattttatcatcgatagtttaacatgctggaaaattggtgaaaagagtcaggtcgtagcaaaatgagtgatttggtaggtatcgtttataatgactatcccatggagagcgaggaggatttcaataggcgcaggagggatcttgataatatatttttcaactgcagcacaaggaaaaatcaggtgagtgaagttttccgaataaattaccaagccataattaagtgcatagcacatgtttcaatcaacttttgctaaccaaaaaagcacttatgctgatttattgtaattagtatgtgtatgttattaccatgattatgcgctcttattcaaaacgtgttttttttctgacaaataataataagtaactgcgcagctatgaatatttatatcctggtaattaaataacattcaagtttttatgtgtactctatatgtatcatcctacaaacaaaaggaacaacaattcgaagccaagcgtcccatactaaactcatcgaactacaataagatattcggagcatctttgggagatgacatggacttcgaggactttcccgacctcaaccaaccactgccaaatatttccattcacgagcaactgcgtctggcttccgggaaccgcgagataatcgcgagcattcagcgaaatcaccaaaagcgactcgaaaacctttggcactcggaactaatagaaaaactagcgcaagagtaaaagcaattctagttagagatagaagttgcttttgggttttccttcagagatttctcacaaaaaatattaaataaaatgtattggtaaagccctgattaccatgtaagttgttaccaaaactagcgttgttaattgttaacaggtgagtgtgcgaggcttaattgcaatttgcgcagcgtcattcggataattaagtgagttttaacttgtgcacacacaatttgctcatgtgacacatttgatggcaatggcaatgtgaaacgaatggcaatggggcactttaaatgcaaaactcacagtttgccaggcgagcctgttgaaatcatttaacgagcttgccaaattgccttatggaaaatgttggaaaagcgggcgaagtgcgtttccgcagtcgaaagtcaggacgtccagtttgtgtcaggatgcattgatttatgtcctgcagacgtcgagagcggaggaaaatgacatgaatcttcatttgtgaattgcattttatatgactgctctgtctgagattgagtatttgtgcgcacataagcacgcttacactcgcggtgcaaataatagtaactgcggttgggaaatggtcgaacatatgttagtacattctgatatatagtggaatctgtaatagcacttctactgtaccatttattatatttttaaggtgctatgagtataaatattaactgcgagtgtgcttcgactcgcatacatatgttgcaattagttcatcgcctcctgactcctcactcagctccacaaaaggcgacccaatcccaccttcaggctcaattagggcaagtgaccagctttgtgctcggctttatttatacaaatgtgtatgcaaatgcgtgtttttgtggaccacttgggtggggcaccacatgcagtgcagtgcatatgcaggacgagattcttgctaatggaattccctcagacaatccggcattcattcgactgcaaaatttcttgttttgatatgtttgttggcctgggcaaatggaattttccagttgccagcagaaagcacttcattttgtagtacactcccttcttactcttaagtatttgaggaagttatcttctggaaagatgattacttcaaactt

SEQ ID NO: 30653 - DNA, 519 bp, DROSOPHILA
ggtgaaaagagtcaggtcgtagcaaaatgagtgatttggtaggtatcgtttataatgactatcccatggagagcgaggaggatttcaataggcgcaggagggatcttgataatatatttttcaactgcagcacaaggaaaaatcaggaacaacaattcgaagccaagcgtcccatactaaactcatcgaactacaataagatattcggagcatctttgggagatgacatggacttcgaggactttcccgacctcaaccaaccactgccaaatatttccattcacgagcaactgcgtctggcttccgggaaccgcgagataatcgcgagcattcagcgaaatcaccaaaagcgactcgaaaacctttggcactcggaactaatagaaaaactagcgcaagagtaaaagcaattctagttagagatagaagttgcttttgggttttccttcagagatttctcacaaaaaatattaaataaaatgtattggtaaagccctgattaccatgtaagttgttacc

SEQ ID NO: 30654 - protein, 112 aa, DROSOPHILA
MESEEDFNRRRRDLDNIFFNCSTRKNQEQQFEAKRPILNSSNYNKIFGASLGDDMDFEDFPDLNQPLPNISIHEQLRLASGNREIIASIQRNHQKRLENLWHSELIEKLAQE

SEQ ID NO: 30655 - DNA, 3471 bp, DROSOPHILA
gctgccaagccctcacttcgaaaaatattttttatacccgttactcgtagagtaaaagaggaaactagattcgcatgtaacaggcagaaggaagtgtttctgactacataaagtatatacattcttgatcaggatcaatatccgtatcgttctagccctgtccgtctgtccgtatgaacttctcagatctcaggaaatatgaaagctgcaaggttaagattcagcatacaggttctaaagacaaagacgcagaacaagtttgttgataaaccggacaaaactgccacgcccacacttttgaaaaatatatttatattttttcacatttttataagtcttgtaaacaagccgcccgaaactgccacattttgaacaatttttaatttttgtattgtggactccaaataggtgatccatgctcaatagtcggacggactagcgaaatgaattgggttttggtcatgtaaggatcctttaacaaagaagcagatcaaggtggctcatctgccattcagataatttaaagtccaatttataagatcaacagggaattctaataaatccttatccttactagaagagaattattaacatagtcaaatgctttacaatatgtcaaacaattttccaaaaagtgctgacatattttcattttattatttgtttttttttttctaagttctacctatatggtaaaccacgcaaaactgtaacagtttttaaaattttttcttctttctttttctattttattatttttttgtgtcaattcctatcgctatgccattttgaactttctcgatcaccgtcccactagctgggtaacgggtatctggtagtcgggtaacttgactacagcgttctctcttgttttcttttaatagcttgtctcgcttcatatgccacggagactgtaatgcaaatttgccatggtagacgtcgatgcaaccttgcagccgacgcaaatacttttggaagcccttgccaaccaaattcccgaatgtacttgaaagttgtttatacgtgcggtaagttgcaagcgaaaatttttaaattaaagcacatagcttttaagacattggccaattttacattaatctgtagtgccaaagcaagtcctaaaagaaaacaaggcgttggaagtggaggctgacgaatctgaagattttggaggtgatctgaatgacctctacgacgatgagcttatctataaggagtccgaggcaatacccaaactgtatagcaatacaacaacgacagtacgccaaaacggtaccagatcactagggttaggattcagcgttaattctgcgaacaatcagagcatcacaaacagttcgctggtcgtcgaaggcgataggagtgacgtcaatcctgtcatgacgcacagtgccgacttaagtctagagggtaagaaatcgatttaacaaaatgcaatcgtagagctataataaaaaataagtaaaatatgtaaaatcatcacaatttttcttccaatagaggaccaagaacgtctttatttttatcttcttgctctggtttcactcggagtgcttatttccattgtcatattcggcactaggatagcgcttcaaaaacaccatctggtaacagaaacgctctccagctcttttgcaaaaacgacgagacgggttgaggaaacaactattccaagcggcttaaatgacacaatttccgaaatagacgctgaaatcgacctaaaaacaacacttcctttacccaacttgtccaataaagaggtaagtacctcagtccagtaaatacatttataccgttatacattctgccgtacagaattacttgacctacgcaccaaccagcagtctgtacgccgatctcccccgtaatcaactggtctcagcttgtagccaaggatctgccgccgggcaaataggaaagccgcacatcgttggcactcgtcaatcacccgaccttattggcataacacagggaccttttgtgactacaagtatggcgagtttaggcggtcagggtccgatggctgcgatggtgacgtcggctattgttattggagattctacgcccaatagtagttccttaggtatgtaacccgaccgacctatgttttagttatcccaatttcattttccctctaaggcgctatgatacctatcacccagtacacaactgctccaacaatcagaggcgggtacgtcataagtgctgataacatgggtgtaattcagcgggcgaataacacgcccaccccgttaaacttgctgtccgggagcacgccagaacaacccccgcaagccggaccgataatctcggcggcgggcatgactgtaactccacaggcccatgggggcgcatcaaatctgcggcgtgtaaagccaccattcttgcagccacagctttcatatgatggcactgcaccacggactctctccaccggagtagctgttggctcgcagttttattatggatgacacagcacactggactgtgacccgtttgtgtacaccacagcgttaggtatggcaccatcaacatccagtactcaagaaacagaggagaaattagatcgagcaagcttaaaaaatggtcttgacacgtcttagccatcggcattcccaagttgccctaggttgtagctaggcaacaaggccagttctttcaaaaccgccacaagtgttttacaatcccagctacatccagactctggaaaggagtgaaaagaatcctatcaagcaagcgagcactgttgttttcaacataaaagaaatattggcacccgtgtgtatataataaacaaatgttatgtacccaaaaaagaaatattattttcaaaatgtcgataatactaaatacggaaaattaatttgttaaattaataggttgtcttccgacagccgagaggaaccatatacaaatacaagtttgtatttgtatagtcttccgtatttcgatcagacattaattgcagaaaatatgagaatacattaagacaatttggacaaaaaagtagtctccggagaataattttgtaatgaaagttaaaaaatgcacggaaggaaaagtgcacaagcttatttaaatcaaattgtaggactgcggtttttggatgctacggtgcctcaatgtcctgaataaaaacagtactccttatcgccccgcattaataaaattggcgccaaagcataattaattatcattgttaaagcagaaactatgcaattgacagcagaaaggtggtaaagttagtcttaggctctgcacatttgcaaaacctgtatattggggatagtaatcctttaataaaaagttaggaacaacgtgaataccaaagtgtgcatcaggatagttgcattcaatcttcggttaaaaaatttataaataagtttcatttagacgtggtttgggttgaggtttactttttaatgtcaagtgccttcctcattacatttaaatgtaaagtagccgtaaaaa

SEQ ID NO: 30656 - DNA, 990 bp, DROSOPHILA
atgtacttgaaagttgtttatacgtgcgtgccaaagcaagtcctaaaagaaaacaaggcgttggaagtggaggctgacgaatctgaagattttggaggtgatctgaatgacctctacgacgatgagcttatctataaggagtccgaggcaatacccaaactgtatagcaatacaacaacgacagtacgccaaaacggtaccagatcactagggttaggattcagcgttaattctgcgaacaatcagagcatcacaaacagttcgctggtcgtcgaaggcgataggagtgacgtcaatcctgtcatgacgcacagtgccgacttaagtctagaggacgctgaaatcgacctaaaaacaacacttcctttacccaacttgtccaataaagagaattacttgacctacgcaccaaccagcagtctgtacgccgatctcccccgtaatcaactggtctcagcttgtagccaaggatctgccgccgggcaaataggaaagccgcacatcgttggcactcgtcaatcacccgaccttattggcataacacagggaccttttgtgactacaagtatggcgagtttaggcggtcagggtccgatggctgcgatggtgacgtcggctattgttattggagattctacgcccaatagtagttccttaggcgctatgatacctatcacccagtacacaactgctccaacaatcagaggcgggtacgtcataagtgctgataacatgggtgtaattcagcgggcgaataacacgcccaccccgttaaacttgctgtccgggagcacgccagaacaacccccgcaagccggaccgataatctcggcggcgggcatgactgtaactccacaggcccatgggggcgcatcaaatctgcggcgtgtaaagccaccattcttgcagccacagctttcatatgatggcactgcaccacggactctctccaccggagtagctgttggctcgcagttttattatggatga

SEQ ID NO: 30657 - protein, 329 aa, DROSOPHILA
MYLKVVYTCVPKQVLKENKALEVEADESEDFGGDLNDLYDDELIYKESEAIPKLYSNTTTTVRQNGTRSLGLGFSVNSANNQSITNSSLVVEGDRSDVNPVMTHSADLSLEDAEIDLKTTLPLPNLSNKENYLTYAPTSSLYADLPRNQLVSACSQGSAAGQIGKPHIVGTRQSPDLIGITQGPFVTTSMASLGGQGPMAAMVTSAIVIGDSTPNSSSLGAMIPITQYTTAPTIRGGYVISADNMGVIQRANNTPTPLNLLSGSTPEQPPQAGPIISAAGMTVTPQAHGGASNLRRVKPPFLQPQLSYDGTAPRTLSTGVAVGSQFYYG

SEQ ID NO: 30658 - DNA, 2304 bp, DROSOPHILA
tggtaagcgacacttgctacaaacacgctgaagtgctgaaatagtgctgcaggcagccaggagatgccgcagcgtaaaatctgcggcttagaacggttggattttcaagatgcagaccgttgatcgcagggtaaacaaatccgattgttcgcttatattcttgaagtgagaagcgcagagaagggctcacagcagaggtgacgaagtttgcatttgctcttaagactcttgtaatgatttacccaaatatatatcacttataaaatccaattaccttgaagatacctttgataagtcatagataagcacttaaggaatgaaactaacactgaggttcccatacgagcctgaaatccctacacaatactcctctcaatttgcgcttccttccgactcaacgtccccatgcttctgtcattgcaatatgtttttatgattatgacaatgataataccgtaatcgctgttgccgccttctggcttactgcaacaactgcaaaatgcgtttgggcgacacttgcagcaaattgccccacgcgcacacaagaactatgagcacaagcgattcaagctgaaaattgcttggcacagtttgtcgcatttttcgtccttgtgcctgctgctgctgctgtttttactcctgcctgctattgccgcctgcccgccttgtcatttagagctcatttcaggcgaaaaacgaaacggaatgtaaacaaaaggcagtggcaactgtggcagcagggcggcaaaaggacgcagccacttccgtgtcgcagcaaccataaaatgacagagcaactgcctccttctacactccagaaaatttagaaattcaatttttgttatacgttggacctaataagaaaattccatattataatacttcatattacaaagattgcaatttcaggaagtaattcgatattctagttaagattttgtatattttttccagtgcataccctcttaagcgctccctcccatcgccctttttcattcccctaatgagcttgatgcgtttttgatgatgctgttggatcctgctgctgctgctgctgctgctgctgctgctgctgctgctgctggttgctgccatcctgcgctgcctgtcgcactaattgaatgttttacctcttggccaacgctgcgtatgcgcaatgtgcagcctagccagttgaaatttgacttttatgagtcgtttacggaatacacaattacggtgtcgaatttattaatgccatttatcatgctgcccagaatgtagagcgtagaggtaacctctttgtcccgaacacagtctttcatggcatgtcggcggctttaattatgctgaggctgccgatgtcctgctgggacagcatcctggccgagacgtgctcatattttatgcctttataagcagtatttgtgtcggttccccagtcacttggacctgaagggtgtattgtttggaaggacaattaaaggctagagcgttcaaatgaagttgggcaacccttttcatctcatataaggaaggcagtaggtaatagcaagcaaccttttaatcacgccgacacataatttgtctatctaatgttgaaatcatcatcatcaaaagcgtaagcttggatttacaaatttagagtcggtattctttatcaatttgtaatatctcataaatggaaactaacactctatttcattttctttgtaaccggcaacaaatgtttgcacctaaatgaacatagaaatatccccaacaaaatgactacaatttaactcacatttaattacacactttaagtgtgggcttaatatagcccttatagcctatggggctatatttcttttctggcttctaggaattaacactggttctttgttaatcgataagcactcaattaacaggacttaaaggcttacttggaaaaccaaattttgcgtgtagctggcagtttacttctacgccccctcgaattttccgaccaaccaccacgcccactgttttcacagccacaaaagcacactcttcggtggcaaacagctggggcgtaaattgattcagtgagcttaattgtgctgacattttcatgtggcagcgatcgatcaatcgatgtgaatgtgtttgcatggcacgcaactgcagctttagttggcctaagcaccaacacccccaacattttccatccagtaagcctaatttatgccgttgcatgggtcgggaattgaatatgacaactttatagagtttagtttattataatcgcataaaatattgtgacgtaccggggcgcttgaaacgagcatggggattttcccgagc

SEQ ID NO: 30659 - DNA, 192 bp, DROSOPHILA
atgaaagactgtgttcgggacaaagaggttacctctacgctctacattctgggcagcatgataaatggcattaataaattcgacaccgcagcgcaggatggcagcaaccagcagcagcagcagcagcagcagcagcagcagcagcagcagcaggatccaacagcatcatcaaaaacgcatcaagctcattag

SEQ ID NO: 30660 - protein, 63 aa, DROSOPHILA
MKDCVRDKEVTSTLYILGSMINGINKFDTAAQDGSNQQQQQQQQQQQQQQQDPTASSKTHQAH

SEQ ID NO: 30661 - DNA, 2189 bp, DROSOPHILA
gcaacaactgtcaaacaagcaacaagacatattacgggcgcgggcagagaacttggcccagacatcgaccctcgagactcatttacaactgaccgaatgaaggcgctcaagtatctcagtatcccagcatcttagtggccgagtatctaagtatctatcccccgccggtgtgtgtgtgtgtgtatctgtgtgtgtccaacactttgcgccaaatcgattgtcctgccgggaacagatgttgagcatgggatctgcacgaggtgttccttccgcccattttccagcaatgttgcggtctttaaatgtggctaaattagggccaaaagtatctgcactggaattctactgtaagtttaaggcaacatgttatttttagagaaattacccaaataacatatgaccccaaacagctgttatagaattgcgacattaagtgttgaacatcgatttcaattcttcaaaaatcaactaaataggtagaccaaaatataacttctaagctctataaattttctaattatgtattgttttttttttttttattaatttttattatcgtacatttagatttataagcggcacttacttttcatatttaaattatatattcaatgcagcatttggcttgaaagcccccaaaagatcggtactttcttaagatgtaaactcagtggcttgggatcgttgttttttttttttttttgtttactgagcttggttttattttgtttattatttttttttttttttggtttgttggctgtgtttgctgccgcttcagaggaaaccgccgccaacgctgctaccataaaaacaattgctgttgttgttgctgctgttggtggtggtggtggtgatgctgctgtttttgttggtacgcaatttaaatggaatttctgctactgggcccacgaacgctgatcgccataaataatcgcgctgtggccgcagcttcagttcctgcctcaactttggacttcagccgggccaggcagcatcaatggtggcggtgtcgcagcaacaactgcaacaacagcagcagcagcagcagcagcaacattggtgcaacaacagcagcagcaacagcaacaacaacaacatgaacaacgagcaactgcaacggcgaccgcatctcagatcgcgcgataaggtaattggactattatgtcaaaaagtatttggcgtttaagaaatatggcctggcatttgacatttcggcaggcagtagtagtcggtcgcatcggtcggatcgttcggatcggttgtagtataatatagcatagtgtactatagtatagtatcgtatgttgccccgtttgcgacgccgcccctttcggcaattcgaactgcaattgccacagaacaaaaggtgcacattaaaaactgtttcgatatcgagattgcattgatcatggccaacaacaagggcgaagcggcgggtgcagttggggtacggcgaacgcattgtcaccagcaaagtcggtggttttaaagtgttaaggggcatgccgccgccgcccccccccctctcctatcaacccaagctcccctccagcaatgatcaaagccaatgtgcgtggtcatgtaattgattacgctgcgatcttcaatgggtatcgcaattgggatcggcattggcatcgaaatggaggagatggaaatcgccgagtgcggggagaggggtggtggtgatggtgttgcagtattgaaggaggcttcccatcgggattaatcattaaatctagagaatggtgcaatgatcaatggagtccgattgtttaggactctaatcggtttgctccgtgtataggtatttagatggtttacttatggattaaggaccttaagttacgcaaattaaattggacaaagatagataacgcatgagattagtccaattcttatctattaagtatttcttttaggcgcattccaaagtatttatatttagttatcagttctgaaattccaatttatattatcagcttagattttgcacaagatatggaaaatattttttgtttttgtaaattaatataatactcttaactttatattagtttcttaaattttattgatattttttgcgcatatatcaaggcagtcgtggccgagtggttaaggcgtctgactagaaatcagattccctctgggagcgtaggttcgaatcctaccggctgcgtttgtaa

SEQ ID NO: 30662 - DNA, 189 bp, DROSOPHILA
atggtggcggtgtcgcagcaacaactgcaacaacagcagcagcagcagcagcagcaacattggtgcaacaacagcagcagcaacagcaacaacaacaacatgaacaacgagcaactgcaacggcgaccgcatctcagatcgcgcgataaggtaattggactattatgtcaaaaagtatttggcgtttaa

SEQ ID NO: 30663 - protein, 62 aa, DROSOPHILA
MVAVSQQQLQQQQQQQQQQHWCNNSSSNSNNNNMNNEQLQRRPHLRSRDKVIGLLCQKVFGV

SEQ ID NO: 30664 - DNA, 13293 bp, DROSOPHILA
aaatacctacaaataattaaattaaaccaaaatctgttctcttttgtttgtgaacgaaagcttacggccctcatgattaatacaaaccaaatatatttttagtgattttgcaatgaaaagcaatatataacagaatggttcatatatcaatgatttatatatgtatcattttaaaaaccagaaaagattataggtatagttatccttgcgtaaatacgcaaacaagtctaaaagactaataaaaagttttgcggccgacataaattataataaagtaaatgtccaattagcgaactacaccatggatagataaataatcaaatattaaagaccaaaaaccccataataaaatttccccaaccaaattagctctactaaatagccacaaaattgcggcatggaaaagagcagagaccgaaaatcgtttaatgtccgttcgcattacaaagaatatttaatgggaaatcgggatttttggcgcattgcagccagtcgagctttaatagaataaagcaatttatgcccgagggaagcgtaataaaaattcaatcttaaacagaaaatattgttcaaatatgcgcgtattaaatgtttccagggaaattttgtatgtggtgaagagatttcattttcgttagcgatcccctgactcctgtaagtgatacattttccccgagtgcttagggttttcccattttccgtggccgcggctaacaagggccatctaaaacaatgacaaacgagatacgacatagcaatatgggcaaattaattgaacaactccagaacgcaataaaagccagagagaaggcaacgttcattttcaactaccaaacagcggcaaaaacaatttcaccgaccgggccaaaacacttgagagtgtgcggggaatatatatatatatatattggggcacattggtggggcatatatcggggtgcttcggggctggcggaataactgtgtcaaaggcaacgtcggcgacagaagtgaaatgaaaatggccgaaacagcgccgccggctgcgtcggcgacatcaaaagccacgtcaagagatttcccgcactgaaaagagctaaagagcggatagaaaatagtgcggtcatgcgcaggcatcagcccagaatgcttttaaatgtttatagttaatgccaaactctcacgcaaacggttgtcaggcaaatgcagttggctaaataaattatttacacgtttttttagtatacagtaacataaaaaatactgtgactaaaaacataaaaatgcatgtttgcttatgtcttttttaaccgagttatctaatgccaagtagcctttgtgtatgctttttaagttaatgcaatatggcttaaagggctttgatattttgcggggaaatgtaaatatttagacttcacacacagactgattgccaaaaagaaaatcattgaaagtaatgatatttatcgccctatattacaattagttgtttccaagtcttttaacaaaactttttaaatttgataagaatacgctacttaaatgttcatattttctaatcagtggtatttagatttttgtgttattttgtaattaatctttctaataactataaagttaatttttttttattaattggaaagaatatagatctaataacctactataatacatttgagatagaaccacttaatgcctaaacattagcaacctatcttttgattattttttgctattcgaatgcattaactaatggaatcggcccgaaaacatctaacattctaaagagaaagccgttcctttaagagcaaagtaaaagagagcgaaaaaagagcgaaaggtgcgcgcgcaggcacttgttgatttctcaattcggaacagctgctcgtggtggaacgccgactgcgctgccaggaagacggcgttgtcaccgcattgcgggcaggtgtgcggtgcaaggagggtgcgaacaccacccacaatccacccaacgcccctacacaccgctggcaaacatgtgcgctaattgaattagtggaactcggacaggtggttgacacctcgctggcgcacttttgacatcggcacagtgttgtttactgttttgcaccgctgggagatataactcacaatagattttaatgggattgcatgttcttttgccaaagaaaaaaacaagttttgtagagggatacccataccaattaagtacaaaagtggtccttacaaattcaatcgcttattctttatttatgatttttataaaaccaaaaagaagtcctgtgaaagtattaaatgcgacatatataacatcacaatgatgaatttataattcaacacattttatagttttggttagccaaattctttagatatttatattagattttataagatatttatatttaagataatttataataatagtaatatatatttataacaattcatttaacaaatgctttgcattgcagtgtcggcaagtgggccacccaatttggcgacgagctgttcgcgctggcgcagaagatcaccaagtcgcaggagatcaaggagaagtacaaggagtacaatgcccgcgtggagctgaagaacggcaccgaactgattaagtcaataacgaaaaatgtgggcagaatgctggcgaggaaaatggacgcggtgcggtgcatccaggagcgtgcggaatatgtgaacgagaactttgagtttaatctcacctatgcgcttcagaacttcacctacttttctagcaagtattcgacctttaatggaaacagttccgaggagctggaacctaatgaggctgagttcgcctggatgtatcggaatatggagttgaatccggacacacacttctacaatacgccagtggacacggaacacagttcggtgcacgtgccatcgaatatatgggatcgatcggaacgtgtcctgaagaccataatgtggtccgagcatctggacgaggtgttccggcagaattaccaatccgatccggccttgtcgtggcagtactttggctccgatacgggaatcctgcgccactatccggctgcccaatggactgataccagaccaaatcgggatgatgccgacacctatgattgccgcaagaggtcttggtacattgagacagccacgtgttcaaaggacattgtcatcctgctggatcattcgggttcaatgacgggcttccggcatcatgtggcaaagtttaccattcgcagcatcctagacactttctccaacaatgatttcttcaccattctgcggtactcgagtgaggtaaatgacataataccctgcttcaatggagctctcgtccaggcgacacccgaaaacatagaggtcttcaaccagcaaatcgaacagttggacgatcctgaaggatatgctaatctcaccttggcctacgagacggccttccaactgctgcgaaaatactacgatagtcgtcattgtgtcaccaattcgacgtgcaatcaggccattatgttggtcaccgacggagtggctggaaataccaccgaagtctttcagaagtacaactggggcaatggcgagaatggaacctcgcagatggacacacgtgtgttcacctatctgctgggcaaggaggtcaccaaggtgcgcgaaatccagtggatggcctgcctcaatcggggctactactcgcatgtccaaactttggatgaggtccacgaagaggtgctcaagtacgtcgatgtcattgccacgcccttggtgctgcagaacgaacaacatccgcccacctggacgcacgccttcacggacaaaacggtaagagtttatagtcatattttaaaatggtttcacaatattaactttaagtccttggagtagttataatttggatccatttttatatttatagggctgatatcaaacttgtgtgtgtttttattccatttcataaccattatttaatttataaacattaacaatattatatttttccatacagtacgatccaaaaacttccaatgaaaaacgacctcgcctaatgatatccgtgggagtgcccgcctttgatcgcttctatcgccacgcgaacagcacaaatccgagggcacgtttgttgggagtcgctggaacagacgtgcccgtggaagatatagacaagctgacactgccctacaaggtggaaatgatggagtttaattaaaatctttaaaactaattgggaagtatttttcagctgggtgttaatggctactcttttgtggtgtccaacaatggatatgttctgctgcatcctgatctacgacccattggggtaagttgaatggtgtcaaacagtgtttacatatatatatatattcttatattacccacaccagaccaatggaaagatgaatcccaactataacagcatcgatttcaccgaagtggagcacctgttcgaagatcaaagtccgcgggaaccgggcgaatctattctacacatacgcaacgccatggtgcgccacgaagccaatgagttcaagagcatatcggtcaagtttcactatgacaagatgcgccgcgtttccgaggagaagcaggactacttctttgccccactgcccaacactccattcaccttgggcatcgtaatgcccagcgaatatggcaaaacttggatcaaagttggcgaggaggtggacaagaacaagcacatgaagataaatatatcggactttttcatcggcgaaaactggaaagttcatcccgattggtgggtgtaaacctaaatctgcttgaatttattaaaacattaaatatttgattaaatttgacagggtttattgcaaataccactatctggagggtcatgagtttaaaacacctgaggcggagttgcgcgagtttctggccaagatgcaaaacgattggaagtggtcagagcaatatgcggaggatgaatccgactgggacgacaaagatgatcgtaagtgcgccaattaattcttttactgacctaaatgcatggcttttgatttcagtgaactgtggtcgcaaaacgctgggtgatgatgcctactattgcaacaaggagctggtgaacctgctcatcttcgacgccaaggtaacgaattccagctacggtgtttggcggttcgagagcgatgaggaacgccagttgatcgagcggttccgtgctgatctgcgatttgtggccaccatgagtggcctgacccgttggcagtttatcttcggagaggttgaggtggacacggatcgtgaattcggggactaccataccacggccatcgatgagacctggtacaagagtgccatcctgcagcatcacgaggaccgagcggagagctttgtctattcggtgaaatattacgatgatcccatggaggacagcgaggtcaaggtaaccgcctcacatgccatctttccgagggacggtggcaaggaggcgcccgcctgcgtagtgggcttccagttttcccacgcccgcatgtgggagcgcttcttcaacatcaccgcagtggatcatgtgagtcgctgaaaatttaagctttatgcattgtagattacttaagtttttccatctgaatttatagtgcaaccattgcttgcccatctgcactgatgacgacgtggattgtgtggtgattgacaataatgcgtatatcgtaattggacagaatatcaacaccactggcaaattctttggcgaattccacggcgatgttatgactgcgatggtggaaaggggcatctttctcagcatagaggtctacgattaccaggagcaatgcaaggaggagccaaaggcgggtagcgatgggcacggtctgctgcatgtaagtcatgccaatttgagtttaatcatatcaaaaacattgaatatgaatcatatatatttctgatctagccccttcgattgttaagcctcggctggaagtatttagtaggtcgactcttctttgaataccagagaattcaatggtgggctgatggagcgccatgtaagtgttagatttgttcaacaacatgtccttttatcctataatctcaattgatccttctttcagttatggaatacacagatgagattgaagacgagtacgtggcagtgggtgatggaggaaagtcttcagcttcgaagccaaaagatgatagtgacgacgaaaacgccatgttcgatgaacccgaacccgatcccatctataaggcatgtgacaagcgatccactctttatgcactgcagccatctgccctcgtgggcattaatgactttgtggaggcgccttcaactcgacccttcttggttaagaagattccgaactccaatctggtgctggtggtggtcaatgtcctgatgccgtcgcgtagcgttcgcctgaccaccgaaccgcagcgtatggaatacgataaagaattcccctgctataagctcaatatgagtttctacgaacgacggcgcatcgaagagtgttatacggtacacgaagatgtaagtatttgtataagtattttaatctgatcacgtccgtccgttcgtctgtccgttcgactgtccgtataaacgttgaaataaagagatagcacccacaatccgctcaacattttgacctatcatcaaaattgattttcatcatgtgattgattttaaattaaatactaatatttacttcttatttaggaggaactgtacacctattgcggcaatgcctcgcggctggttttgacgcttcagctaatgccgctgaccataattttagtgttttacctgacgcacagctttatgcgttaggtacaatgtacacagaactatacattatacaactattatgtactatacgcgactacgatcggtttgttgtttatacatatatatatatatatatatataaatatattttttgttttctatagattgtaaactttatgccgtagtccaatactttgtcgaatgtttaacaacagcgcaaaacaaacaaaaactggcacaatcttcggtacgaaaaccactataagcaagaacaatttcaacttttagacttacaaactgcgccaaaaattatgaaactgggtcttactttattttaaaaaattgtagtgaacgatgaaggccgctgcaaacaaaaggagacaacttaaagaccaacgatttcacacgatgagtttccttgttccaagctgatccttcaacattttcttagaatcttagtgaacgcaatgtttcttttttatatacaatacctaacgcctatagaaaaagaacccacgtttcaatgactattttgatagattaatatggtgcaaccaatgccaaatattaaatgaataaattagcaaaaattagtaaattgcgaacaaaaataattcgaatgacaattatttttgtaattttataaaacttagttgattttgtacaacaataaaaacgtataaatattataatacacgtaaatgatggaaaagcaaaaaaaaaaaatacacaaaacacctacttttgttaggaatattcgctatttcttaaagccgaatagaatatatatggttttcgtttttgaacgcagcctaaaaaacgcggtttacaacagataatatttaatgttaatgcggcgaacatttttcatatgttttccaacggttttgtaaagtgtactttattgaatataatgtttttaaaacggcaagttaacgcacagatttgtaaaaccaagcataggaccacctgtaaagtatgcaatacttatttaatactgagttcgaaaaccccatctattatataatttacagcgctcttcaggccatacactaagtcgaaagtctttagcaagatttacacagaagatggtagggggaaaccaaaccttaaatgaataccaacctaattgcctttgtatcgtatttcgaatgtggaaacaatttatgaactttatgaatttatgcctagaaacctaaaacaaaatatgtaatattatgatgaagacaatttaaattaagattattttcaaggaaatgaaatcaaaagaagacggtgtttttaaaggtgagctaatgatgctgagatgaatggcaaaatgaaatgaaaacagttaactattaaatgtaattttttaaacaaactgaattactaatacaacctttattttttggagtgtttaaacgttgtaaaatgtattaaaaaaaaaatatgacataacaaaatctagttataatggtatacgtggatttgctgcaagttcatcatcaagttaatgttcatctctatgagttatataggctctttttaatcacatttttttaaatttcgacacgtatacacaatgtatatgacatgtccactaaaaataagaaacgataaacattttaaatttccttagcaaaataaatgaactaatcgtcgacaaatattgaaaagtatttcatttgttatggatttttaaaagaggtaagtgtatttaatatatagctttatattgggagttaaacacatttaatatttatagcttaagcaaccctcttaaattcctcacaacccttctatcttaagcaattgactttacaattataagtgaaaaaagttttcgagcagataatcggcgaaaaattaatacaaatttaattatcaacggtcgctgttttgtttactctatatagaatctgaaatattacagattgtttacccaattgaaggagatatttaaacaatgtactctttttccttaaagactttattgttatgtgtgtttttaaaaataattaaagcaaacgtaaggaaactgtgccattggaaattcgaagttaaaaagtttcttttcagttaagtgatattgacactggaaatgcgcacaaacaacacaataaagattcatttccgaatccatactctaatggaagtgattttatatcgaatcaagataacaaaattaattatattcctcccaatcaacatggaaaaatgtttatccatcaaagagagcagcttccatttaaacataatgagcaagatccaaattatttagcccccgtcattcaaaaaagaaaacctatggataaggatccacgaaatccactgaaacgacttaaatttttgcaggaatttcctactcaatcatcaaagggggatcttgacgatttaaaatatccaacacagttagaagggcgccacgattcacccaaatatgataaaacctttcataccgaaatacatgcaaataatgaaacagattctcaagaattggaaaatataattttagaaaagaacttgcaagattctaaaacagaattccaagaaaatcgtgcatcgcaaccaaagaatatgcattcgttccaaattcctgaagcaatcgaatctcattttaataacaaagaattgcagaatgagaatgatttacataaaggactgaagcaacaatatcgatctggatccgaacaggataagtcaggaccagagaatgtacgcgaaattgcatccaaactgatcctccagtgggcggaaaatcagcgcagtttattagattccttcgtgaaggcgatcaccgacgtattgaaagttcatgattctaagctgaatatgaaaataaatatcagccctcgagatataatgattttaaaagatatgctcaaacaattacttgaatcaataatgcaattgagagaaggtagcaccagcacacgtgctaggatcgtattaaacaagtggatagagacccaaaaatcactaattgattcattttcccaagctattcaaaatacaaatcaaaatgtggacaacattgccaatgtatatgaggtcatggaaaatttaaataaaaaccttagggaactggtaattctgctaagcgacaaggaaagtttcccaacaacagagagtagtagttcccaacaaactactagcatttatgcaactactactttctatctaacatcaagcacatttggctcaactcatcctattgtagacgaaaatatcaatcgtgttaatatcatgggaaatttgataaagggactaagaaatattatggttcaaatggatgaaacaaataaaacttcaagttctacttcttataccacaacggaaagtacctatattcaaccgagtacatccacatatttgaacgcggaggtcactacttcccatccaactacaagcacatatgaagttacaaatataataaccgacgaaagtaaaattaaagacatgtttaatttgattaaaggtatagaagacctaattagtcaatataatggcaaacataaatttacaagtaccaccagtttaactgggaaaagcaatagccgagagccaacgatgaccacttattcctcagctggtggtattacatcccattcctttacaaccacttcaccgaaaacagtgactacttcttctagtcattcaacaacagagagttcgcctagtcatccgacaacaagcaactatgaagtcactgtttttgatcaggatagccataaatttaaggttatgaaaaatttgatcaaagaacttaaaggactgatcgaacatttcagtgatacaaaaaatattacgagtacaacctattcaacaggagacagcaaaagtttccagccaaccgctacgactcctgactctacagacagatcttcctcccaaccaattacattccccgagtcgacaacatcgacgacgaacttacaatcaactattactaaccatttgtcaacagagagtacgagttctcagcttaatactactctttctataacaggaaccactactcccaatctaactacaagcacacatgactttaaagaccagattaatgacgatgattctaaaagtctgaaacatttaattaagatactttcagacctggtatattcattaaatgataagaataatataaaaagtaccagccagttaacaacagagagcacatttaatagttcaattaacatcaccaattcaacgactgttgcctcatcaactttttcaacaacagagagtatggccatccattcaaccccttatctttcaacaagagaaatcacggttttccaatttaacgatgtagaaaatataaatccaattatatccaacaattcaacaactgtgaccactaatattcattctagtacatataccacatcaacaacagataatacaacatcctatcctaacctttcaacaacagagagttccccaacgtttgattcgaccatatctcactcaaatacatctagtcaaacaagatcgcttggttcatataaagacaaaatcaaaaatattgtagaacttttaaaaaaattacgtaagattcagaaaactttagccgacaagtcgaaggggcaactttcaccaatgcttatatcgagaataaaagctgtacttaagcaaatcgtcgcgggtaatattgattcagtaaacggcgattcaactgagttggaaatacttctttccacaacagtcaatcccaatgaagatactaccgatttgacgatggaaaaattgttaaagctattcgatgattttgaaaggatgtataacgtattgttggatgatagtattcagagtactacacaatccacgacacagaacaacacaattttttcaacgacatacagtacaattttttctacaacccaaagcatatcaacaacttcaccaacacagtatgcattaacgagttccacaccaaatacttcaacaacatcacattcttctaccccatcctcaataaataatctaaggagtgatgaatcaaacaatcaccagccaattgtagacgcaattcagcaattaaagatggcattatatcatgacttttatgcttttaaaaaatctcaagaggaaaggtatttctatattgcacatatttataaaaattctttataatacttgcttatttttagaatggaaaaaattcttcaacttcttaatggcaaaccaatagatcggcggacaaaaactattgctaaaccgagaaccatacgaaagaaagtaagccgtgagatacaaaaaagaaacagcgatgttaaagaggataaaatgtaagcattaattttagcaaaataaattcataaagtaagaattattttccgcactctatactagacaccactacaaagcagacaaatttataaaaaacccaaaaaatggaaatcaagatagtcacatccctaaaccgattttaaattcggcaagatcgaaaataaaagatgtcccattaaaactatctgctattaaagtaaatggtggactaaaacatttgccttcaaaacgtaaagctaatgaagaagtatctgcaatgcatgagattttcccggaacccgtatcaatactgccacataagtaaggcttttatcaacatgtttatgttgaataatttatatacgcgatttaaattttcagagagtcctatgaattaccaattatcgactttcttccgtttggttaaaaattaaataaaatctttgaaagcaaatagaataaaattgaatatgtaagtgcacttttttcatcttaatataaatattaatataaaaattagtggactcgaatcaaatatgcctttaatagatatatcttctaattaaagatgcttacctttcagcttcaagtcatcgaaaaataattgatttggtccaaacatttttagtgaaaccatttccaaaacctattgtacataatagactctcgattttatagggattaacaaaagtgattggttaattttaatatagatcatttttatttccttgtaatgactaacattttaaaaaattacaattcaatattttggataaattatttataagcattaaatttgtttttattttcggcttgtgttttttcttcgtgcttttcatcgtctccatttcacacaatataatttgttaatttgttgtttacaataaggtttaatttttttttgcatgttcattttctcaatttttgttttattttttcttgctgcttgtttgaaatatttctttaatctgcttgcaatttttgagtttgaatgtatgtagtcattaatgtaaaactttgtagttctatagttctataatacatatatatatttaattatatgtatagatatatatatatatctttgaatcacacatacacgcatggaactcatgcatatatgtgagaggctgattggtattgtagtgtcaaataagcaaggtgtttagcatataaaaaagaaggttctaatataaataaatgtattttttactattgaaaattaaaactcaaataagtgttcagatatatgccttcacccattgatagcgaaaagtggacgaagtgaaaagaagataaaaaacaaaatataaataatgcaaatt

SEQ ID NO: 30665 - DNA, 6519 bp, DROSOPHILA
atggccgaaacagcgccgccggctgcgtcggcgacatcaaaagccactgtcggcaagtgggccacccaatttggcgacgagctgttcgcgctggcgcagaagatcaccaagtcgcaggagatcaaggagaagtacaaggagtacaatgcccgcgtggagctgaagaacggcaccgaactgattaagtcaataacgaaaaatgtgggcagaatgctggcgaggaaaatggacgcggtgcggtgcatccaggagcacttcacctacttttctagcaagtattcgacctttaatggaaacagttccgaggagctggaacctaatgaggctgagttcgcctggatgtatcggaatatggagttgaatccggacacacacttctacaatacgccagtggacacggaacacagttcggtgcacgtgccatcgaatatatgggatcgatcggaacgtgtcctgaagaccataatgtggtccgagcatctggacgaggtgttccggcagaattaccaatccgatccggccttgtcgtggcagtactttggctccgatacgggaatcctgcgccactatccggctgcccaatggactgataccagaccaaatcgggatgatgccgacacctatgattgccgcaagaggtcttggtacattgagacagccacgtgttcaaaggacattgtcatcctgctggatcattcgggttcaatgacgggcttccggcatcatgtggcaaagtttaccattcgcagcatcctagacactttctccaacaatgatttcttcaccattctgcggtactcgagtgaggtaaatgacataataccctgcttcaatggagctctcgtccaggcgacacccgaaaacatagaggtcttcaaccagcaaatcgaacagttggacgatcctgaaggatatgctaatctcaccttggcctacgagacggccttccaactgctgcgaaaatactacgatagtcgtcattgtgtcaccaattcgacgtgcaatcaggccattatgttggtcaccgacggagtggctggaaataccaccgaagtctttcagaagtacaactggggcaatggcgagaatggaacctcgcagatggacacacgtgtgttcacctatctgctgggcaaggaggtcaccaaggtgcgcgaaatccagtggatggcctgcctcaatcggggctactactcgcatgtccaaactttggatgaggtccacgaagaggtgctcaagtacgtcgatgtcattgccacgcccttggtgctgcagaacgaacaacatccgcccacctggacgcacgccttcacggacaaaacgtacgatccaaaaacttccaatgaaaaacgacctcgcctaatgatatccgtgggagtgcccgcctttgatcgcttctatcgccacgcgaacagcacaaatccgagggcacgtttgttgggagtcgctggaacagacgtgcccgtggaagatatagacaagctgacactgccctacaagctgggtgttaatggctactcttttgtggtgtccaacaatggatatgttctgctgcatcctgatctacgacccattgggaccaatggaaagatgaatcccaactataacagcatcgatttcaccgaagtggagcacctgttcgaagatcaaagtccgcgggaaccgggcgaatctattctacacatacgcaacgccatggtgcgccacgaagccaatgagttcaagagcatatcggtcaagtttcactatgacaagatgcgccgcgtttccgaggagaagcaggactacttctttgccccactgcccaacactccattcaccttgggcatcgtaatgcccagcgaatatggcaaaacttggatcaaagttggcgaggaggtggacaagaacaagcacatgaagataaatatatcggactttttcatcggcgaaaactggaaagttcatcccgattgggtttattgcaaataccactatctggagggtcatgagtttaaaacacctgaggcggagttgcgcgagtttctggccaagatgcaaaacgattggaagtggtcagagcaatatgcggaggatgaatccgactgggacgacaaagatgatctgaactgtggtcgcaaaacgctgggtgatgatgcctactattgcaacaaggagctggtgaacctgctcatcttcgacgccaaggtaacgaattccagctacggtgtttggcggttcgagagcgatgaggaacgccagttgatcgagcggttccgtgctgatctgcgatttgtggccaccatgagtggcctgacccgttggcagtttatcttcggagaggttgaggtggacacggatcgtgaattcggggactaccataccacggccatcgatgagacctggtacaagagtgccatcctgcagcatcacgaggaccgagcggagagctttgtctattcggtgaaatattacgatgatcccatggaggacagcgaggtcaagtgcaaccattgcttgcccatctgcactgatgacgacgtggattgtgtggtgattgacaataatgcgtatatcgtaattggacagaatatcaacaccactggcaaattctttggcgaattccacggcgatgttatgactgcgatggtggaaaggggcatctttctcagcatagaggtctacgattaccaggagcaatgcaaggaggagccaaaggcggttatggaatacacagatgagattgaagacgagtacgtggcagtgggtgatggaggaaagtcttcagcttcgaagccaaaagatgatagtgacgacgaaaacgccatgttcgatgaacccgaacccgatcccatctataaggcatgtgacaagcgatccactctttatgcactgcagccatctgccctcgtgggcattaatgactttgtggaggcgccttcaactcgacccttcttggttaagaagattccgaactccaatctggtgctggtggtggtcaatgtcctgatgccgtcgcgtagcgttcgcctgaccaccgaaccgcagcgtatggaatacgataaagaattcccctgctataagctcaatatgagtttctacgaacgacggcgcatcgaagagtgttatacggtacacgaagatttaagtgatattgacactggaaatgcgcacaaacaacacaataaagattcatttccgaatccatactctaatggaagtgattttatatcgaatcaagataacaaaattaattatattcctcccaatcaacatggaaaaatgtttatccatcaaagagagcagcttccatttaaacataatgagcaagatccaaattatttagcccccgtcattcaaaaaagaaaacctatggataaggatccacgaaatccactgaaacgacttaaatttttgcaggaatttcctactcaatcatcaaagggggatcttgacgatttaaaatatccaacacagttagaagggcgccacgattcacccaaatatgataaaacctttcataccgaaatacatgcaaataatgaaacagattctcaagaattggaaaatataattttagaaaagaacttgcaagattctaaaacagaattccaagaaaatcgtgcatcgcaaccaaagaatatgcattcgttccaaattcctgaagcaatcgaatctcattttaataacaaagaattgcagaatgagaatgatttacataaaggactgaagcaacaatatcgatctggatccgaacaggataagtcaggaccagagaatgtacgcgaaattgcatccaaactgatcctccagtgggcggaaaatcagcgcagtttattagattccttcgtgaaggcgatcaccgacgtattgaaagttcatgattctaagctgaatatgaaaataaatatcagccctcgagatataatgattttaaaagatatgctcaaacaattacttgaatcaataatgcaattgagagaaggtagcaccagcacacgtgctaggatcgtattaaacaagtggatagagacccaaaaatcactaattgattcattttcccaagctattcaaaatacaaatcaaaatgtggacaacattgccaatgtatatgaggtcatggaaaatttaaataaaaaccttagggaactggtaattctgctaagcgacaaggaaagtttcccaacaacagagagtagtagttcccaacaaactactagcatttatgcaactactactttctatctaacatcaagcacatttggctcaactcatcctattgtagacgaaaatatcaatcgtgttaatatcatgggaaatttgataaagggactaagaaatattatggttcaaatggatgaaacaaataaaacttcaagttctacttcttataccacaacggaaagtacctatattcaaccgagtacatccacatatttgaacgcggaggtcactacttcccatccaactacaagcacatatgaagttacaaatataataaccgacgaaagtaaaattaaagacatgtttaatttgattaaaggtatagaagacctaattagtcaatataatggcaaacataaatttacaagtaccaccagtttaactgggaaaagcaatagccgagagccaacgatgaccacttattcctcagctggtggtattacatcccattcctttacaaccacttcaccgaaaacagtgactacttcttctagtcattcaacaacagagagttcgcctagtcatccgacaacaagcaactatgaagtcactgtttttgatcaggatagccataaatttaaggttatgaaaaatttgatcaaagaacttaaaggactgatcgaacatttcagtgatacaaaaaatattacgagtacaacctattcaacaggagacagcaaaagtttccagccaaccgctacgactcctgactctacagacagatcttcctcccaaccaattacattccccgagtcgacaacatcgacgacgaacttacaatcaactattactaaccatttgtcaacagagagtacgagttctcagcttaatactactctttctataacaggaaccactactcccaatctaactacaagcacacatgactttaaagaccagattaatgacgatgattctaaaagtctgaaacatttaattaagatactttcagacctggtatattcattaaatgataagaataatataaaaagtaccagccagttaacaacagagagcacatttaatagttcaattaacatcaccaattcaacgactgttgcctcatcaactttttcaacaacagagagtatggccatccattcaaccccttatctttcaacaagagaaatcacggttttccaatttaacgatgtagaaaatataaatccaattatatccaacaattcaacaactgtgaccactaatattcattctagtacatataccacatcaacaacagataatacaacatcctatcctaacctttcaacaacagagagttccccaacgtttgattcgaccatatctcactcaaatacatctagtcaaacaagatcgcttggttcatataaagacaaaatcaaaaatattgtagaacttttaaaaaaattacgtaagattcagaaaactttagccgacaagtcgaaggggcaactttcaccaatgcttatatcgagaataaaagctgtacttaagcaaatcgtcgcgggtaatattgattcagtaaacggcgattcaactgagttggaaatacttctttccacaacagtcaatcccaatgaagatactaccgatttgacgatggaaaaattgttaaagctattcgatgattttgaaaggatgtataacgtattgttggatgatagtattcagagtactacacaatccacgacacagaacaacacaattttttcaacgacatacagtacaattttttctacaacccaaagcatatcaacaacttcaccaacacagtatgcattaacgagttccacaccaaatacttcaacaacatcacattcttctaccccatcctcaataaataatctaaggagtgatgaatcaaacaatcaccagccaattgtagacgcaattcagcaattaaagatggcattatatcatgacttttatgcttttaaaaaatctcaagaggaaagaatggaaaaaattcttcaacttcttaatggcaaaccaatagatcggcggacaaaaactattgctaaaccgagaaccatacgaaagaaagtaagccgtgagatacaaaaaagaaacagcgatgttaaagaggataaaatacaccactacaaagcagacaaatttataaaaaacccaaaaaatggaaatcaagatagtcacatccctaaaccgattttaaattcggcaagatcgaaaataaaagatgtcccattaaaactatctgctattaaagtaaatggtggactaaaacatttgccttcaaaacgtaaagctaatgaagaagtatctgcaatgcatgagattttcccggaacccgtatcaatactgccacataagtaa

SEQ ID NO: 30666 - protein, 2172 aa, DROSOPHILA
MAETAPPAASATSKATVGKWATQFGDELFALAQKITKSQEIKEKYKEYNARVELKNGTELIKSITKNVGRMLARKMDAVRCIQEHFTYFSSKYSTFNGNSSEELEPNEAEFAWMYRNMELNPDTHFYNTPVDTEHSSVHVPSNIWDRSERVLKTIMWSEHLDEVFRQNYQSDPALSWQYFGSDTGILRHYPAAQWTDTRPNRDDADTYDCRKRSWYIETATCSKDIVILLDHSGSMTGFRHHVAKFTIRSILDTFSNNDFFTILRYSSEVNDIIPCFNGALVQATPENIEVFNQQIEQLDDPEGYANLTLAYETAFQLLRKYYDSRHCVTNSTCNQAIMLVTDGVAGNTTEVFQKYNWGNGENGTSQMDTRVFTYLLGKEVTKVREIQWMACLNRGYYSHVQTLDEVHEEVLKYVDVIATPLVLQNEQHPPTWTHAFTDKTYDPKTSNEKRPRLMISVGVPAFDRFYRHANSTNPRARLLGVAGTDVPVEDIDKLTLPYKLGVNGYSFVVSNNGYVLLHPDLRPIGTNGKMNPNYNSIDFTEVEHLFEDQSPREPGESILHIRNAMVRHEANEFKSISVKFHYDKMRRVSEEKQDYFFAPLPNTPFTLGIVMPSEYGKTWIKVGEEVDKNKHMKINISDFFIGENWKVHPDWVYCKYHYLEGHEFKTPEAELREFLAKMQNDWKWSEQYAEDESDWDDKDDLNCGRKTLGDDAYYCNKELVNLLIFDAKVTNSSYGVWRFESDEERQLIERFRADLRFVATMSGLTRWQFIFGEVEVDTDREFGDYHTTAIDETWYKSAILQHHEDRAESFVYSVKYYDDPMEDSEVKCNHCLPICTDDDVDCVVIDNNAYIVIGQNINTTGKFFGEFHGDVMTAMVERGIFLSIEVYDYQEQCKEEPKAVMEYTDEIEDEYVAVGDGGKSSASKPKDDSDDENAMFDEPEPDPIYKACDKRSTLYALQPSALVGINDFVEAPSTRPFLVKKIPNSNLVLVVVNVLMPSRSVRLTTEPQRMEYDKEFPCYKLNMSFYERRRIEECYTVHEDLSDIDTGNAHKQHNKDSFPNPYSNGSDFISNQDNKINYIPPNQHGKMFIHQREQLPFKHNEQDPNYLAPVIQKRKPMDKDPRNPLKRLKFLQEFPTQSSKGDLDDLKYPTQLEGRHDSPKYDKTFHTEIHANNETDSQELENIILEKNLQDSKTEFQENRASQPKNMHSFQIPEAIESHFNNKELQNENDLHKGLKQQYRSGSEQDKSGPENVREIASKLILQWAENQRSLLDSFVKAITDVLKVHDSKLNMKINISPRDIMILKDMLKQLLESIMQLREGSTSTRARIVLNKWIETQKSLIDSFSQAIQNTNQNVDNIANVYEVMENLNKNLRELVILLSDKESFPTTESSSSQQTTSIYATTTFYLTSSTFGSTHPIVDENINRVNIMGNLIKGLRNIMVQMDETNKTSSSTSYTTTESTYIQPSTSTYLNAEVTTSHPTTSTYEVTNIITDESKIKDMFNLIKGIEDLISQYNGKHKFTSTTSLTGKSNSREPTMTTYSSAGGITSHSFTTTSPKTVTTSSSHSTTESSPSHPTTSNYEVTVFDQDSHKFKVMKNLIKELKGLIEHFSDTKNITSTTYSTGDSKSFQPTATTPDSTDRSSSQPITFPESTTSTTNLQSTITNHLSTESTSSQLNTTLSITGTTTPNLTTSTHDFKDQINDDDSKSLKHLIKILSDLVYSLNDKNNIKSTSQLTTESTFNSSINITNSTTVASSTFSTTESMAIHSTPYLSTREITVFQFNDVENINPIISNNSTTVTTNIHSSTYTTSTTDNTTSYPNLSTTESSPTFDSTISHSNTSSQTRSLGSYKDKIKNIVELLKKLRKIQKTLADKSKGQLSPMLISRIKAVLKQIVAGNIDSVNGDSTELEILLSTTVNPNEDTTDLTMEKLLKLFDDFERMYNVLLDDSIQSTTQSTTQNNTIFSTTYSTIFSTTQSISTTSPTQYALTSSTPNTSTTSHSSTPSSINNLRSDESNNHQPIVDAIQQLKMALYHDFYAFKKSQEERMEKILQLLNGKPIDRRTKTIAKPRTIRKKVSREIQKRNSDVKEDKIHHYKADKFIKNPKNGNQDSHIPKPILNSARSKIKDVPLKLSAIKVNGGLKHLPSKRKANEEVSAMHEIFPEPVSILPHK

SEQ ID NO: 30667 - DNA, 2549 bp, DROSOPHILA
actcatccgaatctccagcacacgctgagcttgcgaagagctggcaagtcctccaatggccaacaacagcgacatcgaaaaactctatccatgtcagactgcacgcacatttcgcagcacaacacactgctggcttccatggatcaggcgccgtccaaaacagcgctaaatcatcagtcgggaaatctcaacatcgatgctaggcagctaacgaatccacaacttttgtggcagcgtcctgtgggcgcactgaaattcggttttgttaactccttgggacgctacgagcgggattttgaggccgtggacgcagtggctctgaaatcgcagccgtggtcactgagcgtcagcggtagcaagctgaaaaatgccatgcgaaagctggtgaacctgccggaggataatgtgcaagaggagatagcctggcaggtggccgaaatgattgtccgggatgttacgagtgtcactcttagtggcaagactcctccgctggcctgatgtgctttaccattacggaatttatttcatatttattctcattcttttacaaattactcttttttgcgagaatctccacgacatgtgcacaaagaagaagtcgcaacagaagctctctctagtaccctctccttatgtacaaattgtgttgaacaaatcaaatactttactttaacttattttaattaatgctatgggctttgaaagcgcattattaactaaactatcgctcgctcatttgttatttacagcaacagaaggcaaaactcaaatatgaaatagaagctaagttacttcattccgtttaaatatgattaaacaattgtataacataataatgtatatgaatatttttgcatactgatgatacactaccaaggaagatttattgttatgaataaactttttcagtaaccaaattttctcaatgcaattattttatattttcatcgcaatctacataacaatccgaatttggattcatctgtcactacaatacaaaatgtcgacggaaacagagacagagacgcaggaaaaacagatcaatctcttgttggtggaaatggagaaaatcgagaaggaacttgagcgcacggagcagcagcagcaggagccgacggagccgtccaatggcaatctggaggagcaagtccgcaagctcagggatcacaatttgcgggtgaagcatctgaatactcagcgtcgtcgcatcctacgcctgttgcagggaaagatgctgcagtatgccaccctggaggaacgtttgcacaggattggcgaactcgttctcatcgcagagctccattcgggtgtgaagacactcaatcagcgtctggacagaatggtggagaattcaacttgctccatttgcctgttgccctggacggacaacggaatacatcgcctggtctcgctccgttgtggccatttgtttggctccagctgcatccacatggccattcggcgcaatcatcgctgcccaatctgccggcgacgggctcgccacttccacgtgcgcaggatctacagtccgagctttttgtctcattaattcgaccatctcagtttttgcgttttcattgaagttttcatatatgtatgtacaaaccgttcttttatggttgatgtttgttcaaaattcaagtaaacattaaacaccttaactgaggaaaaacgattttactttatttataaggtaaagatttaaagctcacactaaaagatgatggcatcatatcctgtcatttatttattattgatattctattaacatcattaaaaatagtttcacattttcactttctctttcaactctctctcttgagtaaactgaagactgggttcgaactaggccacattatccacgggcaacgattcgcccgattcactgaaccaacgcaggatgcgcaacatcgttttggcggagtagaggcaaaatggatattcgttgtagcacagctccgtgctgcctctcaaggccaatcctcgactgaaggcgcgaccaattttggccggtgccagctccagcgatgactccagataatccatgagcaactcagcctctggaactttcgcttccgctccggacatcagttggcatatcaacgattgcaggcactcgaagggatctctcgacaggatcctcttccaatcgacggcaggtggtggcctgtgatccgcgcccccacctctggcaccattgcccccacccgaatcttgggtccttcgcacccaaccgagttcgtgattcaggctggcctctctcctgctccggaataaattaagagccccgctggcctgttgaatgggtgcaataacctgttggatcggctgagcggccattccggctagttgggttattccgcgaatgggtcggatcttcacccaatcctgggcgagcagatgcatcatgtacatggcgcccagaccggtggcagctaagagcacaattctacgggttgatttaaagtaagaactgtattaaagtttattaaaatcatttgattttcaaatacaatataaatttcttcacatttcaccgaattttcaga

SEQ ID NO: 30668 - DNA, 549 bp, DROSOPHILA
atgtcgacggaaacagagacagagacgcaggaaaaacagatcaatctcttgttggtggaaatggagaaaatcgagaaggaacttgagcgcacggagcagcagcagcaggagccgacggagccgtccaatggcaatctggaggagcaagtccgcaagctcagggatcacaatttgcgggtgaagcatctgaatactcagcgtcgtcgcatcctacgcctgttgcagggaaagatgctgcagtatgccaccctggaggaacgtttgcacaggattggcgaactcgttctcatcgcagagctccattcgggtgtgaagacactcaatcagcgtctggacagaatggtggagaattcaacttgctccatttgcctgttgccctggacggacaacggaatacatcgcctggtctcgctccgttgtggccatttgtttggctccagctgcatccacatggccattcggcgcaatcatcgctgcccaatctgccggcgacgggctcgccacttccacgtgcgcaggatctacagtccgagctttttgtctcattaa

SEQ ID NO: 30669 - protein, 182 aa, DROSOPHILA
MSTETETETQEKQINLLLVEMEKIEKELERTEQQQQEPTEPSNGNLEEQVRKLRDHNLRVKHLNTQRRRILRLLQGKMLQYATLEERLHRIGELVLIAELHSGVKTLNQRLDRMVENSTCSICLLPWTDNGIHRLVSLRCGHLFGSSCIHMAIRRNHRCPICRRRARHFHVRRIYSPSFLSH

SEQ ID NO: 30670 - DNA, 3214 bp, DROSOPHILA
tgaccttggtcacctcctctccagaatttgtttacaatagttaaagtattcaatttgtgcctttttggatgccggcacatgcgctgcctggtctcgataatcgctaatattgtatacacagcatcttgaaagtggggaatatatgcggggatatgtatattatcagcggggggtggagagctcaggtggtcggggtcccgaaaccacgaaatttcacccgtgcagctcccagtttctcacgctctctctctctcgctgcccctctctctctctctcttttcctcgaccggtgcgaggatcgttcttcttatatgcctctccttttccggctgcgtctttgcttccggctatcgattccgggttagtggcgcaaatcgatttggctgcgattttactcttagttattttaatcaaacaaatcaactgtcacgtcacgtcagcgcaaaaacgaaaaaaggttacactttttcgttgaaggtggcaacgccgtatcgcatgtgcagccctgcctattcctacagtttttacccaaatttcataaatgaaaataattcagataatatgcaataaatatttagcggtacatgtatgtgcattttttatataattcgtaaaacaaaggtgggttttaaatatttatgtaatcattgttatcaacacttatcaacgtaattagtagttgaagtagctcaccaaaatattactatatcttttgcatatttgcggaaatgaatccacattgagtatgaaattcattttaaacacgcgaaacaaatttaatcatatatgatagatttgtttcacaagctagagttacgactgtaccgttgcagccctggtcccaatcagctgataggagtttagagcaaaattttcaataatttttttgttgatttctataaaattgaaataaaacatggactataatatccacaaaatatgcagagtttgcctggaggaactacatcctgtaacttcgatatatagtacagactttgctatgatgccctccgtaatgttgatgcaatgcgctaaaataagagtgggttctaaaaacaaaatatttcaatgttaattggcatatggaaattgttttaggtttttaaaaccgatggcctaccttcggtgatctgcaacaactgtatttaccggctgggggtggccttccacttcaagcaggaatgcgaaaacagtgatctccgactgcgacaatatctgggcattctggaatcctggcgccaggatgcggccaccaatacggactttgtggagaagccgttgcttccgcagcgcgatagcgatgaagaggaacccgtggatgccaaagtgagcaagaggcggtcgcgctatcaaagaaagccgccagaagagcacaaaaaacgggggcccaaacctgtgccaaagatgccccacacctgctacgagtgccacaaaagcttcaaatgcattgcccaattaacacagcatataagaacacatactggcgagaaaccctaccaatgcagcttttgtatccagagattcgcccaaaagtacaatcttaaagtccacgaaagaacgcacacgggcgacaagccttttcagtgtgagatctgctcaaagcagttttccgcgttaggcaatttccaggcgcaccagaagattcatttaggagtgcgggatcaggtatgctcgctatgtcagaaaggtttctacaccgccggtgatctctccaagcacatgataacccatacgggcatcaaaaaccatcactgcgatgtctgcggcaaggctttcagcaggcgaagagatatgcggactcataaattgaagcttcatcctctggagtccagtacaaaccatgatatagtggatgatgatgatgatgaggctatagacacggatcccgtgggtctggacaccctcgatcacgcccacttcaagtgtccggattgcgacaaggcatttgatacggcggacagcctaagtctacattttcgcacgcatgcggcgaataataatctactgaatttgccgttgcctcctgcaccacctatgtcgcatcactaccatcacgatgcactgcatcatctcggcccaccgaatcccgccacacaaatgggaatggctgcaatggctcacatgttggcaccgccgccgcctccaccgccaacgccaagtgaaggacgttacactatgctgcaccacacggcggcacaaagactacattattagagtatagctacgaagatttatcttaatcataattattgttttagattatgttttgatattgaacacttttatttagtttgtctatataaaatggaatattttgtcatgtttgcttttatatctttacaataaatacatgtagaaatttggcaagcacagcttctattaagattattacttaaatgcaagaactaaaatcactaaaaactccccgcgcgtacttgtcgcatacttgtcgtcgatataaaaatgtcattgttgtataaactaagcttgatttgtgttttctgtaggtaaaaattgtagtatctcaatattggtttgtttggtattggtatgcatcgttggtatcggcttaatccagtttgaatatgtatataaaaagctcaaaaatcaatcagagaactatcataaaatattgcttttgacaacggcccggattgattgatcccagagatcgaaacctctctacttgagcttggctttcagccactcctcggtgagttcgtctagttcgcgtatctcgtagacgcgtgtgagatctacttcgcgctgaagagcgctcttcgtgcaggcgtacatcatctgcaattcgatctgaaacagagagttatgaattatagaatatatttgagcattgctaaactcccacctggctatccctgggtgtgtagaatatgaagcacattgggtacgaaatgcgctgatcgtcatggaccattttatacgtatagatgacatatcggggctggtgtcctggcaatgtatcctgcagctcgtccaccgaaatatcgtcgatgaactcgtccagcaccaccgtttgcttctcccggtcgactttcactgcaagggacaatggagtggtcataaaaactacacacatctgttaccatgacaatcaaggcttacatatcaaagccgcattatttttgctcttgctgaatcgaaacttcttcaattcctccagaacttcgttgcttatgtcgcatatctggttatc

SEQ ID NO: 30671 - DNA, 1158 bp, DROSOPHILA
atgatgccctccgtaatgttgatgcaatgcgctaaaataagagtttttaaaaccgatggcctaccttcggtgatctgcaacaactgtatttaccggctgggggtggccttccacttcaagcaggaatgcgaaaacagtgatctccgactgcgacaatatctgggcattctggaatcctggcgccaggatgcggccaccaatacggactttgtggagaagccgttgcttccgcagcgcgatagcgatgaagaggaacccgtggatgccaaagtgagcaagaggcggtcgcgctatcaaagaaagccgccagaagagcacaaaaaacgggggcccaaacctgtgccaaagatgccccacacctgctacgagtgccacaaaagcttcaaatgcattgcccaattaacacagcatataagaacacatactggcgagaaaccctaccaatgcagcttttgtatccagagattcgcccaaaagtacaatcttaaagtccacgaaagaacgcacacgggcgacaagccttttcagtgtgagatctgctcaaagcagttttccgcgttaggcaatttccaggcgcaccagaagattcatttaggagtgcgggatcaggtatgctcgctatgtcagaaaggtttctacaccgccggtgatctctccaagcacatgataacccatacgggcatcaaaaaccatcactgcgatgtctgcggcaaggctttcagcaggcgaagagatatgcggactcataaattgaagcttcatcctctggagtccagtacaaaccatgatatagtggatgatgatgatgatgaggctatagacacggatcccgtgggtctggacaccctcgatcacgcccacttcaagtgtccggattgcgacaaggcatttgatacggcggacagcctaagtctacattttcgcacgcatgcggcgaataataatctactgaatttgccgttgcctcctgcaccacctatgtcgcatcactaccatcacgatgcactgcatcatctcggcccaccgaatcccgccacacaaatgggaatggctgcaatggctcacatgttggcaccgccgccgcctccaccgccaacgccaagtgaaggacgttacactatgctgcaccacacggcggcacaaagactacattattag

SEQ ID NO: 30672 - protein, 385 aa, DROSOPHILA
MMPSVMLMQCAKIRVFKTDGLPSVICNNCIYRLGVAFHFKQECENSDLRLRQYLGILESWRQDAATNTDFVEKPLLPQRDSDEEEPVDAKVSKRRSRYQRKPPEEHKKRGPKPVPKMPHTCYECHKSFKCIAQLTQHIRTHTGEKPYQCSFCIQRFAQKYNLKVHERTHTGDKPFQCEICSKQFSALGNFQAHQKIHLGVRDQVCSLCQKGFYTAGDLSKHMITHTGIKNHHCDVCGKAFSRRRDMRTHKLKLHPLESSTNHDIVDDDDDEAIDTDPVGLDTLDHAHFKCPDCDKAFDTADSLSLHFRTHAANNNLLNLPLPPAPPMSHHYHHDALHHLGPPNPATQMGMAAMAHMLAPPPPPPPTPSEGRYTMLHHTAAQRLHY

SEQ ID NO: 30673 - DNA, 7022 bp, DROSOPHILA
tttcgaaccaatcttagggtaggtcatcgaactgacttcactcgttttaatagtttcttgagttgaatgcacctccaacacttttttctttacttctgcacattcgggttcatcgaaaattaggatcgtttttgggcattctcattcgtttgcattggcttatctccattgtccaattggaggctggtacactgctcatgaaaattatgttaatttcgtgtggaatttacttccaggggttttgctcaagttcgtttgcgatttgcatttgaatgcctggttacgtacttcaaaagtcataataattctatgaaggaagcattagcaaagctctattgacctagaacttgagctttccatgcccgatttctgaagataaaaatgagcacgaggtttgttatgaacgaaattattcgattttcaagttgctatatttttcaataaatttataaaaacatgtacttttaactttttttgattagaaatatttatatttatatggaatatttgtaatatgtctactttctagatatacctatttatttttataaatttattgaaaagaaatattaaattttagtgtaaaaacgattaatatcagagtaaaattatatgaattttatgcattgtgttggctagtgtattttctagctgtcataggcgctctctctttctgtcctttttccccctaaacgaaaccaataaatatcatagttaaattatttgaattttatgcatgtagtttttgtttttgttggctagtgtatttactagctgtcataggcgcgctctctttctatcgttttctccctaaacggaaccaataaaattacaaagctttaaaaataaataatactcgtacgtaattagctcgacgtcataagctggagagtgggttttctggcgagagcaaaaaaaattagaatctgtgaactgatgacatcacgagcgatgagtatataaagctgagatcggtcccaatcgtcgatcagttgtcgagatgaatcaggcctctctatatcagcacgccaaccaggtgcaaaggcacgatgccaaattgattctggacgaattcgcatcgaccatgcagtggcgatccgatggagaggatgcactcctggatgtgggttcaggatccggtaacgtgctcatggacttcgtaaagccactgctcccgattcgtggacaactggtgggcacagacatctccagccagatggtgcactatgccagtaagcattaccagcgagaggagcgcaccagattccaggttctggacattggatgcgagcgactgcctgaggagcttagcggcagatttgaccatgtcacctcgttctactgcctccattgggtgcaaaatctgaaaggagctctcggaaatatctacaatcttctgaagcccgaaggtggcgactgcctcctggcctttttggcctccaatccggtttacgaagtctataagattcttaaaacgaatgacaagtggtcgacttttatgcaggatgtggagaacttcatatccccacttcactacagtctaagtcctggcgaggaattcagtcagttgttgaacgatgtgggtttcgtgcaacacaatgtggaaattcgaaacgaagtgtttgtttatgaaggcgtgaggacactgaaaggtaagttaaagcacttgtaatatttaaattaattcttaactaattttacgattttactttacagataatgtaaaggccatttgtccttttcttgagcgaatgcctgcagatttgcatgaacagttcctggatgacttcatagacattgttatatccatgaatttgcagcaaggtgaaaataatgaggatcaaaagttcctatctccctataaattggtggtggcctatgctcgcaagactcctgaatttgtgaataatgttttcctggagcctacacatcaaaacttggttaagggaataaattaattttattttacaaattaacagtaattgcatttgttaacagagtctattaatgccaaataatgtacttaatttaaatactttaaatatacaaagttccaacaattggtcttacaatacaaaagtgatctctagggagaagtgatcttagttgtaatagagatacaaaaatatccaaatttagtttattatatagattaaatatggttaaatcatctgttgcaattcaattgttttatttaactaaattatacatgattattgttgacgcagcaaatgaagtgtgcaatcaaatattctgtttaatatatcatttatagagaggcttcggcattataattgctgcttttgacagaaccaattattacagcagcaagtataattctctatcactctccctctcattttagttccatatataccatacatacatacatatatatgtatatagttgtttggggttaactctcactctccatggaacttttcatctttcccaaagcttaacgtcaaaaaccgcgcgtttccctcgcgattttgatgtatcaaaacttttcgtcagacgaaaaaccgcccgttgcgtttaaaatacgatggtaaactgagttgggcggatacgttgaaagggttgaaaatgttgccattcgagtctaagaacaattttaattgttattccgtctttttttgtcagttgtgggctacgtatgttggagttcgttgtggaatttcgaaatgagttattaacgcgatgtcgacagaaatgcgcattcatgtcatttatcagtgggtttgcgtttttgaggcgtgagtttgtctagcttccgggcaattgacagttcattcacaggacatctccccacaacgggcaagtattgtagtaaatgtttgtcttaatctttgatttttgctttctgtagcatttaaaattcgacttacccccaagaaaatcccagctcatcccgaaacaacaacccactccgcattttgtttctggcaaatgtaaacgacaggaattaatttagataaatgatttctcaagtgcgctggccggggcttcagacgatttgccgcctgtcagtcaaacggattctacattttcccccatgcccgcccccttttgccgggtttccgcgttggggcgtggcatgcgatttgtatgtctagctactagctactagctgagcccctgcccagtctcttatacccagaacttaccaacccgtctcaaaattgttttcgcaaacaaattttcgtattgaaatttgatttatttgttaatttgtttgtaatgaattttccgtttgcttggctgcctgccccgaaggtcggcggatttcaggattttggattggggattggggtattggttgctctttaattgcctgttcctggcattttggtttttcttctctgcatcatttgtttggctaattttcttcgaacttaaaagattccgggtggaaattgttgtgctccggcatggaaagaacaattggaaaaattccttattccaaattagtttcgaagggtggaaggaatttcgaatcgaattattgtatgtttaatcaatatcaataaatgcatgcactcatatttaaatacttttgtttacttttacaagtttaaggtgcttatgtaccagattcttttcggcttctttgtgctttgaacacttttcgatttgtccatttgcagctatttgtttttcactttgcacttagttgttaaaaaaagggagtttgctgttgcaaataactttggtttcgtatttaacttgacattttatgggacaattcgcttgcatgtacgtggacttatttggactttcgttttggcacatatttaatttgttttggcacattgtaaattattctcacaattacgggtaaatatatattttctttgagaagtttccaaaactacaaatgactataattattcaatcaataatgatttttgcgacttttaaggtcttgaagaatagttatagatatagatgtatagattactttagttatttaaccgaagagcttcttttgttagtggcctttataacccatcaataaaggaaatattaattttgggtagtttgaaaatttatttttgtaactcttttaactcatgaattttcacatcttaccaggagttctaacccagcgttcatagtcgctgacccacccgatttcgcgggtcgattccgggggcgtaaccgcaaaaacaaacatcgaataccggaactgaatgtcggcggaagtcgtgtacacacgaatacatacatatatacatatgtatatgtatgtatgtttctatgggggcgtgtgcatttggctgtagctcacaaaaatgcgtagccatcgaataatatgcccggattttcaggtgggttcccactttgccactgaccattctgtttgagtttacttagcggttttgttgactctcgggcgttttgattgcgctttccatatgcatatgtgaaaaggacagctcaaaaaagcgagttttttttttgggatttatctatttaatggccaccaaaaggcaattacacacacataaaataccaagaggaatgaaggctgagtctcattatagaaaattataagaggaatatggtaatttacattcggtatcatgtgcggctttttattaaaaattcagcactaacgagtctcttttgtttttataacagagttctctacggctatctttttctagccctctctttcgctcatccgcagcggaggtcctttgcgttgcaaataagaattttaataaattatattgtaatatgacaaaaacgtttgcgcaggccaaaggcagagacgtatgccttgcaaagggttaagttcatacaaaactgtgttgattttggctaaaacattagattcgttaaatacatgccaaaatatatatgccagtatatataaatcaaatataatatgtatttttttgttgtgatttctctgcattgtagtaattcttatattttttcattgaaaaaggggtacgaaattcatgggccacgccactgagtccttgtgtcaatttactgggcaaaggctcatgaatttttcaataacaaaatgttgcgttccgtaaaaaaatgtacatacaaaaattgttgaaaaatttctccaaaaattttgtttagctaattatgggcaccaggggagccaactgtaaaccctttgggatgtcgagttagcccatgcttaagccttttctttcctttttgtggaatgtttccgtacttcattacgtttggcttcagcttcggctttggtttattttaatttcattttatgatttaactttacacctgcttgaaaaacgacacacacacacaaggactctggactgcacttcaattaaaacccgagtcctggccaaggcacttaagtgctttttactctgcgaaaggtgtgagaatatttcttttgcccaaattatttcaacattttccgctccgcaggaaaggggttgggtcatgtcccaaaaaaagggaaaacagtaatatgaagatttctgccgaagagttccgggcatgccgggtcaagggtttccaaaaagcaatgcttttcgtcctgggttttgggatcgggtttctggggagctctagttgtccacgtccaacacttcgtggggcaaatcttcgtgtaatcggataaggtaattgggaagctttgtctagacattaagcgtacatagtaaattttgttttccccagttttgaccgaaatatgactgccaatgaggatgtttcggaaaaggatctccgcacagtggcctcttaaatatttgcaatgaactaagaatttgtgctaagaaataattttaatttaactagactgtactgccatagtctatatatttcttcgttaattcaaagtgtaaaatttaataattaataaatttcaatttattgtttttcaacagctctctattccactgttcaaactgcactcccatcaatcaaaaatcgtctcacattggaaaccttttcggtgttcggccgcaaaacttttgttcggcaacacatgttccttttcgcaattgaaggtcctgcttccgttttggccaagtaacttaccaacaacaatcacttgaacgaacaactgcgacggcttttaataaatcgatttaaatttctgatcatattttcatctctagagaaatttaatagtttttcgcaataacattttatgtgcggacgcatacccatgacgcaggatcccaacatcatccactttctatagcagttgaaaaaaaaaaacactacacagaaaattcttttgatttcttatttgttggttaaagtttaaggataaaaaaaaactaacaatatgggcaggaaattatataatgaagcattttaaggtacttattattttgaagttttcaaaagtattatatatgtatatgatcaagctttcgtaacaattctaaagaattatcttcattgtaattagcaattctgctattttagttttagggttttaattttcaaaacttgggataaatacaatttttgtctgtgctgtgtaaacaggagaaactagcgagaactacccaactaaaataataagagcggcaacaaacttggggaccggcacgttgggccaagtccaaacaaagaaactgcaaagtttacgggtcacacgatgtgccaggagctctacggggatccgtacagtctctctcactctctctctctctccttcagcaggacctcttacaggaatccttgtcgtcgtcgtcgtcgtctatgcagcttcctgtgcatggcaataaaattactttagcccataagtatgctacaattttacgtacgagctcccagcttttggtcgcaagtgcggcaaatagttttaccgccacgccccctggacactagccgccccccatttgccacgcctttctcccgagacacacgtcataattaatgcaaagctggcaaatgtatgcaacacctgcggtttgtttaaaacgaccgcaagcagcacttctcttggaaaatccttatacccacagatggtattgcagccaattttggttattaaaatt

SEQ ID NO: 30674 - DNA, 889 bp, DROSOPHILA
atgaatcaggcctctctatatcagcacgccaaccaggtgcaaaggcacgatgccaaattgattctggacgaattcgcatcgaccatgcagtggcgatccgatggagaggatgcactcctggatgtgggttcaggatccggtaacgtgctcatggacttcgtaaagccactgctcccgattcgtggacaactggtgggcacagacatctccagccagatggtgcactatgccagtaagcattaccagcgagaggagcgcaccagattccaggttctggacattggatgcgagcgactgcctgaggagcttagcggcagatttgaccatgtcacctcgttctactgcctccattgggtgcaaaatctgaaaggagctctcggaaatatctacaatcttctgaagcccgaaggtggcgactgcctcctggcctttttggcctccaatccggtttacgaagtctataagattcttaaaacgaatgacaagtggtcgacttttatgcaggatgtggagaacttcatatccccacttcactacagtctaagtcctggcgaggaattcagtcagttgttgaacgatgtgggtttcgtgcaacacaatgtggaaattcgaaacgaagtgtttgtttatgaaggcgtgaggacactgaaagataatgtaaaggccatttgtccttttcttgagcgaatgcctgcagatttgcatgaacagttcctggatgacttcatagacattgttatatccatgaatttgcagcaaggctctctattccactgttcaaactgcactcccatcaatcaaaaatcgtctcacattggaaaccttttcggtgttcggccgcaaaacttttgttcggcaacacatgttccttttcgcaattgaaggtcct

SEQ ID NO: 30675 - protein, 293 aa, DROSOPHILA
MNQASLYQHANQVQRHDAKLILDEFASTMQWRSDGEDALLDVGSGSGNVLMDFVKPLLPIRGQLVGTDISSQMVHYASKHYQREERTRFQVLDIGCERLPEELSGRFDHVTSFYCLHWVQNLKGALGNIYNLLKPEGGDCLLAFLASNPVYEVYKILKTNDKWSTFMQDVENFISPLHYSLSPGEEFSQLLNDVGFVQHNVEIRNEVFVYEGVRTLKDNVKAICPFLERMPADLHEQFLDDFIDIVISMNLQQGSLFHCSNCTPINQKSSHIGNLFGVRPQNFCSATHVPFRN

SEQ ID NO: 30676 - DNA, 2844 bp, DROSOPHILA
atatttttgcatactgatgatacactaccaaggaagatttattgttatgaataaactttttcagtaaccaaattttctcaatgcaattattttatattttcatcgcaatctacataacaatccgaatttggattcatctgtcactacaatacaaaatgtcgacggaaacagagacagagacgcaggaaaaacagatcaatctcttgttggtggaaatggagaaaatcgagaaggaacttgagcgcacggagcagcagcagcaggagccgacggagccgtccaatggcaatctggaggagcaagtccgcaagctcagggatcacaatttgcgggtgaagcatctgaatactcagcgtcgtcgcatcctacgcctgttgcagggaaagatgctgcagtatgccaccctggaggaacgtttgcacaggattggcgaactcgttctcatcgcagagctccattcgggtgtgaagacactcaatcagcgtctggacagaatggtggagaattcaacttgctccatttgcctgttgccctggacggacaacggaatacatcgcctggtctcgctccgttgtggccatttgtttggctccagctgcatccacatggccattcggcgcaatcatcgctgcccaatctgccggcgacgggctcgccacttccacgtgcgcaggatctacagtccgagctttttgtctcattaattcgaccatctcagtttttgcgttttcattgaagttttcatatatgtatgtacaaaccgttcttttatggttgatgtttgttcaaaattcaagtaaacattaaacaccttaactgaggaaaaacgattttactttatttataaggtaaagatttaaagctcacactaaaagatgatggcatcatatcctgtcatttatttattattgatattctattaacatcattaaaaatagtttcacattttcactttctctttcaactctctctcttgagtaaactgaagactgggttcgaactaggccacattatccacgggcaacgattcgcccgattcactgaaccaacgcaggatgcgcaacatcgttttggcggagtagaggcaaaatggatattcgttgtagcacagctccgtgctgcctctcaaggccaatcctcgactgaaggcgcgaccaattttggccggtgccagctccagcgatgactccagataatccatgagcaactcagcctctggaactttcgcttccgctccggacatcagttggcatatcaacgattgcaggcactcgaagggatctctcgacaggatcctcttccaatcgacggcaggtggtggcctgtgatccgcgcccccacctctggcaccattgcccccacccgaatcttgggtccttcgcacccaaccgagttcgtgattcaggctggcctctctcctgctccggaataaattaagagccccgctggcctgttgaatgggtgcaataacctgttggatcggctgagcggccattccggctagttgggttattccgcgaatgggtcggatcttcacccaatcctgggcgagcagatgcatcatgtacatggcgcccagaccggtggcagctaagagcacaattctacgggttgatttaaagtaagaactgtattaaagtttattaaaatcatttgattttcaaatacaatataaatttcttcacatttcaccgaattttcagactctagttattgcaatatttaagtttgttgaaccaatttaagcacgtacaatactttacaattataacaaacttaaataggcatgtatagtctgtacatccttgttttccacttggccactgcgctcacctgaaacccattttataaactaaattgcaatcctgtcacgtcttcgcagctcggccgccagtcttcaaatgggcgagatccgcgagtgtggcgccgtgttaaagccccaattggatgccaaaaatcgatggcagctccactttgatcgactgaaacggcatgatcgcaaacgcgaagccactatccccgatccccgatccccagaaaccggaatcagcggacttatcatcaaaacaaagtccatcccgcagctttccgcaatggcgatggcgatcacataatagcctcatccagtcgagttgtccagccaggctcctcctcctcctccggctccttgcttttctctttgccaacatctccatttgttttccctttcatttggagcaaacgggtttcttgtatttgcgttttcgcggtttttcttaacgcaacaagttttccttgactttggcggcgttggtgatccagtggttttggtggcgttgtccatgaccattaaagtcggtggttagcggcaatttgccgccgagtaaaatgcagttgaaccatccacaaggcagtgggtcagacgggtgaagatttgggtctttaaggctaaatggatctagttaaggatcttatgcaatagtgactcagcgaaatccaatgtggaaacaacaaatatgttagctaagtatttataaaaataaattttgaaaaccatttatagttctcgttaaataataatcctatttcatcatgtaagaggttagagtatcctatattttaaaaagttaagtctttccgaccgtgtaaagtatatatattcttggtcaagtctgttgtctgttcgtttggaaatcttgcatctttcgaactatagaagctatcgatatagctgaagaattttagatttcctttcagcaactcacactagcttaatgggtatctgttagtcgaatcacttgaatgttgcattcgcgcttgttttaatttggcgaatgtcaaatgtataatgattaaaatcaacaa

SEQ ID NO: 30677 - DNA, 615 bp, DROSOPHILA
atgggtttcagaattgtgctcttagctgccaccggtctgggcgccatgtacatgatgcatctgctcgcccaggattgggtgaagatccgacccattcgcggaataacccaactagccggaatggccgctcagccgatccaacaggttattgcacccattcaacaggccagcggggctcttaatttattccggagcaggagagaggccagcctgaatcacgaactcggttgggtgcgaaggacccaagattcgggtgggggcaatggtgccagaggtgggggcgcggatcacaggccaccacctgccgtcgattggaagaggatcctgtcgagagatcccttcgagtgcctgcaatcgttgatatgccaactgatgtccggagcggaagcgaaagttccagaggctgagttgctcatggattatctggagtcatcgctggagctggcaccggccaaaattggtcgcgccttcagtcgaggattggccttgagaggcagcacggagctgtgctacaacgaatatccattttgcctctactccgccaaaacgatgttgcgcatcctgcgttggttcagtgaatcgggcgaatcgttgcccgtggataatgtggcctag

SEQ ID NO: 30678 - protein, 204 aa, DROSOPHILA
MGFRIVLLAATGLGAMYMMHLLAQDWVKIRPIRGITQLAGMAAQPIQQVIAPIQQASGALNLFRSRREASLNHELGWVRRTQDSGGGNGARGGGADHRPPPAVDWKRILSRDPFECLQSLICQLMSGAEAKVPEAELLMDYLESSLELAPAKIGRAFSRGLALRGSTELCYNEYPFCLYSAKTMLRILRWFSESGESLPVDNVA

SEQ ID NO: 30679 - DNA, 3923 bp, DROSOPHILA
tttgcacacacattttgcatattgaccaatctccgtgtgtgcgtgttggtgtgcaggaaaagttgttgaatgcattttcatttgcatttgtgcagacttagctgattttgccatcgttccccagatgtttctttttttttttacatttgctatgtgggttttggttttatttgattgccggtgtggcatttaatgcatttaaagtaaaaagcatttaaattaagggcttagacctgcggcatttatttacaagcatttactattaattaactggcttacattttgattctattcaaaatttagtttgcttataattcgtcaacaatggtttagttcacaatttagaggattccagtaaattctatttttttttaaatattaagtggcatgtacggaaaaaagaataggaaatcaattaaaaaaatttagctcagtaactttgctctttgacttgtttatgttttgccaataaaactatgtttttccaacaaagtgaagccagctcctttctcaagtttcgcatacattttcatttatagctctcgttttctacttgaatttttgatttgcttttaattaaaataaatattttatggctttcgataaacaatctgcagaggagcataggaacagaagtggcaaggcaatacaagtcaaactttctcctcgaacttgagagggcaaagttgattgaaagtgaaaaactctttgacttttataattttccttcacttttccgtttcgtttcaggcattgccaatccgaaaggtgtaaataattgaggcctaaaacttggcccctgtgtttatccaagttcaacttgtgatcgcccatttcactttaagcaacatgacactttttccgacaatttttaaaggcaatctcaacaactcgcaactgttgtcaaaacagaatctcagcttgcactctctgattactacgatgaaaatcagctattactaatcaacgataaataagagagtttcgcctgaaaaaaaaaatggcagctgctgtcttggaaattaacgaaaaccaattggagctggtttgcgatgaatgcgattattacggcgccacagacaccatatttattgataatagtacccaaaccgatggctatgatgatgacgagtctgagctaaagcctttgaaacccagactgagtcagattgtggaagaggaagcggaaatggaagggacagtcaaagaggaaatggacacgcaagtggaaacaaacggtatacaaagcgatagcaatggcgttagtgatgtgaaaaccgcgattaatggcaatgaatcgatcgtggcggaggagatctctgaggaggagcctccagttgaagcgagtgtaccacatgttgtccaggaactagtcgattccgatgatgaggtggaaatcgacgacgtgaccaggctagcaggcttgactttgggcatgggctatgctcgcattatagactacgataacttgcgcattatcgagcatgttatcgaaagcgacgatgaggacgataacaatgttgcagcagctggtacagcggcaacatcagcggaattgcagcaggcctgccatgatttggtgactttcatcggtgaaagctatcaggtaatcgagaggtcaggtcatagtcgtgaacccaccgcaactttgtcggtggtggacaacaacaataataatcgaagtagcgaagtatccacaaacggtcgtggcgccatcaccgatagatcaaaatcaacccggaaagtgcacaacgggttgcaagtaaatcaaaacgcatccactagtgcaacagcaaccagcagcagcaacagcaaaagcaacagcagcaacaacactgctgcaacatctaacagcagtgcgttgataaaggcttacaaatcgaatcttacccccttggcgccgccctttcagcccgccgccttgaaggccaagcagctgcaacaatcgtcgctgcccagcggcaacatgtcctcggtgacgacgacaacaaccacagctttgggctataccgcctatgagcagacaacggtctactatcagcagcaagttcaacagcagcagcagcaacacccacaacagcagcaacagttgtcacccaagcagcagcagcagcagcagcagcagccgcagcaacagcagccaatctgcgctcaacatggaggcttgccgcatattcatggcgcccaactgctgcccgtgcagttgatagccctgccaccgaatggagtaacagcagcagctgcaacagcagcagtagcagcagcagcaggagcaactgtggcagcggccggaactccagcagccgcagcagcgggtggtgccgcagcaacatctttgactggcgccgcttggccacttgtggaggcgccaatttacatcgacatcaatggcgaatatcgcagctattgcccggcacatggaccaccggccgtggcagtcccaaatggcgccatcggccatcatccccacattcatgcccatcctccgcacacccattcgcatgcccatcctacacattcgcatcacgcacagcagcaacagcaacagcagcagcagcagcagcagcagcttcatcatcaccatcagcaacatgggcagcatcagcaacatttgacgccatcgccagtgacaaatgttaatggaaatatagcacaggcagcagcagcagcagcttcagcgcctagattgctgctgcaactggacgcagcaactgtccagcagcaacagcaacagcagcatcagcagcaacaacagcatcagcagcaacagcagcaacaaatcgtggccgctggcaagcgtagcaaagtttatcgaggtgagtggccgttttatgacatttgttgtacagtttttattcctgtccatgatgcccggggctatttgggtccatatagtttgcccaaagaatggcccatgcactaataaaaaaaaagagtggctcttccgattaatcgtttgtaatcatagtctgtttccatgaggaactttttacatatcaactgcattaattttctctaaatgcagtttgaaacagctcagcattgcatttatgtttttaaaacaatctatatttattaatattattcgcgttaatacgcaacatttctttcagtgcactgaccacatatatagcctgtacgatctaaagtgtctttcctgtaactttggccattactttccgctttgattcatgatgccaacatgtaggatgagagttacatggcgcaaccgagaccctatttccggaccccagccccctcgcgtagcctcttttcgaaccgtctggaaccggccagggacttaatcagttaagcaaagccaactgagatggctagctagcttggtattggtagtatgtgtgtcgccgcagtctgggttaaaattaatttcgaaaccgttgggcgctgcctttgtgtgcggattgtttgctttttgggcctggccaaaggtagcgaaagcattggttaagttcttggcttgtttgcccggcttatttgccaaataatctgtttgtttggccatgcaataagtagttctggccccggcgccagttgacataggcaggttgcactgtgccttgccatcgacgagatgagacgaaacatgaagcgccgaagttgaatgcaaattaagtggtaattgttttagcggctatctttgcaatgtggaatgatggttaatggtttatataaatatattaaataaagaatattcttgctgaagcatatgtgtatgtgtatgcttacttaaccagttgtctattgtttggactgtttctgttgcacaatcatcaacgaaagctcagctctatttgttcgtcttgattgccggctatcaatggcatccgtttggatcgacacctggcaattggcctccagtgatggctgtgtctcctgttgactttatccggcgacatctaatc

SEQ ID NO: 30680 - DNA, 1923 bp, DROSOPHILA
atggcagctgctgtcttggaaattaacgaaaaccaattggagctggtttgcgatgaatgcgattattacggcgccacagacaccatatttattgataatagtacccaaaccgatggctatgatgatgacgagtctgagctaaagcctttgaaacccagactgagtcagattgtggaagaggaagcggaaatggaagggacagtcaaagaggaaatggacacgcaagtggaaacaaacggtatacaaagcgatagcaatggcgttagtgatgtgaaaaccgcgattaatggcaatgaatcgatcgtggcggaggagatctctgaggaggagcctccagttgaagcgagtgtaccacatgttgtccaggaactagtcgattccgatgatgaggtggaaatcgacgacgtgaccaggctagcaggcttgactttgggcatgggctatgctcgcattatagactacgataacttgcgcattatcgagcatgttatcgaaagcgacgatgaggacgataacaatgttgcagcagctggtacagcggcaacatcagcggaattgcagcaggcctgccatgatttggtgactttcatcggtgaaagctatcaggtaatcgagaggtcaggtcatagtcgtgaacccaccgcaactttgtcggtggtggacaacaacaataataatcgaagtagcgaagtatccacaaacggtcgtggcgccatcaccgatagatcaaaatcaacccggaaagtgcacaacgggttgcaagtaaatcaaaacgcatccactagtgcaacagcaaccagcagcagcaacagcaaaagcaacagcagcaacaacactgctgcaacatctaacagcagtgcgttgataaaggcttacaaatcgaatcttacccccttggcgccgccctttcagcccgccgccttgaaggccaagcagctgcaacaatcgtcgctgcccagcggcaacatgtcctcggtgacgacgacaacaaccacagctttgggctataccgcctatgagcagacaacggtctactatcagcagcaagttcaacagcagcagcagcaacacccacaacagcagcaacagttgtcacccaagcagcagcagcagcagcagcagcagccgcagcaacagcagccaatctgcgctcaacatggaggcttgccgcatattcatggcgcccaactgctgcccgtgcagttgatagccctgccaccgaatggagtaacagcagcagctgcaacagcagcagtagcagcagcagcaggagcaactgtggcagcggccggaactccagcagccgcagcagcgggtggtgccgcagcaacatctttgactggcgccgcttggccacttgtggaggcgccaatttacatcgacatcaatggcgaatatcgcagctattgcccggcacatggaccaccggccgtggcagtcccaaatggcgccatcggccatcatccccacattcatgcccatcctccgcacacccattcgcatgcccatcctacacattcgcatcacgcacagcagcaacagcaacagcagcagcagcagcagcagcagcttcatcatcaccatcagcaacatgggcagcatcagcaacatttgacgccatcgccagtgacaaatgttaatggaaatatagcacaggcagcagcagcagcagcttcagcgcctagattgctgctgcaactggacgcagcaactgtccagcagcaacagcaacagcagcatcagcagcaacaacagcatcagcagcaacagcagcaacaaatcgtggccgctggcaagcgtagcaaagtttatcgaggtgagtggccgttttatgacatttgttgtacagtttttattcctgtccatgatgcccggggctatttgggtccatatagtttgcccaaagaatggcccatgcactaa

SEQ ID NO: 30681 - protein, 640 aa, DROSOPHILA
MAAAVLEINENQLELVCDECDYYGATDTIFIDNSTQTDGYDDDESELKPLKPRLSQIVEEEAEMEGTVKEEMDTQVETNGIQSDSNGVSDVKTAINGNESIVAEEISEEEPPVEASVPHVVQELVDSDDEVEIDDVTRLAGLTLGMGYARIIDYDNLRIIEHVIESDDEDDNNVAAAGTAATSAELQQACHDLVTFIGESYQVIERSGHSREPTATLSVVDNNNNNRSSEVSTNGRGAITDRSKSTRKVHNGLQVNQNASTSATATSSSNSKSNSSNNTAATSNSSALIKAYKSNLTPLAPPFQPAALKAKQLQQSSLPSGNMSSVTTTTTTALGYTAYEQTTVYYQQQVQQQQQQHPQQQQQLSPKQQQQQQQQPQQQQPICAQHGGLPHIHGAQLLPVQLIALPPNGVTAAAATAAVAAAAGATVAAAGTPAAAAAGGAAATSLTGAAWPLVEAPIYIDINGEYRSYCPAHGPPAVAVPNGAIGHHPHIHAHPPHTHSHAHPTHSHHAQQQQQQQQQQQQQLHHHHQQHGQHQQHLTPSPVTNVNGNIAQAAAAAASAPRLLLQLDAATVQQQQQQQHQQQQQHQQQQQQQIVAAGKRSKVYRGEWPFYDICCTVFIPVHDARGYLGPYSLPKEWPMH

SEQ ID NO: 30682 - DNA, 5264 bp, DROSOPHILA
atgtttttattgtatttttttctatgaatgcatgtgggtggtgtttccccagcaatcaaccccctgaatttccctccccatcgaacattcattgtagctctgtgtttgtgccttttgtgaaaatatttcaattatttgtcaaattgacacaatgcgcaattctggttacaattcgcaattgtttggctgagcaacgaaaacaacaattgccgtaggcctgggatgctgtcagcaatttggagagataatttcaattggatttagtcccagtactagattcatggaaaatattatctatgaccagcatctttcatcttatcgttgatgttcctggaaatgctgcgtggaacggaagtctttcgtcattgatctttaattcgtaaacattcggttctacgtacgtgaattaaaaatcagaacacatgtgttgacatttcgtgtgtggtttctgcttatttggcctagagatatgaaagagttcactgcaaatcagatacttttcaaatcgttttccaaattaaagtttagtactgtgtactgctctttctcgcgcttatgtaaatcagaatctacaaattcttaaatgagaaacactctaatattgatatgtatttactttatcgacaatacaacattatcagctgtaggcgcttaaatgaaatagacatcagcttactgtaattttccccattcccgaattcttcgaagacagagtagttgaattcttggaatttcttctgataaccttgggcgagggccagtgggtgggtggattgttttgtctccgctcttatcgcagcaaagaaatgataacgttattggattggtaacaaagcgacaaaggcgctacgctccgcctgtgtgcaactattaatttaagacaaacactgtgttccttttgcagatagacaaagtagcgcataataattaaactgaaaacatgctaaaagtggcctaaatcacagaaacggggcagacagagttcggaaaacggaataccatggtgcgactgaatgttgcagagcaacacagcagcagcaacaacaacggcaacataagcaacagcagcataagcaacaccaacggaacaataataactagcaacaataatgcgggtggcagttgctcctcgacaacctcatcaacgaccagtttgaatagcaatccggcctcgcccgcctgcactatggtgatgttgccggcaccgcagcaacacttgttggtgcagcagcagcagcagcagcagcagcagcagcagcaacagcagcagccgcagcaaccaccgccacagttgcagcagcaacatggcccgcagcaacagcagcaacagcagcagcagcaacactctccctcggatggcggttcatcgaattgctcgctgccggcatcgccgcctttgctgcagcaaaccgcaactccgccgcagggcgcccagattgtgccgcccgtgtgcgcgctgcaccacccacaacagcagctggccttgatggcggccatgcagcaccaccaccacctgccgccgccccatgccctgcaccacgccccactgccgccaccgcccccgaatctaccgccaccccacgaaaatggccacggcggcggtgggtccggcgtggcggttggtggtggtggcatttcgcccaacggcggcggtggctcctccgccagcagcgtgagcagcctgtccagcggcagtggcggttccggaggtcaggtgaacggtctgagtaacggtacgaatggcattgcgccattgccgccgggtcagctgtatatccagtatccgggcgagttctatccgccggaatactacatcgcaccgcatccgcacgagggcatctgtccgcagcatccgcaccacccacacccgcaccaccaccagcccatgtgcgccatgtccacggaatacggtgagtccacagattaagcctttaaatgtaggatgtgggaatttagttaaaattgtgaaatcagaaaaaacatattggtcattttaaatgccttaaatcgtttgtgcatttagtattcagcatttcatatgggaatttttcataattcactgtaaaatgcaactgtgcttaatagaaataaaatatcccctaagactgtgaaacagtcttggtgcagctaattacagctgaagtaatcccctggctaagtatctcaattcgtcaaaagatatttcgctaagccttcgccacgatgatgcagttgtcgagctcttaagctgccaaaaaaacttggtaagcgacaaacaaacaaaaatggacgaaaagatgggagtgctccgccctaatgctaaaaatagacgaaagccatatttagcttacccatccattccatcccaacccatcccaacccatcaacccaccaaaagcagtccacttcacctcccactggcagtaagctgtatacatttggcatttaaatctgctgaggagcaaacctcaacctcaaaccaccgccccatccgtccgcaaagtcaacaagtaaactttgcatttgatttatctccccgacatggaatgcgtcctccactcctcctcccaggctagaatgacccttttggaagcccagctccgcatacgccagtcatttaatatcatcaggcaacaaattagctctaaatcgccttttttttccactgctcccagtgactgcactcggtaccatttgaatttccataacaacagcaacaaaacggcatccagagcgaaaaatatatatacatatatattaatagatatggcatccagtttcagattcgacagcgacttaagttccagttcgcgttcttagtacatacgttcttaatacatacaatgtatgtctatttagcataagaagtaagaaacatacgtaaaatacagggtgtctaggaatttataaagatatttatatttatttagaatttataagatatcacaatgaacaccctatacgcatagcttggcgatataacaagcaattcacatttgtgatttggcattagcatgattatttcgaaacacccacacaaactgaaatggacacatagaaaaaagccagtcgaactggaacttaactgaccaagccgaacgaactgaccgacaatcccatccagagatatacgcacagaaatagaacagaattgtgtcactcgagaagaaatcagatgtggacaaactgatggagtgtgtgttggcaaaatatataattgaatttgatcaggttttgcacgcaacccaaaaacctcgataaccaacattttcaatttatcaatgtcattaaccttaattgtggtttttgctgcgcgggagggggggtgaaacaaagagcagccattgatcgactcggcgtaagtcgagacaagacttcagttttggtatctttttgattgttttttggcgcatcttctaattcgattccccctccccctcccctcctccgtaacgacaccgtcttacactagacacagcaagcatgctgtgtgtgttctccatgtgctaattgaatttgcatgtgaggctggcagttattcacacccacatccacccagcattacctcctcttaaacccactaaagactacccgccgcccatggaactttgtcacttagtttgatgtcaacattgaagacccggtagaaagtgccatggagacgggagtattctctgctctaagttgcacataatttacgattaagggggaagtgtaaatggcttttctacctccacattctgtcgctccccctccccctcttcttgccccttatctaagcccctgttttcctccttttagcttcctttgctcatttggcaagaacgcctgcactggggggaaataattgccacctataatgaaaacagaaaatcataatttaagacgtttaccttgcactgacagaactattttgtaactgacaaagtaaaggtataattaactttcaagtaaaagttcggaaaatcaaaagttttgcaaaataatatatcacataatagctaaataagttcaaatgttttaacagatcttaatcataggaatattctaatttagccattataattataatttatatgtgctccattgtgttgcaaatattaaaaaaaaaacacgaaatctatgagattcagaaaattcactgcttaaattgaatattttgtacagtgatttccccgacagctttgcctttaccctcagctccaatcgactttggcccggcctgattgttgttaatcgaataaacttgcagaggaaatgggctctgagtgcgtgctgggcctgagacttgggcagactcccccccaagtcccccaagtccccaaccccctaccccttcccacccccaccaacccaaagaacctacttctcgtagtgcgccctgtgagttctaatggaatttgcgcccgggtcgacggcaactttactatattgatatggatgctgagcatgttataattataagaatgctgagcaggctcttgtttctgcttcccagttccttcaacttgtggtgcaaaaaatatttagctaaatggggtagagatatgttagtatttctggtgtatattccgaagaagtgggtggccactggccaatgggtcaccccgcatggtgttgattgccgagtccgagtctctaatcaacataatttctattattttatatgcccacaccctagatttttatgcggtcagccctaataagcgcggaacaaatgaaaagtagaaggaaaaaaaaaatggaagggaattggaattggaattgaaggctgataaaagggcatgtagctgaaggccatcgtttgaagaatcttgaatctagaacgacttgttttggatgcgatcttcggaatgttgctcaaataagttgagatatatattattagattgtaaaatagaacgcaaattgttgtaaacagcaatcaaatatattatttctgtacatatagaaatataaaattcaagtattcaaatctaataatttcaattggatttatagattatatcccattggatttagtgaagctgatacattttctccaaccccttatttagtcgtattaaaacacatgttttgaggtcattaacaaataatgttcccataaatacataaatacaagaaaagcaaacatcttcgatattaagtacactcagtcaatgaacctacgagaaagacatatgtgaaactagagagcaaataagagaaaaacgggcaatgatgggaaatctaagtgttacatcaacacttgtccacagatcgaaatccctgagagcaaacaggaa

SEQ ID NO: 30683 - DNA, 1080 bp, DROSOPHILA
atggtgcgactgaatgttgcagagcaacacagcagcagcaacaacaacggcaacataagcaacagcagcataagcaacaccaacggaacaataataactagcaacaataatgcgggtggcagttgctcctcgacaacctcatcaacgaccagtttgaatagcaatccggcctcgcccgcctgcactatggtgatgttgccggcaccgcagcaacacttgttggtgcagcagcagcagcagcagcagcagcagcagcagcaacagcagcagccgcagcaaccaccgccacagttgcagcagcaacatggcccgcagcaacagcagcaacagcagcagcagcaacactctccctcggatggcggttcatcgaattgctcgctgccggcatcgccgcctttgctgcagcaaaccgcaactccgccgcagggcgcccagattgtgccgcccgtgtgcgcgctgcaccacccacaacagcagctggccttgatggcggccatgcagcaccaccaccacctgccgccgccccatgccctgcaccacgccccactgccgccaccgcccccgaatctaccgccaccccacgaaaatggccacggcggcggtgggtccggcgtggcggttggtggtggtggcatttcgcccaacggcggcggtggctcctccgccagcagcgtgagcagcctgtccagcggcagtggcggttccggaggtcaggtgaacggtctgagtaacggtacgaatggcattgcgccattgccgccgggtcagctgtatatccagtatccgggcgagttctatccgccggaatactacatcgcaccgcatccgcacgagggcatctgtccgcagcatccgcaccacccacacccgcaccaccaccagcccatgtgcgccatgtccacggaatacgatatttcgctaagccttcgccacgatgatgcagttgtcgagctcttaagctgtgatttccccgacagctttgcctttaccctcagctccaatcgactttggcccggcctgattgttgttaatcgaataaacttgcagaggaaatgggctctgagtgcgtgctgggcctga

SEQ ID NO: 30684 - protein, 359 aa, DROSOPHILA
MVRLNVAEQHSSSNNNGNISNSSISNTNGTIITSNNNAGGSCSSTTSSTTSLNSNPASPACTMVMLPAPQQHLLVQQQQQQQQQQQQQQQPQQPPPQLQQQHGPQQQQQQQQQQHSPSDGGSSNCSLPASPPLLQQTATPPQGAQIVPPVCALHHPQQQLALMAAMQHHHHLPPPHALHHAPLPPPPPNLPPPHENGHGGGGSGVAVGGGGISPNGGGGSSASSVSSLSSGSGGSGGQVNGLSNGTNGIAPLPPGQLYIQYPGEFYPPEYYIAPHPHEGICPQHPHHPHPHHHQPMCAMSTEYDISLSLRHDDAVVELLSCDFPDSFAFTLSSNRLWPGLIVVNRINLQRKWALSACWA

SEQ ID NO: 30685 - DNA, 5742 bp, DROSOPHILA
ctttcaaagttcccaggaaaggctatgttcaaccatcgggatgaaaaactttggccaacttttactttaaaagaactggccaatgttgtgaagttcaatcgagaaggtaatttcctttgaataaactttttagaagtaaaacgaaatacaaaggttttaggaagaagtttctcataaaactttaaataacatactaaaagaaatacatcaaattatcttccatattaattaaattggggagcccttgatacatgagtagaaaataaaccaggtgtattttatcaaaagtttttgaattgaataactaagaaaacgcagaattcgccactttacctttctaaaatattaatatgtgcgttttaattatgtgaaatcacaattcaatggttaatcaaattcgcattaaataagtaaagcaatagattatcctttcgagttgagaaccccattcccttcatatgcgaatgtccttcggcgataaaaaaaaaaggcaagagccttataggataatctggtttttagcaggaactacatatataagtcgcaaaggtctcgctcatatcggaatttataaaggaaatgtaaaagaatttggggttgaaatagaagtgggggcaggccataaaaccaaatgaaaaacgagttggggcttacgttcgaacggaaacgcaaataaaaaacaacaacgttttggcgtgattacgtaaaatgcgtaaaagaacagaaagagagagtaaatcgacgatgagaaagagagactcgcaggaaccacttgacgcatttcaaggacacgtgcagcctttgcaaggacacacgcagcacaaaagagtggcgaattacacaacactgggtgtcggtagcgctcccaccaacttaccgtaatatgcaagttggcagctcctttctggtggctgccctgtagctttcttgcctttttttggattcagctaggtaggccctgaccgaaacgctctagaaatttcagtagtggtaaaggccagaacacataactttcgaaggtgacaagcagcaaacaaattttccgttctcgccgagtcttgttgttttggggatattttccaactcaaaaactggtgcgtttcagttcctttacagacgcaagacgcgtaatattcgatcggtgtaacggtgaacagaatcggcagcgggaaaaccgaacgcggcgaactcagctgattgaatgaaaacgccaagctgagcagcagccacaattgccattgccccaaccagcgctcattgagagagggagccaacgagagagcgagcaacaagcaactgcagagcgagaagaactgtccgtcgggtaagcttgttgcgttgttgctgccccttacacagcaaaaaagaacttagctagttttacaattgcttaattttatatgaaactaagcatatagtcatatttgtttattaaactaaataagtagctatattaaaaaagctaattattggcattctccttcttttctcccactgtgcacgatgcagagacgtcagcagtgcactcagagcaaagaacaggtataaaatgcccaaaaagaagcatttttagtaatttttcattcacacatttccaacattgctctcacgcgcagcgctgcagctctctcgcagcgctttctccgtgtcatttatgttggagctgctctctttctagtctctctgccccactctttcacctctttctctctctctcgctcagcataaaatgcaaaaccaactagcggtgttgttgttgtagttggggggttatgtaactttcgggcatccgcaagcacagaaagctgaaagcgttgaagggcagtcagcgacctcgttctagaaaagaagccatctcttcagcccctccacgcaccacccctcaaaagaaagcccccccccaaagaagaagaagcaacagcagtgaaaagcgcgtagtataaacacatgctgtaacataaacagtggtacttgcttaactaaagcaactatgcttgcacatataattataattaactaaatgtatttgctaccattatctttaatgtaaagttttgacaatgtgtttttccttaaatatccatattaagctcactaatatttcataaaaacttttctttaatctaaatatttgacatcatgtcatataagtattactgtgcaatcaaaaagaaaggggagcaagaaagaaatgtaggttttctgccatgcagggcaggggcaaaccagaaatgtctgctttttaggttggggaggtggttctttatgggtatagctttcgagggggtgtggcctggcgggaatcccaaagtcatgccaaattgcgcaacagccaaagcgttgttcttggtaacccgctgaccgaggatattgacgcagaagtgggtatggagtggcaataataataatttcactggtcaagtctgaggtactccaagaaaccgttattaaattatgttaagtgaactttccatggttacaacaaaaaaaaacgaaagagaacaacagtatagtcgatttccatgactatacacccagctagaggtagtgctaggaagattttatagtttttggcatatcgatagaatctttttaaaaaaaaaaacgttaaatcatagtttttggcgtgacacctttgcagtcttctgaaagaaagctgcgtatcgtacatacggacaaatagacggacagcagacattgtcagatcggctggtgatcctaattaagaatatactctatagggtcggaaccgttttttccctcttacatactttacgaaagtagcgggtggagctacataaaacatttttcccttcctcattacatttgagcagatgccgcaatatgctttttatttttgcataacaatttccgcaccttacaggcaattcaatatctgcacctcctttagcacgcagactcctttgtgcctttgcactctttttgaactctatttgtcctggaccatcctctcacctttttatggacttccgcagcaatagatctagtaaacaatatagcctccccacaacctttccgcaggctatctctttcctactactaccccatgttcggccgagcccgttcaagcgtaatttaatttcttgcaccatttatttatagtggtccggcaaaagaactcgggccaacaggcaggatagtttagcctgcgggtaaattatggttccattgccaattaggttaggtcacaaccaggatgtcccattggggatatatgtatgtatgtatgtagatggatgcacagggagtacacctaataccagtgcagggctgccaggaaaatgtcattgtttggatttagaatgtgacatttacatacgtacgtaatataaatatataaataatatcattctctgaaaaatatcataatgcactcttgtaaatttaaaacaaatttaattttaagataattggttgagataaacatagttaatattttcaattgatcctttaaattttaaattgcaggtgaatatcatccctgtgtgaccgttgtatgcggcatggttccatgtctctttcccgttattcatttccctctgctttgttttttttttttttggttttgttatgcggtggcatctgtttttgccacaggaaaatggttgagagaggggaaggcagggggcgaaagcggagagtgcgtaaaatgcgttttaattgaaaggaaatgttcaaagcacatgtgcatctgctagtcaacgaattggttgggaaagggggtggcaagccgaatgtgtctgctaattgaattacctttcggttgcttttcccattagaagtgccgacaagttctcgagctgcttgtttgcttttcatttaatacccattttgatttaattttcgtttttcctatttttctgacccaattttgttttgctttcgtgcattagcagctgtctctgtctatcgctgtgcagccaagagagtgaccaagagaaacgctctctctctctctctcagttgtccaggacttgcacttttcaaacggttttttaggacactgaaacaaattgaatctgtttttcttttctatcaaatttttagttctacacttttctttttcatgatagtttcggaatcaaccaatttctatttgatccaaattaacaaaaaacaaataacaaaaaattaaaaaatatagaaataaaagctgcataaaaagttgaattctaaatcataaatatcatttttccctatttgtctttcaggcttccaagatgggttctggtgatgcagagaacggcaagaagatatttgtgcagaagtgcgcccagtgccacacctacgaagtgggcggcaaacacaaggtgggcccaaatcttggcggggtcgtgggtcgcaagtgtggcacagcagcgggatacaagtataccgatgccaatataaagaagggcgttacctggacagaggggaatttggacgagtacctcaaggacccgaagaaatacattcccggaacaaagatggtgttcgcaggtcttaaaaaggctgaggagcgggccgatttgattgccttcctcaagtcaaacaagtagaatcgcctgcgaaacaacaagatcggccaccatgctatccagaaaactgcgcttaaagactacaaacatattcaaaagatgacgtatttcacttggatttcgaaactttgattgggaatggtcgagctcaaatacatttcaaaaaggtttactttcactttagccaattaaagttgataaaccaaaaaccctcttcttaattcaagttgtgtgcgacgcgggtggaggaaagtgttgtaccaatcagctttggtcacagttggttttatggtcctactagcaaaatgtaataaattggagaagcttgttaaataatgcaaattttccagaggctttccaatatagtcccgttaataggggaaaaaattacttatacgccgtgtggtggataaatacgggtacaaaagcttgcgacattttttaatgcgtggcccccggtcactctggtcacactaattacctatcgacataacgcgcgctcgtcattcgtgaaaaatcggcgacgctcgacgtttgtgttcaatgtaagtagtgggtggaatttttgtattttcaagtgacgtaaatattaccttgaatagttattgattatcaagccccaagtcagataaagattagaaacacttccgtgtcatttacgtaacatccagcagctgtgttttgttctgaaaatgattcgcatgcaaatttaacgtattctttgggggatgattcaggttacataaacgtgtccttgtgtgtgtgtgtataagtgtgattttttattagatatttaatagtttatttagcaaatattagcagtggtgtattaatagtaaaaatagcatcccaaagtcacattgccattgaaaaaagccccggagagagtcgattacatgagcaaagagagtggcgtacccgatcatcagctgtctcgctcgctcagtggcaaaaattaattcttggattttttgtcaatgcttcagctttggagtctttaagcgcgccacgtggttgctaagcaggttttgctttctgcgatgtgcagttttctataatataaataaaagagaattcacctctgcgaaaaggcggcttatgtaacattcgctgctctcaggaaacttggatgttggcccaattttcactcatctctttgttctcaccaccttgctcacccacacaaggaaaaacacagctgcct

SEQ ID NO: 30686 - DNA, 834 bp, DROSOPHILA
gaacacataactttcgaaggtgacaagcagcaaacaaattttccgttctcgccgagtcttgttgttttggggatattttccaactcaaaaactggtgcgtttcagttcctttacagacgcaagacgcgtaatattcgatcggtgtaacggtgaacagaatcggcagcgggaaaaccgaacgcggcgaactcagctgattgaatgaaaacgccaagctgagcagcagccacaattgccattgccccaaccagcgctcattgagagagggagccaacgagagagcgagcaacaagcaactgcagagcgagaagaactgtccgtcgggcttccaagatgggttctggtgatgcagagaacggcaagaagatatttgtgcagaagtgcgcccagtgccacacctacgaagtgggcggcaaacacaaggtgggcccaaatcttggcggggtcgtgggtcgcaagtgtggcacagcagcgggatacaagtataccgatgccaatataaagaagggcgttacctggacagaggggaatttggacgagtacctcaaggacccgaagaaatacattcccggaacaaagatggtgttcgcaggtcttaaaaaggctgaggagcgggccgatttgattgccttcctcaagtcaaacaagtagaatcgcctgcgaaacaacaagatcggccaccatgctatccagaaaactgcgcttaaagactacaaacatattcaaaagatgacgtatttcacttggatttcgaaactttgattgggaatggtcgagctcaaatacatttcaaaaaggtttactttcactttagccaattaaagttgataaacc

SEQ ID NO: 30687 - protein, 105 aa, DROSOPHILA
MGSGDAENGKKIFVQKCAQCHTYEVGGKHKVGPNLGGVVGRKCGTAAGYKYTDANIKKGVTWTEGNLDEYLKDPKKYIPGTKMVFAGLKKAEERADLIAFLKSNK

SEQ ID NO: 30688 - DNA, 6129 bp, DROSOPHILA
gaggaaatgcagaagaaagaaagccaaaaaaagcaaaaccgccgcccacccaggtcgtatacatcatctgaccgctggtattcagtacccggtctcctgggagtcttcgctttaatcacgttgtccgtttgccctctgccgcaaaatgccataaattatgaattaatcgtatcaatcttggagaagcctcttttatcagaccgatgcattgctgcgttcattataaagggtctaatatttaactaagaagttgcataattgcatctcctttgaacgttaagtttgttgcttaagtcttttgttttcccaaaaattacattaaaattgggaataatctctattttcgtattttgtattttccttctaaatatcacacaaactaaatcacttaaaaacaaatcataaaagattttaatttaaatggttgtaatagttcgataagtttgtgtcctaagtcttttgtttcaggactttttactttgctcaaatttggtaatttaaattaaagccttatcgtttaataaatcttctcgtttatttttccctcaatcagccttgttaaaatcagatttgtcaaaacaatttacaatttaataccttttcattaagaaatcgagccaagtgaaaggttaattttctttactctttagtctatattaaactggcattccactttatgctcacaactaaaaggctacctgaatttcataccagctctaaattaactggccaacaatctggataacaacctgttaagtgagtcgaatgcaaccaccgccaaacttcctcattcacgtccgttgttatccaatagttaagaatcaattgcggtggctgaaattgcacagatcaagttcggcgaacacaatcgatgttggctattaaatcatcagcgagtcataaccgaaactgaacaatttaaccaaattccagataagacgagaagcaacagaaaaaaaaacccgagagacaccgatcaacgaaccaagccagccgcaagatgattagtgaacgccacaagagccgcgatttggttacgatacttggcctgttccacctcctgctcctcggattcgcctacggcgaccatgtggtcgaggtcttggctcaatcaacaaccgcatccacatcacagccgcagactttggagacgattggcagccaggatggggctgctctgacgcccggtgcgacaacaggtgagcgaacaacgagcaacgtacaacaaccgcagcgaaatgaaaaatatgaaagatttgcactttgattttgtttcgccaacataattgggtgcctgggtgcggagagcgggcactattttaatggccagcattaggagatcaaacaattttgaacgcaatcatgcgaggcatattaatgcgaatgaaagtgaaaatcgtctggcaacattgtttcgtggtcacaggcaattatgcaaggataaatgggatacagatgcatgtgctcgattggctgggattggagtggctccgcttaagccgagctacacattgtaggcagagcgcgcccacccattatcaatgaaatgcaaaggaagggcgaaacgacgctgtgaataccctacaatattaataggattttatcccaccaatacaaaagtagataaatattattgaattctaagaaatcagcctgttttttaatgtaattaattcattttctgacaaaatcctctcaatgcgacatactttgtcttcatgatgtggacatatattgtcatatttaaattatcagactagcgaatcaattgcctttcatgtaagccaattgcctttcatgtaagtttgaaatgccaattggtacaaggagatcaagatgccagagtggccatttccgcttgtgtcaagtgcatgtcctcacgtcgaggagctgggagcttatagctccgcatgcctttgcaaccgctcaaatggaaagcgatttgtctggttttagctaataatttatcaggcctccgcattcgcagtcgtcgccttcgccgcctctgccatttatttttcctcagcccgttgatcagtcaatcaggcaatggcgagctaaaaccgagccgaaatccaagtcgacccaagtggttccgatgagtctttgtgtctgtctggctgtctgtctgtttgcggtgttgattgcccgtggtcgtggcccccactgatcaacgcctgccggcggaggagccaccaagtgttgtctgccaggtgggcgttgggtatcacagcttatggcggcttcacctctgactttggctttattaagagccacatggcgcgcagataagcggcttgtggctgtggtttcgaattcaaatggaaggctcccatctagcactctgtatgcaggcattaaaatcaatttatgcaaaaattacttgaaagccatttcagttagatagtcgcgagagaagttcgatgagataggatgggattattattattactccttggacctcaccactctagaaggcaccattaaaccacttgcttactaaggaatccaatattatccaataccaattctatcatcgcgatgcatgaaaatgctaacaaaataaattcctctggctcccctcgctatgagcaaccaggatgccatcttggccaagtgacgggacaaaaacatttgttaacactttaacgagtttggccatggccaataactccgggctctacgctgaatctctagcttgaatgcctaccggccaattggggggcaattaaagttgcacttgtaaaagtaaattgatatggtgctcaatcatctacccctgcgtcttctctttcacagctccacgactggacccgaacaacaacaacgagtggcgtcctcttggccacggggatccactgcaaaaggatcccacctacgactacagtccgccggccttggatcgagtacgctactgggcggagaacaacagcactggtcaaagtaatccagaggccaggaaaaaggaactaccaccagaggttcttcgcaataaaacgaaaagtgaggtactgctccttggagtggcaagtgatcgcgttagggtaccccactcccattcgtatccaccagttggtggcttaggccattatcagcagcaccaccagcagcagcaacagcagcagcaccagcaacaagctaaatatgcggccatccggaggagctactatgctcccacccagcaacaacataacccacaaatgccacagcatacacatgcccagcagcacatgccgcctacccatttgatgccaccacccatgatgatgatgaaatcaagtggttcgtccgttcctcccatggaatacaggcacagtatgatggccacgggagcgcccacctcttacatgagcctcaaccatatgagctctccaactaccaaacaagcgatgacttcctcagtgatttaccatcagccaccagcgatgagccaccacacctcattatcttcttcaacgccttggatgaccagtaggccaccatatcgtttatcgtactcagatccccatctgcaggaatccgtgcatacatacagcttttcaaggccccatcaccagcaaacgatgatctactcgcccaactctctcccaggacatcaaaatggatcaaagacgggtcttaggaagccgtggctccatgagctactccaaaaagaggtggtggtaacgtcgaagcccaaggttaagcccacaatgccagccacaaaatatttgatgggaacaaccaagccacatcagccacaaccatctgttggctttggcatgagctccacccgccctccatttacctatgcacccgtgacatttgtgcctggtccacctaccatagccgttccgactgtggccactagaaaagaaccacaaccggaaatctatatcacacccacgccccaaacaagtagctctggttttagacccatgacgatgagcagcactaccaccgtgggaaccactcaatcgaccataactactcctttgtccatttatcagcgagccagcacaaccaccagtaatcgtttactgatcccccagacgagcaatctagcgcagagacccacagtggctcctgctcccagtgaacccaccacagactctcttttctcgcactacaagcaaccaccgaaaccgctactaggacccatgtacctcatcatcgagggtcattcgaaagtgaagacctacggtcaaaatgaattggatccacatagtccgaagatagtgccggttatctccaagagggaaccagtagttaggatagccgatcctaatgagaagaggggaactgtggagtcctatcaggtaaaacatttgcacaccaaaacaacaccaatgacaacgacaaccacgactaataagcccactaccatgaaacctacgacgacaagggcgcctgaaaaaactcctatatatagcaccaccactaaggctccagtagtaagcactagcactacaaccgttgccaccgctacgaaaaccacaacttcaacaaccactaaagtgcccataatcagcaccacccctttaattccaccacaacccactccagaaaagccaagcggtgtaaacgatctgcttagtctactggacaatatgtttgccgatgcccaaaagatgggctcatccactgatttacctttggtagcaagttctactaccagcactgtgctgaggccagttagcaccaagttgttgccgcagcaaccggaacctaggatatccagtaaaggggcgggcatagagagtctccttaaagatgacacccatgaagatgacgaagctggcgaaggtctggggtcaacgatttccactgaaacaccacctcgggcaacacgtcaggtatttgactatgatcaattgcctgagtcacggattaaagacggggtcaccaccagtgatgatattatggaatacaatgatgaagatgaggaggagggcattgaggatgataatgaaacggttactgaaaatgatgaggatgaggaggaggaggaggaggctgaagagccaaacaatttactcaaacgaatcgatcaatttgtggatgatgtggatgatggggaagacgacttggaggatcttatcgagggtctggaggaggacgagatcgacgagaggcgacagcagcattagcccaaaacaagcatttttcttgaactgcgctctataccaaatctatcagaaactttttctcacgcctaatacgttcttgtacataagtcagctttaattgaatctgtatttatttgttgttagttgttaggccctgctggcgtcacaatgtgactgcgttctatacccaatgtaattcgagcaaagagttttcgttgtgtaattaagcattaaattattgaaatttttctacgttttttagttgttaagtgtgaaaataaaaaaaaaaccaaaacgaaatacgatatacgatatacgaaaataaaatacaatagagccatctattggggagatcagtcgattgcgccaccttgtgcgcgacaagcgggacctgcactagagagtctttgtctttctacacaaatattaaaaaaggggtaagttaaaatactgatggataatccaaacatattatctcattgaaaagtatgtctatacccttaatgctcactggaaataattatacattaatgaataacacagtcgtttttcttttctatgaataataataattttgcgtttcaaatgtaccgccaaatttccttccagtaaatatcgatcgttcactgttcgataccgatagccaaagtttatcagacagtgctgacatgttagcggaaaatatgtaagcaaaattcaaattgtttctgagtattcattaatacaatattattacttattactgtctttaggatgaaaactattgacgattgtagctcttactgttttatcatgaaaaaatcgtgaaaaaatcattttcccgctcaactccggacatcactgatgtcgagcctattgctttgtttatttccagttgtattttccaagcgtcagttgagaactcgtcgttgaagcgtgcggtttacggtaaaaagaggccgcttccagtacgtgaaaataagtctgctcttgttgaaagaaacaacaaaaacttgccaattggattaaattgtgtgcaagg

SEQ ID NO: 30689 - DNA, 2529 bp, DROSOPHILA
atgattagtgaacgccacaagagccgcgatttggttacgatacttggcctgttccacctcctgctcctcggattcgcctacggcgaccatgtggtcgaggtcttggctcaatcaacaaccgcatccacatcacagccgcagactttggagacgattggcagccaggatggggctgctctgacgcccggtgcgacaacagctccacgactggacccgaacaacaacaacgagtggcgtcctcttggccacggggatccactgcaaaaggatcccacctacgactacagtccgccggccttggatcgagtacgctactgggcggagaacaacagcactggtcaaagtaatccagaggccaggaaaaaggaactaccaccagaggttcttcgcaataaaacgaaaagtgaggtactgctccttggagtggcaagtgatcgcgttagggtaccccactcccattcgtatccaccagttggtggcttaggccattatcagcagcaccaccagcagcagcaacagcagcagcaccagcaacaagctaaatatgcggccatccggaggagctactatgctcccacccagcaacaacataacccacaaatgccacagcatacacatgcccagcagcacatgccgcctacccatttgatgccaccacccatgatgatgatgaaatcaagtggttcgtccgttcctcccatggaatacaggcacagtatgatggccacgggagcgcccacctcttacatgagcctcaaccatatgagctctccaactaccaaacaagcgatgacttcctcagtgatttaccatcagccaccagcgatgagccaccacacctcattatcttcttcaacgccttggatgaccagtaggccaccatatcgtttatcgtactcagatccccatctgcaggaatccgtgcatacatacagcttttcaaggccccatcaccagcaaacgatgatctactcgcccaactctctcccaggacatcaaaatggatcaaagacgggtcttaggaagccgtggctccatgagctactccaaaaagaggtggtggtaacgtcgaagcccaaggttaagcccacaatgccagccacaaaatatttgatgggaacaaccaagccacatcagccacaaccatctgttggctttggcatgagctccacccgccctccatttacctatgcacccgtgacatttgtgcctggtccacctaccatagccgttccgactgtggccactagaaaagaaccacaaccggaaatctatatcacacccacgccccaaacaagtagctctggttttagacccatgacgatgagcagcactaccaccgtgggaaccactcaatcgaccataactactcctttgtccatttatcagcgagccagcacaaccaccagtaatcgtttactgatcccccagacgagcaatctagcgcagagacccacagtggctcctgctcccagtgaacccaccacagactctcttttctcgcactacaagcaaccaccgaaaccgctactaggacccatgtacctcatcatcgagggtcattcgaaagtgaagacctacggtcaaaatgaattggatccacatagtccgaagatagtgccggttatctccaagagggaaccagtagttaggatagccgatcctaatgagaagaggggaactgtggagtcctatcaggtaaaacatttgcacaccaaaacaacaccaatgacaacgacaaccacgactaataagcccactaccatgaaacctacgacgacaagggcgcctgaaaaaactcctatatatagcaccaccactaaggctccagtagtaagcactagcactacaaccgttgccaccgctacgaaaaccacaacttcaacaaccactaaagtgcccataatcagcaccacccctttaattccaccacaacccactccagaaaagccaagcggtgtaaacgatctgcttagtctactggacaatatgtttgccgatgcccaaaagatgggctcatccactgatttacctttggtagcaagttctactaccagcactgtgctgaggccagttagcaccaagttgttgccgcagcaaccggaacctaggatatccagtaaaggggcgggcatagagagtctccttaaagatgacacccatgaagatgacgaagctggcgaaggtctggggtcaacgatttccactgaaacaccacctcgggcaacacgtcaggtatttgactatgatcaattgcctgagtcacggattaaagacggggtcaccaccagtgatgatattatggaatacaatgatgaagatgaggaggagggcattgaggatgataatgaaacggttactgaaaatgatgaggatgaggaggaggaggaggaggctgaagagccaaacaatttactcaaacgaatcgatcaatttgtggatgatgtggatgatggggaagacgacttggaggatcttatcgagggtctggaggaggacgagatcgacgagaggcgacagcagcattag

SEQ ID NO: 30690 - protein, 842 aa, DROSOPHILA
MISERHKSRDLVTILGLFHLLLLGFAYGDHVVEVLAQSTTASTSQPQTLETIGSQDGAALTPGATTAPRLDPNNNNEWRPLGHGDPLQKDPTYDYSPPALDRVRYWAENNSTGQSNPEARKKELPPEVLRNKTKSEVLLLGVASDRVRVPHSHSYPPVGGLGHYQQHHQQQQQQQHQQQAKYAAIRRSYYAPTQQQHNPQMPQHTHAQQHMPPTHLMPPPMMMMKSSGSSVPPMEYRHSMMATGAPTSYMSLNHMSSPTTKQAMTSSVIYHQPPAMSHHTSLSSSTPWMTSRPPYRLSYSDPHLQESVHTYSFSRPHHQQTMIYSPNSLPGHQNGSKTGLRKPWLHELLQKEVVVTSKPKVKPTMPATKYLMGTTKPHQPQPSVGFGMSSTRPPFTYAPVTFVPGPPTIAVPTVATRKEPQPEIYITPTPQTSSSGFRPMTMSSTTTVGTTQSTITTPLSIYQRASTTTSNRLLIPQTSNLAQRPTVAPAPSEPTTDSLFSHYKQPPKPLLGPMYLIIEGHSKVKTYGQNELDPHSPKIVPVISKREPVVRIADPNEKRGTVESYQVKHLHTKTTPMTTTTTTNKPTTMKPTTTRAPEKTPIYSTTTKAPVVSTSTTTVATATKTTTSTTTKVPIISTTPLIPPQPTPEKPSGVNDLLSLLDNMFADAQKMGSSTDLPLVASSTTSTVLRPVSTKLLPQQPEPRISSKGAGIESLLKDDTHEDDEAGEGLGSTISTETPPRATRQVFDYDQLPESRIKDGVTTSDDIMEYNDEDEEEGIEDDNETVTENDEDEEEEEEAEEPNNLLKRIDQFVDDVDDGEDDLEDLIEGLEEDEIDERRQQH

SEQ ID NO: 30691 - DNA, 6298 bp, DROSOPHILA
caaatcaacatagtacagacctaaagaactacaattatgttaattataaagtttaaataggacaatttattatttaatttaaataaaaagtggaatatttaattcaaacccgatgagaattgtgacatccacaaaaaagttaaataataaaaaaagaactaaaaaatgatataaaatctgttttatgcgaggacctggtttttgtagctcgcaggtcaaaaagaataaaaaaagcttcttcagatttttgactcgggcaactcaaattaaaaataagagataccaatcatatttataaaacaattgtcctggcaatttctatcaataggtatctgttagtcgtcaaactcgactgcagcatactctttgcgtctgtcaaaaatgttgttggctgatctatataggccttactcatctgagtcgcacaaagatgaccacaaatcatcctgggttgctgcaaattccttagttcattgcgtggaggtagacatcactaaaaacatccaacaaagaaagagtcgatacgttacgcagaaacatcacaataagattgtattactgagagagaaagtagaaaactattagggtcgaaatgctctcttaatgcacattctatttggccaatcgttaaacaagaatacactggtatttttatattttttggctaatttatgtatattttcttttacactcccaaaattgtatcatacattttaataacaactttattatgcaatacatatttttcgttttaattatgcttatttgatttattttttttttaatgaaagaaatacttgataggtttatacaatatattttttgttttctttagtttcgttttttgcttagatgtggatgcgcagatgcgactatataaacgtaagaagcgcatatcatctggtttagaaaaactctgtacagcggcgcactcataaaattaagaacacaaataataataacaacaaaatatataaacaatcgaattgaatggaacaatttgtagaggatagttgcttgtatttgttctgccattacagtgaattgctttttggaatgccaacaaaaaatcgaatttttctctcaatactttctaagaactgagggcgtacacggaggtatgggctaacaaaaacttagtttaaacggggaacaaacatgcgcttaaagatagcaagaacaaacatcattgcaagtgtgatggagaagcggaggatcaggctggagatatagatccccctacgactcttattgttagttaaggtttcaggctggcggcctggctaaaatatttgttgtgtgcctgtgcatggatgacttgttgattagaccacctaggccttgccagcgatgggggcggcaccttgtttctggttctcgttttccttctccagctgcttgcccaggtattccctgataaaaacaaagagagaaacaaacgcattttgagtacacagagaattttgatgataatcctggtcatgaattgaaaacaaatgatatgaggatcactggacctgaatgtggagaaggggagcgcatgagatgataggcattgaaagtccatactaaccaattgtgtaccatcagcttttgcacagccagcagggcttcgtatcgcacattgggatcctcgtggccaagatgctgcatcacgatctgcttgcctccgagttgttccaagacgctagaagaaaatgatttggtaattggattgtatgtaacatagtataaaatctaaacttactgcttgccgcggggatagtggcgcacatactccccgatgtcgaagcaggcgacggaaaggatgatggcatcttttgaggtttccaggaggtggacgaggatgcgcagcaactcgtagttcttttcgtttaggcgctgggcattctcgcgccagaacttggccgacttgtgcacaggcgaccattccaagcgaccgctgcgcacctctgtggcgtactcatcaaaggagctcaagtcttgcaccgaattctggagcttctcgctcaggtactctacgtcggcggtaatgtcctcgtcgtcgaagcgacgctgctccaggatggatagctgcttcagcaccttgcactggaccatggcgatgcaatggtccttggccaccgatgaatcctccggcttctcgatcagattgcggaagaccgcgaggataatgcgtgtcaccttctccttggcacaatcgctgaggatatcagccaggatggggatcacgctgaacttattcatcttggcggccagcaggggattgaaggtcagcacccacaggcaaaagatcaactggtattgcacctatgaataagaaatcgaatttaaattgtaccaaacaatttacgcatttcaatttcaaactcacctggaagttgacacgggtcgacaagatacggatcagagtgctgattccgtcgactcccacaaaggcaaatcgatactcatccacacggagcatcatctgcaggcaccgggccaccgactggatgtattcgttgttctattaatggtagaaggttgcgattagttttactctcgtattcgattatagtttcgttggttaggattgttagttatgacgatatctgctgaaatctatttttcgctagctacgacaacgataattactaaagctacgtacaatatacgaaataaagtgaaaaagaatgtggacaacatttaagagagatagagttggtaatgcaacatcatcaatgggagttcgaacagttcaccttatgccattggtttatctgtgtgtaattttggttgattttcgtgtagttttaaccatcacccgggcctcaaattaccgttacaccacactgatatgcactgattcatacactgcttgacaacactgtcagctagagctttcacgccggattttccttgctgtcttctgacgcgctattagttgggttagtaaacagttacgaaatagactaggatttaccacacaaacacacggatctcagtcgaagaggtaggaattataaagaataaaagttaaaaatgccttatgtaatttcagaaactacgaaatactttttttttagtttttagttattacatatttacgaattgagtcaaaatcattgatcagttgttgttacataataaatgttacaatttcctgttatacgaaaataacagaacagttgtttatccttttatatttcataaaattaagtttttctatttctatatttctttaaaaattgcaactataagggttgactgagcttatcgactgtgttccttcgtgtgaccataaatgttttatagtttattcgtgtttttgtgcggtttttggtgggtgggtaagtgtatgttttgggttgtttcggcgagtggattgctgagagtttggtttggggtttagttgtttggaataccggtatcacacatttgccatcctgctgctggtgatcactgccaacgcccacttcgcgatagctttcgttggccctctcggccagctcgtgctgctgctgcagctgggccagtgtgggactgtactggtggccatggtggtctttgtctttgccatgcgtgtgcacaaggatcgtttgtgtccgcttggccagctgggccatctcttgcagatatgctaaaccctacggttgggatcagaggtcgagggtcgttggttgtgggggcggttcgtccatagacatcgattcaatcaattcatagacggtaaattgcatataaattaaaattgttcacagggttcgagtgtagcggaacaaattaaaaccatagatggacaagaacacaaggtaataacaaacttagattctggtgcataattgacacatgacaacgattgcacgtgatgatcggtagaagtgaggtggcgaatttaaaaaaaatccaggataatatacggttttggtatggtgtgacaagattctgagtgctgatgtatggcagaatgtagtaacaaacttgttgtgttgacaacccgttcgcagagatttcacaaatatttcaccaagacgaggtcagttttgtttggttttccaacgtatacaaggtcagtatagcttggtttagttagattaaaataaataagaggtattcaatattggcaagacatgcagaatgcagattatttggtttcttagctgttaacagatttaagaggttaattaaagactcagtccataaggagatcgttaacggattagagtaaatttgtattagaaatgtttttcaacgggatttttgaagcatataactcaaacaaagcatgctaaccagtatcataagccatatattacatgctgaaagctaaatgcctgcctaggaaacccatgtatcaattataaaaactgtttgttttgactatatacaaatttgggaggttgattcagtgcaagcattccttagaaaactacttatactgatacaatcttcacatgctctcctatcttcttaaacagataaaaggctacaatagacatgctaacgaaggggttaacccagtaccgcacacaatcagactcacattgctggccagctgatccttcaggaactgcagatagaagttcaggtcggacttgggcatggtctcatggccccagcaggcgaatttggccaggatgcgcgacgacatgttgacaataaagccatcctgacggttcagcaggttcaggaacggaccccagatgcactgcttcagcttgccggctgtgtcatggaatagatccacacgggagcgatcctcctgcagcaaatcgtcgagcagcacaaggatgtactgaatggtggagtccttcgacagatgcgaaaccagattaagcagcgtcttcaccacctggctggagttctgggccaagaagctggcacgtgacttgtccaacgcgctgattgccttgtagtcctcctcgctgatcatctgcgactgcatgtacgaagcccagttgatcgtcctggtgcggatgtccgccgcctgctgctgcagcaccgaggtggcagcaatcatatctgggggcaagcagtaagccaagttaatgggtggattacaaacggggtgctgcgctggacggacaccccacacactcacacactcgcacttcgatttttcgcaaaggtcgattgagaggtgcggtgagggggaaaactcaccaatgttctcctcgggcaaatacaaggcggtagtcattttgagggctttcttgagacgacgctcggcacacacaaattcaagcacagaatttatgaaaatctatcaaatacaaccgagtgtttttcacactactgcgacacagcaccgaaattcagctgactggtcttgtgacttttctgcagccttcaatcgaatattcgatatataagaatatcgatatgacgagcagagccccatgttatcggtagcttggagctgccaacgcgacttctgtacttgtggtatattaaatttgaaaaatattaagttatataaaaaagtaaattggatctttattcattatactttttatttccgtcataaggcacacattttaaagattttttaaagattttgtggtctttatgtgtagttgtttggtaatttatttcaattaattttcaaatctaccaaatacaagcacatacgttgtgtcttgaaattaacttaaaagctttatttactcttcaacctaaaagtatgaatcacggagatcacggcaggcatttcctttggtatttacccatattcgatataaccgaaaacctcttattgcagttggagcacctatacggtttttcccccgtgtggatgtgaacttttaaatcgctagcgcggggaaacgtctttgagcagaactcgcactccataggtttcttcccattgtgcaaccgcttgtggcggcttagattagacggatacttaaaggacttgtcgcaatggctgccgatctgccgatatgactttgaacattgctcacacttgtgcgaccgctccttggagtgggataaaacgtgggcacgcaatgcattgggacactggtatgggcgagtcttctcgtgacttagtagatgaagactccaactggaggaaaacggaaacatcttggtgcacttgaggcatttgacaacccgattgggaggatctgatggcggacactttggtctatcgcatcactgcatttgcaaaagtctttcgacactgggaacacttgtatcgctttccatgggatcgaaggtataatctataggagtccttgtcttcaaaatattttgggaagtaattacatttgtagggcatgtaagtagtacgatgcactatgctgcatgatgc

SEQ ID NO: 30692 - DNA, 1857 bp, DROSOPHILA
aatttcggtgctgtgtcgcagtagtgtgaaaaacactcggttgtatttgatagattttcataaattctgtgcttgaatttgtgtgtgccgagcgtcgtctcaagaaagccctcaaaatgactaccgccttgtatttgcccgaggagaacattgatatgattgctgccacctcggtgctgcagcagcaggcggcggacatccgcaccaggacgatcaactgggcttcgtacatgcagtcgcagatgatcagcgaggaggactacaaggcaatcagcgcgttggacaagtcacgtgccagcttcttggcccagaactccagccaggtggtgaagacgctgcttaatctggtttcgcatctgtcgaaggactccaccattcagtacatccttgtgctgctcgacgatttgctgcaggaggatcgctcccgtgtggatctattccatgacacagccggcaagctgaagcagtgcatctggggtccgttcctgaacctgctgaaccgtcaggatggctttattgtcaacatgtcgtcgcgcatcctggccaaattcgcctgctggggccatgagaccatgcccaagtccgacctgaacttctatctgcagttcctgaaggatcagctggccagcaataacaacgaatacatccagtcggtggcccggtgcctgcagatgatgctccgtgtggatgagtatcgatttgcctttgtgggagtcgacggaatcagcactctgatccgtatcttgtcgacccgtgtcaacttccaggtgcaataccagttgatcttttgcctgtgggtgctgaccttcaatcccctgctggccgccaagatgaataagttcagcgtgatccccatcctggctgatatcctcagcgattgtgccaaggagaaggtgacacgcattatcctcgcggtcttccgcaatctgatcgagaagccggaggattcatcggtggccaaggaccattgcatcgccatggtccagtgcaaggtgctgaagcagctatccatcctggagcagcgtcgcttcgacgacgaggacattaccgccgacgtagagtacctgagcgagaagctccagaattcggtgcaagacttgagctcctttgatgagtacgccacagaggtgcgcagcggtcgcttggaatggtcgcctgtgcacaagtcggccaagttctggcgcgagaatgcccagcgcctaaacgaaaagaactacgagttgctgcgcatcctcgtccacctcctggaaacctcaaaagatgccatcatcctttccgtcgcctgcttcgacatcggggagtatgtgcgccactatccccgcggcaagcacgtcttggaacaactcggaggcaagcagatcgtgatgcagcatcttggccacgaggatcccaatgtgcgatacgaagccctgctggctgtgcaaaagctgatggtacacaattgggaatacctgggcaagcagctggagaaggaaaacgagaaccagaaacaaggtgccgcccccatcgctggcaaggcctaggtggtctaatcaacaagtcatccatgcacaggcacacaacaaatattttagccaggccgccagcctgaaaccttaactaacaataagagtcgtagggggatctatatctccagcctgatcctccgcttctccatcacacttgcaatgatgtttgttcttgctatctttaagcgcatgtttgttccccgtttaaactaagtttttgttagcccatacctccgtgtacgccctcagttcttagaaagtattgagagaaaaattcgattttttgttggcattccaaaaagcaattcactgtaatggcagaacaaatacaagcaactatcctctacaa

SEQ ID NO: 30693 - protein, 468 aa, DROSOPHILA
MTTALYLPEENIDMIAATSVLQQQAADIRTRTINWASYMQSQMISEEDYKAISALDKSRASFLAQNSSQVVKTLLNLVSHLSKDSTIQYILVLLDDLLQEDRSRVDLFHDTAGKLKQCIWGPFLNLLNRQDGFIVNMSSRILAKFACWGHETMPKSDLNFYLQFLKDQLASNNNEYIQSVARCLQMMLRVDEYRFAFVGVDGISTLIRILSTRVNFQVQYQLIFCLWVLTFNPLLAAKMNKFSVIPILADILSDCAKEKVTRIILAVFRNLIEKPEDSSVAKDHCIAMVQCKVLKQLSILEQRRFDDEDITADVEYLSEKLQNSVQDLSSFDEYATEVRSGRLEWSPVHKSAKFWRENAQRLNEKNYELLRILVHLLETSKDAIILSVACFDIGEYVRHYPRGKHVLEQLGGKQIVMQHLGHEDPNVRYEALLAVQKLMVHNWEYLGKQLEKENENQKQGAAPIAGKA

SEQ ID NO: 30694 - DNA, 2899 bp, DROSOPHILA
taagttcttaactgaagagctgcgaaatatatatactaactttccttttttagttatctacaagcaaagtcctcgattgtaccatgccagctttttggtcattgtgcaaaagcctggtgatacggatcactatcaatcaaagaacttgaagggtgttcaacgcgtggcagaaacttctgataaggatgtgctgctcctgactgtccaaccgcctaagaagataagctcttccagggatttgcaggaagccacagtaacagagactattgtgcggcgttttaattacttaacttttgtacaaagcaaacaacaataaggaactactcagggactctacaacttctccagccggtgcttcttgggtatgccagtgctgcgatagtcggcgcgctcctgcagatatatctgcttgcactcctccttgaaggcttcgttctgataccactgggtgaggcattccttcagggctgagttctgtttccgacaggtggccaccatcagtatactgctggccttgcagcactcctggaagtcggccacctcctttgagcagaactccgtcttggcacgatcgcgcattatcttgggtatcagcacttcgcgctccaccttgcgcaacctagtatcatttggatcgcctagcaagggcagtgtcagttggtggtcatattcgattattctgaggactcacccagtccatggggattgtggggatccacggctggctgttgttcaaggctcatattgtgttaaaaatactatttattttgtataacaacttttagagtgactgccaccggtgcgatgaaaaatactagggatataaaaataccacgagtatactaaaattagattcatttttaagatataaaatataattttataattcgatttcttgaatattgaaattacttaatgatcgtctagaacacaaaatttgcccgactgatcgctaattcaataatatatttttttttaaaccgataaaccaccttcgtgtattaaattagccaagaatccagacgcattttattacaaaactgcattttaaatgcttaaatcaaaacctaactaagcggccaggctagcagcgctgattggctccaaatctcgcacaccatccttgtccacgacggcgacggtgaagttcttgaggttgacgaccaggcgcttctggatttcggcaatgcacttcttgaagacgtcgtaggcctccgcctgggttatattggggtgccagtatcggtcatagatgctggatgcgaagatcgcaccatagccatgaccggcgtaattcacaggcagtgcattggccaaatagtcaatgaaggtgagctccggacccgcgttgggatcgtagctttggggagaagaaacagattaggcacggaaagcaaatggattgactgatctcatgatccttacccggccacaaacatgaacacttggtagggcgtgcgactgcgaagatattcggccagattcttgcgagtaaaatgagccgattcacgtggacttaaatcgtagccattgcgcatcttgtacaacgctatgttcttcgaaatgaattcggtaaattgctccgtgtcgcccgattcgccgacggttgaaataagcagactatccgacaccttgtggattttgttctgatctgcaatggaaattcaaggagactaacgaaatgagtcccaagccgccaagaaaatgagcaccatttgggcttaccctctttcatcactataatggatcgggcgtgggtggtgtccgccgccagcatcacgaagtcagggcccttgatacccagtagagtctccatgttgcaattatatttatactttcggggttttttaacgaaaattacaagttgtttgtgagttgccgaatgcgatgacaagcaagttaaatgcagagtggccgtatgctgggcggctaaaaataccgctattctgaaaagatactaataaatataagctaacacatatttataattttattttatatttattatttatcattttaaattaacttaattatacttaattttcaattatacctaattggtatgatattcaaatcttataagtttacttgcttactaaaattaaaattaaaattatttcaatgtttcaactttgtctaaataaaaaaaaactttatttttaataaacccatttttgtttcctttaatatgaatatgaatatttacatatacataaaaattatgttatataaattataattataaattaaattattaataaaattgaatatcttagttatatattatttttaattttaatcgcagttaatcaacacttgttgagtgcccggttataacttggccacactgttcccttgttatcatttcatttcacaattagtttacggaattcgaactattgaaactaagagccatgcaggcaccacctccggaacactgtcctggcgtcgagagcgaggaggcgggcaagggaagtgcctgttcgggctgccccaaccaaggactctgcagcgatcccaacaagaaactcgaagatcccggcaaggctttggtggtcgaatccatgaaagatgtcaaacacaagctgctgatcctgtccgggaaaggcggcgttggcaagagcacggtaaccagcttgctaacccgctatctggccagaagtaatccggacagtaacttcggcgtgcttgatatcgacatttgcggtccatcgcaaccgcgtttgatgggcgccctgggggagagtgtccaccagtctgggtacggctggtcacctgtgggaatcgaagacaacgtgtgtctgatgtccatcggatttcttctgggctctgtggacgatgccattatttggcgaggacccaagaagaatggcatgatcaggcagtttctgagcgaggt

SEQ ID NO: 30695 - DNA, 760 bp, DROSOPHILA
cttgcttgtcatcgcattcggcaactcacaaacaacttgtaattttcgttaaaaaaccccgaaagtataaatataattgcaacatggagactctactgggtatcaagggccctgacttcgtgatgctggcggcggacaccacccacgcccgatccattatagtgatgaaagaggatcagaacaaaatccacaaggtgtcggatagtctgcttatttcaaccgtcggcgaatcgggcgacacggagcaatttaccgaattcatttcgaagaacatagcgttgtacaagatgcgcaatggctacgatttaagtccacgtgaatcggctcattttactcgcaagaatctggccgaatatcttcgcagtcgcacgccctaccaagtgttcatgtttgtggccggctacgatcccaacgcgggtccggagctcaccttcattgactatttggccaatgcactgcctgtgaattacgccggtcatggctatggtgcgatcttcgcatccagcatctatgaccgatactggcaccccaatataacccaggcggaggcctacgacgtcttcaagaagtgcattgccgaaatccagaagcgcctggtcgtcaacctcaagaacttcaccgtcgccgtcgtggacaaggatggtgtgcgagatttggagccaatcagcgctgctagcctggccgcttagttaggttttgatttaagcatttaaaatgcagttttgtaataaaatgcgtctggattcttggctaatttaat

SEQ ID NO: 30696 - protein, 201 aa, DROSOPHILA
METLLGIKGPDFVMLAADTTHARSIIVMKEDQNKIHKVSDSLLISTVGESGDTEQFTEFISKNIALYKMRNGYDLSPRESAHFTRKNLAEYLRSRTPYQVFMFVAGYDPNAGPELTFIDYLANALPVNYAGHGYGAIFASSIYDRYWHPNITQAEAYDVFKKCIAEIQKRLVVNLKNFTVAVVDKDGVRDLEPISAASLAA

SEQ ID NO: 30697 - DNA, 2712 bp, DROSOPHILA
aaggcatcgtggcccagagatgtggtggtccaagaatgccacaattgaggattggttcgatgagatggttggccaggcgaatataatcaataagttcgcagcggtacgaatggaggagattcgtggcatgagagtaccctttctgcgcgtcggctggaatcgacagtttctcatgatgaaggagtttggcttcgtgtacgattcatccatggttgcgccgcattcgaatcctcctctgtggccctacaccttggactacaagatgccgcacagctgcacgggcgtaaatcagaattgcccgtctaggagttatccgggcatttgggagctggttatgaaccaactggaagtgggcgagtatatgtgcggcatggtggacacgtgtccgccgcatttgagcggcgaggatgtgtacagaatgctcacgcacaacttcaagaggcactacctcagcaatagggcaccatttggcctgtatttccattcgacttggttcaagaaagtcgactatctgaatgcatttctggtgaatattcgaattgttacccataatactagatcttcattccttcctgatcatttagaaattcctcgacgatctgcaaaagctgccggatgtgttcttcgtgactaaccagcaggcgattcagtggatgcgccatcccacgcccagcaaccagctgcaccaattcgagtcctggcactgccaaccgaaggacttggatccccacgagcaggtctgcaacacgccgaatgtgtgcaaggtgcgtagtcgggtgctgcaagaggatcgattcttctacacttgcatggagtgtcctgcccagtatccctggattcgcaacgagttcggcttggactaaggtgatagcccgcttgacactatagggctctgcgcaaggcgctttgatatatccataatgtttggagcgttccataagtaattggataagattgatacaattttaggttttaattgtttagaaaaattaatatttataaattggattacgcatatttagatgattcagctttcaaaatctgaccgtaagcaaacccgtagataacttcgtaacatacctgaagaggataaagtgcattaatttaaaatcggaacactctgaattttatggagaagcttaaacaatttcgcgggctcataaacgtggtactttgcggcctgattagattttaagaactaatttatacgtatgtatgtctccgctaaatatatttaaaccgatttccaaaagagctttgtacttagtctacattctggaacgcatcccagccacaaaaccttggactattgcgttataaacggattggcgatgctctcgactccgtcttgcggacaaatgaggacgagggctgtgccgcgacagacgaccagtcccaggctgcgggtctgctcctcggtcagtttgtagggctcatccgagtcgcgcagatactccaccgtgttgtccagcaccagattgagcagcgcatcgtagcccttgaggattccggatgcctcgcggccgcccgcgaatttcacgcggatctgtttctccaagtacttggagaggtccagaatggactccttgcggcgcttctccttaccgtcattgttgccacccacctgacaagtcacgattttgatgattaagcaccacaatgtagttattctatttaatttacctttttatctgccattattctgtttttggtaaatgccggctggtaaagagtgaccaaagcatatttttttagaaatacaccaaataaggcgctactagccagcagatggcgctggtgaagtaatcttatgggccgcgctttttgaggtacataatcgataataatggaataaacatatgtaagaattaatgttatttgaaaaatatgacaacaaagttctcttatttctactgtcatcattgtgaaattattttcttaccttttgctattgaggcgaacatatcaatttatttgtataataattattatattggtttaagatatcgataagattcatttatttgtatcgatatgctggtcactctgactggctctccattttgttttccacgacagagcaatttttagtacaacagattgttatcttctaccaattaccggatcgattttgtacatttaagtgttttaaagccaccttaggatcatgggacgcaagaagaagaaggcctccaaaccctggtgctggtatccttttcgcaaaacaaagatataaatattttttcactgcatgtgccgctcgctgtatctgcacatacacacacatttatataatggtattgggttgggggtagatacacacacacatgtatatgcatactggctacaacgccgcatccccgtgaattttccttaactcttaacgcaaaaaactaggtactgcaaccgtgagttcgatgacgaaaagatccttgtgcagcaccagaaggccaagcacttcaaatgccacatctgccacaagaagttgtacaccggacccggactatccatacactgcatgcaggtgcacaaggaaacggtggacaaggtccccaactcgctgcccaatcgctcaaatattgaagtcgaaatctttggcatggacggcattcccgccgaggatctcagggatcacgaacgtcagaagaatggtggcaagtctgattcggacgatgatgaaccggtggccaaaaagaaagtagaatgtaagtg

SEQ ID NO: 30698 - DNA, 653 bp, DROSOPHILA
ccaaaaacagaataatggcagataaaaaggtgggtggcaacaatgacggtaaggagaagcgccgcaaggagtccattctggacctctccaagtacttggagaaacagatccgcgtgaaattcgcgggcggccgcgaggcatccggaatcctcaagggctacgatgcgctgctcaatctggtgctggacaacacggtggagtatctgcgcgactcggatgagccctacaaactgaccgaggagcagacccgcagcctgggactggtcgtctgtcgcggcacagccctcgtcctcatttgtccgcaagacggagtcgagagcatcgccaatccgtttataacgcaatagtccaaggttttgtggctgggatgcgttccagaatgtagactaagtacaaagctcttttggaaatcggtttaaatatatttagcggagacatacatacgtataaattagttcttaaaatctaatcaggccgcaaagtaccacgtttatgagcccgcgaaattgtttaagcttctccataaaattcagagtgttccgattttaaattaatgcactttatcctcttcaggtatgttacgaagttatctacgggtttgcttacggtcagattttgaaagctgaatcatctaaatatgcgtaatccaattt

SEQ ID NO: 30699 - protein, 110 aa, DROSOPHILA
MADKKVGGNNDGKEKRRKESILDLSKYLEKQIRVKFAGGREASGILKGYDALLNLVLDNTVEYLRDSDEPYKLTEEQTRSLGLVVCRGTALVLICPQDGVESIANPFITQ

SEQ ID NO: 30700 - DNA, 3764 bp, DROSOPHILA
tgcagcatcacttcttccacccagatccaatggccggtaacttcagcatcaatggcattgagtttcaatgggatgatggcctatacggactggctctatcgaagcccctggaaacgggctatgccacattgtacttccatcccctctgctccactacggaattctcggtggatacatcgatattgcgtaacaagaccctggccacttcgccgatgatttatcgagaattcaaggtgctgggctccagaggaccgaacacccaggctggagccgagttcttggatccggataccggagtcctattctacgccctgcccaatctgaacgaagtcgcctgctggcgcactgccacagactttagtcacagttcccagagccgcatccacatgaacaatgataccttggtgttccccagtgacatcaaggttgatgatcagaaacgtctatgggtcctatccaatcagctacccgtcttcatctacgatgaactgtacgccggctcaataaacttccgtatcctgactgccagtgttaaggaggccattgagaatacagcctgtgaaattagaacttcccctctgccagatgtaatcaacaaactgggggatattctcaatactaacatcaaactgaagtccaattcggcttcttcccttaggaacctcagctcccttatgctgattgccttatgtttgctgatgagctttagaatctagattcccgcagcggtacaaaagtatcttgcgcacttgcgaacgaaaatgttttatgtttttcaagaacagagaacttgaaaaatttctgtaattttagcattttcactgatttcttaaacgtacgaaatatttttatttgagtgcaattgtaatctgttaagatgtaggcttagaaaacttaaacgttgtacgtgaagttgattaaatgtaagaagtgtatttgaatagttttctttatatgtacttcccacttattgcaaatccaagccagcttggttattgactcaatatttgggttgcttttccttctttttataggcaatttctacatcgatggtctcatcgctggtttgtgattgaccatcctcggagtttgcctctaactttgcctgctccttctgctgcatcctcttaatgaatccgccacagaaaaagagcatcatctgaaaggatgtcaaataccttgttactctgccagtttgaatgtggacttggtcttacatgctccagtattccaatcaatcccaggacagacaagcccagtagaaaaccaagagaaccacccacatcggctatgaattgtgtggtgtcatagctgggacgctcttcaatcatctgaaaatgttaacgggctcagtgaaagatcgatgcatcataacattattaacctaccgatatcagttttgttgtatagtatatgtagatttgggtgcgtggctctggttgattaaaggcctttctgttctgaatgaaagttgtgtatattctcgattggcagggctgaacacagtcacagtcaaagtcatcctcattttcatagacactgaaagagaaaatagaaaatacatacttacatacataataaaacactaatgcttctgtcttactctttataatccgatatcagtttcctcatggaaagggagtcattgcagggctcacttgcaatctcatgcatccaaggacccgaacactgcatattatcggctaaatcctgccagatgcattgttcaccacactgaaatggttgcaaatactgaattaaggacacatagtgcggttgcacctacctttaagtcactgtagttctcatcatcggaacacgcctcttcacgcgtctgaacattggaaaagtattgggtttgaagcttgatctctatttcctcattgacaccaacaaaaacatactccactcgaccagatcccttcatattgatttcttggcaggaatataaattaaagcttacccccctatgacttttgtatgataatctcacctgtaaaattctctttcttatcgtgtataaagacatgccacccaacactgcctgtgtccacatcgctgacggatgtggtcaacatagaatgttctagcattatggagtaaccaacagcctttgatactctcttcgcggattccttgggtctaagggtgtagcagcgacccatataaaagtgtagactgctgttcatgaccacatctaaattcggcatatatattgcatcatgcatttaatatacccttaattaattcgacttactgtttttgtcctcgtttagtccgtaaaatacaaaagtgtctcccgaatcatgtgtgctattttcaaagaactcatccagggatatttctccaaatggatatttcatccagcaggttgcatattttggatgtggacacgcaccgccggaaaggcgctttaaaaatacgagtgtattaaatttattgcatttacttataccgaatagaggtgcttgtagaaatatctctaaatggattgcaaaatatcttctagttttctttcctattcactaaccgttagcacctcctccttatagggcggttcccgacatatggtcaccgagggcatttcgatggtttcgtttaggctgtagtaggagtgagtggatatgggtggattgtacagcttggcgaagcactcgtacaactggacaatgaccacaatgcagcaggcgaagagaaccaggtagcgtatgagcttagctggatcacgaaagagccaggcccgcgtctccgaccagtaacccatggcgtgtggaaagtgaaactcgagtgagctcaatggatatggggtgccagtttctgtcatggctgagggccaatatctttgggttcgcagcatgcttgaattctcacagttggtcaagataagcctaatattgatttacgtgccgtggtggcgataaagcgccatcaacccggccatccatggtgactatacaccgggacatgtgctgtattcgttgtttgcaaaactccgtagtaccatggctctgagcgtaacattaccaaaacatgttgtttataattgtctacgcctagtgcagatagctatgccgccatatctactgaacccgtagctgcagcaaaaatcaccgctgagtaacgaatttatggttttatatctgtttgctcctcgtccaatcgccgcgtgtgcagaggcagtcttgacgcttccttatggggtcccgctgtaaggacttgctaatgctcttctgtatgtcagtttatagtttcgactaaaaaaataattaataaatttcaacaaaaaacaagcatatcttaagatattatcaaattaaagttcttattctataaaggagttattgttatggttattgacagttcatttttttttaagaaaatagaacaacaaaaatggtatctgcaattattatgcctacatattatctaaaaacattttgtattccatctgaaacccttatataaagacgcattcgcgataccttagcctatcatcaaagcaaacacctcgcacgggcatagcttgaccttatagacaggcagctaaatctaaatctatgcaaacacctagccattagcgaggcatgtacatacatacatatatatgaaactatatagacagatcgggatatatagccgaagctttcgggcgaaaacaaacaatgcgtggtggtgatccagccagatcgaggagaagacattcctcagttgtgacgttaaatcagagcagcagaaacatcgccccaaaacgacccactgctatt

SEQ ID NO: 30701 - DNA, 1296 bp, DROSOPHILA
atgggttactggtcggagacgcgggcctggctctttcgtgatccagctaagctcatacgctacctggttctcttcgcctgctgcattgtggtcattgtccagttgtacgagtgcttcgccaagctgtacaatccacccatatccactcactcctactacagcctaaacgaaaccatcgaaatgccctcggtgaccatatgtcgggaaccgccctataaggaggaggtgctaacgcgcctttccggcggtgcgtgtccacatccaaaatatgcaacctgctggatgaaatatccatttggagaaatatccctggatgagttctttgaaaatagcacacatgattcgggagacacttttgtattttacggactaaacgaggacaaaaacaatgtggtcatgaacagcagtctacacttttatatgggtcgctgctacacccttagacccaaggaatccgcgaagagagtatcaaaggctgttggttactccataatgctagaacattctatgttgaccacatccgtcagcgatgtggacacaggcagtgttgggtggcatgtctttatacacgataagaaagagaattttacagaaatcaatatgaagggatctggtcgagtggagtatgtttttgttggtgtcaatgaggaaatagagatcaagcttcaaacccaatacttttccaatgttcagacgcgtgaagaggcgtgttccgatgatgagaactacagtgacttaaagtgtggtgaacaatgcatctggcaggatttagccgataatatgcagtgttcgggtccttggatgcatgagattgcaagtgagccctgcaatgactccctttccatgaggaaactgatatcggattataaagatgtctatgaaaatgaggatgactttgactgtgactgtgttcagccctgccaatcgagaatatacacaactttcattcagaacagaaaggcctttaatcaaccagagccacgcacccaaatctacatatactatacaacaaaactgatatcgatgattgaagagcgtcccagctatgacaccacacaattcatagccgatgtgggtggttctcttggttttctactgggcttgtctgtcctgggattgattggaatactggagcatatgatgctctttttctgtggcggattcattaagaggatgcagcagaaggagcaggcaaagttagaggcaaactccgaggatggtcaatcacaaaccagcgatgagaccatcgatgtagaaattgcctataaaaagaaggaaaagcaacccaaatattga

SEQ ID NO: 30702 - protein, 431 aa, DROSOPHILA
MGYWSETRAWLFRDPAKLIRYLVLFACCIVVIVQLYECFAKLYNPPISTHSYYSLNETIEMPSVTICREPPYKEEVLTRLSGGACPHPKYATCWMKYPFGEISLDEFFENSTHDSGDTFVFYGLNEDKNNVVMNSSLHFYMGRCYTLRPKESAKRVSKAVGYSIMLEHSMLTTSVSDVDTGSVGWHVFIHDKKENFTEINMKGSGRVEYVFVGVNEEIEIKLQTQYFSNVQTREEACSDDENYSDLKCGEQCIWQDLADNMQCSGPWMHEIASEPCNDSLSMRKLISDYKDVYENEDDFDCDCVQPCQSRIYTTFIQNRKAFNQPEPRTQIYIYYTTKLISMIEERPSYDTTQFIADVGGSLGFLLGLSVLGLIGILEHMMLFFCGGFIKRMQQKEQAKLEANSEDGQSQTSDETIDVEIAYKKKEKQPKY

SEQ ID NO: 30703 - DNA, 3843 bp, DROSOPHILA
acaaaacgtgttcagggagtgctagtcgtactcgttatcgttctatcccgtgcagtcgatccaacatggcgacttgtcccatccccggcatgtttaaatatactaattattcttgaactaattttaatcaaccgatttatctctcttccgcagccccgtgcgacgtccgttaggccacaattcgacggattggccttcccaccaagattcgaccttgctcctgaaaacgaattctaaatgccatttcattttttaatttattttaaatgatatttcataatgattatgtttatgattttaatttaatttcttaatttaaaaacaaaataataaaactataacaaaataaatatcgaaaacgacgggaggcaaaccaccaacaacgccagatgcacttaggcaaaaaaataaaatcatataacaacaatcgatcaccatcgattagcatacataatacataagtgatcagtaacaggctattgtgtaagcgcgacatttgccatggggacactgctcgctggacctgtatttgtatttgtatttatatatttttatacaactttcgaaatgcattcaaccaactaactatgaaagaaccatcgactctcaaccgaacaacatgagaataatcgcgaaacgtgagccccgtcaaaatgaaggccccgcggaggtgtccgccggtaaatgtcgcccgcagttcgaatattttgctctatatgtactcccaatattgtttgtcatgcagaccagacaagacttacggacgacacgagctacacactgcgcttatgtttatgtttaactctgactctatctaacaatgatagggagataagatcatcacttgacactaaatgaaaagtatacaaaaaaggaacaaaataaatgtaaatcaatttaacaaatgtgtattattttccgtgatcaaatcattcgactgggacatattcattcatatttactggccatacgtgttaagaaattgtcacaggtcttttgtaaactaataagatgttgtggatatatttatttacttttacttaagccccatacaaattaagtcctactttcccgccccaggagccctgggattgggctcgatgcgcaatagttgcttgtgctggccaatcatgtgctcgatgtggttgcactcgcggagatgacccttgaactcatcgagagtctggtaaagcaccggatagagggcgggcaggaggccatgatccagggtcgggaagagatggtggagcacatggtcaccaaagtgggtgagcaccaggaactgcgaccacttgagatcaccgcggtcgataatcgtgtccacctggaagagaccccagtcacgatcctcacgattggcatcaccctcgtgatagatttccggatcgtgatgcgccgcattcagaccaatcaagcagaagctaaagctggctatcgacgtcatcgcgagccactggcgcacgcagatccaaatgcctaaagatcccccggttcccaggtatatggcaatgggtatagtcagtggcagtaggtcgtgccagtagaggatgttggtgtggcgcagcgaatagaaaatactgcaatatcaatcaatcaaaagatcactgattagactttgtttacgatcaccgcctcgatcacacactcaccgagtgcccatttgtatgaagaaggcgagggcataggccaccggctccgtgacccaggacacataacgcatcaacttgctcttgatgtgcggattgggcacccagcacagcaagggttcgaacatcgagagttccagatcgaaatacgaattcggatagatgtggtgggacagagcatgggacacacgccaggcggcaaagttcatcatgcccagattaaaggcgtacatctgccagttgtcccgacgatgaaagtagttgtgggacacgatcaccgtccagcagagggccacactcgccaagaccaaagccaaaaggctgttgtatttggcactggcaatgcccaacaggtagagcgacacaacgagacccaggtgaatgagctaaaagaaatgtatattaatatattataaatataatgataaattttaaagttatcatattaattagggtttcagcgtgcaaataattaaataatataatcacacaggccgccgaatacaagtgggggcataatattagggctgcgacacgtgaaatgtaagattagatgtttttagttagtaataaatttatttatgagccggcaggttcaacttcctatcaataagtaactgataagaattacttaactgatatgaaatgaaatctaaggcacgcccattttcaataaggtatttttttttgcagattaacactcacatcactcttctttttcggccgcttgtctatggtctttagttgctcgcggactcgctcctttagcgtcttgtagaatccgccctcctccaaggtcagtgtgtagattctgggttcagccgcatccctcaccttgtatttggcgatcatcttttcgggagccgtggtcagatgatgtgcctcaaaggcttcggtgatgtcggtgcccttggtctcacgaatccagaagggaccgccaggatgcttgtcaatgaacgaggtgaagtcatagatgccatcgttgatgcgccacagtccttcggctccatcgtcctgccgtttacccttttgccagctgtgtgtggtgattagggccgaatttcggtatgttggaaacttggtggcaatgccactctttttccactcctcgattaccatattgccgagtccttttgatccttgacgtctgtggcacaaactttaccgatccgagcacctttccgctgggattccaacgactaactgaaaggcaccggcagtggtccgtttattttatgtgtagcgcaaatctcttttgattatataaaccgaaaatcgagatttccaaacaaaacgtttccattttgataaggcgccggtgttatcaggagagcagcgcagctgccgccttttaactattacgtctatttaattctcacatatttttagcagtatgttctaatcgctaattcatttggtgaaatctcaagcagtgggcatgtctaagcaccacatgggcggttcgagcagacttcggcgacaataggtcagtgcggtggccataacaatgttatggtatcgcggcagtttgaggcttcgcttggctggcgtgggtctagccgaaagcaatcagcttttgagattgttgggggtagtcttatctctaagagctccaataaaataaaataatttgataggaataaattcagcgatttactagggtttattagcatggctacacgttgagttcacttttcttttgcttggtaagcataggtaatccttgtacaacttacttaatatgaagctaaggatataagtataagtataagtaagtaatataagtgtaagtatttatacttatacttttcttttaaacaaagttctgacttatgggaaaataatgcaatgcacacactactctagatcgcaatgctggcgcccttcaatgtaagtatgctttgaatctcatttacatactgttactttttcctgataagaagtgagagccactgagaggaaagctttcaatcggcgatactctcagagctttactaattgatcgagcgagtgcgatacgaaaacaaaagccgagcgccgctccaataaaagttcagttggcgctacgtaaacaaactttgcggttagtctgcatctggggtgtccagaacgaccggttctttcgttaggcactaagatgaacttgggaatcaaacggctagttatcagcaacgattaagcactagcgttcaaggta

SEQ ID NO: 30704 - DNA, 1452 bp, DROSOPHILA
gttggaatcccagcggaaaggtgctcggatcggtaaagtttgtgccacagacgtcaaggatcaaaaggactcggcaatatggtaatcgaggagtggaaaaagagtggcattgccaccaagtttccaacataccgaaattcggccctaatcaccacacacagctggcaaaagggtaaacggcaggacgatggagccgaaggactgtggcgcatcaacgatggcatctatgacttcacctcgttcattgacaagcatcctggcggtcccttctggattcgtgagaccaagggcaccgacatcaccgaagcctttgaggcacatcatctgaccacggctcccgaaaagatgatcgccaaatacaaggtgagggatgcggctgaacccagaatctacacactgaccttggaggagggcggattctacaagacgctaaaggagcgagtccgcgagcaactaaagaccatagacaagcggccgaaaaagaagagtgatctcattcacctgggtctcgttgtgtcgctctacctgttgggcattgccagtgccaaatacaacagccttttggctttggtcttggcgagtgtggccctctgctggacggtgatcgtgtcccacaactactttcatcgtcgggacaactggcagatgtacgcctttaatctgggcatgatgaactttgccgcctggcgtgtgtcccatgctctgtcccaccacatctatccgaattcgtatttcgatctggaactctcgatgttcgaacccttgctgtgctgggtgcccaatccgcacatcaagagcaagttgatgcgttatgtgtcctgggtcacggagccggtggcctatgccctcgccttcttcatacaaatgggcactcgtattttctattcgctgcgccacaccaacatcctctactggcacgacctactgccactgactatacccattgccatatacctgggaaccgggggatctttaggcatttggatctgcgtgcgccagtggctcgcgatgacgtcgatagccagctttagcttctgcttgattggtctgaatgcggcgcatcacgatccggaaatctatcacgagggtgatgccaatcgtgaggatcgtgactggggtctcttccaggtggacacgattatcgaccgcggtgatctcaagtggtcgcagttcctggtgctcacccactttggtgaccatgtgctccaccatctcttcccgaccctggatcatggcctcctgcccgccctctatccggtgctttaccagactctcgatgagttcaagggtcatctccgcgagtgcaaccacatcgagcacatgattggccagcacaagcaactattgcgcatcgagcccaatcccagggctcctggggcgggaaagtaggacttaatttgtatggggcttaagtaaaagtaaataaatatatccacaacatcttattagttt

SEQ ID NO: 30705 - protein, 436 aa, DROSOPHILA
MVIEEWKKSGIATKFPTYRNSALITTHSWQKGKRQDDGAEGLWRINDGIYDFTSFIDKHPGGPFWIRETKGTDITEAFEAHHLTTAPEKMIAKYKVRDAAEPRIYTLTLEEGGFYKTLKERVREQLKTIDKRPKKKSDLIHLGLVVSLYLLGIASAKYNSLLALVLASVALCWTVIVSHNYFHRRDNWQMYAFNLGMMNFAAWRVSHALSHHIYPNSYFDLELSMFEPLLCWVPNPHIKSKLMRYVSWVTEPVAYALAFFIQMGTRIFYSLRHTNILYWHDLLPLTIPIAIYLGTGGSLGIWICVRQWLAMTSIASFSFCLIGLNAAHHDPEIYHEGDANREDRDWGLFQVDTIIDRGDLKWSQFLVLTHFGDHVLHHLFPTLDHGLLPALYPVLYQTLDEFKGHLRECNHIEHMIGQHKQLLRIEPNPRAPGAGK

SEQ ID NO: 30706 - DNA, 20892 bp, DROSOPHILA
tatggcctgcagctgccattggccaccctggatgtggatgaattcaaggcagccattaaggaggtcatcgaaaatcccaagtacgcaaagacattgaagagcttctcacagctctatcgcgatcgtcctttgagtcctcaagaatcggtcgtctactggacggagtatgtgatccgtcatcatggtgccgctcacatgcagagtcccttggtgcacatgaatttcattgccagcaataatttggacatatatatcatcgccgccctggtgctctacattgtcttcatcatcaacaagatcgtgtggaaatttgtgtggcgcaagttatttggcaaatcgaacaaagtttccaagggaaagaaggtgaagaagcagtaggttggaaatatagaaattttaactaatttatacttaaaagattaaaaaaaaaaaaatagtaaaaccacaaaaatgtcttaagttatttgttaaatagctgagttaagcactccttctgtgcacgaaattcggttatcaataaccagctcataatcaccattaactgcctatcttatccgtaaactattcttatcaccgttaaaccagttaagtacaagcaacgtcattgaattgaattatatcaaattgtagtgttgtagaaacagtggcaacaaattacagttgtttgttgtctagtgtgacaaaatctcactgaaaacgattagatatgaaactatgtttgataacaatttcaaattccaaattcaccacagcctaccacaatttttggtaaagctgtttaagcagtggtgaatttgatcactactttatagcctagacacgaaccacttaaaagccatatttcactctttagacgcagagcgattcgttacaacgcaaagttatcaacttaattaaaatttatttttgctcgttgagcattgtcgatttctttaaaaacatcataatccgatcatgaaattagtgttatgacacaccctaaatttcaatgccgcatcaatcaatgatgtttgacctggtctttcacctcctgccgattgatatccaaacttcttccacccatgctgatatcctccaccacccggcacgtctcgctggccagctcctcgggatccttgactatatcctgaacattctcgatctgcttttgcagatctgaaacctcgttgcgattggcgaattcaccgactcccagttcggcgtgaatggtgtccatcagattggccagcagcagactctcgttgtgactgaagtcatcgctctccgtgctgcccttcagaatacagttccgcacttcctccgcctcgtagcacatgcccagtcgattgtggtagtgggtgggtggcaattgatcgccacccggcagcgggaactcgtagtccacctcctcggtgatcagacgcgttggacaccagtaattgttcatcttaaagaaaaaatatacataatacacgattgtaaactctatgcaaaacccaccttaatggacccatccttgccttgaataacagcctggttgctcagcttcttttcggaactgacctcgatgagggctctctttccgcgcgtgaaacacagttcaatgtcggcggacacgtccacatgctccgagttgaccctgccactgaccttgaggcagcgtggtacttctcgaaacacccacaatgccagctgcataccgtagacaccaaaatcgttggtaactccgccgtaaagtcctagtctcctgcaagtttgctgatgcagtgtgtgctaaatgtgtcatctacgtttaaaatcttacccctgtgaaacgggcaagcccaaagtgcaatggacttgctttatctctcccaaacggtttcgcagtatctgatgccgcaggtaatgataggcgggcacgcatcttggccacattccctccatgaggaacaggccgcgcgcccgcgccttctccagcagcttggtcacctgctcctccgtcatgcagagcggcttttcgcacagaacgtgcttgtcgtggttcaacatcaggtggcacagctccgagtgttgtggattcaggggagagatgtacactacatctgcgctcgaataaagttatcagtaggtagatgcttcacagaatgtaatagaatgtaataaactcaccgacatttggacacttggccagatcctcgaagctggtgtacacgttctccacctgatggcgctcggcgaaggcgagcgcatgcgactgataggcagccacgcaggacacgatgcgatggtgctgctcgggcaggacactcagcgccgcggcaaagtcatccgccatcaggctgacgggtgcgatgccccagcgcagcgttggaccctcgtccaccacccagacgcccctttcgaggatccccttcgaggcggccttggaggagggaaaccgattgatgtgcagctggcgtggtcggtgtcgccacatattgtggtcaccaatatcgcagccaacgaatctgaatctgccccggctgccatccgacttgcctgatgaacttgtgccatgacctgtgggcaggtgatctgcggagcggttagtaggaggtattactcacttcgaccagagaaaactgcacttagagaaaatatgttagcaaagtgttaacaattgtttaaagtcacttttgaaggatcccaaattaagatttaatattggttttaaaaaactacttaagtcagtagctattcattttgttgaatatttctatttatattgtattaagttagtatcatatttttcaagtgtacaactgctggtgacgatcggtatctactttgtcgcgtaaaacgcatttcattcatacaatcgagcgcttttccacgaattggcgaaattgcgggtgttggttttggccgccggcaaccggtccgaactgcgctccatccgtggacatggaccgtggaccatctacgtcgaaaccgagacgacgggcgcattatgtggcgctgtttagtgcgtcagttcctccataattagtcatatttgtttagcatcacaacttgtgaatgactcgctgccgctggttgcagctcagtcaggtttttaagccgcttgtttttatgtttgttgtgttgcttttcttttacattttgttggtgtcgatattgttgttttttgttgttgctgttgttgtcgtattggcctggtcctggccaagttggccaagttgggagctgcctgggccgcgcactttgcgcttcgttctgtccgcattcgaatttcactttcttttttagaaactaaacatcggactgcttgtgtatttatcaccgcactgccagtcgaatgagtcgctgcactttgataaatacattgataaataatttaaaaaaaacgcatctaacctaatcaaaattcgattaattaccagcttaacaagtacttaagatgatatttaagatactatttaaattcaaagtgcattacaaatgtagtaaacatatatttgccttgcatatttcttctattcttgtgtatgatagagcatataaaattcggttttttccacagctcaacctgccacctttcgcggcttatttcacttttcaataactcgagtgcgtgcaacaatgtacggcagcgagtgtccgcttctgtgtgcgagtgtcgatggtgcgtcgcaacaaaaagcaaaaatttgtttatctaattagcaatgcgccgggcgacgtcttttcggggcggcagtgcttttcacctaattttgcatgcatggcaggcggtgcaagtggcaagtcgatggccgtagaaattgccctaaccccaaatgcaaagcgataaaaatatgtgcgagccgcgtcttcgtttggccagtgaacgaaagtgttctatgggtgtgcagacgctccaaaaaaaaaggaaaaaaaaaaactgctgaaaaccaaccaaagtccaaaatgagaagaaaacacaaaccaactctcgccccgtgccggaaatgtctttgtataagtcattgcaagtgcgagtgtgtgtgtgtgggtgaaattatgtgccagtgaaaggttgcctaatttctgtcattaagctacacgggcacgagcaggacatagaaatgcactcaaaaacattgagacaacattagatcgatcagaaaaatatatatataagttatcttgattatgttaaagaattttattggaagtttttaaaataagccttaataaaggatgaatttatgtacgaaagaaaataatcctaaccgcatccaaatttatttatatttaatttatttattaattaacttcctcgaaatgtttgttgtaaccaagagccactaaactcctggaaaatatgtttaacattgattgcattcctttgcatattgtttatagtgtagcaggaagtgatgggcggggggtggaggggtacgcgacaagagctgacagccggagcacacaaatttgccatgcgtgtgtgttttgatgactctttcccgagagcgacgacacggcggagacgacatgttcattaaagccgtagcagcgtcatcttggccgccatcagttgccggttcctctggtgcaccgacaaagcaaataaatactaaaatttgcatgcctgcaacataaatcgtcgcaaaatattaaacaagtcagcagcaacagttgaaatcaataaatttattgatacaatttacacggccgagtgggctgccagatagctggccacatgcaacattggccgcatgcaacaacacatgcgctaattaagggggttcccacttgctggcgggggtgtcttggcaaatgctgcacttgagatggcaagatggccttgcaagtggccactgaacaagttaacgagcctggccaaatgaccaactgactgaggaaatccaattggtgatttcaaggcgggagaaaaggaggaaaacaaattaccgtggggggatttagtgagttacattacagtgatttgcgatgatttggtccttactctgactcgatttcgcatcggagaaaaacaaccgtaataaattaaaagtcatttgactttaattgttaactaatttcgattgcatttagtaatgtgaaattaattaagttggtttttcattcctgaaaatgggccaaaagcgttgaatttacttagttcttgtcaaagttttcagcaaaaagaaaacaagggaaaaaagaaagtggaatgatttgcaaacatttaatgttctgtgacgacaggtatttaggagtgtggctagatatttgcgtgttgtgccattctaagtttcgaaagtcatgcgtcaagttcgttgccagagtctttcgatttgccttacgctttttgtgcgatgtttttgcaacactgcgcctattgacaccttcaacatgtcgaaagaaaagggggacaaagggaggctctgtggccagaaaacagcataatctttccgcagccgttgccattgctttttttattttattttatttctttatcatactgacgagtttcgtatgcatgtctgtcggcttactctaatcttcccctcaactacgcacacgcccagcagcaacagcaacgccaattgacagccagtcatgtcatgactattgccaattgtttttgctgcccaaagcttttaacatattttacgacccgattgccagtagaaatttattttggatgtttgctttttatgcaacaagtggcagcgaaagtgtaagttttagggtatagaactaaaatgatatattcctttggattttagaaggaacctacttcgatgttggcaatagaattttatttagtcttttttaaaatcgaaatttctgcaaatatcgaaagataataaaatcaaacctaatcagaattcttggctagcagcggtaacatgttgcaggtagtgaaaagtgagtctgcctttgggcaacgactacaaacaggcagcaacaaaagcgaaaagacgacaactttggtgacgaagtcgacggcgctgccaactgcgctggcgacgcgtgtctttatggattcgctttggccaaaagcgttggtcaaaagcgttgcgacggcggcaacaccacgaagacaagtgcaggctctttgcttttcagctggttcgatgtacctgaaaatctcagccgaagccgaagtcgagttgctgcctgcgtcgacgacgctgccgcttttaacagtttcgaattttagttttggccaagaccacgcgaaatcagttaacaaacggacgcgtttcgaaacggatgcactggttggtggcactggcaaagcgaagcgaaacctgaagcgcctgaacctctggctcctccataaagatcccaggttttgtcccaaaacccgaggccgtgcgaatgtctgtcggtttcggcggcagaagctcgaagagctgctatcttcatcggtcgcgctggtcgcttaaaagtgaaatttactgaatgaaatgaaatgtcttctggccagcctcactgtctggccgattggctttgtgtttgattattgatttgtgactattgtcggcaaggaagcgactgcaaattagattgccgttccaaaaggattaagaaataacctactacgagtacaaattataaaagacttgactcgcggaaccgctaaaatatttgttcctgtgccagtgacattgtcgattggccagtcgattggccgggaaaaaggtgatgtaagatcctgcatagattgtgtaagcttgtgaaagtgaaagaacaaaagatgtggacgattattttgaacaaatttaataatatatagaactagaaaaactaatggaaatcttaactttcaaaggagaaaaaatgtttttttcagatacgtatgtatctaatggctaatgaatatttatatgacatacatgccactttgctcgatcgtttgtttaaatcgcctaacatcttataatcctacgtgtgatttgaagaaaccatgtacgactatttattgcaattgagttaagcttgagtttagtcttgataatacttgagtactcactgaacacagatctatgaggcttaaagttactttacattcgatgagaactttactttccaaacaaaaaacaaacacttagctaacgatacttttcccataaggttccaagactccttcagatataaaatttccccaaaattactgctcgtaataaatcaaagtacggcctatttgtagccttttagaatctctgaagtaacattttactaaaaagacttggtcacgatacattgtcgatggacattttcccgcattttccatccatcaactctcggttttcaatggtataatccgtgagtgcggatgttgcacataaaatccacctttcttcgccagcgaaatcgagtgctttgtctcttttacgatcttgcatctttgcgcaaagaattaagacgctgaatggcgttaaagccggcgcttatgccaacgaaaggcagacaaacaaacggacatcactcatacgccgtgtgtacagaataaaagaggcgatgcaaggcaaggagagaaagggcgcacatacacttgattttccaggcactcccgggccactcggcgcatttatctttcacttaaagtgaagatgacattctttaaatgaaattaactgccggcaacaaaaagcctgaagctgcaactgcaactggcgctgctgttgtgctgatgcatttgtagatgttgctgctgctgctgctgctgctaatgttgctgctgtggcagttgcttctgttggcagttggcagctgctttggctgcaattagtatttgtctttggctaatacgctgccatgttggtatgcatctcagtgcgccagtttcttgttgctcgtgttgctgctactactgctgcaggttgcaggttgctgcgttgctgctgctgctgctgctgctgctgctgctggcataaaaactgtcgcgcacttgaatgggtatttggtctcggcttcggttgtttgtctatttattggtctgtttgcttgctcatcggctttttatagctggctttttttttacacacattggcttagccgtccacttaacagctgtcgctttgagtgcatctctcactccatctccatgtctcagtgatttttttcctaatcccagtgccacacagcgccttatggatttgacggagcctttgggtttgattttgtgggcagcttttgagtgcctgagtgaccacttttatgatacaccgatcgctagtgcttggaatgcatttatgttcggggaccatgcagttttgacatggcgtgggttgctcaatcaaaggggtcgagatcctgcgaattactggaaagttgcggaataatcggactagttttactacagcaggtggcgacattgctccttagccaattgataagaaatattgtagtacaatttagcatgaaaaaactactttttaactttatggtggagcttttggttgtagcttttttatatgtgaagtcataaaaagcgacttatatttttataaagcatttaaaattaatagtataataataaataactgatcggaccagacaaattaacttgttttaataaaaaagtaatcctattttttaattgaagctatagatcttttatatcattccaaccggtactcgtaaactcgtctgtctgtacgttattctataaaatgtttttattttactacaatattattattgacatttcctcgcactcgcccttagttgagtaacgagtttctatcaaattgatatcattattgttctttcttgattttttttaaattaagttccttttaaatgttaaatattatattttggtaaaaataacataaacaattcacttaaattccatttaattagcatatgcgacaatcgcctaatcattagccgcaccactcacttagcaatcgacacatttctcttgtcatgttaagctaataaagttaaataacacggaaattatgcgtaattaaacgcattatgcaaaaccgatgtaagataataaaaacaattaaataactcacacgaaacgagagtgtcaaaacaagttaggcctaccgcataaaaatgcgattgctttaatgaaggaagcgggggaaaattgagggaaattaggagcgatacttggaaaatgtatggtcaaaaagttggccgggataaattattatcaattgcaagtccatcatcacccccccttccacttttcttagccgtcggcgagttttatttgattttaattgctgccatagcaagatgtttgccatttaatggctttatttatgcgtgtagtaatcaagttaatttttacgattgccgccgagcgcgatgcaccagcaacaacaacaacaacaaccgtagcagcatgcaggcaacaacaagaaacccgtagagctgctgcgaaatatatgcaaattttcttttatgatcaaaaagcacaagtttcactttcgatgggaacgaatcgcccggcaagcgcaagccgcagagaaatattcacaaaaccgaaaaaagagacaaagatgacatgcaacttggggagggagatgatgataagaagcccttaggacatatattttcgagaggaaatgcagaagaaagaaagccaaaaaaagcaaaaccgccgcccacccaggtcgtatacatcatctgaccgctggtattcagtacccggtctcctgggagtcttcgctttaatcacgttgtccgtttgccctctgccgcaaaatgccataaattatgaattaatcgtatcaatcttggagaagcctcttttatcagaccgatgcattgctgcgttcattataaagggtctaatatttaactaagaagttgcataattgcatctcctttgaacgttaagtttgttgcttaagtcttttgttttcccaaaaattacattaaaattgggaataatctctattttcgtattttgtattttccttctaaatatcacacaaactaaatcacttaaaaacaaatcataaaagattttaatttaaatggttgtaatagttcgataagtttgtgtcctaagtcttttgtttcaggactttttactttgctcaaatttggtaatttaaattaaagccttatcgtttaataaatcttctcgtttatttttccctcaatcagccttgttaaaatcagatttgtcaaaacaatttacaatttaataccttttcattaagaaatcgagccaagtgaaaggttaattttctttactctttagtctatattaaactggcattccactttatgctcacaactaaaaggctacctgaatttcataccagctctaaattaactggccaacaatctggataacaacctgttaagtgagtcgaatgcaaccaccgccaaacttcctcattcacgtccgttgttatccaatagttaagaatcaattgcggtggctgaaattgcacagatcaagttcggcgaacacaatcgatgttggctattaaatcatcagcgagtcataaccgaaactgaacaatttaaccaaattccagataagacgagaagcaacagaaaaaaaaacccgagagacaccgatcaacgaaccaagccagccgcaagatgattagtgaacgccacaagagccgcgatttggttacgatacttggcctgttccacctcctgctcctcggattcgcctacggcgaccatgtggtcgaggtcttggctcaatcaacaaccgcatccacatcacagccgcagactttggagacgattggcagccaggatggggctgctctgacgcccggtgcgacaacaggtgagcgaacaacgagcaacgtacaacaaccgcagcgaaatgaaaaatatgaaagatttgcactttgattttgtttcgccaacataattgggtgcctgggtgcggagagcgggcactattttaatggccagcattaggagatcaaacaattttgaacgcaatcatgcgaggcatattaatgcgaatgaaagtgaaaatcgtctggcaacattgtttcgtggtcacaggcaattatgcaaggataaatgggatacagatgcatgtgctcgattggctgggattggagtggctccgcttaagccgagctacacattgtaggcagagcgcgcccacccattatcaatgaaatgcaaaggaagggcgaaacgacgctgtgaataccctacaatattaataggattttatcccaccaatacaaaagtagataaatattattgaattctaagaaatcagcctgttttttaatgtaattaattcattttctgacaaaatcctctcaatgcgacatactttgtcttcatgatgtggacatatattgtcatatttaaattatcagactagcgaatcaattgcctttcatgtaagccaattgcctttcatgtaagtttgaaatgccaattggtacaaggagatcaagatgccagagtggccatttccgcttgtgtcaagtgcatgtcctcacgtcgaggagctgggagcttatagctccgcatgcctttgcaaccgctcaaatggaaagcgatttgtctggttttagctaataatttatcaggcctccgcattcgcagtcgtcgccttcgccgcctctgccatttatttttcctcagcccgttgatcagtcaatcaggcaatggcgagctaaaaccgagccgaaatccaagtcgacccaagtggttccgatgagtctttgtgtctgtctggctgtctgtctgtttgcggtgttgattgcccgtggtcgtggcccccactgatcaacgcctgccggcggaggagccaccaagtgttgtctgccaggtgggcgttgggtatcacagcttatggcggcttcacctctgactttggctttattaagagccacatggcgcgcagataagcggcttgtggctgtggtttcgaattcaaatggaaggctcccatctagcactctgtatgcaggcattaaaatcaatttatgcaaaaattacttgaaagccatttcagttagatagtcgcgagagaagttcgatgagataggatgggattattattattactccttggacctcaccactctagaaggcaccattaaaccacttgcttactaaggaatccaatattatccaataccaattctatcatcgcgatgcatgaaaatgctaacaaaataaattcctctggctcccctcgctatgagcaaccaggatgccatcttggccaagtgacgggacaaaaacatttgttaacactttaacgagtttggccatggccaataactccgggctctacgctgaatctctagcttgaatgcctaccggccaattggggggcaattaaagttgcacttgtaaaagtaaattgatatggtgctcaatcatctacccctgcgtcttctctttcacagctccacgactggacccgaacaacaacaacgagtggcgtcctcttggccacggggatccactgcaaaaggatcccacctacgactacagtccgccggccttggatcgagtacgctactgggcggagaacaacagcactggtcaaagtaatccagaggccaggaaaaaggaactaccaccagaggttcttcgcaataaaacgaaaagtgaggtactgctccttggagtggcaagtgatcgcgttagggtaccccactcccattcgtatccaccagttggtggcttaggccattatcagcagcaccaccagcagcagcaacagcagcagcaccagcaacaagctaaatatgcggccatccggaggagctactatgctcccacccagcaacaacataacccacaaatgccacagcatacacatgcccagcagcacatgccgcctacccatttgatgccaccacccatgatgatgatgaaatcaagtggttcgtccgttcctcccatggaatacaggcacagtatgatggccacgggagcgcccacctcttacatgagcctcaaccatatgagctctccaactaccaaacaagcgatgacttcctcagtgatttaccatcagccaccagcgatgagccaccacacctcattatcttcttcaacgccttggatgaccagtaggccaccatatcgtttatcgtactcagatccccatctgcaggaatccgtgcatacatacagcttttcaaggccccatcaccagcaaacgatgatctactcgcccaactctctcccaggacatcaaaatggatcaaagacgggtcttaggaagccgtggctccatgagctactccaaaaagaggtggtggtaacgtcgaagcccaaggttaagcccacaatgccagccacaaaatatttgatgggaacaaccaagccacatcagccacaaccatctgttggctttggcatgagctccacccgccctccatttacctatgcacccgtgacatttgtgcctggtccacctaccatagccgttccgactgtggccactagaaaagaaccacaaccggaaatctatatcacacccacgccccaaacaagtagctctggttttagacccatgacgatgagcagcactaccaccgtgggaaccactcaatcgaccataactactcctttgtccatttatcagcgagccagcacaaccaccagtaatcgtttactgatcccccagacgagcaatctagcgcagagacccacagtggctcctgctcccagtgaacccaccacagactctcttttctcgcactacaagcaaccaccgaaaccgctactaggacccatgtacctcatcatcgagggtcattcgaaagtgaagacctacggtcaaaatgaattggatccacatagtccgaagatagtgccggttatctccaagagggaaccagtagttaggatagccgatcctaatgagaagaggggaactgtggagtcctatcaggtaaaacatttgcacaccaaaacaacaccaatgacaacgacaaccacgactaataagcccactaccatgaaacctacgacgacaagggcgcctgaaaaaactcctatatatagcaccaccactaaggctccagtagtaagcactagcactacaaccgttgccaccgctacgaaaaccacaacttcaacaaccactaaagtgcccataatcagcaccacccctttaattccaccacaacccactccagaaaagccaagcggtgtaaacgatctgcttagtctactggacaatatgtttgccgatgcccaaaagatgggctcatccactgatttacctttggtagcaagttctactaccagcactgtgctgaggccagttagcaccaagttgttgccgcagcaaccggaacctaggatatccagtaaaggggcgggcatagagagtctccttaaagatgacacccatgaagatgacgaagctggcgaaggtctggggtcaacgatttccactgaaacaccacctcgggcaacacgtcaggtatttgactatgatcaattgcctgagtcacggattaaagacggggtcaccaccagtgatgatattatggaatacaatgatgaagatgaggaggagggcattgaggatgataatgaaacggttactgaaaatgatgaggatgaggaggaggaggaggaggctgaagagccaaacaatttactcaaacgaatcgatcaatttgtggatgatgtggatgatggggaagacgacttggaggatcttatcgagggtctggaggaggacgagatcgacgagaggcgacagcagcattagcccaaaacaagcatttttcttgaactgcgctctataccaaatctatcagaaactttttctcacgcctaatacgttcttgtacataagtcagctttaattgaatctgtatttatttgttgttagttgttaggccctgctggcgtcacaatgtgactgcgttctatacccaatgtaattcgagcaaagagttttcgttgtgtaattaagcattaaattattgaaatttttctacgttttttagttgttaagtgtgaaaataaaaaaaaaaccaaaacgaaatacgatatacgatatacgaaaataaaatacaatagagccatctattggggagatcagtcgattgcgccaccttgtgcgcgacaagcgggacctgcactagagagtctttgtctttctacacaaatattaaaaaaggggtaagttaaaatactgatggataatccaaacatattatctcattgaaaagtatgtctatacccttaatgctcactggaaataattatacattaatgaataacacagtcgtttttcttttctatgaataataataattttgcgtttcaaatgtaccgccaaatttccttccagtaaatatcgatcgttcactgttcgataccgatagccaaagtttatcagacagtgctgacatgttagcggaaaatatgtaagcaaaattcaaattgtttctgagtattcattaatacaatattattacttattactgtctttaggatgaaaactattgacgattgtagctcttactgttttatcatgaaaaaatcgtgaaaaaatcattttcccgctcaactccggacatcactgatgtcgagcctattgctttgtttatttccagttgtattttccaagcgtcagttgagaactcgtcgttgaagcgtgcggtttacggtaaaaagaggccgcttccagtacgtgaaaataagtctgctcttgttgaaagaaacaacaaaaacttgccaattggattaaattgtgtgcaaggtgtgctaaactgagtagacaaataatatattattaactaggtacaaacaatacaaggcacacaaagttcccagagttcaagtaaaaaattaaacgatcagtgtgatatttttttgtgtgtttgtttacgcttcttcggcgatcttcgttctctgtctaactctcgcttttgtttgaagttttcgatggcggagtaatgaacttgagcgaataagaagaagatctgcaagtgcagttgttccaatcggtaatgtgtttctggcacccactgaaaagaaaacaaaaacaacaagtggcaaacacgtgcagtgtgatttggtgactcaaagcccattaaagcggctaaattttatgagaacagcagctaagcagataaaaaacaagatatacctaacaacaaatcgtatatagacgaatacggaggctttatttttgcataccatatagccatcataaattagtgaaactatctccgccttcccttgaattgaatgagcgttgataatgtctatataactaaatgtgtgaatgcgtgtgcatatatttgaccaatggctgtataaccttgatccgggcattgcgtcgcaaactaaaaaaaaaaaaacaaaaaaaaaaacatttccgaaatgtggcggcgtcgtctccatcaaacagaaaaagccaaacagtaaaaaccaaacaaacttctatgccaaaaaaccggtttatgctgaaaacccaaacagagagcacttctgaccggagataaaatgacccagcaaaagagagagcttgtgtctggttgggaaaacaaattccattccacttagaaattatcagtggcacggcaaatgtcagaatccggctgataagagcattgttgtttcattctgattagaggaagccggcgaaatttttgtgtatttttcctctcgataatttgtaggctacagtgaagcttgtcatggttaacttcacattacattaaacttaacatggtgtctttaaaaatgcggtttatgtttgaaatcaattataaatatttcattctccaaagttagattgattccagcaaaaacgcctcatagaatttcgactctagctggtatgcatccgttttacatggtaaggggcaagaaaattgtgattagggtggcccagccagacatgtctaccctggcaacatgataacgtgggtattatgcaatctccgagtttatgaaccgcagcttgagcagcttgataacctttatcaatcgatgttccattgggcggcgttcgccactcaagttgatgaatctacttgagttactgacctacttttatcatcgctatggaaagttcttccttataaagccgcaaccggttccgacagtaattatccgtcctacatggacaactaaaatgtttggaatattttcaccattttaagttcgccctagggcagagcacaaaataaagatcaacagtgctcaataaatagacgaaacttttccaagatccattatcattctgctgcagttaccgctgtaccgcccccaccttcgattgtttaaatataaaccgaaagttcaacaaactaatcgtcaaaccgcagagagcattcaattcaggttcggtttccacatgcgggttgtatatgtgtgttcttacatatctattcaaacagcagaggtcacaattgtagcgcatttataaatatataactcaaatgaagctagacgttgaaatatacatttttaataagaacccacaatgagtcgactttgctttcttcttttaccttgcacttcaaaatatctctacagttctatcctgattaacttatttgcacggatttataatatgtatattaatgggtgcatataatgcaatctctctttgaatgcttcatgtacatctcggactgcctcggtcctcgatgcctgtaaattactcatcattcggttgatgggccataacgagctccgacttgaagttctgaatgacgttgcgtcacggtgactcgactgaaatcgtactgaactccccatgaacgaacatatgagattggagtatatgtctttgttgcacttggatcagttcaacgcactgaataattatgtaaaactttgtgttttccgccagtggaatactaaatacacgctgcgagacaaaaattgctaaaattcttcatctgtccttttttcaaaaccataaattatttcaatcctgaactcgaatcgtatacattacaactttcaaaagccattactgaaaaggttggcatccacgatcacttaaattgatttttcggttcattagcgataagcagcgatagtgatcgaactttgatgtcaaataaacaaggtatcaacaaactactcgcataaaacaattaggtaaaaatggttgccttcgtaacatgacgtagattttgttacctaagatatcttttcaacagataacacacacaaatttcgtcattaattttagttgcatacatatatgtaggtatttcactgatttataaatattaaataattgctgagacaacaatttcctaatcgtatcttgctactcgttgtttaacaaaaacaagttacgtgaacgcaaatctataacttgaatcgcatttgtattcaaaaatagaatctgcacatatcaaccgtttatttgttgatgattcttgagttctatacaattttcattgcaaaaggtggatgtggatttgaaactttgaggcttaacggcgataatgccctcccatttggttgacatgcgatcttgactgtgggagctaatgtcaagtacgatcgtagcagctttacaactggttttaaacgatttaagtgagaagctgttggcttaaccacattatcaaatgcgggctcaatgtctatgcaaatcggtatctgattactcaatcagcaatctctcagtcagctgaactttgacctcaagccgcattttgcttctggttttgtatggatctatttattctctaacatacatatagctctgtttactaataaactaatatatgaccagcttcagcaagtaataaaacgattttcataaataaaaaacaagatatgtgcttaagacatcttattacttaattaccctcattatttcttatctcagttgcgtatttattcaatagataagcgactctgaaaatgcctccactgtttacaacctcctgggatcccatctgagttatttgtgtgtcaaaataaaagcactcaaacattttataaggggtaccaaaacaaatcttatctttgcatttcaactgcaaacggaatttgcgataagctagaagtaatcactataaattgaaattctttcaatatagagaccatcaccatgaccaccaataaggatccccaagataaggagcccgggaaagcagaacaaccgaccaagaatagcggatccagcggtgtgggtatcatgaagcgcttgagaagatcggcgtccgccacagagcataatcttagcagtctgcgaaaccgcaagtcaacacaaaatctattcgatcagcacgggaatcccatagatctgcgacagtatcgtaaagttttggataaggatgaaaatggtaatggaaccaacggatccgagaagaagcttagatacaggagaacacaaagtgtgactcgtgctgaggagatttccaataaagaggagaagcagagaagagctcagcctggcagaccgtaagtagggaaattaaactactttagcccaaatacagggtttcgcctcttttagaatccatcggccaagagattctctgttttcttggagctctggatttaccaatttttctggactggtgaactggggatttctactgctctgcattggaggtctgcgtttgggcttggagaatctcctaaagtaactacgatgatcttgagtagaaatacaagttttagctaattcattatttttttaggtatggcattcgcatcaatccactggattggttcttcttcataagcggacacaacgaaggcgaaggacataacgccctaatcctgagcatttgtaagcacgcacaaaatcaaggattacgcaaacgaaattgataaccttcgtctcaccatattttacagactctttagtgcatatctcgctctgtttggctgtggagaagggtctagccatggtaagtacttactttgatagcatctcacgcctattttcttcgatcgtgacttgaaatacgttattagcttgaacatggcttatatgataaatttcgaaatatctagttaattctaaattcacaattttgaaattgagtgaagggtgtttgacaagaaatgatttgtttatcagagagaaaagtatgaaatattcagaagttatcgcagttgaaacacactagtttcggaaaacataatttttaattgtttacaaaacttacatatattagatacaatttttaaatgacaataaactgggcatgcaatgagtgatcgagtgcgtgtatgcataaattttcgaatgtatggcgaggtttgattgcgatgaatgagcttaaagtcggtcgattcctttaggcaatgcgtactccagcctgatcacaatatttctggagtacttgcttgtactccggctccaggggcgacaacaaagtggaaaattctcctgccctagcctgggcaaacttagagagcgaagttgctagaaactggcgagcatccttaatctcagccaggtgatcctgctggttgggctgggcatgagtcagttgggcaaatgccacttgatagcccgcatcgggatcttcggcaactccagctgtctctcctatttcgagacccatcaatttctctggtggtcgttcaaaaagatcgattagagaatgcagcagtcgtggccagaaagtagcgtactgttgctgcaatatctcaggagtttctgtaagtagcttagtgacacccacggccaccattttgcgatcctgttccttgggaatcttgcccatttcggtgataaacacgcggtccagcagcatgccaaataggttaggctgaatctcatctatcaattgagccatctgactgccactgaacttaatcacataaaagctaaagaagataatgatgccgcttaaatacttcggagtctttgagagagacaatcgctggaagagcaggccaaagatctgacgaagattagtttgaatctcagcgggagggtagtaggaaagcagattctggagaagataaaacccttcatggtcattagccttggaggcaatc

SEQ ID NO: 30707 - DNA, 1442 bp, DROSOPHILA
atatttcgaaatttatcatataagccatgttcaagctaataacgtatttcaagtcacgatcgaagaaaataggcgtgagatgctatcaaaatcacctgcccacaggtcatggcacaagttcatcaggcaagtcggatggcagccggggcagattcagattcgttggctgcgatattggtgaccacaatatgtggcgacaccgaccacgccagctgcacatcaatcggtttccctcctccaaggccgcctcgaaggggatcctcgaaaggggcgtctgggtggtggacgagggtccaacgctgcgctggggcatcgcacccgtcagcctgatggcggatgactttgccgcggcgctgagtgtcctgcccgagcagcaccatcgcatcgtgtcctgcgtggctgcctatcagtcgcatgcgctcgccttcgccgagcgccatcaggtggagaacgtgtacaccagcttcgaggatctggccaagtgtccaaatgtcgtgtacatctctcccctgaatccacaacactcggagctgtgccacctgatgttgaaccacgacaagcacgttctgtgcgaaaagccgctctgcatgacggaggagcaggtgaccaagctgctggagaaggcgcgggcgcgcggcctgttcctcatggagggaatgtggccaagatgcgtgcccgcctatcattacctgcggcatcagatactgcgaaaccgtttgggagagataaagcaagtccattgcactttgggcttgcccgtttcacaggggagactaggactttacggcggagttaccaacgattttggtgtctacggtatgcagctggcattgtgggtgtttcgagaagtaccacgctgcctcaaggtcagtggcagggtcaactcggagcatgtggacgtgtccgccgacattgaactgtgtttcacgcgcggaaagagagccctcatcgaggtcagttccgaaaagaagctgagcaaccaggctgttattcaaggcaaggatgggtccattaagatgaacaattactggtgtccaacgcgtctgatcaccgaggaggtggactacgagttcccgctgccgggtggcgatcaattgccacccacccactaccacaatcgactgggcatgtgctacgaggcggaggaagtgcggaactgtattctgaagggcagcacggagagcgatgacttcagtcacaacgagagtctgctgctggccaatctgatggacaccattcacgccgaactgggagtcggtgaattcgccaatcgcaacgaggtttcagatctgcaaaagcagatcgagaatgttcaggatatagtcaaggatcccgaggagctggccagcgagacgtgccgggtggtggaggatatcagcatgggtggaagaagtttggatatcaatcggcaggaggtgaaagaccaggtcaaacatcattga

SEQ ID NO: 30708 - protein, 417 aa, DROSOPHILA
MWRHRPRQLHINRFPSSKAASKGILERGVWVVDEGPTLRWGIAPVSLMADDFAAALSVLPEQHHRIVSCVAAYQSHALAFAERHQVENVYTSFEDLAKCPNVVYISPLNPQHSELCHLMLNHDKHVLCEKPLCMTEEQVTKLLEKARARGLFLMEGMWPRCVPAYHYLRHQILRNRLGEIKQVHCTLGLPVSQGRLGLYGGVTNDFGVYGMQLALWVFREVPRCLKVSGRVNSEHVDVSADIELCFTRGKRALIEVSSEKKLSNQAVIQGKDGSIKMNNYWCPTRLITEEVDYEFPLPGGDQLPPTHYHNRLGMCYEAEEVRNCILKGSTESDDFSHNESLLLANLMDTIHAELGVGEFANRNEVSDLQKQIENVQDIVKDPEELASETCRVVEDISMGGRSLDINRQEVKDQVKHH

SEQ ID NO: 30709 - DNA, 3708 bp, DROSOPHILA
cagccgcaaattaatgtagatattaagcaggagcccgaaggtctgaatgaggattttgctcctgaatcccccgcaaccaaatcgacagtaaaagctgatcccgatgaaccctcaccatctaaccccctggcatcggaggctgctacgccggccagagcaagaaggactgttaaaaagaaggtatagagcggcgacttagtaacattacggataacgaattagcattttacgtgtaagctctgtggtcaggacggaggatggcagctggcgtggaaattggtcggatattcagataacacgacattcgggtcgggtcaattaactaacgaatcccattttatacacacagttgtataccaaaaaggttaatatatatacccaccatggatcttcacaacggacttcaatacacgaatacatcttgagccggaagtccacattcttaaaatccatttgaaattattatggcaacaaatttattacaatttacaaaatatacaaaactgctattgtattcgcaattgtttaattatacaatgcttgaattacagtttccatttgttttggattttttgctgatattaattgttgtaacagaacagattaaaatgaaattgaagtcaaccaaaaatccttacttaaattcacaaaaaaaataacgttctgtatcacggctgtttaatctgcaaaaattcagcacaggatgtacagacatttgtatcgttttctgattttatgtttgttcagtatagtaagcctttttatgttacaaaaactctatttacctatttatttagctggataaaaaataaaactcataaaaaagttggaataatgctaaacatatagctatccagattttgtaaaatattaggcattaaacataatttatttcgttcgatttgtatttgtaactatgaatattaaactaagtgacttatatattagtaaggaatgggggcaaggaaggattttaagtagcttaaaacatcgaatagggctaatccactgtgggcacagaaaatatgttatcctccatgaatccatatgtaagattccttctgtaatcccaccagctttgcgtgggacgcgcctctgtacttatcatctgtcggtcatctggctcaataaactccactggatcctgctcttcaacagaatcaccatcgctatcgttctctttctgttcaggactgaagctcgtccaatgctcgtagggatcctgctcggtgggccacatctgaaggttgttaaagttggctgccagtttaccaaactgatcgatgtgatgcagtaggggatccacaccttgatttggaggcgccttcagtttctgggtcggaactcgccactgtggctgctttgcgcccaatgtgggtagatccgtccacttgcccagggcaaatggcgaactgtcattggtgtctatcataaacattcctctcgtagtgggccgtatattttcgccagcttcaagcaaaaaattcgttgggggacacattcccaggaggtaggatatgtagccactgcaggcccatccccaaaaacccttgggtgaccggatggattctagaaagtacgctggagcacgttggtgactgcaagcaaaggaatctgaaaggtacaaatattaattagagcttccacctaaaaatagcaagaaacgacatacttattttctgtccattgcatcccggctgcatgattccaccgttcatgtaaaaatccgcatgaccacatctctccattttcccctggaccaatgcattcgtgtgtatcacatccacatagctggcatcgctgggatccagtttatccgccttgccggaagtgataaaaagaggcatcgctggatctagtcccgtaatccttggcagcatgaaagagcttaaattcctggctatatagttgggcacttgagctcccaatgagaagcctatcacgtggatatccgtattgcccgtctccaccaggcgctctaccaactgggctgtgcaggttccagcgtgcttggtgttatgaacggcacttatgtagcagggtcctggcgaaaggatactccagtccacatatatgatattataatccgcttttgccaggtactctaaaaaagaggtaatttcatttaaaggtaattgttctgatgctaatttaaatatttttcatcagtgatagaaaatatgatttatatattttatactcatatcctataaaatttgctagtatcaaaattactggactcaccctccctcatctgttgcaggggatgtagaaacatatcggagttgtagccgtggatgataatcttagtgggatatcgagggttgaagtaggagtcagtcagattggacttctccagtgactcgtctatgtgaaggcactgtctgtccatcggattgtggcgcgtataaatgtaatacttgacatccggatccggacaacttcgacctatagcccatttgcacggaccgatggtgatgtccctatttgatggtgttgttgtgctggtgggtgtgggattagtagatccctcagtggagctctcatcctcatgttgaatgggaataggttttagatttagaaatctctttccgatagtctcccggttgaagctggctgaagataatctttggctaaataaatacacttataaatcatcggaattactcacctagaagcagcaaaccaatgacaagtcgccagtgcattttgtaatctagaaacttaaaccacatgcagttccgattaatttgaaacgctagttgaaaacaaattccttggccagattcgtgaagcgttcggtctgaaaacgttggagaaactaagagccggctgctcgagtcaatacgattttggccaaattgtaatgagatatgcaaatgagtgagtacttttgatggtccgattgagtatggctataaagtgagagttgcgggcggaaaagtgaaaccgaattgagaatttaagttacagaaaataaggtgtaatatgcaagctatctgaagaagtttcaatagaatgtaatattagttgttccgcctctttcagtgccttgtgagttttcatatttctttctttcatttctttcataaattcagaagttttcgctatttgtttataatttttgagaaaaactcataaatgcattaacacaacacttactcactcaacgatatgcactctcatagacaatatgtacacttgcctacgtgattgcggtttcaattagcaacgtttactgaatgaaaactttttgatattatcaccagcgatcttggctcacgtacaaaggcgaatgttcgcaggtcttttgaatttataggaatcaggtcttacgaagaatcttgaattattattgactcggtctagttctgcagacccacatagataacttggaagacttcctgacccgggtcaatgaaaacaaactagaatgatgtatgtaatttcatttaagtggcgaaagaaacagtataaatataagtacattaactggagctttctttatggccgttatgtgacttgagatcgagcaacaagcaataaatatttgcaaagattttcgcagccgcaaatatttggttttctgctctggaattgtttttgatgcctttgcggtttattaccggtacgtgtgtctagaacgcccacagattttcctcacgaaaaatccactcggaaccgactcttaatatatatataatattg

SEQ ID NO: 30710 - DNA, 1455 bp, DROSOPHILA
atgcactggcgacttgtcattggtttgctgcttctagccagcttcaaccgggagactatcggaaagagatttctaaatctaaaacctattcccattcaacatgaggatgagagctccactgagggatctactaatcccacacccaccagcacaacaacaccatcaaatagggacatcaccatcggtccgtgcaaatgggctataggtcgaagttgtccggatccggatgtcaagtattacatttatacgcgccacaatccgatggacagacagtgccttcacatagacgagtcactggagaagtccaatctgactgactcctacttcaaccctcgatatcccactaagattatcatccacggctacaactccgatatgtttctacatcccctgcaacagatgagggaggagtacctggcaaaagcggattataatatcatatatgtggactggagtatcctttcgccaggaccctgctacataagtgccgttcataacaccaagcacgctggaacctgcacagcccagttggtagagcgcctggtggagacgggcaatacggatatccacgtgataggcttctcattgggagctcaagtgcccaactatatagccaggaatttaagctctttcatgctgccaaggattacgggactagatccagcgatgcctctttttatcacttccggcaaggcggataaactggatcccagcgatgccagctatgtggatgtgatacacacgaatgcattggtccaggggaaaatggagagatgtggtcatgcggatttttacatgaacggtggaatcatgcagccgggatgcaatggacagaaaataaattcctttgcttgcagtcaccaacgtgctccagcgtactttctagaatccatccggtcacccaagggtttttggggatgggcctgcagtggctacatatcctacctcctgggaatgtgtcccccaacgaattttttgcttgaagctggcgaaaatatacggcccactacgagaggaatgtttatgatagacaccaatgacagttcgccatttgccctgggcaagtggacggatctacccacattgggcgcaaagcagccacagtggcgagttccgacccagaaactgaaggcgcctccaaatcaaggtgtggatcccctactgcatcacatcgatcagtttggtaaactggcagccaactttaacaaccttcagatgtggcccaccgagcaggatccctacgagcattggacgagcttcagtcctgaacagaaagagaacgatagcgatggtgattctgttgaagagcaggatccagtggagtttattgagccagatgaccgacagatgataagtacagaggcgcgtcccacgcaaagctggtgggattacagaaggaatcttacatatggattcatggaggataacatattttctgtgcccacagtggattag

SEQ ID NO: 30711 - protein, 484 aa, DROSOPHILA
MHWRLVIGLLLLASFNRETIGKRFLNLKPIPIQHEDESSTEGSTNPTPTSTTTPSNRDITIGPCKWAIGRSCPDPDVKYYIYTRHNPMDRQCLHIDESLEKSNLTDSYFNPRYPTKIIIHGYNSDMFLHPLQQMREEYLAKADYNIIYVDWSILSPGPCYISAVHNTKHAGTCTAQLVERLVETGNTDIHVIGFSLGAQVPNYIARNLSSFMLPRITGLDPAMPLFITSGKADKLDPSDASYVDVIHTNALVQGKMERCGHADFYMNGGIMQPGCNGQKINSFACSHQRAPAYFLESIRSPKGFWGWACSGYISYLLGMCPPTNFLLEAGENIRPTTRGMFMIDTNDSSPFALGKWTDLPTLGAKQPQWRVPTQKLKAPPNQGVDPLLHHIDQFGKLAANFNNLQMWPTEQDPYEHWTSFSPEQKENDSDGDSVEEQDPVEFIEPDDRQMISTEARPTQSWWDYRRNLTYGFMEDNIFSVPTVD

SEQ ID NO: 30712 - DNA, 3959 bp, DROSOPHILA
tttctttctttcatttctttcataaattcagaagttttcgctatttgtttataatttttgagaaaaactcataaatgcattaacacaacacttactcactcaacgatatgcactctcatagacaatatgtacacttgcctacgtgattgcggtttcaattagcaacgtttactgaatgaaaactttttgatattatcaccagcgatcttggctcacgtacaaaggcgaatgttcgcaggtcttttgaatttataggaatcaggtcttacgaagaatcttgaattattattgactcggtctagttctgcagacccacatagataacttggaagacttcctgacccgggtcaatgaaaacaaactagaatgatgtatgtaatttcatttaagtggcgaaagaaacagtataaatataagtacattaactggagctttctttatggccgttatgtgacttgagatcgagcaacaagcaataaatatttgcaaagattttcgcagccgcaaatatttggttttctgctctggaattgtttttgatgcctttgcggtttattaccggtacgtgtgtctagaacgcccacagattttcctcacgaaaaatccactcggaaccgactcttaatatatatataatattgatgatacatacatatgtgcatgccaatttgctgctatatggaatgtcaaacaaaaatcgtataaatggctagatggaaagacatttcccgcctgtgtctttaaatgaccgacatgtgggccatattgtcaaattcattaaaatatgaatagctaatcttcatatgtaaaaactataaactataaaacttgtgggcggttgagtttgtttaaatcattttttaataggcaacttttatagtgaatgttgataacaagtatatttccaatgactaggtaaatataacaatacattttattttttatctctaacatatcttcattaaaatgattttaaattaaaattttaaagttgaaaacatcaagtatgtggcctttcacacatgttgatcatgcatctggatgggggattcatggccttttcggctccgcacttgaaagcctcctggaactcgggaagattcatatagcccctattcaattgggcagcaaatatctccgtttggcggttacataactgctgggccaccgcatagaagagtaccctgtgtggattcaatccgaagtagtccagcacaaaggtctcggcaaaggcgaacctttcaccctgaagccaaaagtgatagtccgtgagggaatactgaaaagagcgataaaactggaagatctcggcgatctcgtgcgaaccaagtggtctgtaaattggagccaattttgcatcgtagtgttggaatgattgccgttctaggcaatccatggcggtatagtggccatcggtatccaagagaagtcgggactccctccaaagttccaagccgtgtgtggcataatagtgataagtagggcggtgcaaggaaagcagtacaaagtgaaggaagtgcctcaagaaatatgctggctgatttacatcttcctcgtccacataaggcgatacgaaactatggcgcagttgagcccgtctaaggatcagaagatttgcataaaaggagttcttttccaatttcaatccttcgtagttttcatttagttcagttatattcagatagttttctgcatgattttggaggatgcgtgccacctgaagctccttcttctccacagaagctggccacaggtgcccataccaatctcttctggacaacttggatctccttagtttttggaagcgagtggtatgaagttgatatgatgccagagcgacttccctgctcagatggcgtctcaaaacatgccattgccagtattcagcgtgcagtagtctctcgaattcctcagataccctatagcagtccggatatcgaagctgctccctggcctgccacatcacatagttgtacactatgcgagtttccgtatgtctgagaacttcccaggcttgagtgatcttctcgacatcgagaggaaacttgcgtgctcccaccagccgttcctcggagaagttaagtgcggcaaaatactgctgaaaataatccatggtgttttcatccagaagaagctgttcttcacctggtctggaggtgttggttctggtattctggctcaaacttcttacgagcggaagttctcctctcatttcgcgacacagaaccctcatctcatgtgatattatacgggatacttgatgatgtctaccttccaagacatcagacaggctagattgaaagtccgcgatactaggacagggcagctcctccatgggactcacataaatcgtatccaaggcaaagtagatatgaagtaaagtgggtaggccatgggctgccagttgtgctgacagaactatccaattcagctgcccataaaggcgccttcgctcccattgatgtttaaggaaaggccaggaagagagcacctctttatgcctggccaggaatgggatctcatcgagcatacgttcccagtgagaagtcaatcgagtaggggtgaaaacatttcgttcttccctctttcggcattccgtataaagttgagaaatcaatcgtcctggtatagtttcaaaatttccaacctcagctgtgaagaagttcattctgtcctgtttgttatacagatagggtggaagaaaatcatcggaattttcctccttcgtttgatcgaagtttccacaagcatgtgcatagaagtcatcacacggatccattgagtcattcttaattttcaccaactgttgcaagttgctcttgtacaaatggctaaaaaactggcccgattctacctcggaatccatttccacttccgtatctgaatccgaatcttctccattctgggacctcactatttgaattatagcgaataaaacaaactgaagcttccagcgcatttagtttatattttattgtgatccgctcgtttgttttgttccacaaaaactgcgcaaaattgtgctcggaattcctccctaatgacttgataagccacggaagcagtggattaagctatatattctcgattctatcaaagttcccagttctctttgcgctctttattggaactcgccttgaacttaaagatctttgcattccgttttgccctacatcgcctattaatgaagttatgtcataatgattaagctttatacatgcatgtaaaaacggatttaacaagttaaagtatatgaattttaaataaaaacccatatgagtgtagtgtgcttggaaaaatatttgaaaaacttatcccaaaaattacccattagtgcttaaaaaatatcgcgcatacgcaatgtggccacagctgcaatagctcaagcaacaaacctgattctatcaggtcgatttttattgtttcttttgatttcatgaatgtgctatgcagaggaataaaaattcattgatttttttataattatcttggtcattatttatatatattcttgtgtcaagccattttgtttttatgccatttgcgcattgcattttcaaattgacttaatgacaagtgtcagcttagggaaagtgtgtgtttttttttagaaaagtcaaggacccgaaatgtgtgacagttgtttatgaacattttggctggtatttatatgtcaacagacgatatgattggagaagtaaaggaggtgtggcgttgaagaaaactctttgtgatttcgctaagaaggtattacgtagaaaggattaagttgaattctattcatatatttgaaagaaaatatatattaacaacataaacatcccgtgctatttcgaaatcaagcgaaaaaacttgtagatcccatgcccaattcgaacctcatgttttgagttcctttgcacttgcggaaattccaaaatgctgtcaataatttcgaggcaaatgttttgcaaaatgga

SEQ ID NO: 30713 - DNA, 1959 bp, DROSOPHILA
atgcgctggaagcttcagtttgttttattcgctataattcaaatagtgaggtcccagaatggagaagattcggattcagatacggaagtggaaatggattccgaggtagaatcgggccagttttttagccatttgtacaagagcaacttgcaacagttggtgaaaattaagaatgactcaatggatccgtgtgatgacttctatgcacatgcttgtggaaacttcgatcaaacgaaggaggaaaattccgatgattttcttccaccctatctgtataacaaacaggacagaatgaacttcttcacagctgaggttggaaattttgaaactataccaggacgattgatttctcaactttatacggaatgccgaaagagggaagaacgaaatgttttcacccctactcgattgacttctcactgggaacgtatgctcgatgagatcccattcctggccaggcataaagaggtgctctcttcctggcctttccttaaacatcaatgggagcgaaggcgcctttatgggcagctgaattggatagttctgtcagcacaactggcagcccatggcctacccactttacttcatatctactttgccttggatacgatttatgtgagtcccatggaggagctgccctgtcctagtatcgcggactttcaatctagcctgtctgatgtcttggaaggtagacatcatcaagtatcccgtataatatcacatgagatgagggttctgtgtcgcgaaatgagaggagaacttccgctcgtaagaagtttgagccagaataccagaaccaacacctccagaccaggtgaagaacagcttcttctggatgaaaacaccatggattattttcagcagtattttgccgcacttaacttctccgaggaacggctggtgggagcacgcaagtttcctctcgatgtcgagaagatcactcaagcctgggaagttctcagacatacggaaactcgcatagtgtacaactatgtgatgtggcaggccagggagcagcttcgatatccggactgctatagggtatctgaggaattcgagagactactgcacgctgaatactggcaatggcatgttttgagacgccatctgagcagggaagtcgctctggcatcatatcaacttcataccactcgcttccaaaaactaaggagatccaagttgtccagaagagattggtatgggcacctgtggccagcttctgtggagaagaaggagcttcaggtggcacgcatcctccaaaatcatgcagaaaactatctgaatataactgaactaaatgaaaactacgaaggattgaaattggaaaagaactccttttatgcaaatcttctgatccttagacgggctcaactgcgccatagtttcgtatcgccttatgtggacgaggaagatgtaaatcagccagcatatttcttgaggcacttccttcactttgtactgctttccttgcaccgccctacttatcactattatgccacacacggcttggaactttggagggagtcccgacttctcttggataccgatggccactataccgccatggattgcctagaacggcaatcattccaacactacgatgcaaaattggctccaatttacagaccacttggttcgcacgagatcgccgagatcttccagttttatcgctcttttcagtattccctcacggactatcacttttggcttcagggtgaaaggttcgcctttgccgagacctttgtgctggactacttcggattgaatccacacagggtactcttctatgcggtggcccagcagttatgtaaccgccaaacggagatatttgctgcccaattgaataggggctatatgaatcttcccgagttccaggaggctttcaagtgcggagccgaaaaggccatgaatcccccatccagatgcatgatcaacatgtgtgaaaggccacatacttga

SEQ ID NO: 30714 - protein, 652 aa, DROSOPHILA
MRWKLQFVLFAIIQIVRSQNGEDSDSDTEVEMDSEVESGQFFSHLYKSNLQQLVKIKNDSMDPCDDFYAHACGNFDQTKEENSDDFLPPYLYNKQDRMNFFTAEVGNFETIPGRLISQLYTECRKREERNVFTPTRLTSHWERMLDEIPFLARHKEVLSSWPFLKHQWERRRLYGQLNWIVLSAQLAAHGLPTLLHIYFALDTIYVSPMEELPCPSIADFQSSLSDVLEGRHHQVSRIISHEMRVLCREMRGELPLVRSLSQNTRTNTSRPGEEQLLLDENTMDYFQQYFAALNFSEERLVGARKFPLDVEKITQAWEVLRHTETRIVYNYVMWQAREQLRYPDCYRVSEEFERLLHAEYWQWHVLRRHLSREVALASYQLHTTRFQKLRRSKLSRRDWYGHLWPASVEKKELQVARILQNHAENYLNITELNENYEGLKLEKNSFYANLLILRRAQLRHSFVSPYVDEEDVNQPAYFLRHFLHFVLLSLHRPTYHYYATHGLELWRESRLLLDTDGHYTAMDCLERQSFQHYDAKLAPIYRPLGSHEIAEIFQFYRSFQYSLTDYHFWLQGERFAFAETFVLDYFGLNPHRVLFYAVAQQLCNRQTEIFAAQLNRGYMNLPEFQEAFKCGAEKAMNPPSRCMINMCERPHT

SEQ ID NO: 30715 - DNA, 5693 bp, DROSOPHILA
gttttatttaaagaacatttttcttcaagtttataattaactaataacaacgaaaactcaatttattttagtggacccaattaaaacttctgccgacagaaaggtgtaatttaacttgcatagtctaagtttccattcaaaatttaaattcatgtatttgtgtgcagttcttcgagagatcttaaaagtactttatctttatttgcatgtggcatatgcatgtgcaaattgaggcctttaacaactggacaacaagttaaaaaaacaaacaaaacataaatgaacggtatagtcgactttgaaatacctgttactcagctagagaacttgtttcgaaatgttttgggcatatctttagacattttcaatgcaaataataatattacaaaaaacacttttcataagtgtagacgtcacagttttgggtggcccgtgggcgtggcaatcctctgaagcaaaggcactacatggttgttcttaacttttaaggttttatagtttacagtgtttatacggacgggcagacgaacatgactagatcaactgctactatctgttaaaaaacgaatctagtacaccctttttttctacgagtaacggctatacagtctataatacaagctaaaagtgcgagcaatgatgcggatacccagtcatcgctggtcttctggcggcttccgactgcagttggccactttgccattttgtcggtcagtagtttcgcgcgctggccaaccggtttcacggctaaaaccgtccgaaagccaaccccctccactccttggccaaattgcagctcttatgcaatccggcagtgcattttgggaattgatttagccagccggttttgcgaatgtgccttttatcttttgttttatctgttgttttatattttgtattttttcatggctttgtgtgtttttttttttttctagttaatagtttaagccttatgactaagaaccaaatatttacatgactcctaacctagcttaacaacctaagtaagcttcagtttcttttgcttttgctcgagggcctcgattctcagtcgtttgaacagttggtgtcccaagtatgtgcggatcggcaggggagccaatttcataatggcatactgtaaaataaaagattttaattaataaggtaagattttaaggcgttaagaaactttaaatcagggaattaagtggtattgcatcttgaaaaaaatccctaatcgccaaattactaacctgaatgccatgggtccagaaaccgttggtctcgctcgtttttcccagtgtaaatacggcggaccgggcaaaagtgtatgcgttcgggaaaaacagacctccctgcattacccgatcggtgtaggcattcattttggtcaccacaaagttgggcatcaccagctgcacgtggatattgtgctccgccacctccagttccagggccttggagaagtaggtgacaaacttcttgctcgcagcatagacggtcatgttgggcagtggctggagctcagaggaggatcccagattgacaatggcgccctttcggcgaccaatcatctggggcaggatcttgcgggtgagcatggtaaccgatcccatgttgacggtaagaaggttccaaagaagatcctctgagaccaggtccagactctcggggtgctcatacatcatgcccacgttgttgactatatgaataaattaataataattcgtattacaaccataacggttcaagcaaggcaataatggcaacaccatatttataacagctcatatcaaatggcagtggctttaaattacgctggccaagatccaatgtcaactcttatcagccaaacattttattaatgccgccttgagaagttcgcaaggttgtcgaaatgtaaattgctgaagcgtttatgagtctcgttggccgaataaaagtaaaacccccaacaacagcgcttcgccatcgtacttgaacatcgcctaagccactcttcgcctcgccaatagaccaaaaaaaaaaagagtcattataattgcacgcaattatcattgtttgacattggcagccgcgcaagaaaaatagtcacaaaatataaagcgtaagtaagcagctgctgctgttgacaatgatgaatgtgtgaatgatacaatatcgtataataaaaacgctaatatctgtagtaagtgccaaatgttgttaatgtttgatttgaatataaatatcgaatcataattatttacccaaaatgccaacgtctatgcccgccagttccttttcgatctgatcgtacacctcacgtcccttggcgaaatccgctgcaatccacttggtcttcactttgtactggctctctgcgaaataaaaaaaacgtgttctaaatatataaaaccaagtactaagcaacacttaccaatctcattggtaaccgcaatgagcttctccttcgtccgcgagatgagcaccaggttgataccctggcgagccagctccctggcgtactccttgccaatgccatcggtggctccagtcaccactaagtgaaaggaatcgaaggaaaacgtgatgagtacaggcacaggttgccgaaagggaaccacattttttcaattttgcatgcagacaaaaaaacacgaaatattgaagactacactatacaacaagctttagaatttgttacgaaaatgtatgtatagtagtttcgttgttattgagtattaagtattatttgtgtaagtgtagattaggtttatatttaatatataattattaattattaaagttattagagtctataagttttggctttccaaagctagctgcatttttatggtattatggtataataatttagtatgaggacttgaatccatgttaaactaaactatttactttccaagacccatttcgtcactttttgttgtgtacctatagttttagcaactgaataatgccacgacctccttgaaagaccttttcgaaactagcatttgcctgctaattagcccactgcattcggctgagcctctttaaatcacatcgccacatcggttgttggttgtcgaaacgtcagcaaatatcatgaatggaatcggccgcaaagaagcgattagaagcaaaccggctagagtggcaattgctgcaatgttgccacaggcagctggtttattggttgccaaatatttgtgcaacggaaacgtgaaacacggcagcaaaacttggcaatcgattgttgcgcttgcgtgttgcccgaaaattatgactgctatagtttggcaaagattttgcactttgattggtgggcaataaaagcagttgtataaaatccataattcaatttggaaaattgtaacgatctcacacctaaggtcacccattaattaagcaataaactcaagaagcgatagttaaatttataactgtttgactacgaagagcagcacgagactctagtcaatggaatcgaattaattagttaataaagcaaaaacaaagcgatcgcaatgtgcgaaacaagcgagaaaatcgcaagccggtttacgagttgaatgactttgtctggtccataaatgaaattgtaaacaaatcaagttgtttgaataatttagttattggatgccaaattataatgaatcagcagacaatttgaaaataaattatatttattttattttatttagggatttgtggaataagttaaaccttttttaattcataatattgaacttaacaattgaacataaattgtattggataatttagcaagaatatcttttatagtctgatattattttttatgattcacaaatatgtgaattcatttaatatctaagcttaactaaaaataaccatcagcaatacgctcaataacactcagataagaaatacaattttgttcatttcggtggtataaataataatggaaattcataattgtaaccggtttcttatcttatcataaatggattttgtaaccgcttttcccaaacctgataactttagattctatcgctcaacgatttatttgatcataaacttggtaatgtagtacatgattaacgtataaatcaataatttaatttagaacacaaaattcatgtgcttcaacgctcaaatttataaggctaacatgtaaagaaagtcaatatactctcattaaagcctaatttattttgtgaaattattcgaatttatagaattattaggcaaatcgtgatatataactattatggggacctgagatagctgatgtcattcaattctgagaaaagctggatatgctgcctgcatatagcaaaaacactccttaagaaaataggtaaacaatttgcatttgcgacagtgaatcaaccgaaaacgcataccttaaatattgacagacccctgaggttaaagtatgcaaatacgggattgaataacatggaaacattcggtgaataaagcgaaactcatggatataatgggccttgcgatcgaaacactcacctgcccactgtccgaacttatccaccaatgtccttggcaagtggggctggaagtagggttccaggacggccttgattatgctgaccaatgacttcaggttgtcgtacagaaacacaccgatggtgagcagtcctacgaggtagatggccgccgagatcagctgccaaatgaacgccatcttcagcagggtgtaaatgctcacttccagaactggctgcatggttaagagagtgctctttaaatactccaaataggccgattttcggttgatattgtggaacttgttcttatcactaacacgaccgggctgattatttattgctccgtagagaattactattgtaccgacatgcgtataatcgcccgactctcgcactatcgcgctgtctgtctgccacttttttccgggggcacaagttgcaggtttgagcgccgatcacgcactgaaaacttggagtcgcgacttcgctttttcggcctttcggtttcggattttcagtttcggatctggtcttcaacaagcaacagttgtaaaatgaatgaatatcagcgacttaaagcggaaaggccactgcagttggggctcttttccgcggtttttactcagctctttgtcggttgattatttcataaaattgtaaacttcattttgttgccttttactgcggcctgtaggtgttgaaaatctacgtgtctgggtgccgggtgaattatttgactcttaattgccgctaaagaaatgaccctcttaccatctcgaattactcggtattttcactagccagtcggtcagttgtcgtagttttgaaatttttgctaagtgcataatcggcttactagtggtgtagaactaattgcaaacaattaggcgaaagatgcgttaaattgtcttttgtcatgcaatgacccctgtcatctgagacagtttatttgtacagatattcatctacctgtttttccttttgcatgtggctaaatactctaggagtgatttagttttggaaaaataattactgcattaaaatatgacaagcttactatgaaacttactctttcttttacttacatattttttaatttatacatgataattacatattcaacacagctccaaaacgttgttatctattgtatttaatttatctgtttccctaacaaatacattttatggcttctggatttttcacagataattgcatgaagttgtttttacatgctct

SEQ ID NO: 30716 - DNA, 1020 bp, DROSOPHILA
atgcagccagttctggaagtgagcatttacaccctgctgaagatggcgttcatttggcagctgatctcggcggccatctacctcgtaggactgctcaccatcggtgtgtttctgtacgacaacctgaagtcattggtcagcataatcaaggccgtcctggaaccctacttccagccccacttgccaaggacattggtggataagttcggacagtgggcagtggtgactggagccaccgatggcattggcaaggagtacgccagggagctggctcgccagggtatcaacctggtgctcatctcgcggacgaaggagaagctcattgcggttaccaatgagattgagagccagtacaaagtgaagaccaagtggattgcagcggatttcgccaagggacgtgaggtgtacgatcagatcgaaaaggaactggcgggcatagacgttggcattttggtcaacaacgtgggcatgatgtatgagcaccccgagagtctggacctggtctcagaggatcttctttggaaccttcttaccgtcaacatgggatcggttaccatgctcacccgcaagatcctgccccagatgattggtcgccgaaagggcgccattgtcaatctgggatcctcctctgagctccagccactgcccaacatgaccgtctatgctgcgagcaagaagtttgtcacctacttctccaaggccctggaactggaggtggcggagcacaatatccacgtgcagctggtgatgcccaactttgtggtgaccaaaatgaatgcctacaccgatcgggtaatgcagggaggtctgtttttcccgaacgcatacacttttgcccggtccgccgtatttacactgggaaaaacgagcgagaccaacggtttctggacccatggcattcagtatgccattatgaaattggctcccctgccgatccgcacatacttgggacaccaactgttcaaacgactgagaatcgaggccctcgagcaaaagcaaaagaaactgaagcttacttag

SEQ ID NO: 30717 - protein, 339 aa, DROSOPHILA
MQPVLEVSIYTLLKMAFIWQLISAAIYLVGLLTIGVFLYDNLKSLVSIIKAVLEPYFQPHLPRTLVDKFGQWAVVTGATDGIGKEYARELARQGINLVLISRTKEKLIAVTNEIESQYKVKTKWIAADFAKGREVYDQIEKELAGIDVGILVNNVGMMYEHPESLDLVSEDLLWNLLTVNMGSVTMLTRKILPQMIGRRKGAIVNLGSSSELQPLPNMTVYAASKKFVTYFSKALELEVAEHNIHVQLVMPNFVVTKMNAYTDRVMQGGLFFPNAYTFARSAVFTLGKTSETNGFWTHGIQYAIMKLAPLPIRTYLGHQLFKRLRIEALEQKQKKLKLT

SEQ ID NO: 30718 - DNA, 2833 bp, DROSOPHILA
caaattttcgcgcctttgaactaatgaactaaatagccaaatttccccagtgtggaaatttcccagccaaattatatttcaactttacttcttcgtcagcttcattcgggctaattaattttcttacggtccgacataaatttgttggaaaatattgctttatttaacaggggaaatctattagcttatcacaaattgctctcagcacatgctcaactggcaaagggactcgagcacttttcccgggaaaattcaagtgaaaactttgctccgctgcatttacgagcttccagatgccgaaggggaaaacataaacatgactttacgtaaaaatttaagacttagtacacaagatgctgcacagactttgtctcaccgcagaaacttgaagatattttcggtgcgacgatgcagttaaagtttgccggctcaggggttatttcgacttccgagatgtgttgcctaataaattgcttatataagtttaacgatctttttgtgtgttgattttgatgcgtgccggagtgtaacattcggttaagttcttggcggcggctttagccaaaagtgctgcgcacatagcctgaaaaatgaaaagagcggtttgaatgaagtcgaaaagtcggcaacgcgatgcagccaaacaagtaatatacatagtcaactttcaggttgaagctgcaaaagtgcaattcatttcaatttaggctaggaatttagatagtaacacacacatttttaccagcactggagagcatgaatatgaacgaatgacaaatgggcagatttgagtgtgcaattgggcgtgtccgctggtaatttgaatgtctcatggaaatgtaacctagaagcaattaattacgcgccaagctaaagcgacagcttacacattaaattagtagcacttgacatatggttaagtattttattattagtcaagagggaagaggccaaaagcggtaacaaaaatgccataacaacagacacaaaaagcacatcattagttatagccacgataggaactcgaaccataggaacgatctctcgagatgggcaggcccaaacgatctgtatcatcgtagtagccatatccacgattccgctgaccctgataatcccgctgccaatagcctgagtattgcctaaaacctccattacctccgtagccaccatatccgccgtatccgcctccttggctacccagaatgttcgtggtcggataactgctagtggaataatagttatagccttgagttgggtagtagccggaggaaccgtagctcccctggtttgggtagtaggtggtagatccatatcccgagccgggatagtatcccgatgagccgtagtagttcgtattgtagccgggatagtaggggttgctcggacgattatagttgtagccatagttcggatacccagagccagttccaaagagatttaacactacaagatcgtaggtaaagaagaacaaagaatttttaattacctagtacctttatgggtataaaaacaatgacgcaatcatattactatttgaaagaataagtaaggtttttgagataaaagatgagttagcctgttagttgtaacttcaatatggagtactcacacttggccgaagtctcggcggttgccaaatcacttgtcgtcgtcctggtcgcagttgccacctgattttctgggagggcggcactccaggctccagtcacggccaactaaaatgttatttaagcggcttttgttttaggatgtttacacaaattgaatattcctgctagcactcaccattagggtaaatagcttgatgaacatgacactggatttaaccatattaaaaacaaaacaatctgaatacggcggaacggtagacttcccggcaagagagctttggaaaccaagacaactgcttggctcggttgctggacgttaaataattctgtttctcagacaaggggccaatttatatttttcattttccggctgagttgctacgctcaagttgaagtcgctgtcgacgtcgttgagacaaacaatccgcaacagaaacaaaacaaaacaaagcccccaactcccgcacttgtcgcacttttgtatctcacttgaggtgaagctcgggcttattactcatacgacacgttggtgcggccaaagcgaaactccagcgtaacttcccacctcagcgggtgggaatccagccctaaagagttctaaccactctgatcagtcgcaatgagaccttttctgccagcgattatctatgattattgaataatacgcgtaatattctcaattacacgaggcaggtgacaaaataaatgcccatcttgccagtgcgtgagccgggtttaattttacccacctatttgcctttgcaaaactttaacaaacacaaatagccaaagcaaaaccaaaaacaaaaccgaaacaaaaacagtgaaaagccccgccccggtaaaccattgaatatttaccctcagttcacagatcgcatttctttcaagtttcccgccatctggcaatgaatgagaatgctgaaaacgctgctggccaggtcgtgttggcttagtatatctttaattccaattatccacagagagtttgctatctaaatatttagcttatttgacattttgttggtttttgttaacttttttgtggtgctaacctcttgcataatcgccggttatcgtggtggagcaaataggccgccaaatattttgtaattcttaaaggccctgtgaagtagtaagcccattcataaaactctagttccgactcgcactagaaagcatgaaaattatctcaaaagtgtatttgtgtttacccgaaa

SEQ ID NO: 30719 - DNA, 597 bp, DROSOPHILA
atggttaaatccagtgtcatgttcatcaagctatttaccctaatgttggccgtgactggagcctggagtgccgccctcccagaaaatcaggtggcaactgcgaccaggacgacgacaagtgatttggcaaccgccgagacttcggccaagttgttaaatctctttggaactggctctgggtatccgaactatggctacaactataatcgtccgagcaacccctactatcccggctacaatacgaactactacggctcatcgggatactatcccggctcgggatatggatctaccacctactacccaaaccaggggagctacggttcctccggctactacccaactcaaggctataactattattccactagcagttatccgaccacgaacattctgggtagccaaggaggcggatacggcggatatggtggctacggaggtaatggaggttttaggcaatactcaggctattggcagcgggattatcagggtcagcggaatcgtggatatggctactacgatgatacagatcgtttgggcctgcccatctcgagagatcgttcctatggttcgagttcctatcgtggctataactaa

SEQ ID NO: 30720 - protein, 198 aa, DROSOPHILA
MVKSSVMFIKLFTLMLAVTGAWSAALPENQVATATRTTTSDLATAETSAKLLNLFGTGSGYPNYGYNYNRPSNPYYPGYNTNYYGSSGYYPGSGYGSTTYYPNQGSYGSSGYYPTQGYNYYSTSSYPTTNILGSQGGGYGGYGGYGGNGGFRQYSGYWQRDYQGQRNRGYGYYDDTDRLGLPISRDRSYGSSSYRGYN

SEQ ID NO: 30721 - DNA, 3018 bp, DROSOPHILA
cacacgaacgaacgtctacattccccgctgcccacaacaaacgtgttttgtgttccaaaaaaagcgacaacaaattcaataggaaatcttatcaaactgattgctgattggctgtgcgatcgccctaatatttggtttctgtttttgtctggttttttttttttttatactgcgcagttctttttttgctggcgtatgtttttcttggtttctgttgtgtttttgccattcgctgatttgattttttattggtaaattggggggtttctatatacagaggtgtcatcaacccccgaacattgaccgacttaccatcacacttcgatcaaggacacaggcagtccagttgaggattatcctcgcctcaatgcatttgaggcattagatctgcgcagacttacaaacctaattgaacggggaaaccagtttgcggcttacctataagaaaaggaaaaggacacccaaccatcccaaaaggataatcatgtaatggtggtggtttgagtaaagaatgaaagattttcattcaattaggtttcttatcagacgcaaaagaatttccaagatcttaaaagtccattcacgttctcgctggaaatgagtaagaaaatgcttgagcagcacaacgacctagaaatgccagcgcaacccccgaaaatgaaaattttaattccagataagccagagcacaggcatgagaatgcattccgagtatctgggcatctgggcaatactacgagtacactcaagtactagggcccacttcgacaaatatatagataagctggcagcgaaatgggagcgagcgaagtgaaaacaatttatgaatgaatgaatgaatgaatgaatgagccagcccaaatggatatgggctggtgcgagtgtgtgagtgagatgagcccctgcttagataatggaatgaatccactccgccgcgccgctcgttcagttatttccgaatatttcttataataacaacgaaacctgttttctgccctcaatgggcgttgagttgggatggggacgtggagggctagagaagaacctaacccaagttgaacttgcctcgcggcaaatggggcaaggacacgatgaatgttgttcagctgcctatttgccgcttggtcatttgaataacaaaaccttgaacagagggattcccagacaggatatcgaattgggcaccgaactcaagtttcattttctattccctccagcgaatccggcaaatcttgcgagtcccaccgaggaatgcggttgtgtgcgactgggcaaatgcaaatggttcaacgtggccaagggatggggcttccttacacccaacgacggcggccaggaggtgttcgtccatcaggtgggtactctctttcttggatgaaactgaggtctttccttaatgcaaggccttatgtactatccgatagaatatggaaaatcggtataataatttaatatttaatgcattaattcaatataattctcattataaacgtatgcatatagagcgtcatccagatgtcaggtttccgatcactgggcgagcaggaggaggtggaattcgagtgccagcgcacgtcgcgcggattggaggccaccagggtgtccagcaggcatggcggtagctgccaaggcagcacctacaggccgcgaatgtgagctcatacccaatcgtttaactaattttccccattttcaccacctacccaccaaccacccaacagaaatcgccggactcgccgcatgcgctgctacaactgcggcgaattcgccaatcacattgcctccgaatgcgctttgggtcctcagccgaagcgctgtcatcgctgccgtggagaagaccatctccatgccgactgcccgcacaagaatgtggtaagtgctcctctacgattccacagccccatttcgaggactaagcccacatcgtttcgcagacccaaagccacagtaatagcaaaagcataagcaacaatagcagcagcagtgcagcccaagagaagagcgaggaggccacctaggaagtccttggatcttggactggtagttggaagttagaaacttccttgacaagtacaaaatggaaatctaagaaaaaacacgcatcaaatcaaagaaacccacgtacaacaaaactagctactacacttagatattagcgggaagagacgcgccccgaaaaccatcctatcctaagtttattttctattttaacattattttctaggaaccatagttgctaaggtttttcactagatcccaagtaaacgaattaagctagagagcatcccttggtctgttttttgaaatcggagcttttgcaccctggggccgaactaaaagctctgtgctgataagaaagtcctggtcgcgagtcacgtggccactgacaacaatggagctttccttggggcaacaacaaacagctacaaatggaatcaccatgaaaacgcagaatcactgtgtaagcttggaaacctgaaacccgccgctcccggcgctaaagtcagcacccaccaccccctgaaagtgaaacatagtgagcagcagcaacaacaaacggattgggcgaggacatggccaggaggagcagggaaagggaaagtcctgcctttttttggtcgctctctttttctctctctctttttctccagctgcctctctgcctcttggctcttggcccttttggctgtttttgttgtggtttagtttgcaacattttgttcgggctcgctctctcgcgatttttgtccttcgccaaggaagcaggagcaggatacccaaaaggatgcaactaaggccagcgtcgagctcagtctcagttgatctctgccagagaattgttgtgtgcaacgcggcggaatttacatttacaccatattaacacagaaaaatatgaagacccaaaaataaaggaccctcaagtccaattatcaaacttaaccaaaaacaataacttagacaactaaaagaatttcaacaaagttaacaaagcgtttcagcaacaaattttcaaaaacc

SEQ ID NO: 30722 - DNA, 546 bp, DROSOPHILA
atgggcgttgagttgggatggggaccgaatccggcaaatcttgcgagtcccaccgaggaatgcggttgtgtgcgactgggcaaatgcaaatggttcaacgtggccaagggatggggcttccttacacccaacgacggcggccaggaggtgttcgtccatcagagcgtcatccagatgtcaggtttccgatcactgggcgagcaggaggaggtggaattcgagtgccagcgcacgtcgcgcggattggaggccaccagggtgtccagcaggcatggcggtagctgccaaggcagcacctacaggccgcgaataaatcgccggactcgccgcatgcgctgctacaactgcggcgaattcgccaatcacattgcctccgaatgcgctttgggtcctcagccgaagcgctgtcatcgctgccgtggagaagaccatctccatgccgactgcccgcacaagaatgtgacccaaagccacagtaatagcaaaagcataagcaacaatagcagcagcagtgcagcccaagagaagagcgaggaggccacctag

SEQ ID NO: 30723 - protein, 181 aa, DROSOPHILA
MGVELGWGPNPANLASPTEECGCVRLGKCKWFNVAKGWGFLTPNDGGQEVFVHQSVIQMSGFRSLGEQEEVEFECQRTSRGLEATRVSSRHGGSCQGSTYRPRINRRTRRMRCYNCGEFANHIASECALGPQPKRCHRCRGEDHLHADCPHKNVTQSHSNSKSISNNSSSSAAQEKSEEAT

SEQ ID NO: 30724 - DNA, 2123 bp, DROSOPHILA
aagtgaccagggcaagcgattgagtgtgtgctcctccagggacaattcacaggatcgcctgtcggccggccgacggacaccgagtcctcgccgctcctccgaaggcggtggcatattgaagcacaccacaggaccggatcctggtatcctaaagccaccatccagtccagccaagtcgaagagtccagatcggagctgtctcaaaaagggcggaccatcgcatgtttgcagcgtggagactctatcgccaagggtttcacccagaggcagtatggatcacctgtcgcccgatcgcggtatgaccagcagttcctgtctgcgccactcccctcgcagcagcttcgatagccacggcgagtcggatcacaacttggatgtaccacatggcagtcgtaagaggagtatgtctgcccacggcagctttgagacgggcacacggcctagggcccaggaaacctatcagtattatccagtgtatgacaaccagacctgcagtgatcactatgtggctgccgcaccaactggacgatatggcggtggcactagtagcaggagcaggctaagcaaatccctggagcgctccacttccagggatagcaccaccaccagcagctcttacggacacagggcatatggggtttcccctgaccgtaactacgtggtcttcagttctgggccactgcgatcgcagtccgctgagaataccttctcttcgcagcccatatacgatcccttgccccgtcatccaccacaaccactgcatcagccgccgatgcaccaccaacagcaacagcagcagcagcagcaacagcaatatatgagctatgccccggagatgggaggatacactggctgccagcatgatccgcagggcggctaccaactcagctcgtcggcaccggagtacactacatgcatcgactgtctgtaccagaagagaccctcctagcataagtcccgcgtgcggcagagtcgcacgcggaagaagacgccacgtggaatggtggtggtcagtgctcagccgacggccaccgggggaataggattcgtgcccgagatgggctcctccgaggcacccggcggttgtgtagactgtcacgactacttcgagatccatgtgtaagggaactcttcgccactcaaggacctccactaaaagacctccactattttgaaaccaaagataacagacgaacaacccgaaatgcctcaaacaaactaattttaaccgaactcagctcacatatacgtaaactcacaatgcaaactataaacgaaagtaatcaaaaaccgaacacgaacttccaacacaagggattgaaatcaaaataaagacctagcctacaggctatatacaatctatttactagaaaaccacgagcataggtaatagaagaaaggcactcttgaaactagatgaaaatagctccaacgtcaacataaccaatcgaagtccccattccttgtacttgttgtgtaagtgttagccataagtcaccgaacctgagcgtagctagctcttttagcgcagcatatgtagtttataccgaaaactaatcaaaggttaaaacggtgggtaactaatcccggttggcgaaaggttgcataatgggtgtgtgccaccgttttgcagttaattatttaagttgcagccgagttgggcgcgaacattttgccgtgatttacacattcgcccacattctcactcacacacccaaccaaccaccaacacacgcattaacgaacaaaatggcggaagttccgctcgcctcgggtggcaagtagaaatattacgtatacgccgcgttgcacacacaatactcaagtgccgtaattacgagggcaaacaacagaaaagagcagtagtagctagggctgaagcagcagcagcagcagcagcaactaaaaactaaagttgaaattcatactcgcactcaagtaaactatgtactaagagacaggcagacaaacaaatggcaaactcaacttgaaacacatatagatggggaaataagacagccaagagcagaaacaaaacgaaaagacagcgagcacagctaaaaagttcggcaaaaagttcgccagctaactaactattagctatgtgggatggaaaggcggaa

SEQ ID NO: 30725 - DNA, 123 bp, DROSOPHILA
atggtggtggtcagtgctcagccgacggccaccgggggaataggattcgtgcccgagatgggctcctccgaggcacccggcggttgtgtagactgtcacgactacttcgagatccatgtgtaa

SEQ ID NO: 30726 - protein, 40 aa, DROSOPHILA
MVVVSAQPTATGGIGFVPEMGSSEAPGGCVDCHDYFEIHV

SEQ ID NO: 30727 - DNA, 3391 bp, DROSOPHILA
tatcctggaagctcgtcgtattcgtcgcgccgtctaaacgaatgactgccttttttgggcgcaggacaaccccgaagtatcctttcatcttgttacaatttcggttcccagctcattagcgtcggcgtcgcagtttttgtggccgcatctaattgctgcatgcggccaaaatgaatactgctgaatcgcaactacagaattcactgcctcactgcgctaataagttgaacatattcttcgctctactaacatggcgtatgttacttttggtacccgcgaaaatctggtgctttttctggtcctgggagcctatgttttcggtctacctcacaatcgaaataatgggttgtccggccaggaattcaaagaactccatatgctgccaaatcaagatatcttcgtcttctagaatccctggtttgggattctttttttcaaaaattaattgaattttaagctcggttgtcttttgggatttcttattaaggtggcgtctatataagcttaatcacattatttcgaaagcatagacaactcattggcttttgtttaagcttttcaaaaatatttgattgcaataatcctcaagctcattttcataacatgattttagaatacttcagatctactacaagataaaatttcccattaacccaaattttattaataaaacgtgattactattgaattggcataacaattagatttttattgaaacattcagccacacattgaatttgcaacttagccataatatcttacaatgatgaaactgaagatcctttcgggtccttcgataagaaagataattaattgagatacagggagatccagttacatatttaagatacaaattgcactacatttaaagctaaggggaaattaaatcggagcgtgggggaaactaaagttaatatcacaatcgaaaatgggcaacgggttttgtttttggggagttagttgacttgatgacttaaaaatatccgaagaaatgcttcgatcatttgggcataccacccattcggcgacctggcggtgtgccgccgaccacgttgatgatctcgttgtcaccggcagatgaggatgagtcctccagctgcggctggtgatcactggccttgtcctggtgggcggtcatgtgtcgcgttagatggtgtcgctccctgaaagtctcctggcagacgggacatcggagtttctcctcccgcttccgtcgatttggatcgcaggccacttcgcttttgtgatgggatcgcatgtgatacaccagatcactggtcatccggaaacttatgttgcacttggcgcacacattctgagcggtcagtgtaaaagtggatgccaatgtgggtggaatcaaccgtggagagaatggcctgcctgcagcagggattctggagaggttgggatacccgcgaatggatgtggtggcggagcaaatccgggataggcatgcaggaactccgacggtggacccggtggtgagtttgcctgcatagtaggtcctcctccattgggatttccaggtcctggtggacgggtgtacaacaactgctgcttaaggcgctgctgtgcctgcagagcctgcatgggattcaccgcctggaaggctccgttgaactgatactccggtcggaagttgtggtagactatgggatttgctggcaggggatttggattctggccaccgctattggttcttggtggaggtgtcaccaatggtggacttatcgagtgacagcttagctgatcgggactcaagggcggagctcccgcatccacgggtgattccaaacgtgaagtggtcgatggtgaggatgatgaagtggacagcgacgaggaggctactttggtaaaagcgctgcgcatgggcggtggtggtgaagaagttgatggtgcctctggagaatccaccaggggtatgaccacactgggatcatcataaacccgcggcgaacggatgctgatctgtggataccgctggcgtgcctccaacagactaatgtactccagtgccgccggcgaaggtggttgcgaggaggttcctcgaggagacaaatctgtgggatagtggctcatctgctgctgctgctgttggtggtgatgatggtgcagtgcctcttgaaggcgagcctgcttctcggcctgcttttgcttaatccgttcatcgggcatcatgaggaaggccacatcgaaggcgcgtttaagagtggtctttccacccggtggcgatgtgggtgtctcattgttgttattgtgattagtggtttgattttgctgcggtgactgttgcggtgatgtggagatcctaagctcggcgtgctgaggcggcgttgggcgacgctggccaggattcgcgtgcgacggcatgctatccatgagcagattcattttcacttcaatacacttttcgactttcacttggctctggtagggactttgggtctttggttctatacagttccttgcgattcgaaattccagtttcgactgctggccgcccgcaatctgttcctctttaagtacccgctgccacaaccaccgcgtccagttggaattctcgtattctcatattgtcccattcaattgggaaaaagcaactctccgcactcgcggcacttggcccatctgtcctgattctgctcggagtctgttcagattcaggtcctgcagagagcaccacccttatgttcctgctcttgctctttcactcccgcttgtcctctctttctccagcggtcttctctctctttctttggcccactctccgtctctccagcgttccatctgctttgccagttggcgaacatattctgtggttttattgtgcgagtcctagccaggacgactcctggttggctagcattcacggacaggttggcttgttcgaaaaccttgttgtgctgtatgtgatgcattggtacaatgggcaatgttgttgttaaagttgtgtgatattatttaaaaaacttaattgattaaacttagaaggatttgaaactagggtcatctatatgagaagttactcttattcattcaaaagagttgaatatcttgaagtagttgcgcttaaacttcattaggtaaatgttttcaaatattttacaataaataaaactttttcgcatggtttccatttagatttttaccaaaacattatattttactaaattattttccctgttccgcccactgtgcactcatctcttttcgcaaggaggcggtgcttgatcctggccgctctctcgcttgctctctctctcgatttgcctctcacacccaccccgaaaatatggcaggacctgccctctctgtctggctctatgcccgtctctgtcggtggtgatgtccttgttgcaagtgtttccgaacaggttgtttttgtcgattt

SEQ ID NO: 30728 - DNA, 1317 bp, DROSOPHILA
atgaatctgctcatggatagcatgccgtcgcacgcgaatcctggccagcgtcgcccaacgccgcctcagcacgccgagcttaggatctccacatcaccgcaacagtcaccgcagcaaaatcaaaccactaatcacaataacaacaatgagacacccacatcgccaccgggtggaaagaccactcttaaacgcgccttcgatgtggccttcctcatgatgcccgatgaacggattaagcaaaagcaggccgagaagcaggctcgccttcaagaggcactgcaccatcatcaccaccaacagcagcagcagcagatgagccactatcccacagatttgtctcctcgaggaacctcctcgcaaccaccttcgccggcggcactggagtacattagtctgttggaggcacgccagcggtatccacagatcagcatccgttcgccgcgggtttatgatgatcccagtgtggtcatacccctggtggattctccagaggcaccatcaacttcttcaccaccaccgcccatgcgcagcgcttttaccaaagtagcctcctcgtcgctgtccacttcatcatcctcaccatcgaccacttcacgtttggaatcacccgtggatgcgggagctccgcccttgagtcccgatcagctaagctgtcactcgataagtccaccattggtgacacctccaccaagaaccaatagcggtggccagaatccaaatcccctgccagcaaatcccatagtctaccacaacttccgaccggagtatcagttcaacggagccttccaggcggtgaatcccatgcaggctctgcaggcacagcagcgccttaagcagcagttgttgtacacccgtccaccaggacctggaaatcccaatggaggaggacctactatgcaggcaaactcaccaccgggtccaccaatccctgctgcaggcaggccattctctccacggttgattccacccacattggcatccacttttacactgaccgctcagaatgtgtgcgccaagtgcaacataagtttccggatgaccagtgatctggtgtatcacatgcgatcccatcacaaaagcgaagtggcctgcgatccaaatcgacggaagcgggaggagaaactccgatgtcccgtctgccaggagactttcagggagcgacaccatctaacgcgacacatgaccgcccaccaggacaaggccagtgatcaccagccgcagctggaggactcatcctcatctgccggtgacaacgagatcatcaacgtggtcggcggcacaccgccaggtcgccgaatgggtggtatgcccaaatga

SEQ ID NO: 30729 - protein, 438 aa, DROSOPHILA
MNLLMDSMPSHANPGQRRPTPPQHAELRISTSPQQSPQQNQTTNHNNNNETPTSPPGGKTTLKRAFDVAFLMMPDERIKQKQAEKQARLQEALHHHHHQQQQQQMSHYPTDLSPRGTSSQPPSPAALEYISLLEARQRYPQISIRSPRVYDDPSVVIPLVDSPEAPSTSSPPPPMRSAFTKVASSSLSTSSSSPSTTSRLESPVDAGAPPLSPDQLSCHSISPPLVTPPPRTNSGGQNPNPLPANPIVYHNFRPEYQFNGAFQAVNPMQALQAQQRLKQQLLYTRPPGPGNPNGGGPTMQANSPPGPPIPAAGRPFSPRLIPPTLASTFTLTAQNVCAKCNISFRMTSDLVYHMRSHHKSEVACDPNRRKREEKLRCPVCQETFRERHHLTRHMTAHQDKASDHQPQLEDSSSSAGDNEIINVVGGTPPGRRMGGMPK

SEQ ID NO: 30730 - DNA, 3945 bp, DROSOPHILA
tagcctttgtaatggattgcagtggaaacaatcttttttttgttgtcgttccagtgactttaagaggagcttaacaacgtaatttaaataatattaggcggctattaaaacctgttaacccgcgctcaatctcgtcgtcatcatgggcgggtcagcatttttcaaaggctaattacgttttaaaagtccattttaccctcgtgccttgttgttttagggctttttttgacctgaggctgtctgaccggttgaagcttgagcatttgaataattatttcaaaacgtctgtctccgggtcaccggagtagtttgacctggcaaagcactcgaactcgaacggagcgcatatccggttgccgttgtcaagcaccggattttactcaagaagtacaggcaagcctaactaacttgtaccaaatacttgcttgccatttaaggcatagtaaagtcaatactcattcaaagatggttgaaaatacagtataattcgcttagctgcctcgagtactttgcacaatgcctcgatgcaggtaacttaaaaatgcagctaacttaatttttttttttctattttctattttctattcacacaaaaaaatggaaaaataatgcagatatcttgccgatgcagctaactatcgatgcagctaagcgaattatactgtaatataatcagatagccttaaaaaatactttttcccagaaacctttctgctattttaacaatacttcaagttaagttatcattctgaatacaacgagtatgtatttcagtatcctgtatcctatttgcatctaccaattagatatcttcgtttccatggagcaggcatgtcaactataagagcatttttgttaaagtctgctatatgcctgttgaaaatctcatttccctttattcagccctttcggatcaattaatttgtaaaaatatcttatagctctgctggaatgtgtattcgagaagaaacgcgtaacattggcttagtgatgaattgcatcaatggcaatgagctgggctggaagccagagtgaaaattggtatgcggccgagatcctctccagttggctgctccgtcaggtggtctagatggatatgagccatgttatgtttactaggaactacatggccaagaacgccctatggtcgtacctgttcgggactgctgctcctcctcctcggtgatggtggagaagttggtaggccgctgcgaagttattagcgggctggctgctccgagcatacgtcgccgcttgccatatccgcttccggtctccagctgctgcaacagattattgtgcagttgctgttgctgtgctttggttagcttctccgctgctgtgaagaccacaataggcttggatttgacggaggcacacggtgttcaggtggggagggggagggcaagtaagcatacttgggagtggcacaacacattcaccgaatacctaccgatgccgtcgaggccgccagtcgcatctccgcccgctgggaacggaacgtctggtactgcgagatgacgcacagcagacagtaaagctggaagcgggtaatgtacattgcggtttagtaggacattcaaatattgtgcattaaagttatggttacttctacttacattgaggcacagtaggaagaaatccatggtaaagatgaaaccgacaatcggatcgaacttgacgcggcgggatagggccaagtggaccaagtggcagacctcgatgagcagatcgcccagcatgaaactaatccagggtatcagcagatgtctcttgttctgtaatttcatccgaaattgaggccacatgccgaccgcattgcgttgaagtggacaaagtagcacactcacctgctggaggcccaatatgagcagaaccgacgatagcaccatcagtatggagcaaaagagcaacaaaatgttgaatatcacagtcactgcaagaggcataaatcacacgtaattgagtcgctcgcaaggaacaagtggctgtgtgttggatttagtatccttccgtactagtgtatccttcggtatgctcacctacagtcacatcgcccttctccagcaaactttcacccagcggctgagcacggttacccagcagaaagtcctgttcctcgattaggtagaacaaaaacatcagcgtcgagaagccaaagtaaacctgtatggggaaaattgtgcaaaaataatagaaacgaacaaccgagggtaaaagtaaattgcggcacacgcttcctatttacacggaaaaaagccccagaagtgtccccttcgccgttcccccaaaatgatccttcaaatgaaaattgaagccagtaattgttgaagaagtatgcagctcaacgcggaaatatgtttgcttcggtatgtatttcacttagttaagctgttaatcattccaatttactgggtttcgacagcaatcaataaggtaaacgtaatctaacgagcacggaaatgtttgtaatgagacatgaaatttatgcgtggcatgtagtgaagtttaatgcttccgaaaaactcaacttgttgctaaagcttttttaaaatatgcataaatcatcttctgcaatacatagaaaatagctaagagaggtcaagtgcaagggatattgcaacttttttgaatcacttgtaaaagttacattttaaaaccacatcttcattagtcataggtgtgcaactgagtaataaaggtttaggtttagatagattttgcttaaaaagtttgaagagaccattaacctttgtccaactgtttgccaaatggctgaaaaagttcgagggaattttgatatgtttacccatgctccaggccacaacttcttatctccagaaattattcatatttgaggagcgacctaccaacgtgtagatggcgcaggcaaagctgccactccgcacatccttccaaaagcaacaagactccaggatggccatcttttagtagctcacgcctcctcgcggatgagcattccaagcacgctgacacaagaaggattttattttacgttgttttctgcgcttagggaacggcagccgccactttcacttgactttcttcacttttacccgctgggataccattttatttcgtttcccgccaaacggttaatttgcttgctttacttgtttttctttagacaagtttttattcggcactcgacagataaatatctagaatttctctttgctgtttgcgggacactgccacataatttcatacacaagacgcgcagatttatgacactgatttatgtggcatgaccgggcatagttacgcggaccgcagtgtgggttgccaaaatgccaggacgcgatattccgaggagaaccgtcgccattgaaagtcgcatcgggactggctaagtagtcctcatgcgatggcgaaatgctttcaatttcgaaatgtactcgcacatacgttttatgaatgaaagttcgaaagtgggattgtgtggcccacgcatgcgccatctgcaggcgaagaacggcaacaggtggtaggattgctgaaatccttgcattctagctgcggctcaccgaattttcatgcaattaaccacaaactgtgttggcttagccaataccgcaaattagtgctatggattagttctctattggatttgccgagcctttaattaacgtgtaaaacgctctgcaggcggtctttgaatgaacaaactggcatggaggaagtggtggcgtcaaggagtcgggttgagttccatgacaatgcccatttcttgctccagttgctgccagcgaaacggaaatgaaaggaaaagtagcttaggcactcaaatggaaaatcaccaagtcatccgttgaaaagaatggcaccagaatttaacaagtcacagctgattaaatagttttgttcccgtgatgatactgaatttaatctgattttcgatgtatacaaatgactccatttttt

SEQ ID NO: 30731 - DNA, 822 bp, DROSOPHILA
atggccatcctggagtcttgttgcttttggaaggatgtgcggagtggcagctttgcctgcgccatctacacgttggtttactttggcttctcgacgctgatgtttttgttctacctaatcgaggaacaggactttctgctgggtaaccgtgctcagccgctgggtgaaagtttgctggagaagggcgatgtgactgtagtgactgtgatattcaacattttgttgctcttttgctccatactgatggtgctatcgtcggttctgctcatattgggcctccagcagaacaagagacatctgctgataccctggattagtttcatgctgggcgatctgctcatcgaggtctgccacttggtccacttggccctatcccgccgcgtcaagttcgatccgattgtcggtttcatctttaccatggatttcttcctactgtgcctcaatctttactgtctgctgtgcgtcatctcgcagtaccagacgttccgttcccagcgggcggagatgcgactggcggcctcgacggcatcgcctattgtggtcttcacagcagcggagaagctaaccaaagcacagcaacagcaactgcacaataatctgttgcagcagctggagaccggaagcggatatggcaagcggcgacgtatgctcggagcagccagcccgctaataacttcgcagcggcctaccaacttctccaccatcaccgaggaggaggagcagcagtcccgaacagaccacctgacggagcagccaactggagaggatctcggccgcataccaattttcactctggcttccagcccagctcattgccattga

SEQ ID NO: 30732 - protein, 273 aa, DROSOPHILA
MAILESCCFWKDVRSGSFACAIYTLVYFGFSTLMFLFYLIEEQDFLLGNRAQPLGESLLEKGDVTVVTVIFNILLLFCSILMVLSSVLLILGLQQNKRHLLIPWISFMLGDLLIEVCHLVHLALSRRVKFDPIVGFIFTMDFFLLCLNLYCLLCVISQYQTFRSQRAEMRLAASTASPIVVFTAAEKLTKAQQQQLHNNLLQQLETGSGYGKRRRMLGAASPLITSQRPTNFSTITEEEEQQSRTDHLTEQPTGEDLGRIPIFTLASSPAHCH

SEQ ID NO: 30733 - DNA, 2765 bp, DROSOPHILA
ggatttgcgcaatttcaacaccaaaatatgtaaaatggcaaattagtttttatttcttcacaatgtgtatgttgacatcagtttgtatggctaggcgtaaagcaagaaagtgcgtagagattatttttagttattttaagtggcaaattttttatatatttaattattgaaagatttataccaaaaataccatgtaaagtttaattttaatttaaaacaaaacattaaacaaacaaaaacgaaaaaaaaacaacaaaaacaaacaaaacgatgcgtaagaaaaaacttaattaaaaatttgcaaataattcacattttacaaacatcgattgctttttgatttggtctgatattctgttcttgttcactgtggcttcttgtacttcgtttatgatttgctgctctgcttttgctgatcttttctgtcaaatcagagggcagagtaatcaaggctctgacgaaccgagctaggttttggatagcatagattaactgggtcctctattgttctggctatatcaaagtcttgtcttattttagtctcttggcaggaatacgatgaaccggatggaacccattaggccgaaccacgcggaattacttttgcgctcagaaatggatctcatgcttagatttagtttacacaaggatggccaataaaattctgaatttgttgcaatcaataattgtgttttgattttattgcgcaaataaattgatgaatttaaatatgccgccctttgggaattgcttggcagcactggtcggagttagccatccctggttccaccatccctggtcgcatagccaatacacacaccaaatatagaaatatactgaatttagcgagtacattcaccgatatttatcgatatattgcagacaaacgtatcgaatgtatatcgagcttctgtcatctctgctagtcaacacctttcaaaaatagcggcaatttagcaaattgttaatttctctcccacttaaatcgacttaaatcaacatgtcaactgcccaggcgaccaaaaactgcatcacactcaagggctccgctcagattattgtggaatacctgagtgagtagcaagctacgtcacgaaagcgtctgtaagttcgcctgcaatggcgtctctggttctttttttttcctaaatagagtacggcatcaattcgatcctcttccaacgcggaatttacccagccgaagactttaacaacacgcagcagtatgggctaaccattctaatgtccaaggatcccaagatcaagacctttctgcagaacgtgctcagccaaactgaaggttagtggtcttttggaaaaaattcaagtttatggtgaccattatttgtattcacctatagaatggctctcgaagaacatgatcaacaagatctcgatggtcattacgaacgcccacaccaaggaggtgctcgagtgctgggactttaatatgcaggccgagttgggcgatggcgatatcagtgatcccaccaaggcaacaaccaccaaggagctgagtcgcatacagaacgagattcgcgacgttatgcggcagatctcggccaccgtgagctatttgccactgctcgattgcatctgcaccttcgacataatgattcacacgctgcagaacaccgaattaccggccaaatgggacgaaacgggtgccattgtcatacagaatccgcaggccgtccagctgcgctccttttctacaggactgcacaaggtggacaccgtggtcaactacaagatgagcacttaaaaggcagtaccgcctcatcctaatgtttaaatatttatttcgtttctatatttacaatagtgcgtaacgaacgtaacgtatttgagagttgcattaaaagccagttgtgaaaagctaacagttgctaagtagtagtttggttggccgcaggggtcgtctatttgtctgtgtgtctcaaatgcaatctggaggacgaaacagagtgagagagggtagcatttgttagtggagcgcaacgcaggaaagggcgtttgtctgggcgacagctacctatcctaagcagcgcttagtcgtcaagtctgcgagatagacccaagtatctagtctgtaccgaagtatttctggccaaagtgattaggtgccacgggatgcagctcggaggtgaggatcttcagcttggggaaggcattcactacggtccgagcggcaatgggtgtgcagaagagattggacaggatgatgcagctctcgggtacgccgtgttcccgcagcacattcaccgcctgcagcacagtgttgcccgtggacatgatggggtacatgagtagcacctgcctgctgccgatgtcatcgggaaagcgggcataaaccacgcgggcctcatgcgtattggcatcggactcgaccaggatctttccaatgcgaatggagcgacagcagtcacgcagtccctgctccatggcctctcccgatcggatgatggacacgccgcagttgccggagcgatacttcagtccctcgtaaatcgcaccggtgggcgtctccacatcgcaatgggtgtagggcagttggttgagcgactcctcgatgaccagccggatgagacggtcggcatagaacttgaagtcactgcgcgtggtgttcctggggggtagaattttgttgtactgctactacgctgctgactcctcctccccaacgtcacctacttgtcgcgcaatatggtcagcagttcggccacctgggaattgcactcgagtagcttcaggttgctgccgta

SEQ ID NO: 30734 - DNA, 624 bp, DROSOPHILA
atgtcaactgcccaggcgaccaaaaactgcatcacactcaagggctccgctcagattattgtggaatacctgaagtacggcatcaattcgatcctcttccaacgcggaatttacccagccgaagactttaacaacacgcagcagtatgggctaaccattctaatgtccaaggatcccaagatcaagacctttctgcagaacgtgctcagccaaactgaagaatggctctcgaagaacatgatcaacaagatctcgatggtcattacgaacgcccacaccaaggaggtgctcgagtgctgggactttaatatgcaggccgagttgggcgatggcgatatcagtgatcccaccaaggcaacaaccaccaaggagctgagtcgcatacagaacgagattcgcgacgttatgcggcagatctcggccaccgtgagctatttgccactgctcgattgcatctgcaccttcgacataatgattcacacgctgcagaacaccgaattaccggccaaatgggacgaaacgggtgccattgtcatacagaatccgcaggccgtccagctgcgctccttttctacaggactgcacaaggtggacaccgtggtcaactacaagatgagcacttaa

SEQ ID NO: 30735 - protein, 207 aa, DROSOPHILA
MSTAQATKNCITLKGSAQIIVEYLKYGINSILFQRGIYPAEDFNNTQQYGLTILMSKDPKIKTFLQNVLSQTEEWLSKNMINKISMVITNAHTKEVLECWDFNMQAELGDGDISDPTKATTTKELSRIQNEIRDVMRQISATVSYLPLLDCICTFDIMIHTLQNTELPAKWDETGAIVIQNPQAVQLRSFSTGLHKVDTVVNYKMST

SEQ ID NO: 30736 - DNA, 2909 bp, DROSOPHILA
cttctggagctcgagtccttcgcgttttgcattgcataatgcgctgctgttcccttccgattgccattagcataatgggggcattaggttggcacgatgctctgattgcatacttaacgacagtgccaagtgccgtcgatgcgccaatttaattagctgcaattgaagcaacgagcctgaatcgagcgaaaatcctcaatttaactggccgcatactggccaagtaaatcggcactcatctccataaaatcaacataattatcgcaagttaagaccaaaataagcaagtccaatttacgcttagactgctaattacgcaacgcaatgggaaacgatttaaaagctgcaaaatgaaaacccaaaggcagtagcacaaacttttcgttcggggctcgaactcatttcaaagtaatttgccgcaaaagccagtggttgccatagtgggcgtactgtggccaagggggcgtggcaagcgctgtttaacattttattggtaaccaaaaattttacacatcaatctcggttgttttctgtgtggtgtggtgggggggggggggggaattggaagtgtgtggcacgacgttgttgtggttctggccgtgagagctaaagtgtgtttgatgtttgttggattttccgggcggaagccggagcaggggttaagctgtggggggtggcgccacaaatccctgaatgaatacacacctgcaccgatactgacggtcaggcgagagttgtcccgaaatcgccattatagcaatgcaaaaactttgccaaattggcagacaacatgcaacatgcaaatcgtaccactagcaatggatgcactgaaaacaaaaagtagtaaatgttattaatattacatcacactttacttaagttgcataacaattcaaaaataactgcatactaaacaatgggaatgtaataatgggaatgtattaatacttataattactttctgtgcactcctatcccttcacaggtgaaacgcctgaccatgggcattggactgctgcggggaaccgaggacagccgccccctgatgcacagcacctgcggctcctcgctgacctccggatccggctgtggatccactcagaccatctccgatggctatgtgaacgaggccatctgcgagccggacaagtacgtggccagcaagttcggcgactcctgccgccagtcactgtccgcactggagagtgccacccagcggctgcaggtggagctgcccgccgccagcaaaaagtatctgagagagacgtgcagcggtaggtagactcttatgtcacagatatgaaatggttggctaaggttaccttacttccgtgtaattatcagccaactccagtccgaaattgtttcccggccacagtgccctgcgcctggataatctcagcctagccgagcagcaggagcttaagggagccgcctggtttcaagcgggcattcccagggaaatatccctggaggccctgtcccgacagagtccaggtgcgtttctagtgcgccagagcagcacaaagccgggatgtttcgccctctcgctgcgagtgccaccaccttcaccacgagtggcccactatctgatcctgcggacgcaaaggggctacaagataaaggtaagtccgagcacattatatataatatttattatatattatgatggtatttaccattttagggcttcaccaaggagttcagttcgctgaaggcgctgatcacgcaccactcggtgatgccggaactgttgcccgtgccgctgaccctgccacgcccacctagtacccgatcgcaacgatcgcagggcgcctacgcaggcggaaccggaaacgggggagcggacttcgagatgtatggctcgctgaacgactttcgcaaaatgatggccgatttgaatgtgtgaccgctgggcgctcttaattaattaagtaattatgtcacgttgattgaattaagctgcccagcttgtcacattgtcctgcgtcctgtgtcctctgtcgcgacaggataacaatctgtttaatttgcgtaattggctgtgctgacgacggttgacgtggctaccaataaatagggtccatgtccatgtgtactcgggccggcaaaggcccacctgtccgacaggtgctgcaaaaagtgcacaaacattttttattaaaattgataataaaatcagctacgtgggcggctgcgatggctgtggtttcgcaggggcgtgtttgcatacacaaatatagggaatacgctcaaatcatttttgcgaaactgattaaaaaatggcaaaaacatgcaatatgtatacgcaaacagacatcaagtgattattatttttcgcgtttttatcaattctgctcgttttgtacggctagtgctgagtggcagatgcatcagacagacgtactatacatatctgaatgggggcagtcggattaaatgttaatgtttgggtagggaaatcgagggtcggctgccgggatttggagtgcggatgcggaatgggcaaagtggattctttttgtatttgatgcactcactttgcggtgcagtggctagatagacttatatgggaagtaaatgaataaccaattatattgtaactctatgtattttgtaataaagttaatggaaaaccttttcaaatagtattgtttattttctgatctatagcatgcaatatacatacaatcacgttgaaaatgaagcattggcttaaaggtagaacattttataatatttaacaacaaatttgttttgaaataatgtgagtgggtaaggaaagtttaaatttcccgcacattatcgatagctctttcgatagaatcggtcggcaatcggctcgcaaactcgctagagaactgttaaccaactgtcatagtttgagttcacgctacgctccattctaa

SEQ ID NO: 30737 - DNA, 777 bp, DROSOPHILA
atgggcattggactgctgcggggaaccgaggacagccgccccctgatgcacagcacctgcggctcctcgctgacctccggatccggctgtggatccactcagaccatctccgatggctatgtgaacgaggccatctgcgagccggacaagtacgtggccagcaagttcggcgactcctgccgccagtcactgtccgcactggagagtgccacccagcggctgcaggtggagctgcccgccgccagcaaaaagtatctgagagagacgtgcagcgccaactccagtccgaaattgtttcccggccacagtgccctgcgcctggataatctcagcctagccgagcagcaggagcttaagggagccgcctggtttcaagcgggcattcccagggaaatatccctggaggccctgtcccgacagagtccaggtgcgtttctagtgcgccagagcagcacaaagccgggatgtttcgccctctcgctgcgagtgccaccaccttcaccacgagtggcccactatctgatcctgcggacgcaaaggggctacaagataaagggcttcaccaaggagttcagttcgctgaaggcgctgatcacgcaccactcggtgatgccggaactgttgcccgtgccgctgaccctgccacgcccacctagtacccgatcgcaacgatcgcagggcgcctacgcaggcggaaccggaaacgggggagcggacttcgagatgtatggctcgctgaacgactttcgcaaaatgatggccgatttgaatgtgtga

SEQ ID NO: 30738 - protein, 258 aa, DROSOPHILA
MGIGLLRGTEDSRPLMHSTCGSSLTSGSGCGSTQTISDGYVNEAICEPDKYVASKFGDSCRQSLSALESATQRLQVELPAASKKYLRETCSANSSPKLFPGHSALRLDNLSLAEQQELKGAAWFQAGIPREISLEALSRQSPGAFLVRQSSTKPGCFALSLRVPPPSPRVAHYLILRTQRGYKIKGFTKEFSSLKALITHHSVMPELLPVPLTLPRPPSTRSQRSQGAYAGGTGNGGADFEMYGSLNDFRKMMADLNV

SEQ ID NO: 30739 - DNA, 2606 bp, DROSOPHILA
aattaatgcccggccagcatggcgtatacttgttaaatgcagagcagcatcacagagcatccaagaacatctcaacaactgtcgacattttcgcctgcagctgcagcttttcttacaccatccctgtgatattgcaacaaccctttttgcatcccctttcaatgttgccagttcttttgtggcacaagcctccattgttcattgtttaaaagtgggtaaagtggtgcagcacaggccgaccggttggataacaaaaactgatgcaaaacgagaccttcggggcaaagttaaggcctcctttcgtctattcttttcaatttcaatttgctccatttcaaccttaacccacattcggttgcaattatccgacgacactccactggaaaccggaaaaaccactgccgaataagctttaaaaattaatatgctgaaaatcttgaaacaatttgcaaactaatagcaaaaggcttaaaatcgcattaaaagtttcccccaagaactatcggcacaagccagaggcatatatatgtatgtagttttatatgccgagagattcaataagcagccagttgtgggcacaaagtttgcagtcagaaaggcttaaagccttttccaaactggcagcaacttaaagaggggcaaaacttctggctgaaggcggaaaattttgcactgcaagaataagtcaagaaatcatcaacgatgccattagcatagggtccagaagtgaccgaacttctgccccttagtggtggcaaaaagttttgtggctttctttttcgaaaggggttgccaagagttttaacaagctccttacattttcttcccccttgcgggaaaaataggaatatagtctcgtcttggaaaataacttaataattaggtggcttgaaatgaatctaaaatatgtgcaaacttaagtgttatatgcataaactatttttctacacgtttttgaacagatgctttgaatgtttgaggcaagatatatgaagtaccaatgatcatgcaggatatacgcctacgcctggaaccacagcacagtaaagccacattcatatcctcctcctcggcctcatcgtcctcatcccaaacagctgagaccacgctgattgagacagctgagaagtcgccagccaggtgagtgtagggaagggaagggcagaagtaactcccttaatctttaacgcaaagtatacctcgtccttaatcctctcgctcatttgttaaccgcagtgaagcagctgctggaacagtgacaacgacatcgccgcagcatttcttccatcatcatcatccgccggctcatccgcatccgccccgccagcagccgcatccgcatagccactcgcatccgcatccgcatccgcaactccagcgccgcccggtggagcagctgcatctgctgcatagccaccacgatgtccaggagctgtccggacaggagcatccacatccgcaacccggctcgcatccgcatccgcaccatctgcgctcgcccagctccgaggaggataattcgcccacagaaatgaataattgccgtcgtttggtggataagccgccgctggtaagttctgcgagggttcactgtaagaaatggtagtcatattttaaaaagctgtcggaaaaatataagaaagccctttatattgtagggtaacacttctatatatattatgcaaaaggaaataataactctgaatggcaggtcataatgtatgcccactgatttttttcaatacataacttattctcattttttgccgattccgctagttaatattaactattagccaatgtattgaaaacagagacggattttgcgatgccagtcgagggagcaatcatttttttttttgttttgctttgttgccaggctcctttgttggccatttctcattgctcgcaaattactttgcacagagcataaatctgcttacgctgatgatttgccaggaaacaagagctggtgggggaatttgaaaggaattacctattggaggagcatcggctggggatgcacttagtgaaagaaatgccaggtagcggcggaaaaggaaaacttcagatcgagacagcatttacgaaatgcaaaaagcgaggaaaatgagggaaaattcgttcaattcatgttgcctagcttaaattctctatttagttgttttaattgcataaaccttaaatcacttgtgtgaaattgcgctgcttgaatcgaactcgaaagcgacaggagtaggcacttcaggtggaaattgtttttgccaccaaaactgcagccgaaaaggagttcattaaattaatttgcacaaatgcaaattttcgagtaacgccactttggcacgcgccactaacaaaggtgcactagctgcacacgacgaaaatgcagaacaaatgggaggacactgagagaaataatttaatattacccaaaaagaaaatccagaaatatttgaatgtaaaacattactagcattttttaaaagattttcatggattttagcaaatttatatagtatatttcagatattaaatttcgcaagaaatttgtcacttgacatgcgagcataattcacttgtaaagagcagtcctaaatgtgtttaac

SEQ ID NO: 30740 - DNA, 510 bp, DROSOPHILA
atgatcatgcaggatatacgcctacgcctggaaccacagcacagtaaagccacattcatatcctcctcctcggcctcatcgtcctcatcccaaacagctgagaccacgctgattgagacagctgagaagtcgccagccagtgaagcagctgctggaacagtgacaacgacatcgccgcagcatttcttccatcatcatcatccgccggctcatccgcatccgccccgccagcagccgcatccgcatagccactcgcatccgcatccgcatccgcaactccagcgccgcccggtggagcagctgcatctgctgcatagccaccacgatgtccaggagctgtccggacaggagcatccacatccgcaacccggctcgcatccgcatccgcaccatctgcgctcgcccagctccgaggaggataattcgcccacagaaatgaataattgccgtcgtttggtggataagccgccgctggtaagttctgcgagggttcactgtaagaaatggtag

SEQ ID NO: 30741 - protein, 169 aa, DROSOPHILA
MIMQDIRLRLEPQHSKATFISSSSASSSSSQTAETTLIETAEKSPASEAAAGTVTTTSPQHFFHHHHPPAHPHPPRQQPHPHSHSHPHPHPQLQRRPVEQLHLLHSHHDVQELSGQEHPHPQPGSHPHPHHLRSPSSEEDNSPTEMNNCRRLVDKPPLVSSARVHCKKW

SEQ ID NO: 30742 - DNA, 2963 bp, DROSOPHILA
ttgtgatacagacaaacggccagacatgatgcgctctgccacaaaatattccgcaaagtcaacagcggcaacacaaaatgaggtcaaccatgaaaattgcaccggcggcagcaatttctcattttgagtttagcaggctgctctgccgaagagcaacaaaaactaaagtactccatacgaaaaaaaaattttgaaaaaagaaggaatttcgcgatgcggtccactgagtgccaatgttgttgctgttgcgcttgatgttgctgctgctgctgctgctgcttgttcctgcggtcgatcagttgctgttgctgcatgtttttggtgtagctgctgctgctgctgctgctggtgtcatgtcgttcatcagcgtaacaatttttattgctggtcggaccgcaactttgttgtcgataaaattttaattcgctttggcttacatctttttgcacgctccctttatgcgatttcaatttaagctttagcaaaagagagcagacagaaaatatgggttataaaaacatggttaacccgaaacggatgacagaatttaccagaaaagtggccattaaggcactacgatttcaggactatgataaccattttttatttaataacaacgtaattagtataaataattttgccataaattcactaactttcaaaatggttttgcctgggtcataattcatgagaatctcagagcattttccattcgttggtacagaatttcactggaatttatgcatgcatccttcgacgaccctgcgccaaattgatttatagcgttcaaacacgtttcgccaaaaaaaaagaaaaaatttgcaaccagaaggggggacaagcgaaaaactgaagacaccacagcgatcacgtccccaattataaacacaactaattgccccggcaaatgttgcatgaaagcgttgcgaattcataataacatggcatacaaattttgtgctaaattgtcaacattagctggggcaagcagccacctcagatgcaacaacagacgaagcagcagcaacatcagcagcagcagcaacacttgacacagcaactacttctgacaccgctgcaacaatgtgaggcacaagaaatcgcagattctatgggccacatttatcatggctaccgttttcagctctgcacgcttttgacctgctgcacagcagcaacgcgcgtgccacaaacagcagcagcagcagcaacagcaacagtcgcagcaacaacacaatgccaacacgaaaccttccaagaggtgaacttgctcagtgatctttgatcttatcttggccacgggtgcaggtaaaagtgttatactgcagataggtgcactaagaaaaaatcgaggcaatcaattagggaaaataacaaaagtcaatacatataatatttaatatttcatattttaaacttcgtttaccaaaacagttgctttattttgtacgaacccatacctttccttccccgcttgttactgattaattgaaattttgcatatttcaagctctttgcaatgttcattaatcgcttcccattctccagtcctcttcagatgcataatttggccacgccccaaacatgttgcaagtgccactttggggccgtctcaattccccttgcacaacgtgatgcgttaccctttgcttgccacatttgttgtcgccgtttaatgcgtttttaaagtgcacgagccccgcccacggggcgtatgagaaacgttttcagttattcagtgccggcaattagacagtgaatgtcataaatgaaccaacagcaccaccatggccactcgctgctgtcaaaaactatgccaactaatgacagtgcgattggagctgaagctggaattggactgggaataggaatgggaattgaaatggctctttggacggccaacggaaaacgagccatgggattggattggggaactgtgggattgaagctgcgcaagatgtaagcgaagtgaggcaattacacatgcaaattgccggccacaagcctcaaaactgaaaactcaaaactggagtctcgccgcgaagtgaacaccataaatcagttgtcattgccacatttcagtttgtctaagcacacgtcaaattgcactcgtgttggagggaatggtaacagcaggggaacttcattagcaagagaatgaagatggaaaaccaaaaaaaaaaagctagctatcattaacattttttgtgcaattaacagcttaggttcaagcccacattgtaaatcagttgggatggaagaaaacgggcctacaactaattggctaagaagggtaataacaaaatgccttatgttattgcaagaagcttgggtgtttgaaagtaaaatgttagctaatatgaaaaaaggtctaaaccaagtaatttgcctttaatcagaagtacttttcctctgactgaactagttctgtaaaccaagaggcctcctttgtttcacccatgccactttcgagcatctcccccaacaactggttcgcctgccccgcacctgactgctcccttctgcccaccaccggaaaccacatcttggcaacacacacacacacacacacacacacctagaacttcagctgaaactgcagctagaccagcgacatgttgccagtgtcgcccagcagcagcaattgctgctgacgtcgacgcggcgacaaaaaacacgctgccaagtgatgcggcgcacagcagcagcagcaactggcgacttgtggcgcaaaagcaacagcaacagcagcagctagaacccagcttcgtgttcgagttcggctgctgctcgtggctcctctgaagatgttgctgccacagtgacttgggagcccacaattcggagccccatttgcaatagaaatgaaaaggccgttcgcactcgttaaagtgccaacatgtccagttgcttatcagtcaactcactttttccgcttgtcataaattatgagaactgttgca

SEQ ID NO: 30743 - DNA, 318 bp, DROSOPHILA
atgcaacaacagacgaagcagcagcaacatcagcagcagcagcaacacttgacacagcaactacttctgacaccgctgcaacaatctctgcacgcttttgacctgctgcacagcagcaacgcgcgtgccacaaacagcagcagcagcagcaacagcaacagtcgcagcaacaacacaatgccaacacgaaaccttccaagagctggaattggactgggaataggaatgggaattgaaatggctctttggacggccaacggaaaacgagccatgggattggattggggaactgtgggattgaagctgcgcaagatgtaa

SEQ ID NO: 30744 - protein, 105 aa, DROSOPHILA
MQQQTKQQQHQQQQQHLTQQLLLTPLQQSLHAFDLLHSSNARATNSSSSSNSNSRSNNTMPTRNLPRAGIGLGIGMGIEMALWTANGKRAMGLDWGTVGLKLRKM

SEQ ID NO: 30745 - DNA, 2525 bp, DROSOPHILA
cacgggcatgaatatttaaggcgttgaatttatgaaaacaacgtgccgctggtagaggaaaaggctaaagttttgcattgcaaaacttctgcctcgatctcgcccatcacgtgacaaagaacacgggcgaaacatttgataaacatttcgcatgtgggcagcccttcgactccttctacgtgttatgacacaaagacaaaaaagttgaaacggaaaagccgaaaaaaaaatccagcaggcaatccagcaaatggtccgtaaggacctcaagcattgtgggtcccaacttgtctaaactttttcgccttaaaaggcagcttagccttttattccgcgtgcgggaatactgtctgccaataattcataacaaagcgtcgaaaattcagaagacatttgggccactccttctgcatggggaaaatggaaaaccaatatacgaggtccaagtgttggcacacccttatcaaagtcaaacccatcaaatatgtttgatcttctaatgcagggcaaaatatttgccatcctttggcaggaaaatctcttgaataatccttatactacgcagaaattccagcttttcgaatgtccctttatcactcatacaatttttcaggatgtttcctttctgttcttctggtatcttaacttaatgcttagttctattctattgggtttatagtttttatggtttttactcaccagaggaggtttgtctgccaatcgcttgcagctgtttagttcggtgggcgaattatcctcatcggagcttggtgtttgggccaccttctcgttgtcattgcaactaaataagacgtttttaaaattcttattagttatgtgtaacgttggtagaaaaatagaggctttaattaaaaaatatttattatattatatacttctgtagttattgaagtgttctggttgtcgtgtgcttttttaatgaatgtgattaaagcattgattggaggaatctacatacacgaatcgccttgaaaactactcacttgagattcgcgtgcgtgaagagttgcagtgggcggcgtcgtcctagactcgctggtgaagggggcgtggccagactagtcttgcggcttattgtggcgagtggtgatctcaaaacggccggatttgcaactccagctggatggcgattgctgcaggaggaggatcgaaaacgggctcctgcgccagttaaaacggcagccaagttggcagctatgcgattgtcgaatcggttgaaatacgaattggagtttgtattggagttcgagttggggttctgattcaaattccgatttatatttgcgtttgaattcgagttggaattggaattggaattgtccgccgtgggcgaggagttgctgctgctgctggtgctgccatttctgttgctcatggccaccgatgttgccgctgtgcccgcggtcgtcgatgtagctcctgctattattgtgctgctggcgctggcctggtcataatccaaattattgttggttatcattgtggcggcctcgcttttgggcattaacttttggcagcgggtgttactggccgacgctctgaattatgtgcgcatataaaaagcgctgcgggcggcttttgtcgcactgcgtgagcccgccaggacaattcaggacatcagcagcgagttccagtcaccaccaggacgaagctcgcagcggccttttattaaatttgactagagtgggtggcgaatgggtggcgtgtgggtggttggcaagccgcaggggttcacttgctcttgccgttgctgttgctccactcggaatgactgcaggacgaaggaccatgaacgacgacgattcgcagatttaaacacagaattaattcaagcggaaattggcaacgcagaatgggggggggggggtttcgagggcggtagtcgcacaaaaaccaaaacaaaaatcgaaagcgtgaagcataaacaaaaacggcaagtgaaaacgcaaatgaaaacgcatagcaaagagaaatattgagggggaaagccacaaaaatgcacataaatagggataggaaaatggggagtgggtggtttaggttggtcggggtggcgggtattacaagggggatttatcagccaagggtcgcagccatgacgtcacaccataaagcgcataaatagcaggattcgcaggatgttcatgaacatggtgatgatgatgatggtgatggtgttgttgaaatgtttttgttcggtggttgttgtgattgtaagggaatacatgattcccatattgtagtggttgttttttttttttatgtttttgttttggttttacgttttccattttatgcgattttcgattacacaacgattttccacatttcacattttgcagttgcaagagtattttttgtttttcgccaattagttgccaattttgcgcataagttcgatgccaatttcgattcgtttggttatcatgttttaaggccaaatttcatgtaaataaaaatggagaaagaatatgccaattttgtagaatgttttttgttgtgcg

SEQ ID NO: 30746 - DNA, 525 bp, DROSOPHILA
atgcccaaaagcgaggccgccacaatgataaccaacaataatttggattatgaccaggccagcgccagcagcacaataatagcaggagctacatcgacgaccgcgggcacagcggcaacatcggtggccatgagcaacagaaatggcagcaccagcagcagcagcaactcctcgcccacggcggacaattccaattccaattccaactcgaattcaaacgcaaatataaatcggaatttgaatcagaaccccaactcgaactccaatacaaactccaattcgtatttcaaccgattcgacaatcgcatagctgccaacttggctgccgttttaactggcgcaggagcccgttttcgatcctcctcctgcagcaatcgccatccagctggagttgcaaatccggccgttttgagatcaccactcgccacaataagccgcaagactagtctggccacgcccccttcaccagcgagtctaggacgacgccgcccactgcaactcttcacgcacgcgaatctcaagtga

SEQ ID NO: 30747 - protein, 174 aa, DROSOPHILA
MPKSEAATMITNNNLDYDQASASSTIIAGATSTTAGTAATSVAMSNRNGSTSSSSNSSPTADNSNSNSNSNSNANINRNLNQNPNSNSNTNSNSYFNRFDNRIAANLAAVLTGAGARFRSSSCSNRHPAGVANPAVLRSPLATISRKTSLATPPSPASLGRRRPLQLFTHANLK

SEQ ID NO: 30748 - DNA, 4766 bp, DROSOPHILA
actgatcatatacattccgatttctctctctgtattgggctgctggctgatgagctcatattgaaagtttttgtgctctgtggaacgacctagtttggccaaagccaaatcaatgtggccgctgcggcgccatttgcactgccgacccttttgtgcatttactctgttttccgctctgccctgctcgacattttccgggtttttcctccgctcctgtctgtctgtatgtgtgtgtctgtgtgttttatttttttctctgtgcaaacaatttcgcctggtcgcctggtcgggcgttattaattgagcttttgatgcatagccagtataacgattgtcccatcccattccatcccatcacatttcatctcccatccgggtcatctcatccatctgttcgtgtgcacttaaaaggctacataattgtttttaccaaattgaaattttaattgaattcgtattggaaacggcatcgagatcgggactcctttcagttatgactttaaatgcgatacctcgccggcttagaaaacaaaggcgaaaggcaaacgacattggtttggggaacataaaaattaaaaatttaatacgcgtagtatttgtggggcaaaaaagccgcattggcatttcattttattgtaagcaaagtcccggcatcagcagcaggcccattgacatcatcctcgtcattatgcacattatccacatcaacaatggctcaacgagcggctgaatgaatctcaagtgggcagtcggcccacctcctcatttggtatagatacgtgcaccaatagatagatagatagatgttaatgggcatagacggatgggtagatacatatcgaaaaattgcatgattcagtttgttatggacggcatagtttatagagatttctgttaaattttaccaaaagcacttcagtttaatcatatgaatgtcttccattgcagcagaaccgattcgcagacataacacattgcggtggaggttgagaagaacggcatggtgaaaatggaatcgacggaagaacaggatcgaaagctagttttggagttctgccacctgctagagaagtccaagcagctcttcaacgggctcaggtgagtctaaatagctgaagaaccttttagagttggttactaatggaatatttgcagggatctgcctcagtatggccatcggcagtggcaggcatacttcggtcgcaccttcgatgtctacaccaagttgtggaagttccagcagcaacatcgcatggtgctggactccaagtatggcctgaagcgctggcagatcggcgaaatagcaagcaagattggccagctttattatcactattagtaagtatgacaggtgatagatagatgaaagatttctaatatatgaatccttcctctccagcttaagaaccagcgaaaccaactacctgaacgaggcgtatcagttctatgcggcaattaggggtcgagcctactattcgcgggcagccaaggaggatcgaccggatctgatggtgaaaaagctgcgttactatgcccgtttcattgtggtgtgcctgctgctcaagaagatgaagctggtgcgggaactggtcaccgagttggaaaaacaaatacaggagtacaccaacacgtaattacttggtgacccatttttgactccgtattaatccccagatttccccgcagctacgagccggaggatcatttggagtggtcgctggtgctcgaggagatcaagggcttcatcaaggcggaggcggcggtggccgtactgcacgccgactccaatcccatcatcctgtcgcacaggtgagtcgttagcacagcctctgtccgtacacgcgtatttgcccgtgctttcgtcggcggaggaggagtttggacagcttgtgggtggccaagtgtatagcctatatctgtccgcatatgcctctacacatatgccctgttctgtttgcgtaggtatacgagttttgcttgagttccgttgccgttgattatgtttaatttttgtgcttatcacagaagacttgaaacaccaaagaacactcaccgttgtcattttgtcacgcacttaaaccatgatctctgtccacccccccaaaacatccgtcaatccaatcacaagatccaggtgggacaatgaaactgtttgatagaaaatttctagttacatttccaaagtattaggtaataaataaaagaatacagtttcagtgtccaaccgcacacacactccacaagatgttatcatttcgttatcatttcattatcattttgtccacgatccccccgagaacacactcccccacccgtacccttgtcacctcattagtgcgccgcattctcaattcttctgtgaaagcacgggccccgccattcgccggaggacgagtgcgactaccctgactgatgtgtccagtggttccggttctaggttgtcgccgctgacgactccaccctgcgagcgttcgccgcacatgacgctcagcctgcaggagatcctgatcgtgggctccgcctgcgagcaggccaagttctcggaactgaccatggacatgttccggatgctgcagacgctggagcgtgagccgacggagtccacaacgaatccactgagcatggcacacggactccatgggcacgatgcgagtccggcggccagccgaataccgccttacggagtgccgggctccaagggctacatggagaacggccgggcctttcgtgacaatccccacaagtatctactgtacaaaccttcgataagccagctgctggttttccttgccagcggctcaaaggaactgccgctgggcggtgccctgctcctttacatgtccgccgatggctgcttctccaccaccaaacatcccgaggattgtgagtacattaccatgctattgatgctgttatctataataaccattgatttttccagttggctacgagctgggaggcctggccaccagcgtgaagcgggacagcgtggatggtggagggctgtcctgccgaggaaaatcgtacaaggagaaccactgcctatatccgggtgatctatatccgttcacacgccggccaatgttcgttgtgatcgactcggacaactcgtttgtctttcagcacataccgcgctattttggccagccgctggtagtgctcatgtccccgcaggatgtgccgcctgcattccagggtaggaactccatccattttgcgtatcaccgagaacttatatcctttttgccttatttcagctgatgtccagcatcatggctcgctgtttacgttgttcctgcactccccgctcaccgccctctgctacatctgcaacgttggagacgtgcccatccaccactgggaacgctgccagacctacgtggaccgcttcatcacggaggcctcgcgccttgtcacccggtgtcgcatcgatgagatcgagcagggcattggttttataggtgggctatcttagttacttcgttactcctatacttactataatctatctcccttggcagattcctcctacgtgcagttcttcggcgacgacttcctgcgcaccctgatcctccgtttcgtcttctgtgatgtggtgcttcggttgcaccgtggattccgggggcggcacatgagaccccgctgtgagccgcagctgccggcgaacgaactgctggagcacccctcgctgtcgcacatcatctttcagctggcctcggccctggatgtgcggggtcacttctcggagggaccggagtgcgactgatgactttttgcggccatagtcgtggtggtggccatcgggatctgcctgcgacagcagctgttccacgtgatcgagaggcagttatccggatggatgctttcgctgtacaatacttttccgctgggctggaactgggcatgagattggtggcgttgctggccatgggtttccgtttcctttcgttggcagtgctccggctgccggcgtaaatcatttcaataacgtaacgcaacgtaactgcagtataatacgaatataaatatataaatacgagtataatatatatatataatatatgcgtatatggataaaggtaaattaatcaagtagctagttttcttatatagtgcgtcgcgcaatggaaatggtccaatgttagttgcttagcatatacataattaatgataacgataacgaagatatacatacgagaaatcaatgatattcagccgatatcgcagcagcaacaagaacagcaaccacaaacatgtcaaaagaacctaacaaacgataactgccaaaagaagatgaaaaacgaaagaaaaaccaaccaaacaatttatgataaaaatcgaatcaaattttgtttgagcggtaccgggaaatttttatgaaaattgtgagcgggggggactttttggattgcccgatcggatcggtaaacataggtaactttgtcatatgcagcggaaaaattttagcttttatacaaccgatattgagggaaacctaatcgaaagtgaatcacgaacacgacacactatataagaaaggaggtgcgttttttatgcattgtacgcggcgctcataacaaattgaaattacgaaaccagaatattattgtacgtatgtaatattgcatatatgtatctattatgattacaagatgactgaaagttactgtttcaacaaaggaaaaaacgaaaaaaaaaaaaccaaaaaacgtataaataaaagtaagacaaccaaaaagaaggcaaagtttagcaaaagtaataac

SEQ ID NO: 30749 - DNA, 1803 bp, DROSOPHILA
atggtgaaaatggaatcgacggaagaacaggatcgaaagctagttttggagttctgccacctgctagagaagtccaagcagctcttcaacgggctcagggatctgcctcagtatggccatcggcagtggcaggcatacttcggtcgcaccttcgatgtctacaccaagttgtggaagttccagcagcaacatcgcatcttaagaaccagcgaaaccaactacctgaacgaggcgtatcagttctatgcggcaattaggggtcgagcctactattcgcgggcagccaaggaggatcgaccggatctgatggtgaaaaagctgcgttactatgcccgtttcattgtggtgtgcctgctgctcaagaagatgaagctggtgcgggaactggtcaccgagttggaaaaacaaatacaggagtacaccaacacctacgagccggaggatcatttggagtggtcgctggtgctcgaggagatcaagggcttcatcaaggcggaggcggcggtggccgtactgcacgccgactccaatcccatcatcctgtcgcacagtgcgccgcattctcaattcttctgtgaaagcacgggccccgccattcgccggaggacgagtgcgactaccctgactgatgtgtccagtggttccggttctaggttgtcgccgctgacgactccaccctgcgagcgttcgccgcacatgacgctcagcctgcaggagatcctgatcgtgggctccgcctgcgagcaggccaagttctcggaactgaccatggacatgttccggatgctgcagacgctggagcgtgagccgacggagtccacaacgaatccactgagcatggcacacggactccatgggcacgatgcgagtccggcggccagccgaataccgccttacggagtgccgggctccaagggctacatggagaacggccgggcctttcgtgacaatccccacaagtatctactgtacaaaccttcgataagccagctgctggttttccttgccagcggctcaaaggaactgccgctgggcggtgccctgctcctttacatgtccgccgatggctgcttctccaccaccaaacatcccgaggattttggctacgagctgggaggcctggccaccagcgtgaagcgggacagcgtggatggtggagggctgtcctgccgaggaaaatcgtacaaggagaaccactgcctatatccgggtgatctatatccgttcacacgccggccaatgttcgttgtgatcgactcggacaactcgtttgtctttcagcacataccgcgctattttggccagccgctggtagtgctcatgtccccgcaggatgtgccgcctgcattccaggctgatgtccagcatcatggctcgctgtttacgttgttcctgcactccccgctcaccgccctctgctacatctgcaacgttggagacgtgcccatccaccactgggaacgctgccagacctacgtggaccgcttcatcacggaggcctcgcgccttgtcacccggtgtcgcatcgatgagatcgagcagggcattggttttatagattcctcctacgtgcagttcttcggcgacgacttcctgcgcaccctgatcctccgtttcgtcttctgtgatgtggtgcttcggttgcaccgtggattccgggggcggcacatgagaccccgctgtgagccgcagctgccggcgaacgaactgctggagcacccctcgctgtcgcacatcatctttcagctggcctcggccctggatgtgcggggtcacttctcggagggaccggagtgcgactga

SEQ ID NO: 30750 - protein, 600 aa, DROSOPHILA
MVKMESTEEQDRKLVLEFCHLLEKSKQLFNGLRDLPQYGHRQWQAYFGRTFDVYTKLWKFQQQHRILRTSETNYLNEAYQFYAAIRGRAYYSRAAKEDRPDLMVKKLRYYARFIVVCLLLKKMKLVRELVTELEKQIQEYTNTYEPEDHLEWSLVLEEIKGFIKAEAAVAVLHADSNPIILSHSAPHSQFFCESTGPAIRRRTSATTLTDVSSGSGSRLSPLTTPPCERSPHMTLSLQEILIVGSACEQAKFSELTMDMFRMLQTLEREPTESTTNPLSMAHGLHGHDASPAASRIPPYGVPGSKGYMENGRAFRDNPHKYLLYKPSISQLLVFLASGSKELPLGGALLLYMSADGCFSTTKHPEDFGYELGGLATSVKRDSVDGGGLSCRGKSYKENHCLYPGDLYPFTRRPMFVVIDSDNSFVFQHIPRYFGQPLVVLMSPQDVPPAFQADVQHHGSLFTLFLHSPLTALCYICNVGDVPIHHWERCQTYVDRFITEASRLVTRCRIDEIEQGIGFIDSSYVQFFGDDFLRTLILRFVFCDVVLRLHRGFRGRHMRPRCEPQLPANELLEHPSLSHIIFQLASALDVRGHFSEGPECD

SEQ ID NO: 30751 - DNA, 6347 bp, DROSOPHILA
acgcagccactcggcctgagtacaaataataaataataaatgaggcgtgtgcaggccgtttataatgtctgacaaggcgcaaagttgatgatgttctgtagatgcgaccgtttcgataacgaaatctatttactcctcccggcaaacttaaagctgctggggtttcagttacagttttcatttcgggtatgtttggtgtactttaagccagagacaggacaagtcgcactttgtatggcataaatttcgttggcataaatcaaaattcagcaacttccgacgagggcagagtgcaaaaatttgcatgccccctgtgtgtgctaactgcagactggccgaaaagggccagtaaacaatggttcgccttccccagcttcgaccagctggacattagagagccacgctcaaatggccgccacccacgcacagttcaacgctcatacgcaacgttggcccagtgcaaaaagcgggactgtacacacaataaataacgagccagataattatgcacgtcgtgcttatatctaagggaacactagctccacagctccaaagtagccactattaattatgccagaacatcgggggggttttcgggtagctagcttaacgtgttggggccatggcaattagagcgattgtttggcccgagaggcattctaaaattgcagtatttaattgtggaccacgcgctatgatttattaatatctcgctctgcaatttgccatgaggtgagtgatggagtttacttggactttaaagcaattaaatcttctggtttgactaccaatagagtacaagagtgtatgaataaatatcttaagttttagtaacttataagtactaagtattcatttatattcattttcgtttgtaattttcgcagttttataagtactataaaaccaatttgttctatctattactttctccggcagagtcaagtggaatcccttgtttagccaacagccacccatcgaggctccccaggcgtgcgccatgtacgagaactcctgttcgtatcagacggcgctggacctgaagagggtatcgccaccgactctcgcccaggtgaaaacggaggagtgccttgcactcggacagtgctcgccagaatggacctcgtaccgcttccatcagtccaccttcgagcagctgaagcagagtgtggagaaggccaaggcggcgctgcaggatcgcagcagttttttcggggccagcagtgcctttaggtgagtaacatcttaagatgtaactattttgcactaaataaaatttataaaccatttaacttggaaatcttactttaaaagaattttaatcttgaattcagaattatagtttgaggtcttattaattggtattatggtatatatatcttaaatgtatgttttccaaccacagcgacatctactcgagccagcgcttaacggactccctcgacaccctgcccgttcagtccgggaatggaggcggcaattgccttggccttccacacaatcccaatgtcggagtgggcgtggccggagtgctcaactacaatgcggtcagcagcagtacggccggagttctgagcagcagtgggaacggcgtgcagagacatcggttggacacactgcagccgccatccgggtgctctccagccgtcacccagcacggcgtcatcacgtccagcgccggacaggtcacgtccggaactctggatgcggtgagtgcggctccagcacttccatcgctaacagcgtccagctcctcgcatgtggagcacaaagtcagggcaggtaagtgaatttaatgtggcagaagcaatagattatacatcgaaagaaagaactattaatataataataaattatatacaaatagtagacattttcgaaatgggagcaatctgtcttatttttaaaatcatttaaattatatttatattaaataaaagtaatcattaaattagatgagatgagggttatactttgctttatctacctaacttttttataattgttttttgtcgtttttattttcaattaacctcatattgaacacaaattattatattttcgttcttatattgtttcttaacaaatatggtcgttatataaatgatttatgcaacaaaacgaacgcgtaatactttgtagtgcaccaacccactgaccttctcgcaattgtctagcacaaaactgtcaacgaaatggcggaaaaacaaatcctgcgcttccggccaaggcaaaacggacccaagccgagaaaaaaaagctgccgaaaatgttgtgccacaaaagtggcaaatttcgcgtatttatttaaacacatccaggcagcatatgttggccaatggccacccccgccaattgcccttcccagttgaccaaccaccaaatatgtccagggccgtaacatttaatggccaaaacaacggctaaaaaccgcgaccagccatgtacataattctgctcgttgtatcaccaacaataagaagcaaaaaaattgggcaaaaaattttaaattgaattatccatataaacgttgaggtctcccagggtcggtttctattcctctgatattttcatggctggtttttatttttttgttggcttggctaggttacatatttatcaatttaagccggggcaaacggatgtggcttataatgccgcccgaagccggttgctgttgactgtttgcggtccttgccaggttttgatagaaacatcaaaaaccgaacaatttcatcgcgtgcctggcaagagtttgttatgccgcctccgaccgtcaagttgtccatgtccatttatttctataagaaacttctttccttcttgctatcttttttttttggcaaatttatgtcctgtttctgcttcgttttcaattagaaaaggctgacaaggcctgtagtgcttgtttctttttttttggctgaaggacgagcacttgatggaaaaacttggatcaaatggaagaataataattttgtacaaatttgccttatcttacttttactttaatcgcaaatttaaggactttggcctttttccctcgcaatagtagacacaaaatggccgccaagctcatctttttttcccatctcaagtcgacgcgctcaagcaaatatgaaacgaatcctttttagccagccttctgctccgcaactcccccgtctctttcatcttttcactggctgtctctttctgtggtcgatgtcaagttgtagctgagtttttgccgcttcggcttcgccatgaaaagattttgtcatgcgtaactcattattttttgctcaaaagacgtttggctcacagaggcgcataaaaataattacactttgcagccaacttaagaataataaagattccaacatatattgcaatacggaaatatgtatatattaaagatttaaactcgaattttgaaaatgtgcaagagaaacttacaggaaacatattttagatatattttcactctcctaaattaaattgaagagttcaatatattcatctttttatcagtttatgtaaaacttaaatttgtgtttatttatttcatgaattatttacaaattatgatacagcccgattttcagaccgattcccatcatcttcatggctatcattatcatggactcgtatcacttccggcttgacatttcaattgaaagcgtagcaaattcctctggcaattttttccttgctgacgactggcttattgttgtttacatcaaacaaagatttacggcaattaaacatctccattgctggtctgtgaagtgacaaccctcgcgattatgtcctttgcggttcacaggatctgtcagcatttcggaatggggtgaaggcgagcgacgttgcgtgacgttttcgcagggtggagtgctggaataaaaaccataattcgagccataaataaaccagtcgctagttgtgatgacaattatctatgccgagatttatgagtcccgccgctccgttcactttttcactttttttttcggttcctttccgtggctaaaggcaaagcgtgccgtgctgagtgtgcaaattttcgctgcctggcaattaaaatatccttttgtttggtcgttcgtcttgcagataaatccacgctggactgcgccaccacatcctcgcatgcggcggcgccctcgtcctcgtcctccgccagcgaccatcagcagggcaggatcagcggcagcaagagcagcaacaccagtggcaccggaggaggggcatcggcatcaggaggcggcggctctgcactgtgtaagttcaatactgtgattatgtcaaaagtgtcctttgagcttttgacagctttcagtcaggacagcaacctgatggtggtatagaaagtgccatcgttcacataaaaggtggcgcttgtgtgcggcaggggtgaaatgtccttggcaggggtgtttcctgcgcggagggtgcttcatgacatttaaaggaatatcaatatatctatttatttaatgctattaaaacatttattatattacttgattgcattttgcaatgagctctgctgcagaattacttaaatgtttaagtctctgtttcaacaaattcgtattttatagaattatttgggtgatattaaaagagattgacagaaagaaattataattttctattctgtctattttacagtttcctttgagctattattttatttgattattttttattaatactattattccattttgttttaattattggacaatagtagttttctgtgaaataatatcatacaactattacaatagtaaacgaaaaatgtctgttctatttaaaatcaatgatcatatatttatatctaaataactaaatttccatttttataattgatataattacaacatttcccacgaactcttgaatccctttggaagtattttgatcactcaattgctcacttgacttaatgccttaagcttgactaatgctcgtaatctgaacttgtgagccttttgtgaatggtccctctgggaacagcaattgagttcatttggcagtgggaaagttggcaaacaattgacaggaccttatgttgatatccctttgttcctgtccactgtaaacatacaaaacgcaacagtcacaacattggctcgagtcgccagtgaatctgtgactgcccgttgataatttgactcttaagtgctcttcagcgctaatcctgttagagcgtgttagtcacacgctcctcgagcacacttcactcggcaggacaacccccgagcgcatccagacatcctgtctaccagtcctgccaaccagctcgagggatggcctctccagcgaggacaatgtggctaatcgacagatcataaaatgatcaaaatgttatgtgaagcgcattagagcgcacgctcctctgacagcgtggtagatatggtagatggtagtgctatatggagtatctgtatctatagattggttgggaggggtgcgctgtgtgggattccttcggcacagacaattgagcggttaggtgtgaatgatgggaaagggtgcagagcggcagcacgacatcgttaaactcatcgagtggcaataggctttatttattgttttattggcctgattttagatatgtttgtttatttatggactgttgaatctaatcaattatgttgaattttgtgtttatgattacttaggaggtacttacatagataggatttttaaatgagccaattcttgtgagctgaactttagaaatttgtatattctttcttcctatagtaaattatatacatttttattaacaagtcctcattgattactgcaaattattgccaaacacatacctttcacctcctacgagtatacccttcatcatcaaattttaattgcatttagagttctttaaaatcatattttacgatgtctatcatcatctgtcgcaggattgtttgtttgctggtggctcacccgacgagctcgactataatcataatcacataatctgccagcaggatggcccaacccaaataccgcccctcatcagcgcgcccagtgggtggctgccacccccttggcctttgccgcccacaagtgggcgccacattgcgtccttacgtcctgtttccataaccgtctctttcgtcctgcgccgtatgttttgctcacttgaaatttaatttctgatttcatttgcgcacagtttattctttatttttttttctggccgtaattgtttcaggctgtgaaaataaattgaaatcgctgctgtgccaactggcgccaaaaaggacgatgaagtcctttttgacagcttcgcggactgacgcttgcgctcaaatttattcactagcatttatgaatgttgttgc

SEQ ID NO: 30752 - DNA, 945 bp, DROSOPHILA
atgtacgagaactcctgttcgtatcagacggcgctggacctgaagagggtatcgccaccgactctcgcccaggtgaaaacggaggagtgccttgcactcggacagtgctcgccagaatggacctcgtaccgcttccatcagtccaccttcgagcagctgaagcagagtgtggagaaggccaaggcggcgctgcaggatcgcagcagttttttcggggccagcagtgcctttagcgacatctactcgagccagcgcttaacggactccctcgacaccctgcccgttcagtccgggaatggaggcggcaattgccttggccttccacacaatcccaatgtcggagtgggcgtggccggagtgctcaactacaatgcggtcagcagcagtacggccggagttctgagcagcagtgggaacggcgtgcagagacatcggttggacacactgcagccgccatccgggtgctctccagccgtcacccagcacggcgtcatcacgtccagcgccggacaggtcacgtccggaactctggatgcggtgagtgcggctccagcacttccatcgctaacagcgtccagctcctcgcatgtggagcacaaagtcagggcagataaatccacgctggactgcgccaccacatcctcgcatgcggcggcgccctcgtcctcgtcctccgccagcgaccatcagcagggcaggatcagcggcagcaagagcagcaacaccagtggcaccggaggaggggcatcggcatcaggaggcggcggctctgcactgtcgctaatcctgttagagcgtgttagtcacacgctcctcgagcacacttcactcggcaggacaacccccgagcgcatccagacatcctgtctaccagtcctgccaaccagctcgagggatggcctctccagcgaggacaatgtggctaatcgacagatcataaaatga

SEQ ID NO: 30753 - protein, 314 aa, DROSOPHILA
MYENSCSYQTALDLKRVSPPTLAQVKTEECLALGQCSPEWTSYRFHQSTFEQLKQSVEKAKAALQDRSSFFGASSAFSDIYSSQRLTDSLDTLPVQSGNGGGNCLGLPHNPNVGVGVAGVLNYNAVSSSTAGVLSSSGNGVQRHRLDTLQPPSGCSPAVTQHGVITSSAGQVTSGTLDAVSAAPALPSLTASSSSHVEHKVRADKSTLDCATTSSHAAAPSSSSSASDHQQGRISGSKSSNTSGTGGGASASGGGGSALSLILLERVSHTLLEHTSLGRTTPERIQTSCLPVLPTSSRDGLSSEDNVANRQIIK

SEQ ID NO: 30754 - DNA, 3576 bp, DROSOPHILA
tgatgttccactccaacttatggatcatatttaccgggctttcatcagccgaagtgcccagttattggaagctccatttcacacagccagtcgattggccacttttccattggtaaactctctggtcaatcgtctaacattcagcactttggattatctgagagacattctggaagttctctacgatgctgttttggccctagaaacacctttaagtgtagtgcagcgcctgggaaatttaacggctagtttgaggcaattggctcaagctaatcttcaattacttagcagggaggaactcaaacgtggaaatcccgaagtgcaaaaggccctgcagagcaacatcagaaatttgctttcgcagcctgggtttgaaaaagaagttgcaaaatccctccaatcggaaatctatgcacaccttccgaaagacgagcaactgctgtacaccgctcgaaaagtatgcatccggaatgtgactgaagaaaattcgtacatttacgaatgcccgcagacgtacctcatctgcagtaacgctcgagatccaaagaaggctgcgtatttcatccaacgtggtcacagtaacgacagccggccgcaatttgctttttatagtgccttctggcgtagtcgctacatcctcatggaaccagccactgcaattgcgagcaatgcaaccaactcgattaccaaaaacgtttacagccgacccaacattaactggtggagagtggtatatggaaatggagggattgccttttacgatgctgccactgaaaactctgttctgtgcggtggcgatcctttgcactgggatggcgaggagcatcacgtctacacaagacatgcatcggagttctcagctcatcaggcagagtgcacctggagcctcgaagactgcagcgatgccgcttaactggaagtgagaagggatttcagaccataataactataaattattactatgtttattttgactaataaggcacatgagaaaatccaactacctctgcagaaaatcccagggtatgcacacaacgccgtcggtcagtaccgaatagtagtgggttatgtgaagcttgcatccctgcagttctttcaactgaagctggtataaatctctaagggatgttatcattttatccggggttatggcatcatctttggtcagcgattgcaactgtagctgctttatgcacgagtccatcagctcctgctcgatgtgcttgtcctgagcgtacttcttcatacgctccctggccagctccagatttacactgatgaagtctacgagtatggatcccggacaggtggctggtgtgataaactggcccgtagggcttaccatcagaggacctgcctctgattccaccactatggtaaactctttcagcgttttcggccattccggcggatatttttgtttgcccaggtaatcgctgagcgaagtggtgaccttcatgaggtagcttgcatagccacttgcctgttgtttgggcataaacttgcgacgacctatctggatgttcagtagaacctgagacagtgttcgttcatacacgggcaccacctttaaataggcatcgtggtgcggaatgttcttgatgaagtcaatccatgtgctgagaacatcaccagtaaaaagcatcacatggccttctaaactgatgcccgtaaagggagcaaaaaccactatgcgacctttcagggaagccatttccaacaaatgggtgttggatagtcgctcaagggtctttaaacagccacggtagtgctcaatgttccagccgcactcgtaacgagcatcttgcaactccagtttctctaccagcatttttttcagtttgtcgatttcggcctgcagatccgcagtttccttagagcgctgtttggctgtgccagcattctcttccagccaggtggtcagcactggacgcttactggcacgttcctgggttaaggaaataagtatataaatggttttttaaatttcaaaattatataccaacattcttcaactgagtttcaaactcggcgaactccatgtcatagtgatagtcatggcttggtttaaaatccaagccagaggtttttggcggctcaggctgggccttaatgttcttcacatactccgtggacaagttgcatgactccagaagaccttgaataaaggttttgggatctcgggtactctgccagtccgtgcgtatttggatgagcttgaaggagtctcgcttgtcagcatctgaactggtgcgtacatagaacttgagcacttgggtgtccccgcttcgctgtctgcgttcatacaaagcctctagatgctcactcagcaatttcagtgagttctcgttggtgttcctctgctccggatgctgggcaaagaagtcaggatgcaccgcgaagtagaagggtctcagcgccgttgtcagatctgcaaaagcgcccaatcacatgatcatccaaaagttgtggcgcattcaaatcaactgaccttggttcagcgatcggcgcaaaagcaggaagtgccgtctgctggtgaccaatttccggatcttggagcccaacgacatggacattatgtaagcagtgggcggcagcacaacactgcaccgcgtcacagatggccaacatacgggagcactgccgcgagattaagattttggatatataactcctgatcttgaattatgaggtaaaattggtaggaccgcggcactgaatgccaaatatccattactatctgggtaatagtggtggctgtttgggtgggtgttttgaggtccctcatgttgacaaattgttctttaaattcttgcgataaaatagttaatcttgataagtttgtcataaaaaagttttaatgagtttgtaattaataaattaattagttttcaacgaaaacaaatgttttaattaattttaaacgtttagctatattcacgctaactctatccacaagattttgcagcactgacgctgacacttttgatgtggccagtttttgcgcagaattccgcattgtttacctcgctgctaaaaagtttttagcgcaattccaattattattgttaataatagtaaacaaatcatacgacaacatgactgccgttccacccccctccaacatctctaccctaatgccattgggtacgtaaatctgctacaggtctacaaatcgagagtttctaacttttgccggcttcccgtactaccctacagaattggtggacaaatgcatcggttcccgcatccacattatcatgaagaacgacaaggagatggtgggaactctcttaggattcgatgactttgtgaatatgctcttggacgacgtaacggagtatgaaaatacccccgacggccgccgcatcaccaaactggatcagattctgctcaacgggaacaatatcacaatggtgggtgctctttttcgaagttacatacgtttgtttattaaatttcatttataatttgatttcagttggtgcctggcggagagctggcggagtagcaaggttccatttgtaaacataaatacatttgtaaaatatcaaaacggtcgttttaatgtggata

SEQ ID NO: 30755 - DNA, 1458 bp, DROSOPHILA
atgtccatgtcgttgggctccaagatccggaaattggtcaccagcagacggcacttcctgcttttgcgccgatcgctgaaccaagatctgacaacggcgctgagacccttctacttcgcggtgcatcctgacttctttgcccagcatccggagcagaggaacaccaacgagaactcactgaaattgctgagtgagcatctagaggctttgtatgaacgcagacagcgaagcggggacacccaagtgctcaagttctatgtacgcaccagttcagatgctgacaagcgagactccttcaagctcatccaaatacgcacggactggcagagtacccgagatcccaaaacctttattcaaggtcttctggagtcatgcaacttgtccacggagtatgtgaagaacattaaggcccagcctgagccgccaaaaacctctggcttggattttaaaccaagccatgactatcactatgacatggagttcgccgagtttgaaactcagttgaagaatgaacgtgccagtaagcgtccagtgctgaccacctggctggaagagaatgctggcacagccaaacagcgctctaaggaaactgcggatctgcaggccgaaatcgacaaactgaaaaaaatgctggtagagaaactggagttgcaagatgctcgttacgagtgcggctggaacattgagcactaccgtggctgtttaaagacccttgagcgactatccaacacccatttgttggaaatggcttccctgaaaggtcgcatagtggtttttgctccctttacgggcatcagtttagaaggccatgtgatgctttttactggtgatgttctcagcacatggattgacttcatcaagaacattccgcaccacgatgcctatttaaaggtggtgcccgtgtatgaacgaacactgtctcaggttctactgaacatccagataggtcgtcgcaagtttatgcccaaacaacaggcaagtggctatgcaagctacctcatgaaggtcaccacttcgctcagcgattacctgggcaaacaaaaatatccgccggaatggccgaaaacgctgaaagagtttaccatagtggtggaatcagaggcaggtcctctgatggtaagccctacgggccagtttatcacaccagccacctgtccgggatccatactcgtagacttcatcagtgtaaatctggagctggccagggagcgtatgaagaagtacgctcaggacaagcacatcgagcaggagctgatggactcgtgcataaagcagctacagttgcaatcgctgaccaaagatgatgccataaccccggataaaatgataacatcccttagagatttataccagcttcagttgaaagaactgcagggatgcaagcttcacataacccactactattcggtactgaccgacggcgttgtgtgcataccctgggattttctgcagaggtag

SEQ ID NO: 30756 - protein, 485 aa, DROSOPHILA
MSMSLGSKIRKLVTSRRHFLLLRRSLNQDLTTALRPFYFAVHPDFFAQHPEQRNTNENSLKLLSEHLEALYERRQRSGDTQVLKFYVRTSSDADKRDSFKLIQIRTDWQSTRDPKTFIQGLLESCNLSTEYVKNIKAQPEPPKTSGLDFKPSHDYHYDMEFAEFETQLKNERASKRPVLTTWLEENAGTAKQRSKETADLQAEIDKLKKMLVEKLELQDARYECGWNIEHYRGCLKTLERLSNTHLLEMASLKGRIVVFAPFTGISLEGHVMLFTGDVLSTWIDFIKNIPHHDAYLKVVPVYERTLSQVLLNIQIGRRKFMPKQQASGYASYLMKVTTSLSDYLGKQKYPPEWPKTLKEFTIVVESEAGPLMVSPTGQFITPATCPGSILVDFISVNLELARERMKKYAQDKHIEQELMDSCIKQLQLQSLTKDDAITPDKMITSLRDLYQLQLKELQGCKLHITHYYSVLTDGVVCIPWDFLQR

SEQ ID NO: 30757 - DNA, 3526 bp, DROSOPHILA
tactgcacacccacaaatgatcacacatacagaaggacacccacacacatactcgccaattagcttgccacattgttttggtcgaaactccgaggtaatactttaaagcgaatcactaaccacaaaaggacgctctggaatcgcgatttcttgagtaagtgccttaaactgacagaaagatattcgtagaaatgaagagtgggtgggttttgaggactacgaaatcagatccaaaagtaaatcgattgttttcagtacacttgttttggggagaaagagagacagacctttgtttaaaactctactaagcgttagccccccggcaaccaactaaatgtagttccagaaatcaagcaaacagaatagttaactctatgctccgatctatactactataccgtcgcatttgaagtaattgtacgattaattgtgaattcaaatcatgtaattgtgagtgtttatggcccgtcaacgttttgctcaacgcacacacaaacacacacacacacacacaaacgcgtacactgagagaaaataatataaacatggaatacacacactcgtacacccgctttgcccaagttgaagacaatttgtgattgttttgcatgtaccctaaagttaagcgagtttacacgaatatggattaagccgcagagagcggaaacggaaacgtaaactgtacgagtaatagcattaattgtctaacaataagatttgtgcattatacgatagaaattcactttgaattcgtattgaaatttatcaataaagcgatactatttgattcttacttcgggcgtctaatttcgtggttatttatattatatttaaaattcaaatgttgggattttctaaaaatgtatacagtttatttcatttgtacattggtttattgaaatagtaatttttaatttttttatttcattttaaaattttatttctacaatatatcacagctgttccccaaaaagcgtgctacgaaaattttgcccagtagctagctggatttcgaagtagatgtggtcaccgttgcggtcattgtggttgtactggaggtgctggtggagctggaccgggactcggaatgggaatgggaatggtgtccaccatgccgggtctccatgtgtcgctgtagatccctgcgtcgtggaaaggatttatggcacacgtggcactggtagtcagcatccgtctccccttcgatgtccacatcgccgtccatgtcggcaccacttgctccaccatcggcgactcccgcggaactactcggatgcgtctgcagatgcagcctcacatgcttgttgagattgctgggatcgccaaaaggtctcaggcagaacttgcacttcagcggcttgaatccggtgtgggtgcgtatgtggatcttcaggccatatttccgggagtacaccttgccgcagtagatgcacagatgaccctgcttggaggcacccatattgctgactatggcctcgatctgggcagctgcattcattggattcgtcgacaacggtgcagtggccatcgacatggagggcaggtaggatagaggcgttgctgctgtggttacgggtaccatgggcaaactctgggtaagtgctgcaatgggacggaaggcggagaaccgtggtggcatctgcggcggtggcgagtgggtgggcgaggccgaagacgtggacgaggtcgccggaatgggtgagtgctgggtttctgtgtgacttcttgctgccgccttcagcgcgtagtgaagtcgcatccaaaggatgtccatggcactgcgaccacaacccagagccaaatggatcttcagcgggtggggtgtctcgaaggtcaagtggcagaggtgacacatgtagcgactatttcctgcaattaaatgtaaaaattggggttaatattgatacgatcaattatgatttatattatataaattatttattcgaattatttaatgtattactaataataacacaaattatttagatgatatttaccttgaatgtttaggggcgtcaggaagggaatgcccataaggagaaccaactcctcaccgaaccaggccacgatctcgtcctcccgggctacatccctgaccaaacggacgcgcacttgtccaccatgcagttcgaagatggcattgaagctatacacatcctcggagagtttgatctgccgcaacagtgaaccggatacgattagttcgccattggacagctggcagtgggagcggctgccatccgtgggcatgaccgtagatcccaggagagccgacgtgggaatggccatggagcaggtatccttgggcgtgtactgcgaggcgtaaacacctggtcgtggattgctcatcctcatccgcttggccggacttgcggtgctcgtggtggccgtcaatgtggtttctgtcgatgaagtggtcatgctggtcggtgtgatactggtgctcggcaggagttgctcaattcggaagatcaggctggccgagcgcttctgctccagactatccagttgagctgtcgtgtgcatcgttcgcgttcgaattcgattctgcgttccaattggaagcgaaccggcgtttttataccacgacgcatccgcatcccaatccgcatcctgctcccttatttttcggatttggatttgccacggccttgcagtgtcacaatggcacggctggcggcaagtgcaagaattcccagcccagaatccagtccggcaccggctatagcctcgacatagctacgcactttgccggctcaaccccctggctcatttggcatcccttttcgagttcctggtgcgtcctggtggttgctcggcaagtgcaacatcatgtcctcgcaatcaccagagcactaagccaagctaagcggcctgtagcaagtgtgcgtattcctgtgcccgaaaaataccccctcccacatcctcacccgtcgacgagtcctttctttttttggcttttgggctacgcacaaggaaaatgtttttaattgaaattaaacgatcgtttgttgttacttcccccgttgttgttgctataatgccaccatatacaaatcgcattcgccatcgtcaatgtcattcggcacatggttcctcccacccccaggacgaccaccccgccccgcatcccaccactataatgctaatgccataatatattggcgtgtatcgtttcactatttgcggtttggggtgggtcgtgatttctgggctcgacggttgcttcgtcggccagtggtgcggatttcgcgagtctaggggattcattggtgttaatcgatggtacgaagcaataaaaatagttggaaatatttagtaacttttgaaagaaattaaagtaaaaactttgaaagttaaactatgtttgaaataaattttctatgaaaggaaacataaaaatggtactacattttaattttcatttataattaagcttaagttgtatagaaaaaattaaatttaatttaacaagtcatcatatattatttgattaatttctatttattataatatttattaaaga

SEQ ID NO: 30758 - DNA, 1398 bp, DROSOPHILA
atgcacacgacagctcaactggatagtctggagcagaagcgctcggccagcctgatcttccgaattgagcaactcctgccgagcaccagtatcacaccgaccagcatgaccacttcatcgacagaaaccacattgacggccaccacgagcaccgcaagtccggccaagcggatgaggatgagcaatccacgaccaggtgtttacgcctcgcagtacacgcccaaggatacctgctccatggccattcccacgtcggctctcctgggatctacggtcatgcccacggatggcagccgctcccactgccagctgtccaatggcgaactaatcgtatccggttcactgttgcggcagatcaaactctccgaggatgtgtatagcttcaatgccatcttcgaactgcatggtggacaagtgcgcgtccgtttggtcagggatgtagcccgggaggacgagatcgtggcctggttcggtgaggagttggttctccttatgggcattcccttcctgacgcccctaaacattcaaggaaatagtcgctacatgtgtcacctctgccacttgaccttcgagacaccccacccgctgaagatccatttggctctgggttgtggtcgcagtgccatggacatcctttggatgcgacttcactacgcgctgaaggcggcagcaagaagtcacacagaaacccagcactcacccattccggcgacctcgtccacgtcttcggcctcgcccacccactcgccaccgccgcagatgccaccacggttctccgccttccgtcccattgcagcacttacccagagtttgcccatggtacccgtaaccacagcagcaacgcctctatcctacctgccctccatgtcgatggccactgcaccgttgtcgacgaatccaatgaatgcagctgcccagatcgaggccatagtcagcaatatgggtgcctccaagcagggtcatctgtgcatctactgcggcaaggtgtactcccggaaatatggcctgaagatccacatacgcacccacaccggattcaagccgctgaagtgcaagttctgcctgagaccttttggcgatcccagcaatctcaacaagcatgtgaggctgcatctgcagacgcatccgagtagttccgcgggagtcgccgatggtggagcaagtggtgccgacatggacggcgatgtggacatcgaaggggagacggatgctgactaccagtgccacgtgtgccataaatcctttccacgacgcagggatctacagcgacacatggagacccggcatggtggacaccattcccattcccattccgagtcccggtccagctccaccagcacctccagtacaaccacaatgaccgcaacggtgaccacatctacttcgaaatccagctag

SEQ ID NO: 30759 - protein, 465 aa, DROSOPHILA
MHTTAQLDSLEQKRSASLIFRIEQLLPSTSITPTSMTTSSTETTLTATTSTASPAKRMRMSNPRPGVYASQYTPKDTCSMAIPTSALLGSTVMPTDGSRSHCQLSNGELIVSGSLLRQIKLSEDVYSFNAIFELHGGQVRVRLVRDVAREDEIVAWFGEELVLLMGIPFLTPLNIQGNSRYMCHLCHLTFETPHPLKIHLALGCGRSAMDILWMRLHYALKAAARSHTETQHSPIPATSSTSSASPTHSPPPQMPPRFSAFRPIAALTQSLPMVPVTTAATPLSYLPSMSMATAPLSTNPMNAAAQIEAIVSNMGASKQGHLCIYCGKVYSRKYGLKIHIRTHTGFKPLKCKFCLRPFGDPSNLNKHVRLHLQTHPSSSAGVADGGASGADMDGDVDIEGETDADYQCHVCHKSFPRRRDLQRHMETRHGGHHSHSHSESRSSSTSTSSTTTMTATVTTSTSKSS

SEQ ID NO: 30760 - DNA, 2605 bp, DROSOPHILA
agaaatgaggccataacgtacacagtaaagccggaaacagttcaggatcccaaggaggtgacaacccaaaaacctgtagaatataaaggtggatacagcttcatctcagccgatggttacgagtaccaggtcctctataaagccaacaaaaacggttttcagccctatgtgacagcccacaaaattaaaccggataagagttaagccattttattgtattgtgatagaaaaataaaattccgcaaagtttatcagtgtattaagcgtggctcaaaagctctttccacagtggtagcagacttggctagaaaaagcttagatatcttcaggccagctcgttaatcttcaatcatttcgagatagactgattgcaacatcatcagcataataatgggttaccatttctgtacaaccggcttgggttgcttggactatgtcgtttagcttgatcgagctaatgactttctgtaaaagatttaaaaattcacgggtatatttaaaatgtgtaaagagccggattgttttttagttttcttaaaaatataaatcgttatattttttaaaagtattattaagctttaaaggtaatttggtaagctttacctgcttattgttcatgccttttcagatatcaaaactgtaatgcatagggtatacattagtctctcagctgagccaactcagactttctttcgtgggttaggtcgattagttttccaatttgatgccgctttaaatgtaatgcacatctttaagagtcgccaccaaattgtggctcgacctgtggaactctattgctttcgttatgcaaatctcaattcagctccaagaaattgggcaacccgtctctgcggccaaagcttactcagcagtttgttttgttttggaccaacaactcattatgaatccacataggtgtcttaggccaggggcctcgatgaagacggttcattaagctcccagccgccttggttgcatgttgtgtttttacagatccaatatgagtctatcctcggtgccaagcagcattcagcatgggaacaaggtaacgcgctgtggcctgagcatcaacaataaactagtgcaggccctgatcctccttttggcctgcattctctttggtgccaacatgaactacgcctcctttccacctggcactgtcatcgatatcaagctgggagatgtcgccctcgagcagttcagctatacgccaacccgcgatggatacgagttcaagtaggtttagccatcattacattaagcattatcataagccttacataatatgaaagaaaacttttcctgatagtacctaattttcattcaatcatttactttgcaagtgttgttaatattatattttggctactatgtatttttttttgtatgtatgaaatgactaatgactaatcttaatctacgttcagctacactcttcctgatggaacttttcgtgatgaggttggcaaggtcctgagtggaacttcagctgcccaggatctggaaaatgccaacaacttggccaagaaccaccgtccctcgcgtcaacagggccttaaggttcgcaagttgtccggaaaatctcttgcatctctggccggataagacacctcagaaaacattattatttacaatccagcacgaatttatttaaacagtttgcattgccgactgttttaggctagcttataagttgagatgttacatttgttagcaataaaaacaatcgatcaaatataatcgactctctgaaaacttgtttgttgtgcaagaaaatttgcgttgactagcaagtttcataaagtcatggtgatttgtaaattagggagatgctttatagatatgtatatcttaaacaatttcacaggtggttagtgtctctaataaatagtgttaagaacggtctgttcataaaaaaatgctctatattttaaaatgacaaaatgttgtacttatgcaatatacatatgcattttttaattttttcttttttctttgtgcggatctcttttattttgattttatctttttattttcgcataaactagtttaaaaatatttcaacaaatgcatgaaacataattcatttgtattatcggtaatattttgctgtaaaatatagtaaaatttgatttctttacaaaatgtgttaaagtgttttacagttcaaataggagtgatcaatgtagaaatattttcccaaaagtatgtaagtgtttcatataaatggtaacctaagttgtttcgatgccgaaaagtttataattttgtttgtatttagggccaaatttaaaatgttattttaagtttggatattttgtttcttatattttagcaaatagtttttaataaaacttgttgcctaagagtatgtgatgattttgaaaaatctatgattttttgcctaagtcatttgattttctgtctaaaaatcttaaataaatatcatcgtcgtattttaaaaatgttagttctaaagtaatttaatactacaacagttaaatctttttcagaattttattggtcttctgctgatcatacaattaatacatttctttctttcttttctttctttacatttctttatttaatagcaatttttccg

SEQ ID NO: 30761 - DNA, 414 bp, DROSOPHILA
atgagtctatcctcggtgccaagcagcattcagcatgggaacaaggtaacgcgctgtggcctgagcatcaacaataaactagtgcaggccctgatcctccttttggcctgcattctctttggtgccaacatgaactacgcctcctttccacctggcactgtcatcgatatcaagctgggagatgtcgccctcgagcagttcagctatacgccaacccgcgatggatacgagttcaactacactcttcctgatggaacttttcgtgatgaggttggcaaggtcctgagtggaacttcagctgcccaggatctggaaaatgccaacaacttggccaagaaccaccgtccctcgcgtcaacagggccttaaggttcgcaagttgtccggaaaatctcttgcatctctggccggataa

SEQ ID NO: 30762 - protein, 137 aa, DROSOPHILA
MSLSSVPSSIQHGNKVTRCGLSINNKLVQALILLLACILFGANMNYASFPPGTVIDIKLGDVALEQFSYTPTRDGYEFNYTLPDGTFRDEVGKVLSGTSAAQDLENANNLAKNHRPSRQQGLKVRKLSGKSLASLAG

SEQ ID NO: 30763 - DNA, 2901 bp, DROSOPHILA
gtacggccatttgagtggctgtgtccggtgactgcgactccttgaggatcgctatgatctgctgcagaccttctccctgtggttcccacgtcattttgctgctgcaagggaagatcgcaagggttttaggtttgattagtgaattcggaattagaaattagggttaatggcctcgcaaagggtagcaaatgggggagaaagagagagcacgagagacactctgttcgaggccactcacgcacaccagggcattttgcacccacacccgcaaacagacatctgctgttgtgaaatttacgttttccgttcgatgtttccttggcacttaatggttttacggcggaaggcgggagttgaaagccctgccccgagagtaacgtgcgattttctgcccacaaccccagacaaaaaaaaacacacgaatagaactcgcctgcctccgccatatttcgtgacatcgggcgtgcggttgaaaacgcttttccgagataagttctgcgttgtccgcataccccctacttacctttgggtgttggctgtgctttaaaactattttagttggaattttcttaagattttgcgtaaattgtctcttttttcaccttttctttgcacaattagcgagatgtatacagtgtgaccgtgcaagagagagggagtatgctattttttattagagatggcaacgtgtcgtcacgggttttaaaattatatttaatgtagttgattttttaatttattgtgcttaatttaatatttttaagcagcttaaaatgtttgaatcactctgatatataatttccgaacaacaaattattttattgccaaaatgaaaaaaaatgaatattaaatcaaattttgcagtccaaagctgctccgatgtaacgaacttcctctcacatatgtatctaagtgctgctgcacggtcacactcgatacggctctcgaaatgcgtccacactctcgccatttagagtgcccacattcgccaccctgttcaattttgtttgggtttgaggccagacagaggagtcattaattttaaacaaaggaccacgcttcaggacattcatcccgggtcagacaaagccgccacacactttcctcgaggccgagtgaaagtttctcgccttgtcgccgcttaacatccgaagcgaccggacatgaacaagcgcaaccatgtgagcagaaaacctacggctccacacacaaagcaaatgtattgagtgaaaagtgctatttcttttgcagatccgcctgccgccagaggtgaatcggctattgtacgtgcggaacctgccgtacaaaatcacctcggacgagatgtacgacatattcggcaaatttggagccattcgacagatacgcgtgtaagattgaagatgataatgctattcgccgtgaatcctctcaatcaatttgtgtatcttttgcagaggcaacactccggaaacgcgtggcaccgcctttgtcgtctacgaggacattttcgatgccaagaacgcctgtgaccatttatcgggttttaatgtgtgcaatcgctatctggtggtgctctactaccaatccaacaaggccttcaagcgcgtggacatggacaagaaacaggaggaactgaacaacattaaggccaagtacaatctgaagacgcctgaagctccttagaacccacacttggtgcggcaggcggtgatggggcatagccagacattgggccccaccagatgacgcccccacttccatcgaccattttccattgtttagggaacttcttgctctgcttatgtgtataccaaatttttgctatctacttgtagatttttttgatcgcattttgtatcatttgaatctaatcattatcatccatccatcactccatctatcatataaacggccggatatcgcggaacgcagacatttgcgcccggttccgactgtttgcaatcatttgacgacattaagacactctctcatcaaaataacaagcaagtgaaagtaaaaataaaaaaaaattgaaaaactagaatcgtttgtttcgatttatgaccaattttttttaaaactagttttagtccaaaaccatttgtagttattctaaagtgtgtcatttgggtcaagtttatttaacaacttagaaataggataacaagtaatagttaaatattaaccaacaataaaaattcccactattatgggaagtcttttgccctatgtaatcgtaaactattctgcgattagggttcctccttaaggtcaggaccagtttggctagctgccgctgcctattacttttcgtatgtgtcttgctgcttctccagtgccagttggttcttcaaatccttgagctccttcttggcgaccttcgcaatttcctgccgtagtgcctcaaccttttgtttacggtcatttctctcccccagaggcttcgccggcttttcgtcatggactttttggtgtcggatgagcgccgctacctggcgaaagcgattgccacacgtcttacactcgaagggcttttcgccagtgtgtatccactcgtgttgcttcacggattgcgagttggcaaagcgacgggagcagaaacggcactcaaagtccttgactttttcgtggacgctcttgtagtggcgcttcatgttgcctatgctcttgaatccctgactgcagctgggacacaagtacataccctccttttgcacaaactgaatctcgtctgtgggattcactgcggtccctgccaatagggccacatcaacttgctctacgcggcggggattcttaggaatgctggctacggattcggcgtaaaccttcagcagctgatgtgagtccacttgagtgtcactggcatcgccatttacttgcacctgtttataagtttccagagccctttccacgctc

SEQ ID NO: 30764 - DNA, 765 bp, DROSOPHILA
attttgtttgggtttgaggccagacagaggagtcattaattttaaacaaaggaccacgcttcaggacattcatcccgggtcagacaaagccgccacacactttcctcgaggccgagtgaaagtttctcgccttgtcgccgcttaacatccgaagcgaccggacatgaacaagcgcaaccatatccgcctgccgccagaggtgaatcggctattgtacgtgcggaacctgccgtacaaaatcacctcggacgagatgtacgacatattcggcaaatttggagccattcgacagatacgcgtaggcaacactccggaaacgcgtggcaccgcctttgtcgtctacgaggacattttcgatgccaagaacgcctgtgaccatttatcgggttttaatgtgtgcaatcgctatctggtggtgctctactaccaatccaacaaggccttcaagcgcgtggacatggacaagaaacaggaggaactgaacaacattaaggccaagtacaatctgaagacgcctgaagctccttagaacccacacttggtgcggcaggcggtgatggggcatagccagacattgggccccaccagatgacgcccccacttccatcgaccattttccattgtttagggaacttcttgctctgcttatgtgtataccaaatttttgctatctacttgtagatttttttgatcgcattttgtatcatttgaatctaatcattatcatccatccatcactccatctatcatataaacggccggata

SEQ ID NO: 30765 - protein, 121 aa, DROSOPHILA
MNKRNHIRLPPEVNRLLYVRNLPYKITSDEMYDIFGKFGAIRQIRVGNTPETRGTAFVVYEDIFDAKNACDHLSGFNVCNRYLVVLYYQSNKAFKRVDMDKKQEELNNIKAKYNLKTPEAP

SEQ ID NO: 30766 - DNA, 2402 bp, DROSOPHILA
tgtggcaaaagagtgaaaaaagcgatagaggtaaacagaaagtatgaatttataacttaatcgctcgaacgttaatcttttttttttttgaatttgagaaacggagacctctttcagttcttgtcaaaacgtttccacaagatatcgtgtcctaattttatctgtataagagagagtttttaaacgagttgtaaacgcgtgaatatcggtgaaaattgtttgaacgcttactttttaaatgaattatactttaaattcgaaaattgtgaaaatcttccagctgtgtaaggctgtaaaataaatatattaagtgtaatcaaaagattaattgtgcaccactattaagttaaattatcaacaaaatatggtaattttgtgtttatcttattaaataagaagcttcatggaaaaatttaaagaaaaacaaaagtttcagctgggaaaagtaatttatgttaagagtaaatttaatattaagcaaagaaggaaaggattaagttttaaaaaaggcaattctgggttgtttctgcgaattaaagagaatttatagtgggatccaccaaaatctccgtcgggtttttatatggttagcctaaagggcaaccgaaaaatccgccggtgttatagcttattgagtgctacttggtaaatttgctctgattttatgaataagaattaaaattagcttctttacacagatgaattttataaaacggaatggattaaagagaaatttatatgcgggtgagtatttaaaccatgggtcttcaaaatactctgttttaaacctctaattgtaacacctaggctgaatttaattttggttgaaaattggaaaggatttagagaagctttctttaacatccaatacttgatagttttaagccaaatcttttattttggaacaacaatatttaagcaatatttaaacaacaatatttaaacctacaacatgtggaaaatgcaatctcgaaatgtgccagatggactaggatattttctattgatcccttatgaaggtcctgccaaagttgatgacactgctcacgaatccgagcatggaggtgatcatggagtgggcgtgcttggagctctccgtggtttcacccttgtcgcttctgctgggccttctcacttctttccgacttcccgacggtgattcttcggtggcaaaaagacgatcgaacctgaggatgggtttcttgaaccattcgccgctgatctcgttgttccgttcgtcatcctcctggctgaatctatcgaatggcagggcgttgacttgaaagaaaatgcagttaggtttaaaataatgtcatgataccagatgatccagtgactcacttgtctgcatgacgagacatccgataaggaagagcaaaaccatcttgctttctgaggtcattttgattgtacttttcgcactagccggagattgataactgactgaatcgaatgccagagagttcatattttatagacgccagccgacgtcggatgtcgccccacattctacgtgatagaatggaaagtaacgatgcgcacgtttcacccaagtaattgctttattttacgcttgtacattttgcctaagcttagaactacatagccataaccctgaatacgacataaaaagtggcactccacacagaaccacaaatcaattgtgggcgttgggtgtctccagcctttcagatttgcacttcaaggtcttcgggtattccgatcgtaggcactatccaattctgcatccgcatctcgctcatcaggcaccgggggcttttgtcgatatcgatcctcgagttccttacgtgaaagttgcggactcggtgctccagcactccaaccgatcactgcaaaaattcggacacaggtaattgcatttgatgcataacatttttagttaataacactaaccgcagataactagcagacatatcagatagaacttaagcgacgcgcttctcatggctgtgctgggattgattcgattgatgggcattaactgacaagcaaaattcggttgggtccactttttatatgtgcaagtgtgccagtctggagctcttcactgattggcgttgaaggaggaggccaatgggcattggcgccgcggcgagagattatgcaaagcacccgtcgaagacccaaaaataacgcaaagaaaaaaaactcaaatataaaaaaagatcacaaaaaatccgaattaagattcgtataaaaggctcgaggcgtcgttctgtctcactgagtgggaaaaaacgctgctgggcatcggttacctcctaccggtctttgacgtagtcaacgtcgcctggcacgtgaatggcccgttgcgcgttgattgattgtttattgaaatgctacctaatgaacttacacgtatgtcgtcggcgattagccaa

SEQ ID NO: 30767 - DNA, 339 bp, DROSOPHILA
atgacctcagaaagcaagatggttttgctcttccttatcggatgtctcgtcatgcagacaatcaacgccctgccattcgatagattcagccaggaggatgacgaacggaacaacgagatcagcggcgaatggttcaagaaacccatcctcaggttcgatcgtctttttgccaccgaagaatcaccgtcgggaagtcggaaagaagtgagaaggcccagcagaagcgacaagggtgaaaccacggagagctccaagcacgcccactccatgatcacctccatgctcggattcgtgagcagtgtcatcaactttggcaggaccttcataagggatcaatag

SEQ ID NO: 30768 - protein, 112 aa, DROSOPHILA
MTSESKMVLLFLIGCLVMQTINALPFDRFSQEDDERNNEISGEWFKKPILRFDRLFATEESPSGSRKEVRRPSRSDKGETTESSKHAHSMITSMLGFVSSVINFGRTFIRDQ

SEQ ID NO: 30769 - DNA, 3867 bp, DROSOPHILA
tttgtttacttttgcatttacatttaagttgctgcaatgtttgattgttttaagtacttttgttggctgttggcttgttgagcttatgtttgatatgcttgtcatgggcttgttattacgacgagtggctattaaaaaatgcaaatgctattagatgcttgagctcataatttgattaatgattttgcggatgatattgcgacttctttttctcactttctcttcacttttcgcctcatcgttatttgttttacgttcgttactttttaccagtttcaaagcccatttgctctcgtcattgcgatacaagagcggaatggagtcaaaaaagccacaaagttctggaccagtgtctgcccgggacaggttcccagaatatgcttcgcacacatttgcccacaaggcttaagctgaaaatgtctatttaaacaaaatccaagtggcaaatgttggtcctataccagactcaactgtggcatacccattgaaatgacttatatatccctggggggctcagttcgatatacccgtaacaatgctggctgctccgatttaaacttgtggcatcatcggcagttgccagttgggtgcaaacagaaagcacgccctttatttgctttaatccgacgaaatccctgttctaatgccgagcggcaataaaggatgaaacgtgcatggcatgtaaagagcatgtcctgtggccacgccacgccacaccgcaaccctctcgcctgtctgactcgatagtttgcgaaacggaaacggaagtgacactaaattcgtttcggttttcccaattggcgacacacaggcagaccgacagacagatacatttagggagtccctggatgaactggcaaaaataaacttcacaaaattgttacgtgtaatcccctttatgatctgcacccatccatgtgcgctgcatcttaagtgaaacgggtccacagacccattcacattactgctgccaaatccaggcgcagtcctggcccgtttctcagctggctatgaccatggtggctgatgtggcacccggtggccagtgggtggctcgggaattgcttgcctcctgtggcagcgatgacgatcccatcgaggacaacgaactactgctgttgaccgagtgcagctgctgcggctgatggtactccggttcctcgtaggcggcatcctcgtcacagtcgtgtggatacagcggcacatggtggtgcgtgtgatggtggtgcgtatgcgagtggtgcacatgctgttgctgctggtatggatggaagtactgctgctgttgcaacggctgatgttgctgctgctgtgtagcaggcggtgtggtcgacgacgacgctggcgaggctccaccagaaggtgggtggggcaatgacagtggcagaggcagcaccaccggcagcggttgcagacctcgtatgctgtccgccgggtgggccgtgtagatgttgctcctcctcaggtggttgttgtttatgttgctgctgctgccgttgtggtggtgcacattgccgccggcaccacccgccgctccacttgccccgcccgcgccattcaatccgttgccgtgggcgcgtttgttgcgagaccaccattgcacgtgcgtgtctgcgtgttggagaaaccgatgcagatgccacacaataacaaacacgagtgccgaaaaatagagagaagagagggtggtggagaaacgggagggggttagttggtgggtcacagttgcgaaaacagtcgacgaatgttgtgagagtcaacacaggtaaaggcctcataatggctaacagcgggcacagtggaaatcattcatcataaaagggttaaaataatacaaaatgtttcacattttaagattttactttgtaaagcttaaatctttgtatttcatttggttaaaagtattattttagatgttttatttgcaactctgaatgattgattatccactacgcccactgtgcttgtcctacgcccactgttttctattttggccaagttggccatgtggctatgtcgagtattagcactcaccgttgcgattgttggaggactttttgcgccggcagcgcaccacggcaatcatgatgatggcgcctagcagcgccgacaacacggacacgatgatcagagtcagtggccagcccagttctgtggccttttctgcaacaaaaaaaggggatgggcaaaaagggtaacggttagtaacggaagttatgcagccctcagctaccaattctgcactaagaaaaaatgtataaaatataatacaaattgtatacgttttttctaagtcttttagattgtctagccaaagctcaatatttaatttttaaatgcatatgtatctatattctttttgtgccagtcaactttaatcagaatataaacctcgaatttgtatcccccagtgcatcccgacttgtattcggttactcacctatcgttccctcgaacatgaatgtgctcttggtgggcatcgcccaggagcacaaatcacacgtggtcaggccgtcgctcagcaccggctcgtcgacgaagaaaggcgggcggggcggtggcggtacaaagcgtccgttccagaggccctgttcgctggcatcaaaggccattggcgagccgaacaagtcgtcatcgtcatcgaagatgtcgaacgtcacgtcaccaaagctgctcaagtcctccgcggagctgctggccaccagactggcaatccgcggtggactgaaagtaggaaattcggatgcggatacggagggcagggcggatgcggatgcggatatggacacagatacggatgcaacttgatttacaacgtaaccgagacgcgcatcgttgctgtagttgctgtttgctacggatggcattttccttgagttttccgggtgggggattgagggagttttccggataaaggggcaaagctggaatcctttgacgctcctcctcgcttattgccagttatcgcagttgtccgttagtcctccgtttggatcatggtgaatggagtgggattttcgccgggcttcgcctgttttctggttcttttcttgcaatttttggctgaaagaaaaatgcaaacggaaggagcaagttagtttcgccaattaaaaccttaattgtgctgtcagtatttgcgcatttctcccccaagagagagctttcacatttttcaggcgtatctcttcgtatcgcctaagcctcgagccgagttaacattccctcgcaagccagagactcatgtcagcaatcgttactaaatgactttttctacctatttccaatttgtagccacccctgccttctgcgctcgctgcctggcatttgtatctcttcagctggaaattgaatttttgaacagctctgccaacgttatctgccagatacttcgagtagcagagccgcacatcgactgctgtggatgcggatacacataggacatcaacatcacacatggcagccaatgctaacgagaattgacagcttgacagttcgatatcaggctagaagtcagcattagttacagttccgagttctcagtgcctcgaatttggtttattaaaaacatcctccattgtgtcaggtctcctccttcctcgtccaattattttttcccttctcggcacttgtctgaacaaacttgatttgcgaggcaataatcctgataaattaacactaatttgcaagcgccacgagcgggaggagaaaaactccagctcgagctcaagctaatcggcaggtgaaaataaagcagagtgcttcgttagttggctcggtagatctctgcctgtctaaagccaaataaatctgtttcactccacttggcagttggcaaccctttcacaacgttcttgttcctcagccttt

SEQ ID NO: 30770 - DNA, 1167 bp, DROSOPHILA
atgccatccgtagcaaacagcaactacagcaacgatgcgcgtctcggttacgttgtaaatcaagttgcatccgtatctgtgtccatatccgcatccgcatccgccctgccctccgtatccgcatccgaatttcctactttcagtccaccgcggattgccagtctggtggccagcagctccgcggaggacttgagcagctttggtgacgtgacgttcgacatcttcgatgacgatgacgacttgttcggctcgccaatggcctttgatgccagcgaacagggcctctggaacggacgctttgtaccgccaccgccccgcccgcctttcttcgtcgacgagccggtgctgagcgacggcctgaccacgtgtgatttgtgctcctgggcgatgcccaccaagagcacattcatgttcgagggaacgatagaaaaggccacagaactgggctggccactgactctgatcatcgtgtccgtgttgtcggcgctgctaggcgccatcatcatgattgccgtggtgcgctgccggcgcaaaaagtcctccaacaatcgcaacgacacgcacgtgcaatggtggtctcgcaacaaacgcgcccacggcaacggattgaatggcgcgggcggggcaagtggagcggcgggtggtgccggcggcaatgtgcaccaccacaacggcagcagcagcaacataaacaacaaccacctgaggaggagcaacatctacacggcccacccggcggacagcatacgaggtctgcaaccgctgccggtggtgctgcctctgccactgtcattgccccacccaccttctggtggagcctcgccagcgtcgtcgtcgaccacaccgcctgctacacagcagcagcaacatcagccgttgcaacagcagcagtacttccatccataccagcagcaacagcatgtgcaccactcgcatacgcaccaccatcacacgcaccaccatgtgccgctgtatccacacgactgtgacgaggatgccgcctacgaggaaccggagtaccatcagccgcagcagctgcactcggtcaacagcagtagttcgttgtcctcgatgggatcgtcatcgctgccacaggaggcaagcaattcccgagccacccactggccaccgggtgccacatcagccaccatggtcatagccagctga

SEQ ID NO: 30771 - protein, 388 aa, DROSOPHILA
MPSVANSNYSNDARLGYVVNQVASVSVSISASASALPSVSASEFPTFSPPRIASLVASSSAEDLSSFGDVTFDIFDDDDDLFGSPMAFDASEQGLWNGRFVPPPPRPPFFVDEPVLSDGLTTCDLCSWAMPTKSTFMFEGTIEKATELGWPLTLIIVSVLSALLGAIIMIAVVRCRRKKSSNNRNDTHVQWWSRNKRAHGNGLNGAGGASGAAGGAGGNVHHHNGSSSNINNNHLRRSNIYTAHPADSIRGLQPLPVVLPLPLSLPHPPSGGASPASSSTTPPATQQQQHQPLQQQQYFHPYQQQQHVHHSHTHHHHTHHHVPLYPHDCDEDAAYEEPEYHQPQQLHSVNSSSSLSSMGSSSLPQEASNSRATHWPPGATSATMVIAS

SEQ ID NO: 30772 - DNA, 3282 bp, DROSOPHILA
tgagaaggatttttcaattattttttgtcatgccgaatgaaattgggatgtaatcgaaatattttatcttccttacggtgaatgcaatagtcgagtttcccgactttcagataacttagttagtgagtagtcagtaccaatgtgaaatgtaaatatacaatgtcaattaaaaaattgttcagaagtgtgggcatgacagttttaggcgtggccaaagtggttttggtacaccggtaaaaattggaaaaataaacaataaaacgaagaaaaatcaaaacattttccaaaagcgtaagtgtaaagttttggcagcgaagacggttggaatgcaataagagtcaaggacggtaagttcgaacgctaattgatggacattggtccccggcaaagcggagagccgtgaactaacggtaacgcgcagagaagtcagtgaaaagcgaactgtgaaagtgtcgggcagtgaaaaacgcgtaggacacagaagaaaggacgagcaatacaagtgagatcaatccttggagtggagaaagaaggaccagggacagtggagtcagtggtcggcaaaggtggtcccaggccgagcgttgccttaacccgtggacgataacatcctaaacctattcgatccggaacgtgttccgttgtcaaggacacacaggacacagagggcaaggcgtcgcagcagacggccatcatcggaagaatccactgtaaaatactcgaataaagctacttaagtcttaagctctttcttttccttggtcgggcaatcacacaaatcatatatttggtcggacgaacacacaaactctctgaactagttattgcaactcgtagcgagcagaacaataaaaaacagttcgttacatctagcagccaactgtgattgtcctggtcaaaggaacagagagggaagtcgtggctgtacagctcaatgaaggataattttctagccatagcaagcgcccatgtgatcaagctagagggtttggtcaaggaaatgcggaatacgctgtctgagtttatcgaccagactacagacgagcccggaacagtcgcaattttagaggcattattcaaggagtacggagggagacatgccgtagaggtcagcctcgacttcactagcatggcggaggccagcggaagcaggtccaaaaggcaacagttcggtcaggaacgtcggtatgtcagtcgcgaatgaaaggagaggcggaaagctacccatgaccgtattacgtaggattacgcaatggtggcaaagcaggtgcgggaataaagctttcgttacgacggaaacaagaaaccgttgtaattccaaaaaaaatgtgaacgagacatcaaccaggtcccaagagcgatgccttctgaaggggagggccttgaagtggtttattgccaacaacaggttctggaagacgtggccgagcttccatacagagcttctagaaattctttctgcccagaggatcatgacaaagccggcggaccaggtcaggcagaggaagcagaagatgtcgcagaaggaggcgctggcgaggatgaaggagaacagcaccccagcctttcgcctgttcatacgcccgtaccagcgccttcacttggatgccctgcctgtcgagagctggacaaccaaagggaacgtttcgatctagagcggacacataagcccgccaccagcaagatttcccaagggaaacacaaaactcggtgtgcaggaggtgccaagaggacaccacaggcccgtcgaggaacagcaacaagaggagagagccggatccggtttggcgtggttttgtgctaggcccggcacaagcctgccataaatatggtggttagggccacttaaaacagaacgagcactgcaagcgaagatcgattctcgtagcaggaaagacaagtagctgccgtggttagtagggacagtggagtggaaggcaaaggtggatacgctcttccgccataaaggaggaaatgtggaagacgctgtttgagtttcgtcgaccagaccacagacgagcccgaaacagtcgcaatattggaggcactagagaggtagtacagaaggaggccgaccgattgaccgagaggtcaaagtcatcggcgttgaaggtctggtgaggcgcctcgacatggaagaggaagcaggtcagaaaggctggaattcgaacaggaccgtcgggaaggcagtcgcaaaagatgggagagacgggaatctagccgtgaccagtgggcgactacaagggcagcaccgcaggattacgcaaatttggcgaagcaggaggacaccacaggcccatccggaaccagacgatcaatttctgctggtcctgcgtgagaatcggtttgagaaccgcggagtgctgcccaagatcgggaaacgccacgcgactccagcctcagaggagccaccaaaattaatgggcgaactgaaggcggaagaaaggcaactgtccgccacagtgctgacagacgacgcaacataatcgacgctctagtactacgttgggttttcgagtaagcgtgacgataccggctggctctgcggggctaagcaggccacgcgagaaactgtcaaaagcaatcgtaaagagggccgcggacttctcggaggaggatattgacgaatttctaaggtcggagttagccgattcaggaagaacacggttcgaatagatttggtggatttaaatcacaacacttgtattcatgtattatttaatattatttaggaagagattggtgaaggcatggtcccgctcctatcgaagtatcttttgtaagcctaaatcgaggagcagcgatgccggcataacctgcagtggcgcttatatctattattcgaattgtcgccgagcgacggcgctggagtgggaggagtgctatatgcacacatggtatgcggtcagcggagttatgttttcttggtctttaagtggatactcttattacgctcgcacttggaccggactctttatacaacgtgtttgtaagttgtaaataaaagcaaagacactagaataacaagatgcgtaacggccatacattggtgcttgcttgtgtgattaaaaacaagagacgagaacgcgtatatgtgtgcgtgttgtgcttcgagacgaaatcaatccgggacgaaatcaattctgatcgaagaaacgaatttacatatttggggagttttgacagtttcgtagcaatatgatgacattgcacgctgtttaaaaatatcaaattggaatataaaaaaatctgaatatgaaaaacaactgaatctaatgtgca

SEQ ID NO: 30773 - DNA, 393 bp, DROSOPHILA
atgcggaatacgctgtctgagtttatcgaccagactacagacgagcccggaacagtcgcaattttagaggcattattcaaggagtacggagggagacatgccgtagaggtcagcctcgacttcactagcatggcggaggccagcggaagcaaccacagacgagcccgaaacagtcgcaatattggaggcactagagaggtagtacagaaggaggccgaccgattgaccgagaggtcaaagtcatcggcgttgaaggtctgtcagaaaggctggaattcgaacaggaccgtcgggaaggcagtcgcaaaagatgggagagacgggaatctagccgtgaccagtgggcgactacaagggcagcaccgcaggattacgcaaatttggcgaagcagg

SEQ ID NO: 30774 - protein, 131 aa, DROSOPHILA
MRNTLSEFIDQTTDEPGTVAILEALFKEYGGRHAVEVSLDFTSMAEASGSNHRRARNSRNIGGTREVVQKEADRLTERSKSSALKVCQKGWNSNRTVGKAVAKDGRDGNLAVTSGRLQGQHRRITQIWRSR

SEQ ID NO: 30775 - DNA, 2147 bp, DROSOPHILA
gcactttacaaaacaacaaccaagttaacgtgatattaaagaaatcactggagggaccccaggacatcgagttggagttaagtatgacagtgtacacaaacggaatgcctcgtggaaaaagtgtagcaaaattatttctgtttgtttctcaacatacattttaaaaattataatatttcatttgctgcgaacatgtatacctttagattccctacaaacctatacagtagacacaaataaaaattatgcagaaaaagtacacacatacctgctctgctgataaattttacatttttaaatcattttaaataaataaaatcatcataaataatagcttatgttcaaagttgttgaattgttgagtaacaagtttgtgattaatttatttttcaagatacacttaagtaaaagtattttaatgtccaaaaaactcacgggatttgtactgcttgtgaggacttggccgcagaacacacttcacctcgtatattccatgtgcatggattatataaatgcatgtgatattcacacattcatgcggttaaaaaaacttactctgcctcctcaccgacactattggtaataaaaaataacgtaagttattttaacatttaataaagattttaacactaaaaacaagagagaattcttttttgctagttcttcggctatatatacccgatattgaagactactaaagattacaaggccaattgaaagtagaacaaaaaatctaaaaaaattttaaacatgtgggcgttacagcttttggcggattgagtttgcgtggtaacgtgtcgagcatttttatacccgttaaagggtatactagatttgttgaaaagtatgtaacaggcaaaaacgcttccgacctcaaaaagtatatatattcttgatcaggatcaatagccgagtcgatctgactatgtctgtctgtccgtatgaacacctcgaattctggactattaaagctaaaatgttgagatgaagcatacagattctaggaacatagacagcacaagtttgttgacccatgttgccattcctgatcaggatcaatagccgagacgatctggtcatgtccgtctgtccgtatgaacgtcacgattacaggaactataaaagctagaaggatgagattcagcatacagaatctagaaaagacgcagcgcagcgttgacccatgttgccacgcccactctaacgcctacaaaccgcgcaaaactgccacgcccgcacttttgaaaaagtgtgttgatattctttaaatattttgattagtcttgtaattttctatcgatttcccaaaaaactttttgccacggccactctaacgcccttcagccgcccaaaaatgctttgtcgcccgttatcaacgtggtagctagtggtttgcttaggacctctcgtgtttagaagcattctcggcagagaaccagtagtagcgctggcctttttgtgggcgtactctaggtgctctcggaacgtggtatcaggagaagcactaactaactattgatctaaagatacacattattttaacgttccaggaagataggtcttgcgtgataatccacacgaacgacatgaatgaaatcatatgatgctgcaaagtatatgtcatagttttaatactgcgttggtgatgcgtcggtgattaaggattcgacgtcaaattagtttgggcagcttgtagagttggtgccttagaggtaggttctgttagcctcgaattatggacgtttggaaatatcaaattttggaaggtggtcgaagggccaaataaggacctctttgcgggtgataaaaaaacttctggcgttctggcgttactcggagatgtatccggcttttggggtctttgtatattgaacagcctttatatggtcagaagcgctttcttccacctgttacatacttttcaacgaacctattgtagtattcccttttactctacgagtaacgggtataaaaaatataaggcccaaagggttttctgtagcacctaccgtttagttacacaattcataaaaaaaaccaaatcgattttcaaattcataatttttttgtataagaatcatacgaaaaaacggtaaaaattttattatgtccttcgtacccgtttatttttattttacttaataaga

SEQ ID NO: 30776 - DNA, 147 bp, DROSOPHILA
atgctgaatctcatccttctagcttttatagttcctgtaatcgtgacgttcatacggacagacggacatgaccagatcgtctcggctattgatcctgatcaggaatggcaacatgggtcaacaaacttgtgctgtctatgttcctag

SEQ ID NO: 30777 - protein, 48 aa, DROSOPHILA
MLNLILLAFIVPVIVTFIRTDGHDQIVSAIDPDQEWQHGSTNLCCLCS

SEQ ID NO: 30778 - DNA, 2456 bp, DROSOPHILA
tgttttagtaacgattacgtgaagatttaagtccaaactaggctactaatcgaaaatatgattacgtgaagatttaagtccaaactaggctactaatcgaaaatatgatttatatgatttacacaaatgtgtacataaccatatagtcatttaaattgcatatatagtctcttaatactaatttaaacagtatataataaaacatttagattttctacagctacaaaatacactccctgaatgattaccgaagacacactgacaccggaacagacagtttgaactatcacataccctacagctagccctagcataaccatacgtaactatacaccaagtcgcttattattttttaatgataagagcaatactcaaaaaataatagtatagatacatgattaagcgtgaagagatagtggttattatagtaaacagtacgtaaaatagtatataaaattaaagatattgctactataaataatcaaaatatcattcttcggtaatataatggacgatattttaaactaaatattcgtttaagttacaaatgtgaacctcgaattattttaaaattggaatatatcatattatatttttatatgtatattaaattatgagacgtcacaatgcgtacatatgtaggtatttccgaacaatacaaatctgggcatcaaaatagtagatcgtatcgggtaacaaattgtgattcaaacgtttacaaaatttttaaatttatatgtaaacaaattcaaatagaaactgcatcaatctaactccatgttttgggataaataggcgataaatgaattttataaccaatatatcgcgacaccgtaacgtgtgccttattccggccttaagtttaaatgacttttaataatacatcaaaaacctaattcaagtatatattaagcccacggacattcaactgcaaagccgtcgcacgtaaaaagtcaataggatataggattttctaatataggaccattacctgattggtatgccgcccatcacctgcgacgtaaccgtcatcgtactgtaatcgcctgagaatatgtttgttttcaaggtaattattgatcctaacttccatgttaatatcgaatccctacagtcacaatggcgatcataccttatatacacacatatataaacatatgcgtgcatatatatacatacgtgtaacaagaacaaagtttccgttttccggcttgaccgttattccgaggtggcacgatttggcaactaagagccattccaaagagagcattattatccgctgagcaaagatgctgtttcttggtaaacccgaagacgggacgaagatattttgccgaaggccttagagctgagtcctgaaacgaagacgtttggcttactttgcgccagcgacgatggcgacagcgatgactcgacttcaggccgactccactttgcgtgcaagttctatttctaaacgagacgtgtctgaacccccagcaacagtcatatttatacttgtccgaggcggcggccaaattagtttttctatgactcgcgggccgccaggttatctgtagttgtttgctgggagcgacttccaagtctcagccgtaatcgtaaccgtaatcgaggccgtgcatatagacagtcactgtattcttccaacaaaaaaaacctcgtaaagaggtaaaagcaaccgaaatacgcaccaaaccaccaattatacaaatggcagcaagataacatttcgctccttttcgaacacttgcatacgcgacacattgcttattattggttttattcacaaattttggtttttttatgctttgaactttagtttcttttctttaaaaagtgattaaaacagtttggtgactatgttccatccccaataataacaaacaatttataagtgtccatgtgcgacgctaggatattcaagaataagtttcctaattgacctgtgtgttttatttatttcgacgcaactacgtctacgaggaaatatattaatttttcaaaaccgatgccaacatatatgtggcttggtaacttaagtcgtccagaaactggcttatacaagaaaccgtattcttatatattaaggctctaccttcgattgcttttaaatcaaattgtctataaattgaatcagaaacgttaaattctgggacaaaagcaattttggtagactgacttttttaaacagaatgaccgatatattagctatggtgtttatatatatattttaaatatatatcttaagagacgtatgcgtatctcacgtttttaatatatacaaaatacggaagtaatttaataattcttaatttgatttattaatcgaaagaatacgtgtaaaaaaaagttagatcattatacacttttttacttcatggttttacttccatggtttggcttaaaaaaaaagcactccaattttatatccattattttagaggaaatcatcctga

SEQ ID NO: 30779 - DNA, 180 bp, DROSOPHILA
atgccgcccatcacctgcgacgtaaccgtcatcgtactacgggacgaagatattttgccgaaggccttagagctgagtcctgaaacgaagacgtttggcttactttgcgccagcgacgatggcgacagcgatgactcgacttcaggccgactccactttgcgtgcaagttctatttctaa

SEQ ID NO: 30780 - protein, 59 aa, DROSOPHILA
MPPITCDVTVIVLRDEDILPKALELSPETKTFGLLCASDDGDSDDSTSGRLHFACKFYF

SEQ ID NO: 30781 - DNA, 2120 bp, DROSOPHILA
gcatgtttattttaaattttaatcaatgtgaataaccgcatctatttgaaactaggcatacatacattcagctcaaagaagctggggtcggaaaatccaatttttaatatgtatgtacagacatacatatgtacatagatcgcgatccgttacgtgttttttccaatatttacataacgataatcattcgcttccacaattttcttgaacttggatatgtatatacatgttcatcatcatcatataagtacatatgtgaatttgtccgccgatcctaaaacatgcgaattggcgccacaacttacaattattacatacatatgtagaaatttagttttaataggtgggaacacaaaaaaacaaaatttttaagggttggacaaacgtttttaattcaaaatacttattttaaaggatgggaaaacgaaaaaaactaattttaaaggatggacaaacgataaaaactaagaatactgattgggcaaaagtttttttttataatatttagttttaagagatggtcaaaataataataccgaggttaactagaacgtctcatattttctaaagtattcactttttcaaaattgaaaagagtggccaaacgtgggcaaataaagacaacaaatgagcaaacgattccagcttttaaatttcaaaaattccattttttcgactccagcttctttgagctcgtacattatgcgcaaaatgagaaatctgcgcactgaagtgtattcgtgtttttgctagtggttgattgattttttgtgaccgtatgaatattgagggtgcgtcgtcgttggagcaagcgtcgcaacggcatgaaacaaactcttacagactctgtgactgagtcttaatgcttaatatcaatattctagttttcattgttcccgagatcacagcgttcagattgatagtcagacggactaaccagttactcgataactgaccgactgcatatgaaatcttcagtatatgtaaggaaatacgatacctatacacctattatggttaacataggtgtaaacgtgtattcgttgggaatcagattatccacccttacctgattcttaagagtttcgtcaatgtgaatggtagacgtcttccgaatcatgtcatgagaatatttaaagttaacgggtcctaagatcccgctctctatgaaaaaatgttttgctttatcaatgctcgagttcaatggttgcattttttagttcttattagattaaaaaaggagtaaaacgttggtcagatcaatgttgatggagatcttcttactcatttatactgagtatttcaataactagctgaaaagtttaaaggatttgagctttaagtagaataaaactttttattagacttacacatatacccaacacatgcaaatgttcatatagttgttttatttgttaatttttatattttacattattacaaatacaaaatattaagtgccgaagatctgtcgcacgcttctttgtgtgaatactcgactagaacatatatgggaaacaatacctaacccaataaatgtcttaagatataagtttcttctaaactgatcgaaaatataactagtattctatcagtagttttgtgtcattatacattataccctctttccactaaattacctgcatatatacacatgtttgggatatagttcacatgatatttttgaagcgattttaggcttaatgttattttattaaatttatatttatatatattatttatatttataattatattattatttattcggtaatttcatagctgttctgggcattactttctttccacaataaacataacattagatgctgttaaaatttgtagtaagtaatcgtagtaataatagtaatagtagtagtaaaactaaaacatttttacgggtaacaacacaagactctcgtttcactctgcattcaagcgctctattattaaacaagctctaattatatttccatcgttcaatatctattttaaagaatagaaggattagaaaactttttcgtcttattttcaaaatttgtgtcttattcgaacactaacagcgaacataccgaaagcaaaccttttatctgcccttataaccactttcaaaccacata

SEQ ID NO: 30782 - DNA, 120 bp, DROSOPHILA
atgattcggaagacgtctaccattcacattgacgaaactcttaagaatcaggtaagggtggataatctgattcccaacgaatacacgtttacacctatgttaaccataataggtgtatag

SEQ ID NO: 30783 - protein, 39 aa, DROSOPHILA
MIRKTSTIHIDETLKNQVRVDNLIPNEYTFTPMLTIIGV

SEQ ID NO: 30784 - DNA, 1559 bp, DROSOPHILA
acatatacgcgttctcgtctcttgtttttactcacccaagcaagcaaattaaatttttagatttcttacgctcggaaagagagcaattttggccgtcactaaaaaattgcctgcatagtgccaaaccaatgtatggccgttacgcatcttgttattctagtgtctttggtacaacagtctaattatacccgttactcgtactagattcgttgataagtatgtaacaggtaaaatgaacaaaaaaaaaatcaacaaattgtcgagttcatagaaagctttcaggaattcttcctgcccacaggcttcatgacaaaggtggcggaccaggtctggcggaggaagcagcaacatggcgagaactttaaagactatagaagaaggagaggaggaggaggaggagaagattctggatgtccagttggtggacgacgaggcatcgatggagaccgatggagcggtcgaggtcgtcaccctctcctcagagagtgaggacgacgatgtcatcggacaaagacaaggccatgcgggggctaaaggccggataccaatgcgagcgtagggcgacgcaggggcggatagacctcggagacgcgccgccgaccgaggtcccggaggaagaagagacgctgtgggcaccaccgcatccgccgacgcagccaccgctgccgccgcggacgacacaaacgcagacgccgctgacgccaacaccaccaccccgttcgccaccgcgccatgctagagactcagcaggcgcacgtttgcccggcggtccgcacgaagattttgaaatacaaatatatatttggtaataatttgtgaaatatgttttgagcaaccaaaatatcagataatttcggtggtttttactttaaatagttcaaagacatgatcaagttggtcaatatcaagagaataggtttcattagtttcgttaacgattgttctaggaactcctttaaaatattcaactttattaaaattaggcttagaactctcctcccgtgttagcgttggcatggcaacatgggttaacaaacttgcgtttcgtctttgtcctgtatcggggcgctttcaattgcgtgaagactccgcgctttgtaaggataagcaagcaaaaggtacacgtcttcgacctgaaaggcggcaaagcagtgggaatcagtatatgtgttatatcagttattaggattgtattttctattagtttctgtgcgttggacaaatacgtttattgccggagttactgctgatgcagaaaagtcgtttgggatgggttgtgtttggaggttgtgtacggccacgtggcacttccctaatagctcttcgcgtttcattccagaatactgaggacaagcctttatgttgttttgcaacgcttctaatagaggtcgaaaattatccggatccaagcaggtcatgcgcaggtttctatctcttgagaggaagcttaatcggaatcctatcgtgaacgatttttatgtgatgcttcgcgacgctaaaaactgtacggatttcctcatgcagaaagccgacaataaatgttgcaggtccgactcaga

SEQ ID NO: 30785 - DNA, 209 bp, DROSOPHILA
tggcgagaactttaaagactatagaagaaggagaggaggaggaggaggagaagattctggatgtccagttggtggacgacgaggcatcgatggagaccgatggagcggtcgaggtcgtcaccctctcctcagagagtgaggacgacgatgtcatcggacaaagacaaggccatgcgggggctaaaggccggataccaatgcgagcgtag

SEQ ID NO: 30786 - protein, 39 aa, DROSOPHILA
METDGAVEVVTLSSESEDDDVIGQRQGHAGAKGRIPMRA

SEQ ID NO: 30787 - DNA, 3515 bp, DROSOPHILA
cgccaagatgcgcatgaacaatgtgaacatggcggactaggccaccgatcttcaatctcttctagctctgttgtgaaccgaattgaactaaatcgaaagcactgaaaatttgttgcagcagtctctcgtggaggccacaatctttgtattataatcgtatctataatgtaactttggtggatctggagtttgtacccgtacatatgcatgttgatgagttgaacagacctcgtgtcgctatattataaatgtgttatggctatcaaaagcactcaccttttctctcgtttgcgatgtagtatccaaaagtgattcggtaaggattcggtttttggtagtggattgttcttggcggtgctgtgggtttcaacttcagaagtcgaatgatctaaacaactgcgcagctcgacgacgaaggatctgctggcaggaattctaagggtgatttttcaacgatgacagggggttgaaaagcccaatgcttataggtcacatcgtaggctttcaaccccttgcaagaagcaacaggctgccaggatatgtgttccaccaatcaggatcaaccagaactggatatggccggctctaacggtcaacggaagttccaagctccagatgttgacaatgcgtttgccaaaatacacaatttttgtgtatgctaaatagcccaagcttttgaccttgatgatggctaaggccgccagctgccagcagtttgattctaggtctcatccccgtcagtctagctgattttcctcttttttttggttttttctattttacaattttctcgcattttatttgccatatcttatataagccctgcagctgaccgttggagcattgcacaatccggggcagcagcgtcgatcgatttcacacaccgctgactgctgggcaagtgacttccggcttttggccaagccccgaaaagtggccaactataaatggctatgttgttgtcaaaatgctgccacaaatttgacgagagtgcaacgcgatggatctgccaattggaaagttaaacggactgctaaagatgcaaatattcctcctgcaattgttgcttttcgtttcgccggcattgttgcagcagccacatgtcttttaccatccaagacaattgtattacgattcaccgcgtcttcgtcgctttgagtatggtgccgctgccacgcccattgtgggcggctatagtccggctcctccgccggcgattcactttcagcagcagacgccacactttcagctgattaactatcggccgagttatcagcccttgggcttggattaccagcagcagcagttgcccgctcctgccgcaccccctccgcccctgtatccgcagcagagtgtccagtaccagcagcggaccatcgctccacacgccgatttggccaaatatcgatatgaaggtaactatctgccagtgcaacgggtttcgctgcagcaaccacaacgccgcgtcgaggagcaacaccagttgcagcaacagcacttgcagcagcaacacttgcagcagcagcagcacttgcagcagcaacacttgcagcagcaacagcagccgcagcaactctacaatgtgccaccggctctttttaccagcgatgtgttgcatgtgattccacctcgcattgccagattgcaggagcagcagcagcagcaaccctcacagaatgtccaaacggaaagacccaggaggtacgccaaggatctggacacggatgtggccgaaaccagaagtccagctgaccgaagtgccaaggaaaccaagtactttcagtaagttaattgggttgaaaaataattgaaaagtggtggttgctcattattttggaatagctcttaacatgcacttcatgcctaaaatcaattatccattttttacacaaatttattaacatacatattcatgcaattcagtaagaaaatttcgcttgaatatgggtgaaattattacgaaataacggtggtggttcagttatttattaaataaaaggattttcctagtgaaaaatggtggatgtttaccctttcgaacttaacaagtagtgccaacagttttttttttttttttgtagaaaaatttttatagaaaaaagggtgaaaagtgagtaacatatttttgacaaaatggtggctgttatttaaacaatgaaaactaacaattggacaattacaattacttcctaattctaaaattaattagtactaatttctttcttttaatttcaatgcttagtgacattttcatgcgctttgatgcacccgattcgcggagtcatggccacgtcctgaagcatccgaaggcccaggaaaagcgatttgaatcccagcgaggcacgaatcgttacaagggcgaggtgagttgagcttgagagccaacttaataaatttccagataattcggcagactttctccctcttaaccactcgatcgacttaggtgatttggacagatcgtcaaggaggtcacggcgaacatcgttgggacatggcgcagggaaaactctgagatcagacctcgatttgcatactccataacatttttcccatcccccccaaaaactctctgtacatacccatgcgaactcgcataaatcgtgacttttcataattttgccgtattatttatttaagggcaatgatttggcgtgaaattggaatgagcactgcaaaagatttgcatacgaatgcagcttgctcagcttcttgtcttaggtcatcttcgagatgtgagattttctcacggcgctccggaaaagtggactgtccaaccggttacacaagttcaacgggcactggctgggccatccaaaaaggtcaactggcgacgggccatcctttagccggaaactggttcctcgaagtgacccgaatgtcctgcagttacttacacttacaggacaagacagtcgatcggtcggtccatcatgcgggtcgctcgttaaggatatgtaaatgcgtctgccaagaagcaggacgaaggggttgaagatgtgtgagggtattatcttgtaacctcgggggttgcactcgcctcatttgcatatccatccaaagacggccaagcaaatgacacaaatgcccggcggcctggactaatgtccagttgtttgttggaataccaacggcgtgaatgaccacgcacatgttcgggatccttgcagcagatcaatatttgatccccgaacctacatatgtaaatgggttacaggccctttgacccgctatgcgggtcattagcgaagcgatcccgactggctgtcagtcatcgcacctcaactcatcatctggagactgtccagaaccggttcgtaatcgccggccgtcttctgctacttcttgggcgataaggtcatcaaagccggggatattcgactgctcaaagttctcacacgctcgtctaatttatgcaaggacattgcagaaggacactgcgatgcgactgcgatgcgaatgcgattgctgttgctattcctattgcttttgtggcgtgagttcccaaaggacaa

SEQ ID NO: 30788 - DNA, 972 bp, DROSOPHILA
atggatctgccaattggaaagttaaacggactgctaaagatgcaaatattcctcctgcaattgttgcttttcgtttcgccggcattgttgcagcagccacatgtcttttaccatccaagacaattgtattacgattcaccgcgtcttcgtcgctttgagtatggtgccgctgccacgcccattgtgggcggctatagtccggctcctccgccggcgattcactttcagcagcagacgccacactttcagctgattaactatcggccgagttatcagcccttgggcttggattaccagcagcagcagttgcccgctcctgccgcaccccctccgcccctgtatccgcagcagagtgtccagtaccagcagcggaccatcgctccacacgccgatttggccaaatatcgatatgaaggtaactatctgccagtgcaacgggtttcgctgcagcaaccacaacgccgcgtcgaggagcaacaccagttgcagcaacagcacttgcagcagcaacacttgcagcagcagcagcacttgcagcagcaacacttgcagcagcaacagcagccgcagcaactctacaatgtgccaccggctctttttaccagcgatgtgttgcatgtgattccacctcgcattgccagattgcaggagcagcagcagcagcaaccctcacagaatgtccaaacggaaagacccaggaggtacgccaaggatctggacacggatgtggccgaaaccagaagtccagctgaccgaagtgccaaggaaaccaagtactttcatgacattttcatgcgctttgatgcacccgattcgcggagtcatggccacgtcctgaagcatccgaaggcccaggaaaagcgatttgaatcccagcgaggcacgaatcgttacaagggcgaggtgatttggacagatcgtcaaggaggtcacggcgaacatcgttgggacatggcgcagggaaaactctga

SEQ ID NO: 30789 - protein, 323 aa, DROSOPHILA
MDLPIGKLNGLLKMQIFLLQLLLFVSPALLQQPHVFYHPRQLYYDSPRLRRFEYGAAATPIVGGYSPAPPPAIHFQQQTPHFQLINYRPSYQPLGLDYQQQQLPAPAAPPPPLYPQQSVQYQQRTIAPHADLAKYRYEGNYLPVQRVSLQQPQRRVEEQHQLQQQHLQQQHLQQQQHLQQQHLQQQQQPQQLYNVPPALFTSDVLHVIPPRIARLQEQQQQQPSQNVQTERPRRYAKDLDTDVAETRSPADRSAKETKYFHDIFMRFDAPDSRSHGHVLKHPKAQEKRFESQRGTNRYKGEVIWTDRQGGHGEHRWDMAQGKL

SEQ ID NO: 30790 - DNA, 2285 bp, DROSOPHILA
attttccgctcggctgtagatggatggctattgccacatattcgtctcacatttttcccattttccaggcagcgatctgctccgttttggtgtgctaatatttaatttaaatattgtattttgccgccgccttgtgctgttgttcttaaccaacctcactgcgtgttgcaatcttcaagcggatttgtttgtttttttccgacaaatatgtggcgatgtgttgttgtttgggctgctctgcggatttgatcgctgtttcaaggttgcattgcatggagctgttgctagaagtgtgtgcctgggtctcaagtatttcttttttctcgttctcgggaatattaagtatacgcattgcgtatacgcaggggcggacacaaatgccgttgaggttttacccttacttttcttcttcgatggtacccacttaagatccgcccctgactgcatagatctcaaacggatgcagcctgttgatttttggtatattttttatggtagtacttaaaggcagtttatttcggaagcgctgatagctatctgaagaggtaagctccatttgaagtgtattttgattcgatttggcaagcactgacaattttgcttggaatcattgcaaaacctaaataaataaactattctggttaatcgaaacatactgaaaaatatttgccgccaaagacaaaaagctttttgaaatcccttttcaaaactatgcgtttctaaaaacttttgggcaagagttgccagcacaaataattatccgatttctatatataaatccaccacagaggaaggcgaaaaatgcgacgaaaacaaaacgacaaggtggaatgcaaagaactgccgtaaatgcgaaaatatctcgaacgctctgcggtaaatattatcttgtaaaatcaggaaatcacgaaaagtgcactgaggtataagccattaataagtgttttataagtgatgaaaaatgaagttgacttctgcagctcgccgaaaaaatagaataatggttctgctactggtgcacctgcggcgccttattttgctgctgacggtcgtttacctgagcggagcggtattccgtcgccttctcaccgaacggcaccacgcccacatcctgcaaggcaatggttacatgggtttcggacgtcttcgtggtggcggtggatccaaggagccgtatcacttccaatggtgggcctacatctacacctgttatgcatacgccgtgctggtcaactacgtcaacatgcgccggctgaccaaccttatcgaatttttcttgaattaatgattaataattagagcaaacgcgattaaacacatatcgaattccctacgcaacacatagacacccttttaaagttacgttataacaaacttattgtattaatagaaacttttttgtaatttattatttacttcttaataattgattgtcttaaataaaagtaaaaccaaaatgtctacatttaccatagagcattcacatacgccctctatatgttgagtgctagatcaggtgtgcagaatgcgccacctatgtgtgagcttgctcctggtttgtgtattggctaagaaaattcctaatttctttttctgttgcttctatttgatgtgaaaacgaaaaatattaaacaaactaaataaaacaaattgttataatattcttgttaattattaaaaaaaatacgaaaatatttaatcttatctatgtatgtgcatctccaatcccaatgaataccgacagcgaaaatttacgatgacaaggcttctaagaatatttgcatttaacacaacaaatatttagcgcaaaccgcacaccaacatttaattttaattagaaacgtcaaatgtaattttttcaccggctacaataattaaatttcgattgcatttagcatcacgaaatgcaaatatttttgatgattaatcgctttgacaaaaacgcaaaaatccgatagacgaatataaaatactcttaaacactaaaaacatatttattttttcggagcttttaatttacatcgaaactgtttaatttttatttttgacctgtaaaatcatatgttaaattaactttttattttgctgacatggtgcatacaatgctaatgaaactgtgctatagaataaatctgtcaacaggccatttcattggtaagatcaacatgcaagggaaagagtaaatgtgtagatacaaaaatatagtcttaagtattggtagtagtaagtttattttggccgcctatttataaatgctgtatctattattaaaccgattacgtgct

SEQ ID NO: 30791 - DNA, 285 bp, DROSOPHILA
atggttctgctactggtgcacctgcggcgccttattttgctgctgacggtcgtttacctgagcggagcggtattccgtcgccttctcaccgaacggcaccacgcccacatcctgcaaggcaatggttacatgggtttcggacgtcttcgtggtggcggtggatccaaggagccgtatcacttccaatggtgggcctacatctacacctgttatgcatacgccgtgctggtcaactacgtcaacatgcgccggctgaccaaccttatcgaatttttcttgaattaa

SEQ ID NO: 30792 - protein, 94 aa, DROSOPHILA
MVLLLVHLRRLILLLTVVYLSGAVFRRLLTERHHAHILQGNGYMGFGRLRGGGGSKEPYHFQWWAYIYTCYAYAVLVNYVNMRRLTNLIEFFLN

SEQ ID NO: 30793 - DNA, 5130 bp, DROSOPHILA
atgcaatttgaagtgtttcgttaaagcttgaattattataattgattttgaggaaaccaaggtgtttttaggaaatttacttgtatgtctaataggacaaagaaaaacgctgttcattccgtgacagaatatgtatattcctttcctctggcccacaataaataataaatctacataactctgcaggtgatgccgacctgttcgtatagcgatgactcaaccacaaccacggtgagcagcaccaccagctccaccacagcggcaccaccttccaccagctcggcatccacttactgtgcggcggttcagtcgcagggaaaatacgcggtcggatataacgcgtatacgacctgtcgccagtatatctactgcactttggttgacggaagttggattggccagacctacacttgtccgggatccatgtacttcgatagtgcctccgagatgtgtgtgtccaccatgccatccacctgttccacaactgcaacaacgagttccacgacgactgcggcacccacgaccagtaatccggaggcatattgccaggcgatgcagtcggcgggctactacccggtgggtacggatgccagcaccacgtgtcatcagtacatcgactgttttctgaacggaggcacttggggtggcaatatgtacacatgtcccggtagcctctactacaacagtgccagcagaacatgtgtctccaccttaccatccacatgctccaccacagtggccagtttaaccctcaatggagtggttttagattaaaaaaggaatctctatgcaaagagtatttgacggtttatttataatgagctgaacattaaagacagtagccgggatttacgtagacgcaactctgagtttgagcaacaaaccaggaatctgtgggacagttatattcggcagatttgataagaacgttcttttgaaagtaacaactaatgtagctgtaaagataagtggttaaattaaatgagtgatgtggaaaattttacgcaaaattctgtacgcaccgctggcaatagggatccgcaggaatgacgggaaaaagaccagtggcattcctttgggcacacatctgggcaggagttagaggcgtcactgtagtgggcgtctcggtggttacagttgaatcggtgctgctttcagttgtgctctcagtgctactttcagtggtaccgccagtagtttcggtggtcacggacgctgcagtggtggtgtccaccagttcgtcatttatgtcacaggtcagcgtttgacccgcgacctcaggcacacaaatcgcagtgctgctggcatcacaaaccgtacccgtggggcagtaaccaaattgcccagtgggtctagtggctccatagcacatctgaaagataccacgactctggcacgcgaatagataattccgattggcactacattggccacattgagaggtatccccgcaactgggaggccgctggctgctcttctgaacacaaatcgccgtgagattggtgcagtcaaatccttctaagcaatggtatagctgatcacgatgtggagttccatctgaaaaatcactataagtcaataaaaacccttttaaaattatattccgcaattaattacctccaaaacacaagtaaaaggacgtggagttgatgcaggccacttgatttgattgacagacattgcaatcggacaccgtttgtgccaccataaaagccagaaccacctgtaaaatatttttgctcttcacttttcctcttggtataccacaaaagcgttattaccatcactagtcctttcactacattttcaatcctttgggtcatttttggacttccgaactgctactgctcactgtcaaggtactgttggtactaaaagtttgcttatgttagctacatgtctagtctactttgtttatctactctttacttttctctgctaattgttttatttgacttggctttccacatgattgctgtttcgtggtgtatcatcctatgatgggaatgtttccagagattctgattgatatgtgtgggtgcggacatggagcataagtcgagaacgtctttaattactagacattaggtaggtggaacggattgcgcgaagaaagtttttagtaagcgatgccaatcctaaggttaatgactgctcatagtatttaattgatatttaaatattaagaacgaaaggtttctgaactttagtattctgttgtcgaatcagttgcaacatttcttgtttgtttcgttaatatgtgatgtcattgagtgcattttcctggtactttataattagggtcgtatattacgacgcaagaccccaataaaaagatgcaattatttgcacattgcgcttatttaaaaaagcgcatgatagccactacaattagtctttataaagtgttcaaagcctgcaaaatgcagtatactcagctcctgagagttttggtaacttggcacagaaatccttaaaaaataatgttcaattaagatgctttctatagtgctccatcgtgatcatatcctatatggcagtccatgttctcggggacataaaatgcaatgtgtgtcaaccaaatcatgtcaagtgcctgaacgagacccactttagtttttgcctcgacgccgtttcgtcggatcaggttatccagtgtcccgacggccaggtttgcaccagcctcctgaagatctgcctgcccaagggatcgactccagcttcctgcactccagatgccgaaatatcgtgtcctccttgcagtggagcaggtctattcgtctgcactagccgcaccaccttccaaatgtgtgatgaaggcaagctcatcggccaagtaacgaagtgcaaggataacactttctgctccatgaagtcgaaaaagttttgcgtagatcagtgtgaaataacgaaatctcaaaatggattcgagtgcgacagagagtcccccttggatgtataaatataaagctccaaaatacaatactaaaaggaagaacgaaatacaagtttttttttacctttttttagagaggaaatatttctattcattaaagtaccgtttttaatttcgtttactaaataaaatggcgtactatatattagagtgacatattaaatcgatttagactaaattagtgcatccggcataagatggcttcacagtaccacagctgaagacatcagcatcgaaataaggtctctgcacgttgcaattatagagcaatcctgcccagcttccactccttagaacacagtagatgtagcttgaaaaaatcaaagaaaatgattattgtcttcagaataaataaaaataggatgtggttattacctagtgcacactgtgtcattgggtatgggatagcgacccgttgagttgatctcttggcaataggtgtcttcattgaatgctggagttgttgcagtactttgggtagtgcttcctgaatcagtgacagtcacggtgctgtccgttgatgtgtccgacgaagttacggaagacgatccagtggaggtatccccagttgatcctgtcgatgaatcagtgatgactgtggatgggtctgcagtagtctcaatgggagtgactgtggatgtgacagtgggagtcactgatgccgtggtgctttccacttcgggttccaaaactcgatcacaaatatctgagtctgatgagtcacaccgggaaatacaaggacttccgctggctgcatttttaacactgcagacaaagtcttctgcacagtcgaaactattggcggaaacaacatcaccgttgcaaacagcaaatgtggtccttgaagtacaggcaaaagttgtggattctgagcaaacaccacaattggagacatcaccacagccgcgttctatactcgtgccgttgggcatgcaaataattccgtaggttgtgcaaatgggttttgattcggggcaagtgtagttgatagtctggtcccggacacctaaaagtacgatctatgatggaagatcattgaaagttcttaaaacataccatcgtagcacaactgaaactccgattcaccgatgcaactgtgcgcatccacacactggccacatgcggcactgacaattgacggtgccacaagagcactcagtagtacgatcaacatgaacgctttcattctgaaattacaattaaatctctaaggagcaactgcacagctttataaaccccgggttggggccatatctctgtgatgatctcggggccataacatttatctttcaatgccgtggaatgccataaaactgctcttcccagtagcgcaatcttcgagtagcacgggagcgctacggggcaaacagtatcatatattctaagatctttagcatacctaatctacggcataaaacgctaaagctatcttctgttttctagagacagttcttataaaagccctatagctgttggatatcacagttagtccgttagtcacattcaaagtcagcataatgcagcaatcccaaatcctaagaaacctagtaagacaatgtgcaatttattttgagaaaaagttttaacaaatttataatttttagtgcctcattgtggttgtaagctcgatggcagttctggtccaaggagtgtgcaacagttgccaagccaacaatgtgaaatgcctgaatgaaacgcactatagcttttgctccgataatgtggcgcccaatcaggtccttcagtgtccggataacaaggtctgcaccgacctggcaatcatctgcatggacagcagtgtagtggatagctcctgctcaggcactgccgatggatcctgccccacctgcgatggaaacagcatgttcgtctgcaccagtcgcaccaccttccagatgtgcgatggcaccaacctaactggccaggtcaccaagtgcaaggacaacaagatctgctcgattaaatcgggcaaatactgcgtggatctctgcgaagtgggtgattccgtcgaatgcgatagggacagtccgctatagaacttttgaattaatttaaaatgctttcactacctcatgtctaaactattaaataaaccacgatttttgtaacttatataaatagtttgtttcaatgataaaagaagtttccctattaaagtgaaactttgtagataa

SEQ ID NO: 30794 - DNA, 1317 bp, DROSOPHILA
atgttgatcgtactactgagtgctcttgtggcaccgtcaattgtcagtgccgcatgtggccagtgtgtggatgcgcacagttgcatcggtgaatcggagtttcagttgtgctacgatggtgtccgggaccagactatcaactacacttgccccgaatcaaaacccatttgcacaacctacggaattatttgcatgcccaacggcacgagtatagaacgcggctgtggtgatgtctccaattgtggtgtttgctcagaatccacaacttttgcctgtacttcaaggaccacatttgctgtttgcaacggtgatgttgtttccgccaatagtttcgactgtgcagaagactttgtctgcagtgttaaaaatgcagccagcggaagtccttgtatttcccggtgtgactcatcagactcagatatttgtgatcgagttttggaacccgaagtggaaagcaccacggcatcagtgactcccactgtcacatccacagtcactcccattgagactactgcagacccatccacagtcatcactgattcatcgacaggatcaactggggatacctccactggatcgtcttccgtaacttcgtcggacacatcaacggacagcaccgtgactgtcactgattcaggaagcactacccaaagtactgcaacaactccagcattcaatgaagacacctattgccaagagatcaactcaacgggtcgctatcccatacccaatgacacagtgtgcactagtgatttttcagatggaactccacatcgtgatcagctataccattgcttagaaggatttgactgcaccaatctcacggcgatttgtgttcagaagagcagccagcggcctcccagttgcggggatacctctcaatgtggccaatgtagtgccaatcggaattatctattcgcgtgccagagtcgtggtatctttcagatgtgctatggagccactagacccactgggcaatttggttactgccccacgggtacggtttgtgatgccagcagcactgcgatttgtgtgcctgaggtcgcgggtcaaacgctgacctgtgacataaatgacgaactggtggacaccaccactgcagcgtccgtgaccaccgaaactactggcggtaccactgaaagtagcactgagagcacaactgaaagcagcaccgattcaactgtaaccaccgagacgcccactacagtgacgcctctaactcctgcccagatgtgtgcccaaaggaatgccactggtctttttcccgtcattcctgcggatccctattgccagcggtgcgtacagaattttgcgtaa

SEQ ID NO: 30795 - protein, 438 aa, DROSOPHILA
MLIVLLSALVAPSIVSAACGQCVDAHSCIGESEFQLCYDGVRDQTINYTCPESKPICTTYGIICMPNGTSIERGCGDVSNCGVCSESTTFACTSRTTFAVCNGDVVSANSFDCAEDFVCSVKNAASGSPCISRCDSSDSDICDRVLEPEVESTTASVTPTVTSTVTPIETTADPSTVITDSSTGSTGDTSTGSSSVTSSDTSTDSTVTVTDSGSTTQSTATTPAFNEDTYCQEINSTGRYPIPNDTVCTSDFSDGTPHRDQLYHCLEGFDCTNLTAICVQKSSQRPPSCGDTSQCGQCSANRNYLFACQSRGIFQMCYGATRPTGQFGYCPTGTVCDASSTAICVPEVAGQTLTCDINDELVDTTTAASVTTETTGGTTESSTESTTESSTDSTVTTETPTTVTPLTPAQMCAQRNATGLFPVIPADPYCQRCVQNFA

SEQ ID NO: 30796 - DNA, 2549 bp, DROSOPHILA
tatcagttaatggtgctcattgtctacgtaataaaactctagcctttgcattgaaacttatttaccttaacgtgcaaatttcagtggttctgtcaaagattgtggatcctttacaggagtacacatttccataaaaattgacaccggaaaaatagcagtagacgtatctgaaatagctataatatgaaacaaaatgtgtattaatattagttctacttactgcttgatggatatagaagaatcctgaacatggagaaatcgtccaaaccgtcttaaggttcgacaatattccgtttcacttgccctgatggctaattgattatcggaagtgcactcactgcaacaattgcatgcagcaagagatgcatttttgctgcagacaatggattcgccggtgcacaagtgatttttagggcaggagtacacttttccgcttggcacggatgcagatgagcagaactgaaactctgtttgtgagagacaggacactttagacttcgtggaacacgaattgcagagagcctgacagccgaggactcctattcccagaaagatcactaaccgcagcatttttgaattacacggagttgacagcgtttgagcaaacggaattgttgagttgcaatctaatcttgtgtaagggcagtatctatatttatgtttgttttgtaaacgctttagttgtgtgttgcgactataaaaaattatttatttatttttaaaagcaattgttatcaacgctcccaaaatctttagactatatgattgtttttttttatgaatttttatgtgatggtaagtgtcaagctggtaattccattagtgcacctggctggcacttcggtgccacaataccccgatgagctattgaagtaagtttgtccaggacaatagtagaggcctcctgcccagttagttgcattgagataacaatatatgtaccttattatgaaataagcggtttaattttttatatacgagataattgaactcctaatatttactgtctgcaggttgtgttgagatcaatgccgtagggaaatcttccgtgctgctggacgatggaacaataggtggtgggtgtcgttgacgtaacatccagtccagtaccactaccgtcacccggacaagtggcctgtgatcctgccgctggactaccacaaatatacggattattaaaatcacatacatagctcgagccacaacttccgacgatctgggaaggagtcgatgttcccaggcacagggcaaatgtccttgcagtgaggcaggcaaatgtattgccactatcgcaggtgccacaacctatacaggatctttgggccacgtctgtattgcacgttacgtcatttgcggtgcaataataacccgtgggacacgtgtaaacgggaccagcaggtaatgcgctgctggagcagaattgaaatgaggtgttcgatatacaggccacattgctaacggaggcacacacattgcaatccccacggataccgagaatacggatcaccaggaaaactccgattgccagcaagatcaagcagcgcagcatctttacaataaactagcgatattggtgtcaaccagttggctttatgcgctcgcagtaatcttatcactcggagaaactagaacttccaacaaagagttattaccagattgttgacgaactaataaagtcaatgtgtccaatgatataaagcggttcttatactctattcaaattatgcagtatgtaaatatatttatattacaagatttcttttataacaatgaactaggcacatgttgccggtttagtcgctacacaagtagaagtgctggcactgaagtatggtttacttgaaggacactgccaggaatttccggaccaggtggaactcttgcgaaaacagtaaatatatctaaaaacaagattgattaaaaatgaagatgcactcatattaatatacaatataaacaactcactttaggcagcttaaatcattgggataaggaaagcgacccgtggagctcttttggatacacaaatcatcgattaaagcatactgggaacacgaggcacttgtgccgtttggtgaggccacacaaggattgccaatttggtatagacacacctctcctgtcgaacagggatattcattgcttgcaatttcattcacagcattgcaaagtgcaaaagttgttggactagtacaggcgaatggtataattccgtcacactttctgcaatcattgcaggatgcaaaagcctcgttggaagtgcatttctctggcaatcccgtacaaaatgtattatttggacatgtatacacggtacctgtaggaatagcgtttgccgagcagttttggtactgattcttggacacgcaggctacattgctctcagaggaacagatattgcactcggcctggctaaatttcactagagtggccaacaaaaatactgaaaagagcaggtgccgttgcattttcaagagtaactgcatgtatattcaaactttacaaactatataggcaactttcttatccagaaagctatttaagataag

SEQ ID NO: 30797 - DNA, 549 bp, DROSOPHILA
atgctgcgctgcttgatcttgctggcaatcggagttttcctggtgatccgtattctcggtatccgtggggattgcaatgtgtgtgcctccgttagcaatgtggcctgtatatcgaacacctcatttcaattctgctccagcagcgcattacctgctggtcccgtttacacgtgtcccacgggttattattgcaccgcaaatgacgtaacgtgcaatacagacgtggcccaaagatcctgtataggttgtggcacctgcgatagtggcaatacatttgcctgcctcactgcaaggacatttgccctgtgcctgggaacatcgactccttcccagatcgtcggaagttgtggctcgagctatgtatgtgattttaataatccgtatatttgtggtagtccagcggcaggatcacaggccacttgtccgggtgacggtagtggtactggactggatgttacgtcaacgacacccaccacctattgttccatcgtccagcagcacggaagatttccctacggcattgatctcaacacaacctgcagacagtaa

SEQ ID NO: 30798 - protein, 182 aa, DROSOPHILA
MLRCLILLAIGVFLVIRILGIRGDCNVCASVSNVACISNTSFQFCSSSALPAGPVYTCPTGYYCTANDVTCNTDVAQRSCIGCGTCDSGNTFACLTARTFALCLGTSTPSQIVGSCGSSYVCDFNNPYICGSPAAGSQATCPGDGSGTGLDVTSTTPTTYCSIVQQHGRFPYGIDLNTTCRQ

SEQ ID NO: 30799 - DNA, 2528 bp, DROSOPHILA
gaattgaattttcggtggcatgccaccaggccacaaacttttgcgacccttgtggccatgtagctgacccacatcaactcataggaggagttggggaaagagaaccgaatggaaaaaatcagcgagtgtctggcaaagatttttttatggcatgtgctcggaaaaaaagggaaaagctcggaaaacttgtgaacgttaaagctactgggcacacttcataattgtatgcgagttctctccaaactcctgcctgcgaggccagcaaaagttccaaggtggaagtgccaacgtggcgtatacgtcataaaagggcatagaccacaatttggcctgcctgtgcgagtggcagtggattgaatgtgaagcatctgttgggagaaatactcgcgcaaattgaatggcggaaaaaatcgatttaagttgcactttgttcattaagccacgttctgttgatgaacggcaaatgtaatgggaatttgggaggaattggtcggcgtttctgaatttcgatatcattaaatcaccagttttggcttgctgaacaatactttccttcttacagtgcatatatacatacaagacaaaaagatacatttctagcacacatgaaagtgcttttaaagtttaaacacaacaagctaattaattatggtctcttggcagcacaacatttgcttttctaatgaattacctttatttgattaagatacccttgccctgtgataattaccacaataaagatacctcaggcccttagaatcttaactctacggcaataatcggttattgagagtcaaacaagacactgtatccgagcatctggcctgcgtttgggtggtgcaaagtttggaggtactatcgaagtaggtgagtcctggacaagtgtacacatttccatagaaaataccagcagcggtgtaacagttcacatatctggaatggcaatcgattagtataggaaaataaactagcaaatttggactttcattaagtgtattactcactgcctgcaggtggttgaggtatctccgccataaggatattttccggctgtttgaatggtttgacaatactcggtggcatttttgatggccgtagtatcgcagtctgacgtacttgatgtggaacaggatactgcgtatgtggcaggactgccacagatattggcgttccccacgttgcatacataattagtgccacagcttccgccaatcgatgtactgggtgtagaagtacctaggcacagcgcaaaggtattccgaccggtgcaagcaaaacgattatccgaactgcacgtattgcatcctgtacaacctgccgaagatgccacggagctgcaaatgggcgtgctctctgtgcagtagtaaccggtggggcaggtgtagaggtttccgatgggttcgctggcggaggagcagaactgaaactccgtttccgatatacaggacacgccattagcgttgcaggtattgcaggctgctcggcagcccaggatataaaatcccaaaacgatcagtaggcgcagcatctttgaatgaaactgtgaaagtggaagccctgcaacccaatttatctagtgggacttatcttatcccagtgcagttggctaatcttcgtttatagatctgttttaattgtggtgcatgcattttattcacgtgacttaaaaacaaattatataaataaaatgcaagttaacatatcacaactgcaattattaataattaatcgcataaggcctcgaaatgtttcaagaaatatttttatatgttttacaatgccagttttaactatgtttttaatttctcaaagaaggtcacgtttttccaagtttagttgattagactatcagttaatggtgctcattgtctacgtaataaaactctagcctttgcattgaaacttatttaccttaacgtgcaaatttcagtggttctgtcaaagattgtggatcctttacaggagtacacatttccataaaaattgacaccggaaaaatagcagtagacgtatctgaaatagctataatatgaaacaaaatgtgtattaatattagttctacttactgcttgatggatatagaagaatcctgaacatggagaaatcgtccaaaccgtcttaaggttcgacaatattccgtttcacttgccctgatggctaattgattatcggaagtgcactcactgcaacaattgcatgcagcaagagatgcatttttgctgcagacaatggattcgccggtgcacaagtgatttttagggcaggagtacacttttccgcttggcacggatgcagatgagcagaactgaaactctgtttgtgagagacaggacactttagacttcgtggaacacgaattgcagagagcctgacagccgaggactcctattcccagaaagatcactaaccgcagcatttttgaattacacggagttgacagcgtttgagcaaacggaattgttgagttgcaatctaatcttgtgtaagggcagtatctatatttatgtttgttttgtaaacgctttagt

SEQ ID NO: 30800 - DNA, 528 bp, DROSOPHILA
atgctgcgcctactgatcgttttgggattttatatcctgggctgccgagcagcctgcaatacctgcaacgctaatggcgtgtcctgtatatcggaaacggagtttcagttctgctcctccgccagcgaacccatcggaaacctctacacctgccccaccggttactactgcacagagagcacgcccatttgcagctccgtggcatcttcggcaggttgtacaggatgcaatacgtgcagttcggataatcgttttgcttgcaccggtcggaatacctttgcgctgtgcctaggtacttctacacccagtacatcgattggcggaagctgtggcactaattatgtatgcaacgtggggaacgccaatatctgtggcagtcctgccacatacgcagtatcctgttccacatcaagtacgtcagactgcgatactacggccatcaaaaatgccaccgagtattgtcaaaccattcaaacagccggaaaatatccttatggcggagatacctcaaccacctgcaggcagtga

SEQ ID NO: 30801 - protein, 175 aa, DROSOPHILA
MLRLLIVLGFYILGCRAACNTCNANGVSCISETEFQFCSSASEPIGNLYTCPTGYYCTESTPICSSVASSAGCTGCNTCSSDNRFACTGRNTFALCLGTSTPSTSIGGSCGTNYVCNVGNANICGSPATYAVSCSTSSTSDCDTTAIKNATEYCQTIQTAGKYPYGGDTSTTCRQ

SEQ ID NO: 30802 - DNA, 3629 bp, DROSOPHILA
acattgatcattaagattttatttgaatctcatctagggcataaatgttttacaattcctagatttaccaaatggtgaacgtacgaatcatgcacaaagcaatccacatttaatttcgctcttccattaattttctatctgtcctttttgttatataactaacataatttattgttagtagacaagtcagcagacgaaaaagaatttcttaagaattccagcaataaaacactttttatcactgttaagctaaaagcttatcattgttttggtcatctcatgttgtcagggccaaaagcatcgcaaattctattgcgaaggtcagttctttcgccataaagaagtgaaaacaaatttggaggtatctctatttactttaagtatgttttaattaaattaagcaatttaattgacattgacccaattgagcgagagtgctgcgtaatcaaattagacatatgaagcaatgacgtcaaaatggtgcaaagctgttacgtaccaaaaacatttttttgtgatgactgtgatgccgtaaacaaattgttcggcactttcatgctccgatatttggcctacgggtggtgttgctccacatttaatgggcgcccaaaggtgtggaaaacaaattcgcaacaggaaacaaacagtgaaaagcgagagcacagagatgggaccacctcccatcgaagccattcaaaccaaccaagagcagccaaaacatccgaaaaggccccctggcacttcgttgattgtggcgcatctaattgttgtgacggttgcgttttgttattgtaattaatatttagctaaactcagctgcgtttgggcttactaaaactaaaaagcgaaaagcgttgaacaaattgcggtcattaaactttttgccgcgccgagtgaaataaattgtcgcccccgcggttgctgcctttcataacaaagtcacaaatcaacgcgagcggatctgcccaacaactaccgatctcccagtggattatttaccatgttgcatctgcaactgactctgctctcctgcctcttggtcctggccaactgtaaaatccagaaacagattccgacaaacagttggcgggatatgcttttcggcagcaagtggctaactcctgcaccacgttggcgcgaatccaaatgtgggtcttaaagctggctaagaccagcagttagtgttaacaaaagaaaaaaattgaattgaattctgtgtaacatccaccagttttgcccattttcgccctggtgcccatcggtcctggcagctgttcagcgccctccggcgaacagggaaattgcattcccagcaaggattgtgtactgcggaacggcatcccggccggtccttgtggcggtggctatggcgtctgctgcatctgtgagtttcccacccatgtgaaagcaatcgcctattcttaataccttcgttcagttctacagacgtgcggcggtattatacgagagaactccacttactttgtgaatcccaatcacccggatgtctacgatggcactggtagttgtcaggtaaccgttcaaaaactgcatccggacatctgtcagctgcgcttggatttggatatgttctcgatagctcctccagaggcagccaatcatctgtgcaatcaggatcagttgctcatatcgggcggtagtcccacgcccaccatttgtggcagttcaacgggagatcacagtgagtgtttggcatgcttttacaaaaacataaattctagaaaattttaaaggatttctaagagactaaccaccgattaagtatgctgaattagatgataagccatcaaaacgagtgtgtaaatatttaatctaaagcgcacacttttagattagccctgtaaacaaaaccgtcttctcaatgccaaccttttgttttcgcagtgtacattgacgcgggtcttggccagagcaatccgattgttttgtcggtgatcaccagcggaagttttccgcgtctgtggcgaatccgcgtcacccaaatccactgtggtagcatcagtcgagcggaccaaggctgtctgcagtactatacggcaattagtggtcgtgtgcgcagctttaattacaacacggtgggtggaagacaactgtccaatcaggactacagcatctgcatacggaacgagcgcaacttttgcggcattcagtacaacgcatgtccggatctggagaacaacagatccagatcgttcacactcactgggaactccaacaatccggtggccacgatggtgggtggtggtggtggcatgccaccaaacttgaacggttgcacaagcgattggctactgattggttgcattcgatcggcggacaggattcctcctctgcctggttgcgaggatcgcgtctgtggaggcacctttagtgcggaggccggaatgctcgccaaaacagtgcaatgtacgtacaagcttaggtcatcaaatcgaatcctatcattaaaagattattaataatatattttcttcaatatatccccacagcaagtgttcgtcctttccggctttatttccacacggacggagtagaagcgccgaatgatatagacaaccgaggattttgccttgattatgttcagcaaccatgcacaaatggcttttagacaccagcccacaagtatgcaatactctaaacacaaaatccacatgacgaattccacgcgactaaaatcgcaaggaaattatgattggcgctgcaaaagtcgcaggaaaaacgcacacatctttcgtatgtaataaatatgttttatttattgattttcgtaattaagttagacgtaacattaaaatttaagttaatttagaaaatcgtgtcgggttttggtacaaatttagtgttgtcgtaaaggatatcgaaatttcatgtgatccaaattctaacattaaaatcgttttcaactactaatacaggtttattgaattacgtttaattaataatacttagcagaagcaaaacaaaaattatataacagaaaaacacgatgataaacgcttttgtttaaggacattttcgttgcagcgttgttgccgttgttggtactcattttttttgccgtgacaaaaaagaaaataataaaaaccagtactaactatgcgcacgttgtcgtataaaagggtaatttctgggttcgcttgctcgcctgagatcgccaatttcagtctgtgcgcgtagtgcccgacttgtgacgtcactgggggatggtattatctcggatgtgatgcgggtatctacgatatatgtctgtcctaatcctaataggtttgtatcaaggcagccacgtgctgtttctcctcctcggtcagaccgtttttcagcgtgcgacgtactgcaaaatatattaaatattataacagagtcttcaaaagtatagtatatatgtatttagttaggcataggcagtcatgcaatgttaggtctaaagggcatgcaggttagttgcctcaagttttgaatatcctttgaattgcatgcaaattgaatatatatagagtaagtttttccatgcataaaacccggatcttcaacaaatgccaagggttccaaaataaagccaaaggtaaaagtttttaacgaaaattacataaggaaaaatgtgtaaaact

SEQ ID NO: 30803 - DNA, 1206 bp, DROSOPHILA
atgttgcatctgcaactgactctgctctcctgcctcttggtcctggccaactgtaaaatccagaaacagattccgacaaacagttggcgggatatgcttttcggcagcaagtggctaactcctgcaccacgttggcgcgaatccaaatttttgcccattttcgccctggtgcccatcggtcctggcagctgttcagcgccctccggcgaacagggaaattgcattcccagcaaggattgtgtactgcggaacggcatcccggccggtccttgtggcggtggctatggcgtctgctgcatctttctacagacgtgcggcggtattatacgagagaactccacttactttgtgaatcccaatcacccggatgtctacgatggcactggtagttgtcaggtaaccgttcaaaaactgcatccggacatctgtcagctgcgcttggatttggatatgttctcgatagctcctccagaggcagccaatcatctgtgcaatcaggatcagttgctcatatcgggcggtagtcccacgcccaccatttgtggcagttcaacgggagatcacatgtacattgacgcgggtcttggccagagcaatccgattgttttgtcggtgatcaccagcggaagttttccgcgtctgtggcgaatccgcgtcacccaaatccactgtggtagcatcagtcgagcggaccaaggctgtctgcagtactatacggcaattagtggtcgtgtgcgcagctttaattacaacacggtgggtggaagacaactgtccaatcaggactacagcatctgcatacggaacgagcgcaacttttgcggcattcagtacaacgcatgtccggatctggagaacaacagatccagatcgttcacactcactgggaactccaacaatccggtggccacgatggtgggtggtggtggtggcatgccaccaaacttgaacggttgcacaagcgattggctactgattggttgcattcgatcggcggacaggattcctcctctgcctggttgcgaggatcgcgtctgtggaggcacctttagtgcggaggccggaatgctcgccaaaacagtgcaatcaagtgttcgtcctttccggctttatttccacacggacggagtagaagcgccgaatgatatagacaaccgaggattttgccttgattatgttcagcaaccatgcacaaatggcttttag

SEQ ID NO: 30804 - protein, 401 aa, DROSOPHILA
MLHLQLTLLSCLLVLANCKIQKQIPTNSWRDMLFGSKWLTPAPRWRESKFLPIFALVPIGPGSCSAPSGEQGNCIPSKDCVLRNGIPAGPCGGGYGVCCIFLQTCGGIIRENSTYFVNPNHPDVYDGTGSCQVTVQKLHPDICQLRLDLDMFSIAPPEAANHLCNQDQLLISGGSPTPTICGSSTGDHMYIDAGLGQSNPIVLSVITSGSFPRLWRIRVTQIHCGSISRADQGCLQYYTAISGRVRSFNYNTVGGRQLSNQDYSICIRNERNFCGIQYNACPDLENNRSRSFTLTGNSNNPVATMVGGGGGMPPNLNGCTSDWLLIGCIRSADRIPPLPGCEDRVCGGTFSAEAGMLAKTVQSSVRPFRLYFHTDGVEAPNDIDNRGFCLDYVQQPCTNGF

SEQ ID NO: 30805 - DNA, 2408 bp, DROSOPHILA
tgactgtggatgtgacagtgggagtcactgatgccgtggtgctttccacttcgggttccaaaactcgatcacaaatatctgagtctgatgagtcacaccgggaaatacaaggacttccgctggctgcatttttaacactgcagacaaagtcttctgcacagtcgaaactattggcggaaacaacatcaccgttgcaaacagcaaatgtggtccttgaagtacaggcaaaagttgtggattctgagcaaacaccacaattggagacatcaccacagccgcgttctatactcgtgccgttgggcatgcaaataattccgtaggttgtgcaaatgggttttgattcggggcaagtgtagttgatagtctggtcccggacacctaaaagtacgatctatgatggaagatcattgaaagttcttaaaacataccatcgtagcacaactgaaactccgattcaccgatgcaactgtgcgcatccacacactggccacatgcggcactgacaattgacggtgccacaagagcactcagtagtacgatcaacatgaacgctttcattctgaaattacaattaaatctctaaggagcaactgcacagctttataaaccccgggttggggccatatctctgtgatgatctcggggccataacatttatctttcaatgccgtggaatgccataaaactgctcttcccagtagcgcaatcttcgagtagcacgggagcgctacggggcaaacagtatcatatattctaagatctttagcatacctaatctacggcataaaacgctaaagctatcttctgttttctagagacagttcttataaaagccctatagctgttggatatcacagttagtccgttagtcacattcaaagtcagcataatgcagcaatcccaaatcctaagaaacctagtaagacaatgtgcaatttattttgagaaaaagttttaacaaatttataatttttagtgcctcattgtggttgtaagctcgatggcagttctggtccaaggagtgtgcaacagttgccaagccaacaatgtgaaatgcctgaatgaaacgcactatagcttttgctccgataatgtggcgcccaatcaggtccttcagtgtccggataacaaggtctgcaccgacctggcaatcatctgcatggacagcagtgtagtggatagctcctgctcaggcactgccgatggatcctgccccacctgcgatggaaacagcatgttcgtctgcaccagtcgcaccaccttccagatgtgcgatggcaccaacctaactggccaggtcaccaagtgcaaggacaacaagatctgctcgattaaatcgggcaaatactgcgtggatctctgcgaagtgggtgattccgtcgaatgcgatagggacagtccgctatagaacttttgaattaatttaaaatgctttcactacctcatgtctaaactattaaataaaccacgatttttgtaacttatataaatagtttgtttcaatgataaaagaagtttccctattaaagtgaaactttgtagataacattgatcattaagattttatttgaatctcatctagggcataaatgttttacaattcctagatttaccaaatggtgaacgtacgaatcatgcacaaagcaatccacatttaatttcgctcttccattaattttctatctgtcctttttgttatataactaacataatttattgttagtagacaagtcagcagacgaaaaagaatttcttaagaattccagcaataaaacactttttatcactgttaagctaaaagcttatcattgttttggtcatctcatgttgtcagggccaaaagcatcgcaaattctattgcgaaggtcagttctttcgccataaagaagtgaaaacaaatttggaggtatctctatttactttaagtatgttttaattaaattaagcaatttaattgacattgacccaattgagcgagagtgctgcgtaatcaaattagacatatgaagcaatgacgtcaaaatggtgcaaagctgttacgtaccaaaaacatttttttgtgatgactgtgatgccgtaaacaaattgttcggcactttcatgctccgatatttggcctacgggtggtgttgctccacatttaatgggcgcccaaaggtgtggaaaacaaattcgcaacaggaaacaaacagtgaaaagcgagagcacagagatgggaccacctcccatcgaagccattcaaaccaaccaagagcagccaaaacatccgaaaaggccccctggcacttcgttgattgtggcgcatctaattgttgtgacggttgcgttttgttattgtaattaatatttagctaaactcagctgcgtttgggcttactaaaactaaaaagcgaaaagcgttgaacaaa

SEQ ID NO: 30806 - DNA, 408 bp, DROSOPHILA
atggcagttctggtccaaggagtgtgcaacagttgccaagccaacaatgtgaaatgcctgaatgaaacgcactatagcttttgctccgataatgtggcgcccaatcaggtccttcagtgtccggataacaaggtctgcaccgacctggcaatcatctgcatggacagcagtgtagtggatagctcctgctcaggcactgccgatggatcctgccccacctgcgatggaaacagcatgttcgtctgcaccagtcgcaccaccttccagatgtgcgatggcaccaacctaactggccaggtcaccaagtgcaaggacaacaagatctgctcgattaaatcgggcaaatactgcgtggatctctgcgaagtgggtgattccgtcgaatgcgatagggacagtccgctatag

SEQ ID NO: 30807 - protein, 135 aa, DROSOPHILA
MAVLVQGVCNSCQANNVKCLNETHYSFCSDNVAPNQVLQCPDNKVCTDLAIICMDSSVVDSSCSGTADGSCPTCDGNSMFVCTSRTTFQMCDGTNLTGQVTKCKDNKICSIKSGKYCVDLCEVGDSVECDRDSPL

SEQ ID NO: 30808 - DNA, 3371 bp, DROSOPHILA
aatatatctaaaaacaagattgattaaaaatgaagatgcactcatattaatatacaatataaacaactcactttaggcagcttaaatcattgggataaggaaagcgacccgtggagctcttttggatacacaaatcatcgattaaagcatactgggaacacgaggcacttgtgccgtttggtgaggccacacaaggattgccaatttggtatagacacacctctcctgtcgaacagggatattcattgcttgcaatttcattcacagcattgcaaagtgcaaaagttgttggactagtacaggcgaatggtataattccgtcacactttctgcaatcattgcaggatgcaaaagcctcgttggaagtgcatttctctggcaatcccgtacaaaatgtattatttggacatgtatacacggtacctgtaggaatagcgtttgccgagcagttttggtactgattcttggacacgcaggctacattgctctcagaggaacagatattgcactcggcctggctaaatttcactagagtggccaacaaaaatactgaaaagagcaggtgccgttgcattttcaagagtaactgcatgtatattcaaactttacaaactatataggcaactttcttatccagaaagctatttaagataaggctatttgagtagtaaaaaagctagtgatatctatttatccttgtcgcctaacaggtttcatacatattcagttttatatatcgctattatattactatgtaaacatacaacaaaaataacccaataaaaattcgccaacaccaaaaagtatgctacccttttcagtccgtcaaagcagcaagagcttatctaaattggagcagtagccaaggtcccgcctgccgaggtctttgtggattaagagcaatctgcatgctccaaaatagctgccaaaaaagcgctctatttaagccacatgcctgccaggcacagacatcagtcggaaaaaacaattgcaacccgaaatgtcgcctaaccgtgtttgcttgccacttggcctgccgctgttgcttttcctgctcggttgccttgtgtcctcgactcatggcacctgcaacgtctgcaacaccgtcaacaatctgacctgctactcctcgacccagatgcagtcctgccaggtggacgtcctgtccacggccacgcccaccgattgccccagcggctatgtctgcgtcagcggctccagcggtgtgctctgccagccggaggactcggcatctgacagtcaggcggactgccaggagtgcaacaagtgcgatgagacccagacgttcgcctgcaccggaacccagagcttcgccctctgcctgggcacagataccgtccaggattcggtgggcacctgtgcctccggttatgtgtgcaacatcaacgacacccagatatgcggtctgccagcggatggggtaagttcgcctttcttcttcttggtggaaatgggatgtttgagaaagaacaggtgctccaggatgctgagacgactctgaaaggaaattaaactttcaagaagcactattcattagaatgtgataccaagtgactggagaaaataagctctttgtatgcaatttgaagtgtttcgttaaagcttgaattattataattgattttgaggaaaccaaggtgtttttaggaaatttacttgtatgtctaataggacaaagaaaaacgctgttcattccgtgacagaatatgtatattcctttcctctggcccacaataaataataaatctacataactctgcaggtgatgccgacctgttcgtatagcgatgactcaaccacaaccacggtgagcagcaccaccagctccaccacagcggcaccaccttccaccagctcggcatccacttactgtgcggcggttcagtcgcagggaaaatacgcggtcggatataacgcgtatacgacctgtcgccagtatatctactgcactttggttgacggaagttggattggccagacctacacttgtccgggatccatgtacttcgatagtgcctccgagatgtgtgtgtccaccatgccatccacctgttccacaactgcaacaacgagttccacgacgactgcggcacccacgaccagtaatccggaggcatattgccaggcgatgcagtcggcgggctactacccggtgggtacggatgccagcaccacgtgtcatcagtacatcgactgttttctgaacggaggcacttggggtggcaatatgtacacatgtcccggtagcctctactacaacagtgccagcagaacatgtgtctccaccttaccatccacatgctccaccacagtggccagtttaaccctcaatggagtggttttagattaaaaaaggaatctctatgcaaagagtatttgacggtttatttataatgagctgaacattaaagacagtagccgggatttacgtagacgcaactctgagtttgagcaacaaaccaggaatctgtgggacagttatattcggcagatttgataagaacgttcttttgaaagtaacaactaatgtagctgtaaagataagtggttaaattaaatgagtgatgtggaaaattttacgcaaaattctgtacgcaccgctggcaatagggatccgcaggaatgacgggaaaaagaccagtggcattcctttgggcacacatctgggcaggagttagaggcgtcactgtagtgggcgtctcggtggttacagttgaatcggtgctgctttcagttgtgctctcagtgctactttcagtggtaccgccagtagtttcggtggtcacggacgctgcagtggtggtgtccaccagttcgtcatttatgtcacaggtcagcgtttgacccgcgacctcaggcacacaaatcgcagtgctgctggcatcacaaaccgtacccgtggggcagtaaccaaattgcccagtgggtctagtggctccatagcacatctgaaagataccacgactctggcacgcgaatagataattccgattggcactacattggccacattgagaggtatccccgcaactgggaggccgctggctgctcttctgaacacaaatcgccgtgagattggtgcagtcaaatccttctaagcaatggtatagctgatcacgatgtggagttccatctgaaaaatcactataagtcaataaaaacccttttaaaattatattccgcaattaattacctccaaaacacaagtaaaaggacgtggagttgatgcaggccacttgatttgattgacagacattgcaatcggacaccgtttgtgccaccataaaagccagaaccacctgtaaaatatttttgctcttcacttttcctcttggtataccacaaaagcg

SEQ ID NO: 30809 - DNA, 1029 bp, DROSOPHILA
atgtcgcctaaccgtgtttgcttgccacttggcctgccgctgttgcttttcctgctcggttgccttgtgtcctcgactcatggcacctgcaacgtctgcaacaccgtcaacaatctgacctgctactcctcgacccagatgcagtcctgccaggtggacgtcctgtccacggccacgcccaccgattgccccagcggctatgtctgcgtcagcggctccagcggtgtgctctgccagccggaggactcggcatctgacagtcaggcggactgccaggagtgcaacaagtgcgatgagacccagacgttcgcctgcaccggaacccagagcttcgccctctgcctgggcacagataccgtccaggattcggtgggcacctgtgcctccggttatgtgtgcaacatcaacgacacccagatatgcggtctgccagcggatggggtgatgccgacctgttcgtatagcgatgactcaaccacaaccacggtgagcagcaccaccagctccaccacagcggcaccaccttccaccagctcggcatccacttactgtgcggcggttcagtcgcagggaaaatacgcggtcggatataacgcgtatacgacctgtcgccagtatatctactgcactttggttgacggaagttggattggccagacctacacttgtccgggatccatgtacttcgatagtgcctccgagatgtgtgtgtccaccatgccatccacctgttccacaactgcaacaacgagttccacgacgactgcggcacccacgaccagtaatccggaggcatattgccaggcgatgcagtcggcgggctactacccggtgggtacggatgccagcaccacgtgtcatcagtacatcgactgttttctgaacggaggcacttggggtggcaatatgtacacatgtcccggtagcctctactacaacagtgccagcagaacatgtgtctccaccttaccatccacatgctccaccacagtggccagtttaaccctcaatggagtggttttagattaa

SEQ ID NO: 30810 - protein, 342 aa, DROSOPHILA
MSPNRVCLPLGLPLLLFLLGCLVSSTHGTCNVCNTVNNLTCYSSTQMQSCQVDVLSTATPTDCPSGYVCVSGSSGVLCQPEDSASDSQADCQECNKCDETQTFACTGTQSFALCLGTDTVQDSVGTCASGYVCNINDTQICGLPADGVMPTCSYSDDSTTTTVSSTTSSTTAAPPSTSSASTYCAAVQSQGKYAVGYNAYTTCRQYIYCTLVDGSWIGQTYTCPGSMYFDSASEMCVSTMPSTCSTTATTSSTTTAAPTTSNPEAYCQAMQSAGYYPVGTDASTTCHQYIDCFLNGGTWGGNMYTCPGSLYYNSASRTCVSTLPSTCSTTVASLTLNGVVLD

SEQ ID NO: 30811 - DNA, 4199 bp, DROSOPHILA
tgagattagcaagcgccatcatccgcaactcagtttgtttgcccagaatacggactcggaaggagtgcttcgtcgtcatttgccgcagatcaaggtgttatctcgctgcgaagacgtggaactggaattgtttgacgagagctcaaagatttcgaagcaactcagctacttctcaacggcaggagcactctgctcctttggcttgaaattgagcgatggattggatctgacgccggaaaaacgagacgaaatgcagaaggccaatgccaaaaaactgaagaagttggtcaccgaattgcagcggtatcgcatgcgcctggataacgaagccttccaactgatggccgacaagaaagttaagtcacatttcgaaaataaggtaatgtgctataaagttttgattccatgcgacattatttttattggttttttattgtaggtcaaagagttggaggcggaaatcaacagtctcactcggctggcagtattgtcctaatgcactgcataacaattagcttagataatgccattgttattgacttacatccgcctaagtcatctgtttgtttagaattaaagactgcaatatttattaaatgcgcaacgtaccttataaaggcactaagcataaaaatactcaactacttgtcactgatctaattcaaatatcaatttctgttcggaaaatttagacatttccgttttaaaccgctaactcttttgtcaccaaaaccgcaaaatactacagatattttttttgaatttgttttaaattcctattagatcatttttgctaattgctaagttcacgaaatcaaacgaatattggtttaaatcggaaatggttattgtttttacactttcgtatgttaattaatgtttaaatttaccagatgcttcgtccaaattcctcgaaaggatccccaatttctcttctccagatatgtatcacggttttttgttatgctatgattatcaagtcttttattgtataccatatttacagaattggacacgcgttctgcgaatacgacaagtagaagccgcgattcgatatgtccatatcctcattaccatcggtgactgtgtagacaacgaatggcttcgccgatgtggtcgtggataccagacccaatccacaaaaccgatcgctgggcatcgcaactccgccctgcgttggcgacggaatgatgatatagtccgttgtacattcctgactctgaacagatgaggtggccagcagagtcggatccacggcacccacatcgttggtcagcgtaaaggaatacgtatcggagccaacctggctgtaggtaatggagcacattcccgctgctttgcgtatgcaaataccgtacttggtgttcgccaactgtctcgtgccctgcacaccaatggaattgagggcggaggccgccgccgaattgtaattaaaactggccagggtgccgctgctgggcatatagtattgcaggcaaccggccggagccaaagtggccgacgtgcatcccagcattcttatctggaactgccagttgcggttgaatgtataacttccggaggtggccactgagatggttatcggactgacgccgttaaagtccacatacacatgctgaccggcgttctcgccacaaatgctgggcacttgcgaggctccgccagtgatggtcaaggcatccgtagagcaggatccatctcccgatggtggtgccagcgatagggaaaggaagtccactcgtagctggcagattgacgaatccggtggcgtgaccacaatggaacaccgtccgccgccgccatatggagcgggataattgctgttgtaaaagtacgtattattgtaggaagtacttgctccacatgtcctttgatctgcaagcataatttgttatttaatacctgatgaaagaacttgaacgtttccgaaagtacttacaaatgcagcaaatggcttgcgctgtgatggaggagcagctgcccgctgcaacgccgctgttatcggtgcactctccgtttataacgcaggtgcccaggagcaggttgttgcccacacagatgtcgttggaaaagcgaccaattgtatagaaaggaaaccctagaaatgaaagaaatggtcattgaaatgttagtgaaaatgatatggataatccaagggattatcggattattaccggagggacacgatttggtaactttatgattctataaaattgctgtcaaccctttatctatgactgtaaaacccaaactgataactatacagtagttagatactaacaaaaacttaattttttgttacagaaaatgtaagagatctttgagataattggataagcttgaactttaaataataatttataacaaataaatttcttctaagagataagtggccaaatatagaaaagttactatttttgaacatctagaaatcaaacctcaaaacacaacaaatatgacttagcgatgctccactttatatttcagaaatgcaatgcgcaaatggaaacgttttccgcggaagcaatgatgattgtagggcatggggacagctaagactaaagaatccacctgcggtacatgcacagtgggtgataattgaggcctgacccacatacttccaccacgacggaaaaacaaactgccggcattcaaccggcccgatctcgtcaagagtaacctgctgaggaggagctcaaacttacagcgaggatggcgcgatccactgtggaccaaactggagtttccatcctccgcgaggagggtatcattcgccaggatcagggattcattagccttcgacagtggagctaatgccaaactgctggcacgtgccgcactgtatatgcccactatatagctgctgaagaagatgaccacgagggccaaaagctgcgaggaacggccaccggcggacatgatgatggattgacgtacggtttcactttcggttttcactcgggttagctggagctagagctgctgcaacggagctggtacggattggctaccgatcgagagagacgttcactcgcgcgtgtgacacaatggatactgccgctggagacccgagttttgggggcacagtcggatgggccagcccagtgggctgctcaggtgctaattgagagaacccgacaacctatgcaccgtgcacagggacggctccaaatcgctcaaaggaaacgtggacagtcatttcttatctcaatatattctaatattaaaaaaaggaagcaatagtttaaatgtcgaatataattacaaacattttaaaaatatcttaagcaggatatgaacgaacttctttctgtttcgtgacgcatttgctattctcattgagtgaatttcaccatatgattcgcacccaaatccgctcctgtccgaagatcgtgtggcgcctatttcacctggtccgggagagaatgtagagcactcacgcatgggaagtgctcggcctctaactcgtattggctttagtggttacccgaatttacgcgtaccgcttctagacaaaaacaacccgatttctgggcgaggaaagtgatagaaatgcctggcactggcactgatacccaatttgccgggctgcgcacgcgtgcagcgccgcatgattcccccggatgggataaaagaaagtgtccgtctgtttgctcatctctgcggtatgtaaacgtagctccacattggcatcttctttccgctcgagccagttttagtggctataaataaaatcgaaaactcggcgccattgtgatccgtccgtttacagaccatgatgatgtaacggtaccatctagctggatttggcgcgtgtttttgagtcagcaagagctgattactgatctgatttggtgcatttactagaacgcagcacgacacgcacgacaccaattagcaggacaccactaatcgccgactatgacactaattaaggtttaatcccaaaaggaaggtaaaagtggattgggctggattgttttccaggccgacgcttagaaagttgcacgtaatttgctgcgttgccaactacgagcaatccatataagttatttggagtgcgattagggcttttcaaaaaacaaagacttttttaaaagtttttcctctagatattaaccttaatataattatgtaaatgaacaaatataattatgttttgatctagtaaactaaccacagcattgcaagaaagtttg

SEQ ID NO: 30812 - DNA, 1322 bp, DROSOPHILA
atgactgtccacgtttcctttgagcgatttggagccgtccctgtgcacgtgaaaccgtacgtcaatccatcatcatgtccgccggtggccgttcctcgcagcttttggccctcgtggtcatcttcttcagcagctatatagtgggcatatacagtgcggcacgtgccagcagtttggcattagctccactgtcgaaggctaatgaatccctgatcctggcgaatgataccctcctcgcggaggatggaaactccagtttggtccacagtggatcgcgccatcctcgctggtttcctttctatacaattggtcgcttttccaacgacatctgtgtgggcaacaacctgctcctgggcacctgcgttataaacggagagtgcaccgataacagcggcgttgcagcgggcagctgctcctccatcacagcgcaagccatttgctgcatttatcaaaggacatgtggagcaagtacttcctacaataatacgtacttttacaacagcaattatcccgctccatatggcggcggcggacggtgttccattgtggtcacgccaccggattcgtcaatctgccagctacgagtggacttcctttccctatcgctggcaccaccatcgggagatggatcctgctctacggatgccttgaccatcactggcggagcctcgcaagtgcccagcatttgtggcgagaacgccggtcagcatgtgtatgtggactttaacggcgtcagtccgataaccatctcagtggccacctccggaagttatacattcaaccgcaactggcagttccagataagaatgctgggatgcacgtcggccactttggctccggccggttgcctgcaatactatatgcccagcagcggcaccctggccagttttaattacaattcggcggcggcctccgccctcaattccattggtgtgcagggcacgagacagttggcgaacaccaagtacggtatttgcatacgcaaagcagcgggaatgtgctccattacctacagccaggttggctccgatacgtattcctttacgctgaccaacgatgtgggtgccgtggatccgactctgctggccacctcatctgttcagagtcaggaatgtacaacggactatatcatcattccgtcgccaacgcagggcggagttgcgatgcccagcgatcggttttgtggattgggtctggtatccacgaccacatcggcgaagccattcgttgtctacacagtcaccgatggtaatgaggatatggacatatcgaatcgcggcttctacttgtcgtattcgcagaacgcgtgtccaattctgtaa

SEQ ID NO: 30813 - protein, 415 aa, DROSOPHILA
MSAGGRSSQLLALVVIFFSSYIVGIYSAARASSLALAPLSKANESLILANDTLLAEDGNSSLVHSGSRHPRWFPFYTIGRFSNDICVGNNLLLGTCVINGECTDNSGVAAGSCSSITAQAICCIYQRTCGASTSYNNTYFYNSNYPAPYGGGGRCSIVVTPPDSSICQLRVDFLSLSLAPPSGDGSCSTDALTITGGASQVPSICGENAGQHVYVDFNGVSPITISVATSGSYTFNRNWQFQIRMLGCTSATLAPAGCLQYYMPSSGTLASFNYNSAAASALNSIGVQGTRQLANTKYGICIRKAAGMCSITYSQVGSDTYSFTLTNDVGAVDPTLLATSSVQSQECTTDYIIIPSPTQGGVAMPSDRFCGLGLVSTTTSAKPFVVYTVTDGNEDMDISNRGFYLSYSQNACPIL

SEQ ID NO: 30814 - DNA, 2381 bp, DROSOPHILA
tttcgagaagttgattaaggacaacttaacgaagagcaactacacgcgagcggatatctgcaaggagttgggagtcaccgaacaggaactggagaccaagttcctatccgccaacactcggcacatggagcagttcaagctgcgtcaacgtgctctgcatgttattcagggtaagttaatcatttacaatcaggatttcacatttaatctgaatcattacgtgtacattaaatttattgatcaccaaatgaataattacagtcaattaataatacgttgacattcatttgttgtccgaaagatttaaactcttagcaaataatattaaattgcaagatcagttaataacattgtttccgcctaacagaatccggtcgcgtggccaaattccggaaaatttgtgaggaactcgccggcggagccaataaggaaggtgcaaaacagctgggtgagctcatgcggcaatcccacgagagtttaagggagctatacgaatgctctcatcctgatgtagagcgcctgattgccatatcgaaccagcagaacgttagcgcccgagtcactggagctgggtaagaaaaccgatatcctagtgactctatgaatttaatcaacattattctttttcagttggggcggttgtatagttgccatgtgcgattccatagaagcagctgatgagtacataaaggttttgaagcgcgattactatgctcaattgccaacacatctcctggagcgtcatcagcccaacaactttagcgaagtggtctttgccactctaccaggaaacggagccgagttgtatatacagtgaacgcttgtgtagcattttaatccaacttttataccaaaatcatcctatcagtcactataatcaaacggtcatttatagaaaaaacatttaatatgtagagtactatgtacaatatattaacaatttacaagctaaaatacaacaaggcacgtggggaacggaactcatctggcatcgtgagttctatctgctactcagatagccggcgttcttgaagagcttgtacacctgttcgcgcggtattttctccgcctcacgatgtaccactgccatttccttcttcgtgagcagtgattccttggccagattggcagcgatcacgggatcattgtagaaccgcgcactcttcgacagctcagccggcaactcagactcccactgggcatttcgcaccaccgagggatgggcatcggctgttgcatatccctggtacggattggccggttcgtaagcgtgcgcaaccggcagacccagcgcctggtggtagaagaactgggcccgaaccgaactcatggccagaagcaggcatccagcgagcagcgttacttggcaggcggtcggcatgattggctgctggaggggagaaaaggagcaggagctggcattattgtccaacgttctaataaagcgatacggacagatttattgccgctggtcagtggcagtttttaatctacaagtcggctgtcagtttcgtgcgtcataaattatgtacgggaaaatcaattatcgcatatggccaatggagtgggcaacgcggagatcttggctcaaactgttacagttgctaatccatgaacttttttgcaacttggaactggcttttttttattgataagaattggactggccgcgaactaaatggcgagctttatttgtcaagcgtagagtgctccaatttggtcgcaacaaagcaatcgtagcttgagatataagtacagtggtctctctagaactcttttgagattttaattgcaattgggtaatttgctataaggattggtgaaaatattattttttattttacgttataatgacattatcgaagatgcatttaccaaatgtattaattaagaatacgttagcaatgaaattgatttaaatcatgatcatcctttttaggctttgatatattcacttcgaactgaaaccctgatataatccttgaaaatgtgacattcgttattagattatacactctttaaacctttctactttttaatgatcacagccactgtacatgcatttttattatgcgccattaaatgcatttacatattccaagtccaaattgatacgttgattcagccaaagtcaaggttacgatcccacacaaccgaatcggatttcggttctccaaaaagcacccactcgcacaaacacacgacactcactcactttgatctggacttatttcaacggctaatcctcgagagaagcacttcaaatgaaactggaacacctgggtgaagttgagactgtaaactgatcatagaatatcgagacggcgaacttttattcgcttgccgttgaatgccacaaaaacgagttgaactcaagtctg

SEQ ID NO: 30815 - DNA, 381 bp, DROSOPHILA
atgccgaccgcctgccaagtaacgctgctcgctggatgcctgcttctggccatgagttcggttcgggcccagttcttctaccaccaggcgctgggtctgccggttgcgcacgcttacgaaccggccaatccgtaccagggatatgcaacagccgatgcccatccctcggtggtgcgaaatgcccagtgggagtctgagttgccggctgagctgtcgaagagtgcgcggttctacaatgatcccgtgatcgctgccaatctggccaaggaatcactgctcacgaagaaggaaatggcagtggtacatcgtgaggcggagaaaataccgcgcgaacaggtgtacaagctcttcaagaacgccggctatctgagtagcagatag

SEQ ID NO: 30816 - protein, 126 aa, DROSOPHILA
MPTACQVTLLAGCLLLAMSSVRAQFFYHQALGLPVAHAYEPANPYQGYATADAHPSVVRNAQWESELPAELSKSARFYNDPVIAANLAKESLLTKKEMAVVHREAEKIPREQVYKLFKNAGYLSSR

SEQ ID NO: 30817 - DNA, 2210 bp, DROSOPHILA
tgtgtgcaaattattcagatccatcaaaatacgatgcggaaaagtctctatatatatttagtaaaattaaaacgaaagcgaatgaaaaatgaatacgtagtacaatgacaagcgaaataaaaagtataaagcaaaaacatatatgaaaacacaaaatttgaggaaacggaaaattaaaaagaatctatgaatagcatataaaaataattatttataaaggctgtaattttaagtaaaatgatcaacccgataaacatgataaaactcaaaaataaaacacaaaaaaaaaaaaaacgaaaaccaaacaaaaaacttaacataaacatatttcacccacaatgcaaattaaattaaactaaaacaaaatgtaaacaaatcgcgagaatatactataaaacataagtaagaaacgatatctaaaaacgaaattataaagctaaacgaacaaattatatgaagtaaaattacataccaaaccaaaggaagtaaagcataaatataaaaccccaaaattatatatatacgagaactcaatgtatgtaataaatataaaactaattaataaaatcttaaaaatggaataaaccgaatgaatcaattgggctttcatttggaatcatacgatgattgtgacatttagatttaggtcattgcttctggaactgatgacgcatttagcagacccccgtcagacttcggtccagaaaaaaaaaaacgaataatattctcttatctacgcgctagaatgcatttattaaatctttgccatttatttctttttttcatatatacatatatgtatatatatataatgccaaggtacatgaaaagtcgtagcgccagcttcgtttagattcgattaactctaatttgcacgataagaactatcgttttggaaaatactctatgcataataaatacaaagtgcacaaaaaaaatttacatatgtatgtctagtgcgacattaggaacatgtcaaggccggaactaaaactaatccctaatcacggatatagctgcgatcatagttctgcatccgtacactctgaggcgccttctgggtgcgatcgaagttctgcagcttgttggtcttcagcatccggggattgggtccggctgaggtgcgccagtagaccgtctgcaccgcattccgtccggcaatgtagcgcgtagtcgctccgatcaaatggttcaccttagtggcagacatcttggggatattgttgtgtgtgtgtgttcgtttagtatcacagttgggttgctttcgctatagagtcgtctctatatctgggttgttcctaatgaattcgtacgatcattggcgcgctcgtttcgtttctgtggcctcacttggctccggatccactatttatagcgatgccttatcagcacttttatactggcatatgtatggtcattatcttgcaagtagttggggcttatcaggtgtgtgttgctcaaaagggtttccaattgattggcttacgaccaggcctttatttgctggccatgcaacccgaatgcaaggcgaaatgcgacgcacttttggccaaagtttgttattcaacgtttcagattgcattgtttatttctaattggctgttgtttagacgtgtatccgtaagcaaaatggagaaatagccttcatcgtacttcccaagtgcagctcgaagtccaaaggctgatctctacagctgtatcattattgcacaattaatcaaatacccctcaggccatgacgtaaatcctaataaaatgtatgtacagtcaagcatgcgccactaaagctgacctaattaaaaaacttaagtcaatttgcattgattccgggaggcattagattaactgaagtaactcacatatttatacaactatagttttgtaattttttttttttgtaatatgactgttatgtatgcatttattgaggatgcaccgaaccgcagccagagatatctatattttgctagactatgttgataattctgcacctgatgctttgttgtctaaaataatcttaaaataataaaatgtgtgctgtaggtcatgggtttcgcctgatagaagttcttctgtaagcgatgtttctggcctttgtattccaatattgaggttacatttatgcctatttatgacactagctaaccagctgattgcctagttggaccgagctttaagatatgtgccaccagcttcgttcttctctaata

SEQ ID NO: 30818 - DNA, 210 bp, DROSOPHILA
atgtctgccactaaggtgaaccatttgatcggagcgactacgcgctacattgccggacggaatgcggtgcagacggtctactggcgcacctcagccggacccaatccccggatgctgaagaccaacaagctgcagaacttcgatcgcacccagaaggcgcctcagagtgtacggatgcagaactatgatcgcagctatatccgtgattag

SEQ ID NO: 30819 - protein, 69 aa, DROSOPHILA
MSATKVNHLIGATTRYIAGRNAVQTVYWRTSAGPNPRMLKTNKLQNFDRTQKAPQSVRMQNYDRSYIRD

SEQ ID NO: 30820 - DNA, 3346 bp, DROSOPHILA
cagtcagccaaaagtttcatttgttaaattttatttgttcttttactttatgattgaaacatttgacttacatttgttaaaaaagttggtattacgcaagcgaatgtaatttcttaaaaggggttcattagaagataacaagccttgattattaaaaaaaaatgtttctgcgataagataaaagccgtgtataaatataaaacactaagtgtaagctgtgtataaatataaaatactaggtgacactaatatcgatagaattaattgtatattatttggctgactttaaagtgcgcgcgagaatagagctggagaatcatcgatggtcggcactatcgatggttttttaagaaaacatcgatagtatggatagttaaaaagaaaacaaaaataaaggaactataatttaacgtgaaccgatgtttatatacccttgcaaattaaaaaatatatattacagtagccctttagaaaaatgcagaaatacatgcacaggaattaaaatgcatttttaaacaaaaacgctttatttgcttcaatgcaaactattatttgaattaacgcagtattcaaaatatttagtaataacaaaataatggttttttatattcataataagacatattctttcatattctgttgaactggccggaatgcacaggcactttttacaaagtttggttattggcttcagactctcactgtttgcctgaaaagggataaattcattaatatttaatttaaaaagtaaaaatgatattcttacaatccaataagcagttaaaagaaatgcccttgcacagaaattaccacttcaatgcgaatcaaatactttgtgaatgtataaaatagcattagttattaagaaattgtttgaggaacacgcaaagcggaatggattcgttttaatttgtgcaaaggatcaatttttacatttcgatttatcgggcatcaaatatgcaaattgttaaaatggtgttggcattttgatcggatcagacatcggatcgaccagacacggtcgaagggaagcagtcaggaagaagcacttctcattgcacatccgcaggcaggcgctggccgatgacttcttagcaaactcaactatgccctcgcccatatgcttgccagaatcgtcgacggtgatgctggccctctcgatgggaccaaagatttcgaaggacttgtacagcagctcgttggaaacgaacggtgtgagatttctcacctgcaaaatgacattcggtgcgaatcgtacaccattcgcatcgatccgtccagggcgcgcttagccttctcggcattaggatgatagtttaaaggtggtttaaaggtgggcccagaaatgctgcaaaaccgctgggaaatgaagaagtcttcacagccgcgcggaccaccgtctccatcgccaccaccacccatattggtgctgttcatcgtgccacctgcaccttcgcaaggcgtggaccactacggtttcggttgtcacgctgctggttctgcggacctccggagaaaccgccaccttgattgttaccagcattgcgacctctgaatcctggatcatttccctaatttccggctcctccttgatttccttggcctccttaattgcctgcacctccttgatattctggtccaccttgatttctttgaccatggacttgattgattgattttggttttgtccttgccgttgattttggcccatgttggcgttctgattcgcttgattttggccagaagctgcagttgccggttcattgttcttaggaagtgccgcctttgatgtttcgttattgggcttttgctatatttgtgttatacatttaaatgagtacaatatgcaattgatatgtgagccacatctgcagtgtcgtcattcaatccagttacaccattagaatacaaactgaacagatataacatcgattcaatcggctctacaggcgtgcctccctatttaacttcccccccgaaaaatgtaaagaatacctaatatttgtatacaattaagtgcccgggataatctaatcaactatatcgaatttagataacttacatttgaattgttgttgcctggaaaagtccggttttggtttccagcgcgattgtttttgcgatagcggtttccagcgaacccacccttgttgtttgcaaaattcttattttaattggcgccaccaccaccgcccgttacaccaccattttgattctgggcatttggaccaccgaatcgttgcttcttttcagccggacatacgtccgcgaaatcattttgattttgtgcattatgcttgccgagatttttgttggccttctagtttccccgctgctgtcgctgcgcttcaacttgctcagagcgtacgattgttttgttgtattctgtgtaaataataattattatttttaatctggagaccctagagttttacagccattatacttcttggcctcattttaaatattcttatttttttaaaagaccaactgaaacctcgtaaatggttagaagttttgacacttcatcacaattttgcttggaggcatcttctccaggattttcatcagaagagtcactagatgagaccatcgctgaagaaattagcgagatatgtgaagatgaaccaatttatcaactgaaaaaaacgcaaaaggtgactaggtagcatagtttcgagtatgaaacttattatttttaatgcattaagtccatttggagtctatttagatcataggcattttcaaatagtgacagattctaattccttagtgcagacatttagtaggaaagccataaaccctaagatagctatacggtcattggaattggaaaactatgatttgcagagctgctgttaacatgccgcatgttgacgcattgagtagtcaagtttaaatattagatgcacttagagaaaatagtgataacgccaaggagcccctagcgaaatccatagagaatagtgaatatattgagaataccctagagcctgtatggaataaataaaaataaaaataaataaataataaaaacctagagaatatagtaggtaagataaaaccgcatatagtaggtacagaacctaggaaaaatacgcaaaactgttaagacaaaactgaagacaatcatttttgcattaaggatagtaaagacagcggggctgtagactcaagtgaattgcagcttagagaaaaattcatagtatagttgattaaagcgagtaaagggagtagtaagagcaacaccttagaatattcactaatattgcaaattgaacaatgtgcgaccctgaaattatcaagataagaagttacgtagagaaaggtagttgcacttcatttg

SEQ ID NO: 30821 - DNA, 954 bp, DROSOPHILA
cgcagcgacagcagcggggaaactagaaggccaacaaaaatctcggcaagcataatgcacaaaatcaaaatgatttcgcggacgtatgtccggctgaaaagaagcaacgattcggtggtccaaatgcccagaatcaaaatgaattttgcaaacaacaagggtgggttcgctggaaaccgctatcgcaaaaacaatcgcgctggaaaccaaaaccggacttttccaggcaacaacaattcaaatgcacttcctaagaacaatgaaccggcaactgcagcttctggccaaaatcaagcgaatcagaacgccaacatgggccaaaatcaacggcaaggacaaaaccaaaatcaatcaatcaagtccatggtcaaagaaatcaaggtggaccagaatatcaaggaggtgcaggcaattaaggaggccaaggaaatcaaggaggagccggaaattagggaaatgatccaggattcagaggtcgcaatgctggtaacaatcaaggtggcggtttctccggaggtccgcagaaccagcagcgtgacaaccgaaaccgtagtggtccacgccttgcgaaggtgcaggtggcacgatgaacagcaccaatatgggtggtggtggcgatggagacggtggtccgcgcggctgtgaagacttcttcatttcccagcggttttgcagcatttctgggcccacctttgtgtacgattcgcaccgaatgtcattttgcaggtgagaaatctcacaccgttcgtttccaacgagctgctgtacaagtccttcgaaatctttggtcccatcgagagggccagcatcaccgtcgacgattctggcaagcatatgggcgagggcatagttgagtttgctaagaagtcatcggccagcgcctgcctgcggatgtgcaatgagaagtgcttcttcctgactgcttcccttcgaccgtgtctggtcgatccgatg
